United States Patent Application Publication US 2018/0126003 A1 - sequence listing, part 174

SEQ ID NO: 307836 - DNA, 2283 bp, Artificial Sequence
  derived and/or modified sequence
atgagtactgtagaagaagatagtgacacggtgactgttgaaactgtgaactccgtaactttaacacaagatacggaaggcaacctaattttgcactgtcctcaaaatgaggccgacgagatagatagcgaggactccatcgagcctcctcataagaggctctgccttagctccgaggacgaccaatccattgatgattctactccatgcatctctgtggtggcactgccattaagtgaaaacgaccagtcttttgaggtaaccatgacggcgacaacagaagttgccgatgatgaagttacagaaggaaccgtgacacaaatacagattctccaaaacgagcaactcgacgaaatctcaccgctcgggaatgaagaagtgtctgctgtctcacaggcctggtttacaaccaaagaagacaaagattccctgactaataaaggtcataagtggaaacaaggtatgtggtccaaggaggagatcgatatattaatgaacaacattgaaaggtatctgaaagctagaggcatcaaggatgccaccgaaatcattttcgaaatgtcaaaggatgaaagaaaagacttttatcgcacaatcgcctggggactgaaccgaccgttgtttgcggtgtacaggcgggtgctccgtatgtacgacgatcgaaaccacgtgggtaaatatactcctgaggagatcgagaaactgaaagaactgcggatcaagcatggtaacgactgggccacaataggcgcagctctgggaaggtcagcctcttcggtgaaagaccggtgccgactgatgaaagacacctgtaacacagggaaatggacagaagaggaagagaagcgcttagccgaagtggtccacgagcttacttcgacggagccgggagatatagttacccagggcgtgtcctgggcagccgtcgccgagcgtgttgggacccggtcagaaaagcaatgccgttctaagtggctgaattatctgaactggaagcaaagtggtggcactgaatggacgaaggaagacgaaattaacctcattctccggatcgcggaattggacgtggcggacgagaatgacatcaattgggatctcctggccgagggatggagcagcgtgagatcaccccagtggctccggtccaaatggtggactattaagaggcagatcgctaaccacaaggacgtgagtttccctgttttgatcaaagggctcaaacaactccatgaaaaccagaagaataaccccacactgctggagaacaagtcaggatcaggggtcccgaactctaacacaaattcaagcgttcagcatgttcagattcgggtagctcgattagaggataacaccgccatcagtagtagtcctatggccgctttgcagatccccgttcagatcacccacgtatcgtctgccgactcccctgccacggtcgattcggaaacaataacactcaattctggtactttacaaactttcgaaatcctcccctcctttcatctgcagccgactggaacccctggtacctatcttcttcagacatcctcaagccaggggttgcctcttaccttgactgcgtcaccaacggtaacgctaactgcagctgcgcctgccagccccgagcagatcatcgtgcatgcattaagtccagaacatctgcttaacacttctgacaacgttaccgttcagtgtcacactcctcgtgtcattatccaaaccgttgccacggaagacatcacaagttcgatttcacaagccgagctgaccgtcgacagtgacatccagtcctccgacttccctgaacctcccgatgctcttgaagctgacacctttccagatgagatacaccatcctaagatgaccgttgagcccagcttcaatgacgctcatgttagcaagttctccgatcagaacagcacggaattgatgaattctgtgatggtccgaaccgaggaggagatatctgatactgatcttaagcaggaggagtctccttctgacttggcttcagcctacgtgaccgaggggctggaatctccaacaatagaggagcaggtggaccagacaatcgacgacgaaaccatactgattgtaccaagtccacacggctttatacaggccagtgacgtcatagacaccgagtctgtattgccactgacaacactcaccgaccccatcctgcagcatcatcaggaggaaagtaatatcatcggatcctcacttggctcacccgtgagtgaggactccaaggacgtggaggacctggttaactgccattag

SEQ ID NO: 307837 - DNA, 2073 bp, Artificial Sequence
  derived and/or modified sequence
atgagcacggtggaggaggactcagacaccgtcactgtggagactgtgaatagtgtgacactgacacaagacactgaaggcaacttaatcctgcactgtcctcagaatgaagccgatgagatcgacagtgaggattctatcgagccaccacataagaggctctgtctttcgtctgaagacgaccagtcaatcgatgacagcaccccttgcatttctgtggtcgctctgccactcagcgagaacgatcagtcatttgaagtcacaatgactgcaacaacggaagtggctgatgacgaagttacggaagggactgtgacccagatccagatcttgcaaaacgaacaactggatgaaatttccccactcggcaacgaggaagtgagcgccgtgtcccaggcttggttcacgacaaaagaagacaaagattcactgacaaataaaggccacaaatggaaacaggggatgtggagcaaagaggagatcgacatattaatgaacaatattgagcgatatctgaaagcaagagggattaaagacgccactgagatcatctttgaaatgtccaaggacgagcggaaggatttctatcgcaccatcgcgtgggggctcaacagacctctgttcgccgtgtatcgccgagtcttacggatgtatgatgataggaaccatgttgggaagtacacccccgaggagatagaaaagctcaaagaactgagaattaagcacgggaacgactgggctaccatcggagccgctttgggacggagcgcctcttcagtgaaagatagatgccgattaatgaaagacacatgtaataccggcaagtggaccgaagaggaggagaaacggctggcagaggtggtccatgagctcacatcgacagaacctggggatattgttacacaaggcgtttcctgggcagcagttgccgagagggttggcaccaggagtgaaaaacagtgtcgatccaaatggcttaactatctaaattggaagcagagcggaggaactgagtggacgaaggaagacgagatcaatctcatcttgcgcattgctgaacttgacgtagccgacgagaacgatattaattgggatctgttggcagagggttggtccagcgtgaggtctccacaatggctaagatccaaatggtggaccattaaaaggcagatcgctaatcataaggatgtgagcttccccgcaagcgccgatagccccgctaccgtcgacagcgagacaatcaccctgaactcaggcaccctgcagacattcgaaattctgccaagtttccacctgcagcctaccgggacacctggcacttacttactacagacttcttcaagtcagggcctgcctctgacactcacggcatcccccactgtgaccctgactgcggcagccccagctagtcccgagcagatcatcgttcatgcgctgtcccctgaacacttgctcaacacctccgataacgtcacggtgcaatgccacactcccagggttatcatacagacagtcgcgactgaggacattacttcaagcatttctcaggcggagctgaccgtggatagcgacatacagagttctgactttcccgaaccaccagacgccttggaagcagatactttccctgatgaaatccaccaccccaagatgaccgtagaaccctccttcaatgacgctcacgtaagcaaattctcagaccagaattctaccgagctgatgaatagtgtaatggtcagaacagaagaagagatatccgacaccgatctcaaacaggaggaaagcccaagcgacctagccagcgcttatgtcacggaaggacttgagtcccccaccatagaggagcaggttgatcagaccattgacgatgagaccatattgatagtgccaagtccacacggcttcatccaagcctcagacgttattgacacagaatcagtcctgccccttacgacactgacagatccgattcttcagcatcatcaagaagagtcgaatataattggcagtagtctcggcagcccagtttccgaagactcaaaagacgttgaggatttggtcaattgtcattag

SEQ ID NO: 307838 - DNA, 33 bp, Artificial Sequence
  derived and/or modified sequence
atgactgcaaccaccgaggttgcagacgattag

SEQ ID NO: 307839 - DNA, 84 bp, Artificial Sequence
  derived and/or modified sequence
atgtctactgtcgaagaggacagcgatactgtgactgtcgagacagtgaattccgtaacacttacacaagatactgagggctag

SEQ ID NO: 307840 - protein, 244 aa, Artificial Sequence
  derived and/or modified sequence
MSTVEEDSDTVTVETVNSVTLTQDTEGNLILHCPQNVSENDQSFEVTMTATTEVADDEVTEGTVTQIQILQNEQLDEISPLGNEEVSAVSQAWFTTKEDKDSLTNKGHKWKQGMWSKEEIDILMNNIERYLKARGIKDATEIIFEMSKDERKDFYRTIAWGLNRPLFAVYRRVLRMYDDRNHVGKYTPEEIEKLKEKKAIAACFFFTHRQLWTPKKGHTFKLWLSKYCCPQLPNQSNGKKKNEE

SEQ ID NO: 307841 - DNA, 735 bp, Artificial Sequence
  derived and/or modified sequence
atgagcaccgtggaggaggacagcgacaccgtgaccgtggagaccgtgaacagcgtgaccctgacccaggacaccgagggcaacctgatcctgcactgcccccagaacgtgagcgagaacgaccagagcttcgaggtgaccatgaccgccaccaccgaggtggccgacgacgaggtgaccgagggcaccgtgacccagatccagatcctgcagaacgagcagctggacgagatcagccccctgggcaacgaggaggtgagcgccgtgagccaggcctggttcaccaccaaggaggacaaggacagcctgaccaacaagggccacaagtggaagcagggcatgtggagcaaggaggagatcgacatcctgatgaacaacatcgagagatacctgaaggccagaggcatcaaggacgccaccgagatcatcttcgagatgagcaaggacgagagaaaggacttctacagaaccatcgcctggggcctgaacagacccctgttcgccgtgtacagaagagtgctgagaatgtacgacgacagaaaccacgtgggcaagtacacccccgaggagatcgagaagctgaaggagaagaaggccatcgccgcctgcttcttcttcacccacagacagctgtggacccccaagaagggccacaccttcaagctgtggctgagcaagtactgctgcccccagctgcccaaccagagcaacggcaagaagaagaacgaggagtag

SEQ ID NO: 307842 - DNA, 1254 bp, Artificial Sequence
  derived and/or modified sequence
gtttccggtggctcgtcgcgctcgctcactccagctgcagccactctcgcccgtggctgcttcctccatcctggtattttttggagcttccatcctggttcttccaaagtgcccggacccaaaacaggaaagtgttgcggagataggaacatgggagagaaacaatctgggtaacatgaaagtgatgctggttgctaagggaaggcaacttgattctgtgggaagggctgtagctgatccatccgttgtctagatttgagtatgagcacagtggaagaggattctgacacagtaacagtagaaactgtgaactctgtgactttgactcaggacacagaagggaatctcattcttcactgccctcagaatgtttcagaaaatgatcagagctttgaagtgaccatgactgcaaccacagaagtagcagatgatgaggttactgaggggactgtgacacagatacagattttgcagaatgagcaactagatgaaatatctcccttgggtaacgaggaagtttcagcagttagccaagcatggtttacaactaaagaagataaggattctctgactaataaaggacataaatggaagcaggggatgtggtccaaggaagaaattgatattttgatgaacaatattgaacgctatcttaaggcacgcggaataaaagatgctacagaaatcatctttgagatgtcaaaagacgaaagaaaagatttctacaggactatagcatggggtctgaaccggcctttgtttgcagtttatagaagagtgcttcgcatgtatgatgacagaaaccatgtgggaaaatatacacctgaagaaattgagaagctcaaggagaaaaaggcaattgctgcctgtttttttttcacccacagacaactgtggaccccaaaaaaaggccacactttcaaactttggctctcaaagtattgctgcccacaacttccaaaccagtcaaatgggaagaagaagaatgaagaataaatgatgaaattaaaagggagaaaacaattgaaccaaatgctgattggcagactcttgttttaggctccggataaagcatggcaatgactgggcaacaataggggcggcgctaggaagaagtgcatcttctgtcaaagatcggtgccgactgatgaaggatacttgcaacacagggaagtggacagaagaagaagaaaagagacttgcagaagtggttcatgagttgacaagcactgagccaggtgacatagtcacaca

SEQ ID NO: 307843 - DNA, 735 bp, Artificial Sequence
  derived and/or modified sequence
atgtccacggtggaagaagatagtgatactgtcacggtagaaaccgttaattcagtgactttgactcaggataccgagggcaatctcatccttcattgcccgcaaaatgtttctgaaaacgaccaatccttcgaagtcaccatgactgccacaacagaggtcgccgatgatgaagtcacggagggcacagtcacccagatccagattttgcagaacgaacagcttgacgagattagtcctctgggcaatgaggaagtgtcggcagtctcccaggcgtggttcactaccaaagaggacaaagacagtttaaccaataaagggcataagtggaagcaggggatgtggtcaaaagaggagatcgacattctgatgaacaacatcgagcgctacctcaaagccaggggaatcaaggatgccacagagatcatctttgagatgtcaaaggacgaacgcaaagatttttaccggaccattgcctggggactgaataggcccctgttcgcagtctacaggagagtactgaggatgtacgatgaccgcaatcatgttggaaagtatactccagaggaaatagaaaagttaaaggaaaagaaggctatcgcggcctgtttcttctttactcatagacagctgtggacgcctaaaaagggtcacacatttaagctgtggctgagcaagtattgttgtccccagctcccaaaccagagtaatggaaagaagaaaaacgaagagtag

SEQ ID NO: 307844 - DNA, 735 bp, Artificial Sequence
  derived and/or modified sequence
atgtctactgtggaggaggactcggataccgtgacagtcgaaaccgtaaactcagtcacactaacacaggacacggaagggaacctgattttgcattgcccacaaaatgtgtcggagaacgaccaaagcttcgaagtcaccatgaccgccacaacggaagtcgccgacgacgaggtgacagaagggactgtaacacagatccagattctgcagaatgagcagttagacgaaatatccccgctgggcaacgaggaggtgagcgccgtgagccaggcctggttcactacaaaggaggacaaagactcactaacaaataagggccacaagtggaagcagggtatgtggtcgaaagaggagattgatattttaatgaacaatattgagcggtatctgaaggccaggggcattaaagacgccacagaaatcattttcgagatgagtaaagatgaacggaaggatttttacaggacaattgcctggggacttaataggcctctgtttgcagtatacaggcgagtccttcggatgtatgatgaccgcaaccacgtaggtaagtacactcctgaagagatcgaaaagcttaaagaaaaaaaagcaatcgctgcctgctttttctttacccacagacagctatggactcctaagaagggccacacattcaagctgtggttatctaagtactgctgcccacaattgcctaaccaatctaacggtaaaaaaaaaaacgaggagtag

SEQ ID NO: 307845 - DNA, 735 bp, Artificial Sequence
  derived and/or modified sequence
atgagcacagtggaggaggacagcgacacagtgacagtggagaccgtgaacagcgtgaccctgacccaggacacagagggcaacctgatcctgcactgcccccagaatgtgtctgaaaatgaccagagctttgaggtgaccatgacagccaccacagaggtggctgatgatgaggtgacagagggcaccgtgacccagatccagatcctgcagaatgagcagctggatgagatcagccccctgggcaatgaggaggtgtctgctgtgtcccaggcctggttcaccaccaaggaggacaaggacagcctgaccaacaagggccacaagtggaagcagggcatgtggagcaaggaggagattgacatcctgatgaacaacatcgagcgctacctgaaggcccggggcatcaaggatgccacagagatcatctttgagatgagcaaggatgagaggaaggacttctaccgcaccatcgcctggggcctgaaccggcccctgtttgctgtgtacagaagagtgctgaggatgtatgatgacaggaaccacgtgggcaagtacaccccagaggagattgagaagctgaaggagaagaaggccatcgccgcctgcttcttcttcacccaccggcagctgtggacccccaagaagggccacaccttcaagctgtggctgagcaagtactgctgcccccagctgcccaaccagagcaatggcaagaagaagaatgaggagtag

SEQ ID NO: 307846 - DNA, 735 bp, Artificial Sequence
  derived and/or modified sequence
atgagcaccgtggaggaggacagcgacaccgtgaccgtggagaccgttaactctgtaactctgacacaggacaccgaggggaatctcattctacattgcccacaaaatgtatccgagaacgatcagtcttttgaagtaaccatgacagccactaccgaagtcgcggacgatgaagtgaccgagggcaccgtgacccagatccagatccttcagaatgaacagttggacgagatctcccctcttggcaatgaagaagtgagcgccgtctcgcaggcctggttcactactaaggaggacaaggactccctcacaaataaggggcacaaatggaagcaaggcatgtggagtaaggaggaaatcgatatacttatgaataacatcgaaagatatctcaaggcgaggggaataaaggacgccactgagatcatatttgagatgagcaaagatgagcggaaggatttttacaggaccattgcttggggtttaaatagacccctttttgcagtctacaggagggtgctcaggatgtatgatgacaggaaccacgtggggaaatataccccagaggagatcgaaaaacttaaggaaaagaaagccattgctgcgtgctttttctttactcaccgccagctgtggactccaaaaaagggccacacgttcaagctgtggctgagcaagtactgctgcccccagttacccaaccagagtaacggcaagaagaagaatgaggagtag

SEQ ID NO: 307847 - DNA, 735 bp, Artificial Sequence
  derived and/or modified sequence
atgagcaccgtggaggaggacagcgacaccgtgaccgtggagaccgtcaatagtgtgacccttacccaggatactgagggcaacctcattctgcattgcccccagaacgtgtctgaaaatgatcaaagcttcgaggttacaatgactgccaccactgaagtagctgatgacgaggtcaccgaaggtaccgtgacccaaattcagatcctgcaaaatgagcagctggacgagattagcccactcggtaacgaagaggtgtccgctgtctcccaagcatggtttacaacgaaggaggacaaggacagtctcaccaataaagggcacaagtggaagcagggaatgtggtctaaagaggagatcgatattctgatgaacaatatcgagcggtacttgaaagcacgggggatcaaggacgcgactgaaattatttttgaaatgagcaaagacgaacgtaaagacttctatcgcaccattgcctggggcttaaacaggccgctctttgcggtttaccggagagtgctgcggatgtatgatgaccgcaaccatgtgggaaaatacacacccgaggagatcgagaagttgaaagagaagaaggctattgctgcttgtttttttttcacgcacaggcagctgtggacccccaagaaagggcatactttcaaactgtggctgtctaagtattgctgtccgcagcttcctaatcagtccaatggaaagaagaagaacgaggagtag

SEQ ID NO: 307848 - DNA, 735 bp, Artificial Sequence
  derived and/or modified sequence
atgtccactgttgaggaagattccgacactgtgacagtagaaactgtgaattccgtaacattgactcaggacaccgaaggaaacttgatactgcattgtcctcagaatgtgtccgaaaacgaccagtcctttgaggtgacaatgacagcaaccacagaggtggccgatgacgaagtcaccgagggtaccgtgacccagattcagatcctgcagaacgaacaattggacgagatatcaccactgggcaacgaggaagtgtctgccgtgagccaggcctggtttacaaccaaggaggacaaagatagcttaaccaataagggccacaagtggaagcaggggatgtggtctaaagaggagatcgatattctgatgaataacatagaaaggtatctcaaggctaggggcattaaggatgcaacagagattatcttcgagatgagtaaagatgagcggaaggatttctacagaacaatcgcttggggtctaaacagaccactttttgccgtgtatcggagggtgctgcggatgtatgacgatagaaatcacgtggggaaatatacccctgaggaaattgagaaactcaaggagaaaaaagccattgccgcatgtttttttttcacccacagacagctgtggacccctaaaaagggccatacctttaaactgtggctcagcaagtattgctgtccccagctgcctaatcagagtaatggtaagaagaagaacgaagagtag

SEQ ID NO: 307849 - DNA, 735 bp, Artificial Sequence
  derived and/or modified sequence
atgtcgacagttgaggaagattccgatacagtgactgtggagacggtcaacagtgtgactttaacccaggataccgaaggcaacttaatcctccactgccctcagaacgtgtctgaaaacgaccaaagtttcgaggtcacgatgactgccacgaccgaggtagccgacgatgaagtgacagaaggaacagtgacacaaatccagatccttcagaatgaacagctcgacgagatttctcctctgggaaatgaggaagtctccgccgtttcgcaggcatggttcactacgaaagaagataaggattcactgaccaataagggtcataagtggaaacagggaatgtggtctaaagaagaaatcgacatcttaatgaacaacatagaacggtatctaaaagccagaggaattaaagacgcaacagagattatctttgagatgtcaaaggacgagagaaaagatttctaccgtacgatagcatggggtttgaacaggcccttgtttgccgtgtaccgccgagttctgcggatgtatgatgaccgaaatcatgtggggaagtatacaccggaagagatagagaagctcaaagaaaagaaagctatcgccgcttgcttcttttttacccaccgccaactgtggacccctaagaagggccacaccttcaaactgtggctgtctaagtactgctgcccgcagcttccgaatcaatcaaacgggaaaaaaaagaacgaggaatag

SEQ ID NO: 307850 - protein, 193 aa, Artificial Sequence
  derived and/or modified sequence
MSTVEEDSDTVTVETVNSVTLTQDTEGNLILHCPQNEADEIDSEDSIEPPHKRLCLSSEDDQSIDDSTPCISVVALPLSENDQSFEVTMTATTEVADDEVTEGTVTQIQILQNEQLDEISPLGNEEVSAVSQAWFTTKEDKDSLTNKGHKWKQGMWSKEEIDILMNNIERYLKARGIKDATEIIFEMSKDERK

SEQ ID NO: 307851 - protein, 27 aa, Artificial Sequence
  derived and/or modified sequence
MSTVEEDSDTVTVETVNSVTLTQDTEG

SEQ ID NO: 307852 - protein, 494 aa, Artificial Sequence
  derived and/or modified sequence
MKDTCNTGKWTEEEEKRLAEVVHELTSTEPGDIVTQGVSWAAVAERVGTRSEKQCRSKWLNYLNWKQSGGTEWTKEDEINLILRIAELDVADENDINWDLLAEGWSSVRSPQWLRSKWWTIKRQIANHKDVSFPVLIKGLKQLHENQKNNPTLLENKSGSGVPNSNTNSSVQHVQIRVARLEDNTAISSSPMAALQIPVQITHVSSADSPATVDSETITLNSGTLQTFEILPSFHLQPTGTPGTYLLQTSSSQGLPLTLTASPTVTLTAAAPASPEQIIVHALSPEHLLNTSDNVTVQCHTPRVIIQTVATEDITSSISQAELTVDSDIQSSDFPEPPDALEADTFPDEIHHPKMTVEPSFNDAHVSKFSDQNSTELMNSVMVRTEEEISDTDLKQEESPSDLASAYVTEGLESPTIEEQVDQTIDDETILIVPSPHGFIQASDVIDTESVLPLTTLTDPILQHHQEESNIIGSSLGSPVSEDSKDVEDLVNCH

SEQ ID NO: 307853 - protein, 672 aa, Artificial Sequence
  derived and/or modified sequence
MTATTEVADDEVTEGTVTQIQILQNEQLDEISPLGNEEVSAVSQAWFTTKEDKDSLTNKGHKWKQGMWSKEEIDILMNNIERYLKARGIKDATEIIFEMSKDERKDFYRTIAWGLNRPLFAVYRRVLRMYDDRNHVGKYTPEEIEKLKELRIKHGNDWATIGAALGRSASSVKDRCRLMKDTCNTGKWTEEEEKRLAEVVHELTSTEPGDIVTQGVSWAAVAERVGTRSEKQCRSKWLNYLNWKQSGGTEWTKEDEINLILRIAELDVADENDINWDLLAEGWSSVRSPQWLRSKWWTIKRQIANHKDVSFPVLIKGLKQLHENQKNNPTLLENKSGSGVPNSNTNSSVQHVQIRVARLEDNTAISSSPMAALQIPVQITHVSSADSPATVDSETITLNSGTLQTFEILPSFHLQPTGTPGTYLLQTSSSQGLPLTLTASPTVTLTAAAPASPEQIIVHALSPEHLLNTSDNVTVQCHTPRVIIQTVATEDITSSISQAELTVDSDIQSSDFPEPPDALEADTFPDEIHHPKMTVEPSFNDAHVSKFSDQNSTELMNSVMVRTEEEISDTDLKQEESPSDLASAYVTEGLESPTIEEQVDQTIDDETILIVPSPHGFIQASDVIDTESVLPLTTLTDPILQHHQEESNIIGSSLGSPVSEDSKDVEDLVNCH

SEQ ID NO: 307854 - DNA, 1485 bp, Artificial Sequence
  derived and/or modified sequence
atgaaggacacctgcaacaccggcaagtggaccgaggaggaggagaagagactggccgaggtggtgcacgagctgaccagcaccgagcccggcgacatcgtgacccagggcgtgagctgggccgccgtggccgagagagtgggcaccagaagcgagaagcagtgcagaagcaagtggctgaactacctgaactggaagcagagcggcggcaccgagtggaccaaggaggacgagatcaacctgatcctgagaatcgccgagctggacgtggccgacgagaacgacatcaactgggacctgctggccgagggctggagcagcgtgagaagcccccagtggctgagaagcaagtggtggaccatcaagagacagatcgccaaccacaaggacgtgagcttccccgtgctgatcaagggcctgaagcagctgcacgagaaccagaagaacaaccccaccctgctggagaacaagagcggcagcggcgtgcccaacagcaacaccaacagcagcgtgcagcacgtgcagatcagagtggccagactggaggacaacaccgccatcagcagcagccccatggccgccctgcagatccccgtgcagatcacccacgtgagcagcgccgacagccccgccaccgtggacagcgagaccatcaccctgaacagcggcaccctgcagaccttcgagatcctgcccagcttccacctgcagcccaccggcacccccggcacctacctgctgcagaccagcagcagccagggcctgcccctgaccctgaccgccagccccaccgtgaccctgaccgccgccgcccccgccagccccgagcagatcatcgtgcacgccctgagccccgagcacctgctgaacaccagcgacaacgtgaccgtgcagtgccacacccccagagtgatcatccagaccgtggccaccgaggacatcaccagcagcatcagccaggccgagctgaccgtggacagcgacatccagagcagcgacttccccgagccccccgacgccctggaggccgacaccttccccgacgagatccaccaccccaagatgaccgtggagcccagcttcaacgacgcccacgtgagcaagttcagcgaccagaacagcaccgagctgatgaacagcgtgatggtgagaaccgaggaggagatcagcgacaccgacctgaagcaggaggagagccccagcgacctggccagcgcctacgtgaccgagggcctggagagccccaccatcgaggagcaggtggaccagaccatcgacgacgagaccatcctgatcgtgcccagcccccacggcttcatccaggccagcgacgtgatcgacaccgagagcgtgctgcccctgaccaccctgaccgaccccatcctgcagcaccaccaggaggagagcaacatcatcggcagcagcctgggcagccccgtgagcgaggacagcaaggacgtggaggacctggtgaactgccactag

SEQ ID NO: 307855 - DNA, 2019 bp, Artificial Sequence
  derived and/or modified sequence
atgaccgccaccaccgaggtggccgacgacgaggtgaccgagggcaccgtgacccagatccagatcctgcagaacgagcagctggacgagatcagccccctgggcaacgaggaggtgagcgccgtgagccaggcctggttcaccaccaaggaggacaaggacagcctgaccaacaagggccacaagtggaagcagggcatgtggagcaaggaggagatcgacatcctgatgaacaacatcgagagatacctgaaggccagaggcatcaaggacgccaccgagatcatcttcgagatgagcaaggacgagagaaaggacttctacagaaccatcgcctggggcctgaacagacccctgttcgccgtgtacagaagagtgctgagaatgtacgacgacagaaaccacgtgggcaagtacacccccgaggagatcgagaagctgaaggagctgagaatcaagcacggcaacgactgggccaccatcggcgccgccctgggcagaagcgccagcagcgtgaaggacagatgcagactgatgaaggacacctgcaacaccggcaagtggaccgaggaggaggagaagagactggccgaggtggtgcacgagctgaccagcaccgagcccggcgacatcgtgacccagggcgtgagctgggccgccgtggccgagagagtgggcaccagaagcgagaagcagtgcagaagcaagtggctgaactacctgaactggaagcagagcggcggcaccgagtggaccaaggaggacgagatcaacctgatcctgagaatcgccgagctggacgtggccgacgagaacgacatcaactgggacctgctggccgagggctggagcagcgtgagaagcccccagtggctgagaagcaagtggtggaccatcaagagacagatcgccaaccacaaggacgtgagcttccccgtgctgatcaagggcctgaagcagctgcacgagaaccagaagaacaaccccaccctgctggagaacaagagcggcagcggcgtgcccaacagcaacaccaacagcagcgtgcagcacgtgcagatcagagtggccagactggaggacaacaccgccatcagcagcagccccatggccgccctgcagatccccgtgcagatcacccacgtgagcagcgccgacagccccgccaccgtggacagcgagaccatcaccctgaacagcggcaccctgcagaccttcgagatcctgcccagcttccacctgcagcccaccggcacccccggcacctacctgctgcagaccagcagcagccagggcctgcccctgaccctgaccgccagccccaccgtgaccctgaccgccgccgcccccgccagccccgagcagatcatcgtgcacgccctgagccccgagcacctgctgaacaccagcgacaacgtgaccgtgcagtgccacacccccagagtgatcatccagaccgtggccaccgaggacatcaccagcagcatcagccaggccgagctgaccgtggacagcgacatccagagcagcgacttccccgagccccccgacgccctggaggccgacaccttccccgacgagatccaccaccccaagatgaccgtggagcccagcttcaacgacgcccacgtgagcaagttcagcgaccagaacagcaccgagctgatgaacagcgtgatggtgagaaccgaggaggagatcagcgacaccgacctgaagcaggaggagagccccagcgacctggccagcgcctacgtgaccgagggcctggagagccccaccatcgaggagcaggtggaccagaccatcgacgacgagaccatcctgatcgtgcccagcccccacggcttcatccaggccagcgacgtgatcgacaccgagagcgtgctgcccctgaccaccctgaccgaccccatcctgcagcaccaccaggaggagagcaacatcatcggcagcagcctgggcagccccgtgagcgaggacagcaaggacgtggaggacctggtgaactgccactag

SEQ ID NO: 307856 - DNA, 4461 bp, Artificial Sequence
  derived and/or modified sequence
cctttaaaaaccatttcatatttcataaagtttcacattgctttcaagagcttgtaatttgtcttttctggcctaattgtttaaggttttgtttttgttttttccacagattcctagatagggttgttcatctgtcatcttaaaagggttttctggatgaatagggtactatataatttttaatgctttaagataaaacataaagaggtgttaataattataaaggaaaactatagttactaataatatttatggtgctgtattgattgatatacacatcatgttacataatggtaccacagtctacagttcatagaatcactagcatagctgagcctgttttttttttttttttcagagaacgtttgtctgcctgatgagagccacttgggttaagaaactacctgtgaatagtcatcatttctgtccttcattggggaatacttttagaggccagtttccaaaaattctgcttaaaaaagaattctggttttgtcttactcttccagatgagatatcacagaggcttgggcctagattgtcatcagcatactgctatactattcgtttgttcttattaagccttattgtgtgtaatgctgttactttttcagagtgttgcggagataggaacatgggagagaaacaatctgggtaacatgaaagtgatgctggttgctaagggaaggcaacttgattctgtgggaagggctgtagctgatccatccgttgtctagccatgagatgctatattctgagactagttattccatctgtctgaacaagaggaaaataatatttgtgtaaaatagcagatttgagtatgagcacagtggaagaggattctgacacagtaacagtagaaactgtgaactctgtgactttgactcaggacacagaagggaatctcattcttcactgccctcagaatgaagcggatgaaatagactcagaagatagtattgaacctccacataaaaggctttgtttgtcctctgaggatgatcagagtattgatgattctactccttgcatatcagttgttgcacttccactttcagaaaatgatcagagctttgaagtgaccatgactgcaaccacagaagtagcagatgatgaggttactgaggggactgtgacacagatacagattttgcagaatgagcaactagatgaaatatctcccttgggtaacgaggaagtttcagcagttagccaagcatggtttacaactaaagaagataaggattctctgactaataaaggacataaatggaagcaggggatgtggtccaaggaagaaattgatattttgatgaacaatattgaacgctatcttaaggcacgcggaataaaagatgctacagaaatcatctttgagatgtcaaaagacgaaagaaaagatttctacaggactatagcatggggtctgaaccggcctttgtttgcagtttatagaagagtgcttcgcatgtatgatgacagaaaccatgtgggaaaatatacacctgaagaaattgagaagctcaaggaacaactgtggaccccaaaaaaaggccacactttcaaactttggctctcaaagtattgctgcccacaacttccaaaccagtcaaatgggaagaagaagaatgaagaataaatgatgaaattaaaagggagaaaacaattgaaccaaatgctgattggcagactcttgttttaggctccggataaagcatggcaatgactgggcaacaataggggcggcgctaggaagaagtgcatcttctgtcaaagatcggtgccgactgatgaaggatacttgcaacacagggaagtggacagaagaagaagaaaagagacttgcagaagtggttcatgagttgacaagcactgagccaggtgacatagtcacacagggtgtgtcttgggcagctgtggctgaacgagtcggtacccgctcagaaaagcaatgtcgttctaaatggctcaactacctgaattggaaacagagtgggggtactgaatggaccaaggaagatgaaatcaatctcatcctcaggatagcagaacttgatgtagctgatgaaaatgacattaactgggatctgttagctgagggatggagtagtgtccgttcaccacaatggctacgaagtaaatggtggaccatcaaaaggcaaattgcaaaccataaggatgtttcgttccctgtcttaataaaaggtcttaaacagttacatgagaaccaaaaaaacaacccaacgcttttggagaataaatcaggatctggagttccaaacagtaataccaattccagtgtgcagcatgttcagataagagttgcccgcttggaagataatacagccatctcttctagccccatggcagcattgcagattccagtccagatcacccatgtttcttcagcagactctcctgctaccgttgactcagaaacaataacactaaacagtggaacactacagacatttgagattcttccctctttccatctacagcccactggcactccaggcacctacctacttcaaacaagctcaagccaaggccttcccctaactctgactgctagtcccacagtaaccctgacagctgctgctcctgcttctcctgaacagattattgttcatgctttatccccagaacatttgttgaacacaagtgataatgttacagtgcagtgtcacacaccaagagtcatcattcagactgttgccacagaggacatcacttcttccatatcccaagcagaactgacagtcgatagtgatattcagtcatctgattttcctgagcctccagacgccctagaagcagacactttcccagatgaaattcatcaccctaagatgactgtggagccatcatttaatgatgctcatgtatccaaattcagtgaccaaaatagcacagaactgatgaatagtgttatggtcagaacagaagaagaaatctctgacaccgaccttaaacaagaggaatcaccctctgatttagccagtgcttatgttactgagggtttagagtctcccactatagaagaacaagttgatcaaacaattgatgatgaaacaatacttatcgttccttcaccacatggctttatccaggcatctgatgttatagatactgaatctgtcttgcctttgacaacactaacagatcccatactccaacatcatcaggaagaatcaaatatcattggatcatccttgggcagtcctgtttcagaagattcaaaggatgtcgaagatttggtaaactgtcattagaataattcttagaaataggcagttcaagcaaagaaggcacactgttaattacaacctcttcaaagaaataggagcaacccccaagaggcttaatttaccaatttaaatagccacagtccttaagccacacacattgttgctgctatgactttttacctcctttaaacacatcatctgaggttgagttttatgacagtatgtagttgagtggaggctgggagttttaagcataaatccctgtttagtgttacatgggaataaggaatttcattcacttcagccactaagaaaagtttagaatcacgaaagcttaactgctgtggtttaaagtacagtttctctaaagatcagacatggcactgtctcctctcaagcctggttgtagttcagatgagtcttttcaacatggtcttcaacatggtctagagcttaccagtgatcttctgatcttcaagaagactaagtttgagacttgaccagcatacaagtatagagacctaggaggtggtcttgtggtggtacatttggttaacccattgctggcagtgggagctgatttaggcagggtaaacaggaaagcattaaaagttaaaattcactacaggttttttgttacttttaaagggaatatggataagcatagtaacaaaacccaccagaatctaagcagttttcaccccctcagaaaccactgtcattagtttacaaagttagcactttgaagtaaaactaaatgaggaaggaagtaatgttacctatccttgataccatgaccatttattagatgttttgctatataaattaccgagagaatagtttgtcatccacttagtgtgttagctggtggggtacaatataacctctcatctcaggctattttaaaaaaacaatatttgcttctataacaaaaggaaacaaatctaagaatcattcctgtactacagaagggttaaggcaaaggtagccttttgggctttttaatgaatatgacccctatagaaaagtcaagaaaaaaaaacccttgtataaattattttatttattattgtaattagatcttcacaaagttgtcttttcactgtgttttgtcaacgtgaaattaaattgtagttataagcaaaagttggttgcctagggaacaattgtatattcagtttaacagaaataaaagaatatttgtctt

SEQ ID NO: 307857 - DNA, 4460 bp, Artificial Sequence
  derived and/or modified sequence
ctttaaaaaccatttcatatttcataaagtttcacattgctttcaagagcttgtaatttgtcttttctggcctaattgtttaaggttttgtttttgttttttccacagattcctagatagggttgttcatctgtcatcttaaaagggttttctggatgaatagggtactatataatttttaatgctttaagataaaacataaagaggtgttaataattataaaggaaaactatagttactaataatatttatggtgctgtattgattgatatacacatcatgttacataatggtaccacagtctacagttcatagaatcactagcatagctgagcctgttttttttttttttttcagagaacgtttgtctgcctgatgagagccacttgggttaagaaactacctgtgaatagtcatcatttctgtccttcattggggaatacttttagaggccagtttccaaaaattctgcttaaaaaagaattctggttttgtcttactcttccagatgagatatcacagaggcttgggcctagattgtcatcagcatactgctatactattcgtttgttcttattaagccttattgtgtgtaatgctgttactttttcagagtgttgcggagataggaacatgggagagaaacaatctgggtaacatgaaagtgatgctggttgctaagggaaggcaacttgattctgtgggaagggctgtagctgatccatccgttgtctagccatgagatgctatattctgagactagttattccatctgtctgaacaagaggaaaataatatttgtgtaaaatagcagatttgagtatgagcacagtggaagaggattctgacacagtaacagtagaaactgtgaactctgtgactttgactcaggacacagaagggaatctcattcttcactgccctcagaatgaagcggatgaaatagactcagaagatagtattgaacctccacataaaaggctttgtttgtcctctgaggatgatcagagtattgatgattctactccttgcatatcagttgttgcacttccactttcagaaaatgatcagagctttgaagtgaccatgactgcaaccacagaagtagcagatgatgaggttactgaggggactgtgacacagatacagattttgcagaatgagcaactagatgaaatatctcccttgggtaacgaggaagtttcagcagttagccaagcatggtttacaactaaagaagataaggattctctgactaataaaggacataaatggaagcaggggatgtggtccaaggaagaaattgatattttgatgaacaatattgaacgctatcttaaggcacgcggaataaaagatgctacagaaatcatctttgagatgtcaaaagacgaaagaaaagatttctacaggactatagcatggggtctgaaccggcctttgtttgcagtttatagaagagtgcttcgcatgtatgatgacagaaaccatgtgggaaaatatacacctgaagaaattgagaagctcaaggaacaactgtggaccccaaaaaaaggccacactttcaaactttggctctcaaagtattgctgcccacaacttccaaaccagtcaaatgggaagaagaagaatgaagaataaatgatgaaattaaaagggagaaaacaattgaaccaaatgctgattggcagactcttgttttaggctccggataaagcatggcaatgactgggcaacaataggggcggcgctaggaagaagtgcatcttctgtcaaagatcggtgccgactgatgaaggatacttgcaacacagggaagtggacagaagaagaagaaaagagacttgcagaagtggttcatgagttgacaagcactgagccaggtgacatagtcacacagggtgtgtcttgggcagctgtggctgaacgagtcggtacccgctcagaaaagcaatgtcgttctaaatggctcaactacctgaattggaaacagagtgggggtactgaatggaccaaggaagatgaaatcaatctcatcctcaggatagcagaacttgatgtagctgatgaaaatgacattaactgggatctgttagctgagggatggagtagtgtccgttcaccacaatggctacgaagtaaatggtggaccatcaaaaggcaaattgcaaaccataaggatgtttcgttccctgtcttaataaaaggtcttaaacagttacatgagaaccaaaaaaacaacccaacgcttttggagaataaatcaggatctggagttccaaacagtaataccaattccagtgtgcagcatgttcagataagagttgcccgcttggaagataatacagccatctcttctagccccatggcagcattgcagattccagtccagatcacccatgtttcttcagcagactctcctgctaccgttgactcagaaacaataacactaaacagtggaacactacagacatttgagattcttccctctttccatctacagcccactggcactccaggcacctacctacttcaaacaagctcaagccaaggccttcccctaactctgactgctagtcccacagtaaccctgacagctgctgctcctgcttctcctgaacagattattgttcatgctttatccccagaacatttgttgaacacaagtgataatgttacagtgcagtgtcacacaccaagagtcatcattcagactgttgccacagaggacatcacttcttccatatcccaagcagaactgacagtcgatagtgatattcagtcatctgattttcctgagcctccagacgccctagaagcagacactttcccagatgaaattcatcaccctaagatgactgtggagccatcatttaatgatgctcatgtatccaaattcagtgaccaaaatagcacagaactgatgaatagtgttatggtcagaacagaagaagaaatctctgacaccgaccttaaacaagaggaatcaccctctgatttagccagtgcttatgttactgagggtttagagtctcccactatagaagaacaagttgatcaaacaattgatgatgaaacaatacttatcgttccttcaccacatggctttatccaggcatctgatgttatagatactgaatctgtcttgcctttgacaacactaacagatcccatactccaacatcatcaggaagaatcaaatatcattggatcatccttgggcagtcctgtttcagaagattcaaaggatgtcgaagatttggtaaactgtcattagaataattcttagaaataggcagttcaagcaaagaaggcacactgttaattacaacctcttcaaagaaataggagcaacccccaagaggcttaatttaccaatttaaatagccacagtccttaagccacacacattgttgctgctatgactttttacctcctttaaacacatcatctgaggttgagttttatgacagtatgtagttgagtggaggctgggagttttaagcataaatccctgtttagtgttacatgggaataaggaatttcattcacttcagccactaagaaaagtttagaatcacgaaagcttaactgctgtggtttaaagtacagtttctctaaagatcagacatggcactgtctcctctcaagcctggttgtagttcagatgagtcttttcaacatggtcttcaacatggtctagagcttaccagtgatcttctgatcttcaagaagactaagtttgagacttgaccagcatacaagtatagagacctaggaggtggtcttgtggtggtacatttggttaacccattgctggcagtgggagctgatttaggcagggtaaacaggaaagcattaaaagttaaaattcactacaggttttttgttacttttaaagggaatatggataagcatagtaacaaaacccaccagaatctaagcagttttcaccccctcagaaaccactgtcattagtttacaaagttagcactttgaagtaaaactaaatgaggaaggaagtaatgttacctatccttgataccatgaccatttattagatgttttgctatataaattaccgagagaatagtttgtcatccacttagtgtgttagctggtggggtacaatataacctctcatctcaggctattttaaaaaaacaatatttgcttctataacaaaaggaaacaaatctaagaatcattcctgtactacagaagggttaaggcaaaggtagccttttgggctttttaatgaatatgacccctatagaaaagtcaagaaaaaaaaacccttgtataaattattttatttattattgtaattagatcttcacaaagttgtcttttcactgtgttttgtcaacgtgaaattaaattgtagttataagcaaaagttggttgcctagggaacaattgtatattcagtttaacagaaataaaagaatatttgtctt

SEQ ID NO: 307858 - DNA, 3954 bp, Artificial Sequence
  derived and/or modified sequence
gcggccgcagctccgtttccggtggctcgtcgcgctcgctcactccagctgcagccactctcgcccgtggctgcttcctccatcctggtattttttggagcttccatcctggttcttccaaagtgcccggacccaaaacaggaaagtgttgcggagataggaacatgggagagaaacaatctgggtaacatgaaagtgatgctggttgctaagggaaggcaacttgattctgtgggaagggctgtagctgatccatccgttgtctagatttgagtatgagcacagtggaagaggattctgacacagtaacagtagaaactgtgaactctgtgactttgactcaggacacagaagggaatctcattcttcactgccctcagaatgaagcggatgaaatagactcagaagatagtattgaacctccacataaaaggctttgtttgtcctctgaggatgatcagagtattgatgattctactccttgcatatcagttgttgcacttccactttcagaaaatgatcagagctttgaagtgaccatgactgcaaccacagaagtagcagatgatgaggttactgaggggactgtgacacagatacagattttgcagaatgagcaactagatgaaatatctcccttgggtaacgaggaagtttcagcagttagccaagcatggtttacaactaaagaagataaggattctctgactaataaaggacataaatggaagcaggggatgtggtccaaggaagaaattgatattttgatgaacaatattgaacgctatcttaaggcacgcggaataaaagatgctacagaaatcatctttgagatgtcaaaagacgaaagaaaagatttctacaggactatagcatggggtctgaaccggcctttgtttgcagtttatagaagagtgcttcgcatgtatgatgacagaaaccatgtgggaaaatatacacctgaagaaattgagaagctcaaggagaaaaaggcaattgctgcctgtttttttttcacccacagacaactgtggaccccaaaaaaaggccacactttcaaactttggctctcaaagtattgctgcccacaacttccaaaccagtcaaatgggaagaagaagaatgaagaataaatgatgaaattaaaagggagaaaacaattgaaccaaatgctgattggcagactcttgttttaggctccggataaagcatggcaatgactgggcaacaataggggcggcgctaggaagaagtgcatcttctgtcaaagatcggtgccgactgatgaaggatacttgcaacacagggaagtggacagaagaagaagaaaagagacttgcagaagtggttcatgagttgacaagcactgagccaggtgacatagtcacacagggtgtgtcttgggcagctgtggctgaacgagtcggtacccgctcagaaaagcaatgtcgttctaaatggctcaactacctgaattggaaacagagtgggggtactgaatggaccaaggaagatgaaatcaatctcatcctcaggatagcagaacttgatgtagctgatgaaaatgacattaactgggatctgttagctgagggatggagtagtgtccgttcaccacaatggctacgaagtaaatggtggaccatcaaaaggcaaattgcaaaccataaggatgtttcgttccctgtcttaataaaaggtcttaaacagttacatgagaaccaaaaaaacaacccaacgcttttggagaataaatcaggatctggagttccaaacagtaataccaattccagtgtgcagcatgttcagataagagttgcccgcttggaagataatacagccatctcttctagccccatggcagcattgcagattccagtccagatcacccatgtttcttcagcagactctcctgctaccgttgactcagaaacaataacactaaacagtggaacactacagacatttgagattcttccctctttccatctacagcccactggcactccaggcacctacctacttcaaacaagctcaagccaaggccttcccctaactctgactgctagtcccacagtaaccctgacagctgctgctcctgcttctcctgaacagattattgttcatgctttatccccagaacatttgttgaacacaagtgataatgttacagtgcagtgtcacacaccaagagtcatcattcagactgttgccacagaggacatcacttcttccatatcccaagcagaactgacagtcgatagtgatattcagtcatctgattttcctgagcctccagacgccctagaagcagacactttcccagatgaaattcatcaccctaagatgactgtggagccatcatttaatgatgctcatgtatccaaattcagtgaccaaaatagcacagaactgatgaatagtgttatggtcagaacagaagaagaaatctctgacaccgaccttaaacaagaggaatcaccctctgatttagccagtgcttatgttactgagggtttagagtctcccactatagaagaacaagttgatcaaacaattgatgatgaaacaatacttatcgttccttcaccacatggctttatccaggcatctgatgttatagatactgaatctgtcttgcctttgacaacactaacagatcccatactccaacatcatcaggaagaatcaaatatcattggatcatccttgggcagtcctgtttcagaagattcaaaggatgtcgaagatttggtaaactgtcattagaataattcttagaaataggcagttcaagcaaagaaggcacactgttaattacaacctcttcaaagaaataggagcaacccccaagaggcttaatttaccaatttaaatagccacagtccttaagccacacacattgttgctgctatgactttttacctcctttaaacacatcatctgaggttgagttttatgacagtatgtagttgagtggaggctgggagttttaagcataaatccctgtttagtgttacatgggaataaggaatttcattcacttcagccactaagaaaagtttagaatcacgaaagcttaactgctgtggtttaaagtacagtttctctaaagatcagacatggcactgtctcctctcaagcctggttgtagttcagatgagtcttttcaacatggtcttcaacatggtctagagcttaccagtgatcttctgatcttcaagaagactaagtttgagacttgaccagcatacaagtatagagacctaggaggtggtcttgtggtggtacatttggttaacccattgctggcagtgggagctgatttaggcagggtaaacaggaaagcattaaaagttaaaattcactacaggttttttgttacttttaaagggaatatggataagcatagtaacaaaacccaccagaatctaagcagttttcaccccctcagaaaccactgtcattagtttacaaagttagcactttgaagtaaaactaaatgaggaaggaagtaatgttacctatccttgataccatgaccatttattagatgttttgctatataaattaccgagagaatagtttgtcatccacttagtgtgttagctggtggggtacaatataacctctcatctcaggctattttaaaaaaacaatatttgcttctataacaaaaggaaacaaatctaagaatcattcctgtactacagaagggttaaggcaaaggtagccttttgggctttttaatgaatatgacccctatagaaaagtcaagaaaaaaaaacccttgtataaattattttatttattattgtaattagatcttcacaaagttgtcttttcactgtgttttgtcaacgtgaaattaaattgtagttataagcaaaagttggttgcctagggaacaattgtatattcagtttaacagaaataaaagaatatttgtcttaa

SEQ ID NO: 307859 - DNA, 1485 bp, Artificial Sequence
  derived and/or modified sequence
atgaaagacacatgtaataccggcaagtggacagaagaagaagaaaagcgattggcagaagtcgtgcacgagctcacatccactgagccaggcgatatcgtaacccagggagtctcttgggctgccgttgcagaacgagtgggcacacggagcgagaaacaatgtcggagcaagtggctcaactacctgaattggaagcagtcgggcggtactgagtggacaaaagaagacgagatcaacctgatcttgcggatcgcagaactcgacgtggccgatgagaatgacattaattgggaccttctggccgaagggtggtccagcgtaagatcgccacaatggttgcggtccaagtggtggacaatcaagaggcaaattgcaaatcacaaggatgtctcatttcctgtgcttatcaagggcttgaaacagcttcacgagaaccaaaaaaataatcccacccttcttgagaacaaatccggttccggcgttcccaatagtaacaccaattcttcagttcagcacgtgcaaattagagtcgccagactggaagataatacagccataagtagcagtcctatggcggctctacagatccctgttcaaatcactcacgtctctagtgctgactcgccagccacggtcgactctgagacaatcaccttaaacagcggcacactccagacctttgaaattttgccatcctttcatctgcagcctaccggcacaccgggcacttacctcctccagacctctagctcccagggcttaccgctaactctgacagctagcccaacagtcaccctgaccgctgctgcacctgccagcccagaacagattattgtacatgctctcagccctgaacacctgctcaacacctccgataacgtgaccgtgcagtgtcacacaccgcgggtgattatccaaacggtcgccacagaggatatcacttcaagtatcagtcaggccgagctgaccgtcgactcagatatccaatccagcgacttccccgagccacccgatgctcttgaggcagatacctttcctgacgagatccaccacccgaaaatgactgtggaacctagctttaacgacgctcacgtgagtaaattttcagatcagaacagcaccgagctcatgaatagcgtgatggttcgcacagaggaagaaatctcagataccgacttgaaacaggaagaatcgccctccgaccttgcaagtgcctatgttaccgaggggcttgagtcccccacaatcgaggagcaggtcgaccaaactattgatgatgagacgatcctgatcgtgccgtctccccacggcttcatccaagcttccgacgtcatcgacacagagtccgttttgcccctgaccacactaaccgatcctatccttcagcatcatcaagaagagagcaatataattgggagttcgcttgggtcccctgtgtccgaggatagcaaggatgtagaagatctcgtgaactgtcattag

SEQ ID NO: 307860 - DNA, 2019 bp, Artificial Sequence
  derived and/or modified sequence
atgaccgcaacgacagaagtagccgatgatgaggtcacggagggaaccgtgacgcaaatccagattctccagaatgagcagctggacgagatctctcccctcggaaatgaggaggttagcgccgtcagccaggcctggtttaccacaaaggaagataaagatagtttgaccaataaaggtcataagtggaagcaggggatgtggagcaaagaggaaatcgacatcctcatgaataatattgagaggtacttaaaagcgcgcgggatcaaggatgccacggagattatttttgagatgtcaaaagacgaaagaaaggacttttacagaactatcgcttggggattaaatagacccctgtttgcagtgtatagaagagtcctaaggatgtacgatgataggaatcacgtaggaaagtacaccccagaggagattgaaaaactgaaagagctacgtatcaaacatggtaatgactgggcaacaattggcgccgctttgggaagatccgcctcttccgtcaaggacaggtgccgattgatgaaagacacctgcaatactggaaagtggaccgaagaagaagagaagcggctcgccgaggtggttcacgagctgacaagcaccgagccgggtgatattgttacacagggtgtctcctgggccgccgtggcggaacgcgttggcactcgcagtgaaaagcagtgccgtagcaagtggctgaactatctcaactggaaacagtctggcggcacagaatggacgaaggaagatgaaataaatttgattttaaggatcgccgaactcgacgtggccgatgaaaatgacatcaactgggaccttctagctgagggttggtcatcagtgcgttccccgcagtggctgcggagcaaatggtggactatcaagcgacagattgctaatcacaaggatgtgtcctttcctgttttaattaagggactgaaacagctccacgagaaccagaagaacaatcctacattgctcgaaaacaagtctgggtccggcgttcccaatagcaataccaattcttcggtgcagcatgtgcagattcgcgtggcacgattggaagataacactgctatttcctcctctcctatggcagctctgcagatccccgttcagattacgcacgtgtcttccgccgacagccccgccacagttgatagtgagacaatcactcttaactccggaactctgcaaacgtttgagatcctgccatcattccaccttcagcctactggcactcctggtacctacttactccagacgtcgtctagccaaggtctcccgctcaccctgactgcatcgccaacggtgacactaaccgccgcagcgccagcgtccccagaacagatcattgtccatgccctatctccggaacatctacttaatacctccgacaatgtgacagtacagtgccatacacctcgcgttattatacagactgttgccaccgaggatatcacgagctccattagccaagcagagctgacagttgactccgacatccaatccagcgactttccagagccgccagacgcgctagaagctgacactttccccgacgagattcaccatcccaagatgaccgtcgagccatcatttaacgatgcgcacgtgagcaaattctcagatcaaaactctactgagctaatgaattccgtgatggtacgcacggaagaagaaatatctgacacagatctcaagcaggaggaaagtccctcagatctggcgtccgcctatgtcactgagggcctggagtcacctacaattgaggagcaggtggaccagacgatcgatgacgagacgatactgattgtgcctagtcctcatggatttatccaggctagcgatgttattgatactgaaagcgtgctgccgctcactaccctgaccgatccgatcctgcagcaccaccaggaggagtctaacataatcgggagctccctgggctcgcctgtctcagaggattctaaggatgtcgaagatctggtgaactgtcattag

SEQ ID NO: 307861 - DNA, 1485 bp, Artificial Sequence
  derived and/or modified sequence
atgaaggacacctgcaacacaggcaagtggacagaggaggaggagaagaggctggccgaggtggtgcatgagctgaccagcacagagcccggggacatcgtgacccagggcgtgtcctgggccgctgtggccgagcgggtgggcaccaggtctgagaagcagtgccgcagcaagtggctgaactacctgaactggaagcagagcggcggcacagagtggaccaaggaggatgagatcaacctgatcctgagaattgctgagctggatgtggctgatgaaaatgacatcaactgggacctgctggccgagggctggagctctgtgcgcagcccccagtggctgcggagcaagtggtggaccatcaagaggcagatcgccaaccacaaggatgtgtccttccctgtgctgatcaagggcctgaagcagctgcacgagaaccagaagaacaaccccaccctgctggagaacaagagcggcagcggcgtgcccaacagcaacaccaacagctctgtgcagcacgtgcagatccgggtggcccggctggaggacaacacagccatcagcagcagccccatggccgccctgcagatccctgtgcagatcacccacgtgagcagcgctgacagccctgccaccgtggacagcgagaccatcaccctgaacagcggcaccctgcagacctttgagatcctgcccagcttccacctgcagcccaccggcaccccaggcacctacctgctgcagaccagcagcagccagggcctgcccctgaccctgacagccagccccaccgtgaccctgacagctgctgccccagccagccctgagcagatcatcgtgcacgccctgagccctgagcacctgctgaacaccagtgacaacgtgacagtgcagtgccacacccccagggtcatcatccagacagtggccacagaggacatcaccagcagcatcagccaggccgagctgactgtggacagcgacatccagagcagtgacttccctgagcccccagatgccctggaggccgacaccttcccagatgagatccaccaccccaagatgacagtggagcccagcttcaatgatgcccacgtgtccaagttcagtgaccagaacagcacagagctgatgaacagcgtgatggtgaggacagaggaggagatcagtgacacagacctgaagcaggaggagagccccagcgacctggccagcgcctacgtgacagagggcctggagagccccaccatcgaggagcaggtggaccagaccattgatgatgagaccatcctgattgtgcccagcccccacggcttcatccaggccagtgatgtgattgacacagagagcgtgctgcccctgaccaccctgacagaccccatcctgcagcaccaccaggaggagagcaacatcatcggcagcagcctgggcagccctgtgtctgaggacagcaaggatgtggaggacctggtgaactgccactag

SEQ ID NO: 307862 - DNA, 2019 bp, Artificial Sequence
  derived and/or modified sequence
atgacagccaccacagaggtggctgatgatgaggtgacagagggcaccgtgacccagatccagatcctgcagaatgagcagctggatgagatcagccccctgggcaatgaggaggtgtctgctgtgtcccaggcctggttcaccaccaaggaggacaaggacagcctgaccaacaagggccacaagtggaagcagggcatgtggagcaaggaggagattgacatcctgatgaacaacatcgagcgctacctgaaggcccggggcatcaaggatgccacagagatcatctttgagatgagcaaggatgagaggaaggacttctaccgcaccatcgcctggggcctgaaccggcccctgtttgctgtgtaccgccgggtgctgaggatgtatgatgacagaaatcatgtgggcaagtacaccccagaggagattgagaagctgaaggagctgcgcatcaagcacggcaatgactgggccaccatcggggccgccctgggccgcagcgccagctctgtgaaggaccgctgccgcctgatgaaggacacctgcaacacaggcaagtggacagaggaggaggagaagaggctggccgaggtggtgcatgagctgaccagcacagagcccggggacatcgtgacccagggcgtgtcctgggccgctgtggccgagcgggtgggcaccaggtctgagaagcagtgccgcagcaagtggctgaactacctgaactggaagcagagcggcggcacagagtggaccaaggaggatgagatcaacctgatcctgagaattgctgagctggatgtggctgatgaaaatgacatcaactgggacctgctggccgagggctggagctctgtgcgcagcccccagtggctgcggagcaagtggtggaccatcaagaggcagatcgccaaccacaaggatgtgtccttccctgtgctgatcaagggcctgaagcagctgcacgagaaccagaagaacaaccccaccctgctggagaacaagagcggcagcggcgtgcccaacagcaacaccaacagctctgtgcagcacgtgcagatccgggtggcccggctggaggacaacacagccatcagcagcagccccatggccgccctgcagatccctgtgcagatcacccacgtgagcagcgctgacagccctgccaccgtggacagcgagaccatcaccctgaacagcggcaccctgcagacctttgagatcctgcccagcttccacctgcagcccaccggcaccccaggcacctacctgctgcagaccagcagcagccagggcctgcccctgaccctgacagccagccccaccgtgaccctgacagctgctgccccagccagccctgagcagatcatcgtgcacgccctgagccctgagcacctgctgaacaccagtgacaacgtgacagtgcagtgccacacccccagggtcatcatccagacagtggccacagaggacatcaccagcagcatcagccaggccgagctgactgtggacagcgacatccagagcagtgacttccctgagcccccagatgccctggaggccgacaccttcccagatgagatccaccaccccaagatgacagtggagcccagcttcaatgatgcccacgtgtccaagttcagtgaccagaacagcacagagctgatgaacagcgtgatggtgaggacagaggaggagatcagtgacacagacctgaagcaggaggagagccccagcgacctggccagcgcctacgtgacagagggcctggagagccccaccatcgaggagcaggtggaccagaccattgatgatgagaccatcctgattgtgcccagcccccacggcttcatccaggccagtgatgtgattgacacagagagcgtgctgcccctgaccaccctgacagaccccatcctgcagcaccaccaggaggagagcaacatcatcggcagcagcctgggcagccctgtgtctgaggacagcaaggatgtggaggacctggtgaactgccactag

SEQ ID NO: 307863 - DNA, 1485 bp, Artificial Sequence
  derived and/or modified sequence
atgaaggacacctgcaacaccggcaagtggaccgaggaggaggagaaacgtcttgccgaagtagtgcatgaactgacgtctacagaaccaggcgacatagtaactcaaggcgtaagttgggctgctgtggcagagagagttgggacaagatcagaaaaacagtgtagaagtaagtggttaaattatctgaactggaaacaatctggcggaactgaatggacaaaggaggatgaaatcaacttgattcttagaattgcagaactggatgtggccgatgaaaatgacattaactgggacctcttggccgagggctggtccagcgtgcgcagcccccagtggcttaggtcgaaatggtggacgatcaaaaggcaaatcgcaaatcataaagacgtatcttttcctgtgctgattaaaggtttgaaacagttgcacgagaatcaaaagaataaccctacactcctagaaaataagtccggctctggggtccctaactctaacactaattcaagtgtccagcatgttcaaatcagggtggcccgcctcgaggacaatacagccattagtagctctccaatggctgccctgcagattccggtgcagatcactcacgtgtcaagcgctgattcgccagcgaccgtggacagtgaaactatcaccctgaactctgggacactgcaaacattcgaaattttacccagcttccatttgcagcccactgggacccccggcacatacctgctgcagactagttccagtcaaggacttcccctcaccttgactgcctcccctaccgttaccttgacggcagctgcccctgcctctcctgaacaaattattgtgcacgccctgtccccagaacaccttttgaacacatctgacaacgtcacagtacagtgtcatacaccgagagtgataatacagactgtagcaacagaggatatcactagtagcatttctcaggcagaactcacagtcgactctgacattcagtcttctgactttccagagcctcctgatgccctggaggctgacaccttccctgacgaaattcatcaccctaaaatgaccgtcgaaccttcctttaacgatgcccatgtaagcaaattttccgaccagaactctaccgagctgatgaatagcgtgatggtgagaactgaggaggaaatttcagacaccgatttaaagcaggaagagtcaccctctgaccttgcgagcgcttatgtcacagagggtctggaatcccctacaatcgaggagcaggtggatcagaccattgacgatgagacaatactcatcgtaccctccccacacgggttcattcaggcctctgatgtcattgataccgagtcagtcttgccactcaccacattaacggatcccattctgcaacaccatcaggaggagtctaacatcatcgggtcgtctctcggtagtccagtaagcgaggactctaaggatgtagaggacctggttaactgccattag

SEQ ID NO: 307864 - DNA, 2019 bp, Artificial Sequence
  derived and/or modified sequence
atgaccgccaccaccgaggtggccgacgacgaggtgaccgagggcacggtcacccagattcaaattcttcaaaatgagcagttggatgagatctcccccctgggcaacgaggaggtgtctgcggtgtcacaagcgtggtttacaactaaagaagataaggacagcctgactaacaaggggcataaatggaaacaggggatgtggagcaaagaagagatcgacattttaatgaataatatcgaacgttacctgaaggcaagaggcataaaggatgcgactgaaatcatcttcgaaatgtcaaaggatgaacgtaaggatttttaccgcacaatcgcatgggggctgaacagaccgctctttgcagtctaccggcgggtcctgcgtatgtacgatgatcgaaatcatgtgggcaagtacacccccgaagagattgagaaactaaaggaattgagaatcaagcatgggaatgattgggctacaatcggagccgctcttggccggtcggcgtcttcagtcaaggatcgatgcaggctgatgaaggacacctgcaataccggaaagtggacagaggaagaggaaaagcgattagcagaggtggtgcatgagctgacatctacagagcctggcgatattgttacacagggcgtgtcatgggcagcagtggccgagcgagtggggacgcgttccgagaaacagtgcaggagcaagtggctaaactacttgaactggaagcagtccggagggacggaatggaccaaagaagatgagataaatctcatcctgaggatcgctgaattggacgttgccgatgaaaatgacatcaattgggatctcctagctgaagggtggagctccgtcagaagcccacagtggctgagaagcaaatggtggaccatcaaacgccaaattgcaaatcacaaagacgtgagttttcccgtgctaattaaaggcctcaagcagctccacgagaatcagaaaaacaatccaaccttgcttgaaaacaagtccggtagtggggttccaaatagcaacacaaactcttctgttcagcacgttcagattagagtggccagactcgaggataataccgctatctcttcgagcccaatggctgcactgcagatccctgtccagatcacccatgtgtcaagtgccgactccccagccacggtggatagcgagacaatcacactcaacagcggaacactgcagacctttgagatcctgccaagtttccacctgcaaccaaccggcacgcctggaacctacctgctgcaaacaagcagctcgcagggcctacctttgaccctcacagcatccccaactgtgactcttacggccgctgctcctgcatcccctgagcagattatcgtacacgcactgtcacctgagcacttgctgaacacttcagacaatgtcacggtgcaatgtcatacacccagggtaatcattcagacagtagccaccgaagacataacatcctctatctcccaggccgagttgactgtagactcggacatccagagcagcgacttccccgagcctcctgacgctctggaggccgatactttcccggatgagattcatcacccaaagatgactgtggaacctagttttaatgacgcccacgtgtcaaagttttcggatcagaactctaccgaattgatgaactccgtgatggtgcgtactgaagaggagataagtgataccgatctgaagcaagaagagtctccatccgatctggcaagtgcttacgtaaccgagggcctcgagtctcctaccatcgaggagcaggtggatcagaccatcgatgatgagactatacttatagtgccgagcccccacggtttcatacaagccagtgacgtgatcgatacagagtccgtgctgcctctgacaacccttacggacccgatactgcagcaccaccaggaggagtccaacataattggctcctccttaggatcccctgtttccgaggactcaaaggacgtcgaggacttggtgaattgtcactag

SEQ ID NO: 307865 - DNA, 1485 bp, Artificial Sequence
  derived and/or modified sequence
atgaaagacacatgcaatacaggaaagtggacagaggaagaagaaaagcgcctggcagaggtggtccacgaactcacctccactgagccgggtgacatagtgacacaaggggtgtcctgggctgctgtcgccgagagggttggtaccaggtcagagaaacaatgtagatcaaagtggctcaattatctgaattggaaacagtctggtggcactgaatggaccaaggaagacgaaattaatctcattctacgcatagccgagctggatgtggcagacgaaaatgacatcaactgggacctgctggccgaggggtggagcagtgtgcggtctccacagtggcttagaagcaaatggtggaccatcaaacgccagatcgcaaatcacaaggacgtgagttttccagtgcttatcaaagggctaaagcagctgcacgaaaaccaaaagaacaatccgacgctgttggagaataaaagcggaagtggtgtacccaattcgaatactaatagttctgtgcagcacgtgcaaatcagagtggcaagactggaggacaacacagccattagcagcagcccaatggcagcccttcaaatccctgtgcagattacacacgtcagtagtgcggactcccccgcaacagttgactctgagacgattactctgaatagcggcacattacagacattcgagatacttccaagtttccacctgcagccaactggcactccaggaacatacttgcttcagacctcctcgtcccagggcctgcccctgactctgacggcctcgccgacagtgaccctgactgcggctgctcctgccagcccagaacaaatcatcgtgcacgcattatcacctgagcatcttctgaacacgtccgataacgtgaccgttcaatgccatactcctcgagtcatcatacaaactgtggccaccgaagatatcacatcttctatttctcaggctgaactgaccgtggacagtgatattcagagcagtgactttccagagcccccagacgcccttgaggcagacaccttcccggacgagattcaccaccctaagatgactgtggagccctctttcaatgacgctcacgtgagcaaattctccgaccagaacagcactgaattaatgaacagcgtcatggtacgcacggaagaggaaattagcgataccgacttgaagcaggaagagtctccatctgatctggcgtcagcctacgtaacggaaggcctcgagtccccaactattgaagaacaggtcgaccagacaatcgacgacgagacaatcctcatagtcccaagtcctcacgggtttatccaagcaagtgacgttattgacactgagtcagtcctgccattgactacgctgactgatccaatcctacagcatcaccaggaggagtccaacatcatcggatcatctctgggctcgccggtgtccgaggattccaaggacgttgaagacctggttaactgccactag

SEQ ID NO: 307866 - DNA, 2019 bp, Artificial Sequence
  derived and/or modified sequence
atgacagcaacgaccgaggtagccgatgacgaagtcactgaaggcaccgtgacccagattcagattcttcagaatgaacagctggacgagatatctcccttaggaaacgaggaggtttctgcagtatcacaagcttggttcactactaaagaagataaagattccctgactaacaaggggcataaatggaaacaggggatgtggagtaaagaagagattgacatactgatgaataatattgagcgctacctaaaagcccgagggatcaaggatgctacggaaatcatatttgagatgtcgaaagatgagagaaaagacttctatcggactattgcctggggactgaacagaccccttttcgcggtgtaccggcgtgtcttgagaatgtatgatgaccgcaatcacgtggggaagtacacgcctgaagaaattgaaaaactaaaagaactgagaatcaagcacgggaacgactgggcgacaatcggggctgcgctcggacgatctgctagttccgttaaagaccgctgccggcttatgaaggatacttgtaacaccggcaaatggacagaggaagaggaaaagcggctcgccgaggttgtccacgaactgacctccactgagccaggagacatagtaactcagggtgttagttgggccgctgtggcagaaagggtaggcaccagaagtgaaaagcaatgccggagcaagtggctgaattatttgaactggaaacaatccgggggtaccgaatggaccaaagaagacgagattaatttaatactaaggatcgctgagctcgatgttgcagatgagaatgatatcaactgggaccttctggcagaaggatggagcagcgttagatctccccagtggctccggagcaagtggtggaccataaaacgccagattgcgaatcataaggacgtgtccttccccgtgcttatcaagggtctgaagcagctacatgaaaaccagaagaacaacccaactctactggagaacaaatctggatctggcgtgcccaatagtaatactaatagctcagtacagcacgttcagattcgtgtggcacgactggaagataataccgctatctcgtcctcccccatggccgctctgcagatccccgtacaaattacacacgtgtcttccgccgatagccccgctaccgttgattctgaaaccataactcttaactctggaactctccagacattcgaaatcttaccctcttttcacctccaacccaccggcaccccgggtacctatttgctgcaaacctccagctcccaggggctgccattgacgctgaccgcatctccaactgtcacccttaccgcggctgcgcctgccagccccgagcagattatcgtccatgcactgtcgcctgagcacttgctaaatacatcagataacgtgacagtccagtgccacacacctcgggtgatcattcaaacagtggctaccgaagacataacttcgagtatctcacaggccgaactaacggttgactctgatatccagagtagcgacttccctgaaccacctgacgcactcgaagctgataccttcccagatgagattcatcaccccaagatgactgtggagccgtccttcaacgatgcacacgttagcaagtttagtgaccagaattctactgaactcatgaatagcgtgatggtgagaactgaagaagagatctctgatacagacctgaagcaggaagagagcccatcagatctcgcttcggcctacgtgacagagggattggagagccctactatcgaagaacaagtagatcagacaatcgatgatgagaccatcctgatagtgcctagtccacacggattcattcaggcctccgatgtcatcgacacagagtcggtgctcccacttacaaccctaactgatcccattcttcaacaccatcaagaggaatccaacatcattggctcttctctgggaagtcctgtctccgaagatagcaaagacgtagaagatctggtgaattgccactag

SEQ ID NO: 307867 - protein, 36 aa, Artificial Sequence
  derived and/or modified sequence
MSTVEEDSDTVTVETVNSVTLTQDTEGNLILHCPQN

SEQ ID NO: 307868 - protein, 147 aa, Artificial Sequence
  derived and/or modified sequence
MSTVEEDSDTVTVETVNSVTLTQDTEGNLILHCPQNEADEIDSEDSIEPPHKRLCLSSEDDQSIDDSTPCISVVALPLSENDQSFEVTMTATTEVADDEVTEGTVTQIQILQNEQLDEISPLGNEEVSAVSQAWFTTKEDKDSLTNK

SEQ ID NO: 307869 - protein, 73 aa, Artificial Sequence
  derived and/or modified sequence
MSTVEEDSDTVTVETVNSVTLTQDTEGNLILHCPQNEADEIDSEDSIEPPHKRLCLSSEDDQSIDDSTPCISV

SEQ ID NO: 307870 - protein, 96 aa, Artificial Sequence
  derived and/or modified sequence
MSTVEEDSDTVTVETVNSVTLTQDTEGNLILHCPQNEADEIDSEDSIEPPHKRLCLSSEDDQSIDDSTPCISVVALPLSENDQSFEVTMTATTEVA

SEQ ID NO: 307871 - protein, 56 aa, Artificial Sequence
  derived and/or modified sequence
MSTVEEDSDTVTVETVNSVTLTQDTEGNLILHCPQNEADEIDSEDSIEPPHKRLCL

SEQ ID NO: 307872 - protein, 49 aa, Artificial Sequence
  derived and/or modified sequence
MSTVEEDSDTVTVETVNSVTLTQDTEGNLILHCPQNEADEIDSEDSIEP

SEQ ID NO: 307873 - protein, 109 aa, Artificial Sequence
  derived and/or modified sequence
MSTVEEDSDTVTVETVNSVTLTQDTEGNLILHCPQNEADEIDSEDSIEPPHKRLCLSSEDDQSIDDSTPCISVVALPLSENDQSFEVTMTATTEVADDEVTEGTVTQIQ

SEQ ID NO: 307874 - protein, 91 aa, Artificial Sequence
  derived and/or modified sequence
MSTVEEDSDTVTVETVNSVTLTQDTEGNLILHCPQNEADEIDSEDSIEPPHKRLCLSSEDDQSIDDSTPCISVVALPLSENDQSFEVTMTA

SEQ ID NO: 307875 - DNA, 858 bp, Artificial Sequence
  derived and/or modified sequence
atgagcaccgtggaggaggacagcgacaccgtgaccgtggagaccgtgaacagcgtgaccctgacccaggacaccgagggcaacctgatcctgcactgcccccagaacgaggccgacgagatcgacagcgaggacagcatcgagcccccccacaagagactgtgcctgagcagcgaggacgaccagagcatcgacgacagcaccccctgcatcagcgtggtggccctgcccctgagcgagaacgaccagagcttcgaggtgaccatgaccgccaccaccgaggtggccgacgacgaggtgaccgagggcaccgtgacccagatccagatcctgcagaacgagcagctggacgagatcagccccctgggcaacgaggaggtgagcgccgtgagccaggcctggttcaccaccaaggaggacaaggacagcctgaccaacaagggccacaagtggaagcagggcatgtggagcaaggaggagatcgacatcctgatgaacaacatcgagagatacctgaaggccagaggcatcaaggacgccaccgagatcatcttcgagatgagcaaggacgagagaaaggacttctacagaaccatcgcctggggcctgaacagacccctgttcgccgtgtacagaagagtgctgagaatgtacgacgacagaaaccacgtgggcaagtacacccccgaggagatcgagaagctgaaggagaagaaggccatcgccgcctgcttcttcttcacccacagacagctgtggacccccaagaagggccacaccttcaagctgtggctgagcaagtactgctgcccccagctgcccaaccagagcaacggcaagaagaagaacgaggagtag

SEQ ID NO: 307876 - DNA, 819 bp, Artificial Sequence
  derived and/or modified sequence
atgagcaccgtggaggaggacagcgacaccgtgaccgtggagaccgtgaacagcgtgaccctgacccaggacaccgagggcaacctgatcctgcactgcccccagaacgaggccgacgagatcgacagcgaggacagcatcgagcccccccacaagagactgtgcctgagcagcgaggacgaccagagcatcgacgacagcaccccctgcatcagcgtggtggccctgcccctgagcgagaacgaccagagcttcgaggtgaccatgaccgccaccaccgaggtggccgacgacgaggtgaccgagggcaccgtgacccagatccagatcctgcagaacgagcagctggacgagatcagccccctgggcaacgaggaggtgagcgccgtgagccaggcctggttcaccaccaaggaggacaaggacagcctgaccaacaagggccacaagtggaagcagggcatgtggagcaaggaggagatcgacatcctgatgaacaacatcgagagatacctgaaggccagaggcatcaaggacgccaccgagatcatcttcgagatgagcaaggacgagagaaaggacttctacagaaccatcgcctggggcctgaacagacccctgttcgccgtgtacagaagagtgctgagaatgtacgacgacagaaaccacgtgggcaagtacacccccgaggagatcgagaagctgaaggagcagctgtggacccccaagaagggccacaccttcaagctgtggctgagcaagtactgctgcccccagctgcccaaccagagcaacggcaagaagaagaacgaggagtag

SEQ ID NO: 307877 - DNA, 111 bp, Artificial Sequence
  derived and/or modified sequence
atgagcaccgtggaggaggacagcgacaccgtgaccgtggagaccgtgaacagcgtgaccctgacccaggacaccgagggcaacctgatcctgcactgcccccagaactag

SEQ ID NO: 307878 - DNA, 582 bp, Artificial Sequence
  derived and/or modified sequence
atgagcaccgtggaggaggacagcgacaccgtgaccgtggagaccgtgaacagcgtgaccctgacccaggacaccgagggcaacctgatcctgcactgcccccagaacgaggccgacgagatcgacagcgaggacagcatcgagcccccccacaagagactgtgcctgagcagcgaggacgaccagagcatcgacgacagcaccccctgcatcagcgtggtggccctgcccctgagcgagaacgaccagagcttcgaggtgaccatgaccgccaccaccgaggtggccgacgacgaggtgaccgagggcaccgtgacccagatccagatcctgcagaacgagcagctggacgagatcagccccctgggcaacgaggaggtgagcgccgtgagccaggcctggttcaccaccaaggaggacaaggacagcctgaccaacaagggccacaagtggaagcagggcatgtggagcaaggaggagatcgacatcctgatgaacaacatcgagagatacctgaaggccagaggcatcaaggacgccaccgagatcatcttcgagatgagcaaggacgagagaaagtag

SEQ ID NO: 307879 - DNA, 444 bp, Artificial Sequence
  derived and/or modified sequence
atgagcaccgtggaggaggacagcgacaccgtgaccgtggagaccgtgaacagcgtgaccctgacccaggacaccgagggcaacctgatcctgcactgcccccagaacgaggccgacgagatcgacagcgaggacagcatcgagcccccccacaagagactgtgcctgagcagcgaggacgaccagagcatcgacgacagcaccccctgcatcagcgtggtggccctgcccctgagcgagaacgaccagagcttcgaggtgaccatgaccgccaccaccgaggtggccgacgacgaggtgaccgagggcaccgtgacccagatccagatcctgcagaacgagcagctggacgagatcagccccctgggcaacgaggaggtgagcgccgtgagccaggcctggttcaccaccaaggaggacaaggacagcctgaccaacaagtag

SEQ ID NO: 307880 - DNA, 222 bp, Artificial Sequence
  derived and/or modified sequence
atgagcaccgtggaggaggacagcgacaccgtgaccgtggagaccgtgaacagcgtgaccctgacccaggacaccgagggcaacctgatcctgcactgcccccagaacgaggccgacgagatcgacagcgaggacagcatcgagcccccccacaagagactgtgcctgagcagcgaggacgaccagagcatcgacgacagcaccccctgcatcagcgtgtag

SEQ ID NO: 307881 - DNA, 291 bp, Artificial Sequence
  derived and/or modified sequence
atgagcaccgtggaggaggacagcgacaccgtgaccgtggagaccgtgaacagcgtgaccctgacccaggacaccgagggcaacctgatcctgcactgcccccagaacgaggccgacgagatcgacagcgaggacagcatcgagcccccccacaagagactgtgcctgagcagcgaggacgaccagagcatcgacgacagcaccccctgcatcagcgtggtggccctgcccctgagcgagaacgaccagagcttcgaggtgaccatgaccgccaccaccgaggtggcctag

SEQ ID NO: 307882 - DNA, 171 bp, Artificial Sequence
  derived and/or modified sequence
atgagcaccgtggaggaggacagcgacaccgtgaccgtggagaccgtgaacagcgtgaccctgacccaggacaccgagggcaacctgatcctgcactgcccccagaacgaggccgacgagatcgacagcgaggacagcatcgagcccccccacaagagactgtgcctgtag

SEQ ID NO: 307883 - DNA, 150 bp, Artificial Sequence
  derived and/or modified sequence
atgagcaccgtggaggaggacagcgacaccgtgaccgtggagaccgtgaacagcgtgaccctgacccaggacaccgagggcaacctgatcctgcactgcccccagaacgaggccgacgagatcgacagcgaggacagcatcgagccctag

SEQ ID NO: 307884 - DNA, 330 bp, Artificial Sequence
  derived and/or modified sequence
atgagcaccgtggaggaggacagcgacaccgtgaccgtggagaccgtgaacagcgtgaccctgacccaggacaccgagggcaacctgatcctgcactgcccccagaacgaggccgacgagatcgacagcgaggacagcatcgagcccccccacaagagactgtgcctgagcagcgaggacgaccagagcatcgacgacagcaccccctgcatcagcgtggtggccctgcccctgagcgagaacgaccagagcttcgaggtgaccatgaccgccaccaccgaggtggccgacgacgaggtgaccgagggcaccgtgacccagatccagtag

SEQ ID NO: 307885 - DNA, 276 bp, Artificial Sequence
  derived and/or modified sequence
atgagcaccgtggaggaggacagcgacaccgtgaccgtggagaccgtgaacagcgtgaccctgacccaggacaccgagggcaacctgatcctgcactgcccccagaacgaggccgacgagatcgacagcgaggacagcatcgagcccccccacaagagactgtgcctgagcagcgaggacgaccagagcatcgacgacagcaccccctgcatcagcgtggtggccctgcccctgagcgagaacgaccagagcttcgaggtgaccatgaccgcctag

SEQ ID NO: 307886 - DNA, 1184 bp, Artificial Sequence
  derived and/or modified sequence
agcgggacagacgagcgggaggggcagcgtgcggggagctgggggcggggcgcggccgcagctccgtttccggtggctcgtcgcgctcgctcactccagctgcagccactctcgcccgtggctgcttcctccatcctggtattttttggagcttccatcctggttcttccaaagtgcccggacccaaaacaggaaagtgttgcggagataggaacatgggagagaaacaatctgggtaacatgaaagtgatgctggttgctaagggaaggcaacttgattctgtgggaagggctgtagctgatccatccgttgtctagatttgagtatgagcacagtggaagaggattctgacacagtaacagtagaaactgtgaactctgtgactttgactcaggacacagaagggaatctcattcttcactgccctcagaatgaagcggatgaaatagactcagaagatagtattgaacctccacataaaaggctttgtttgtcctctgaggatgatcagagtattgatgattctactccttgcatatcagttgttgcacttccactttcagaaaatgatcagagctttgaagtgaccatgactgcaaccacagaagtagcagatgatgaggttactgaggggactgtgacacagatacagattttgcagaatgagcaactagatgaaatatctcccttgggtaacgaggaagtttcagcagttagccaagcatggtttacaactaaagaagataaggattctctgactaataaaggacataaatggaagcaggggatgtggtccaaggaagaaattgatattttgatgaacaatattgaacgctatcttaaggcacgcggaataaaagatgctacagaaatcatctttgagatgtcaaaagacgaaagaaaagatttctacaggactatagcatggggtctgaaccggcctttgtttgcagtttatagaagagtgcttcgcatgtatgatgacagaaaccatgtgggaaaatatacacctgaagaaattgagaagctcaaggagaaaaaggcaattgctgcctgtttttttttcacccacagacaactgtggaccccaaaaaaaggccacactttcaaactttggctctcaaagtattgctgcccacaacttccaaaccagtcaaatgggaagaagaagaatgaagaataa

SEQ ID NO: 307887 - DNA, 568 bp, Artificial Sequence
  derived and/or modified sequence
gctcgtcgcgctcgctcactccagctgcagccactctcgcccgtggctgcttcctccatcctggtattttttggagcttccatcctggttcttccaaagtgcccggacccaaaacaggaattgataggctcaccccaaaatatgcttttggggactgatttagcacctgcatattctgcgtgaatctctttaattggttgcagttgagctaatggtggagccaaaatgctattgccctgtcttcatcaacatttaatcaagtgttgcggagataggaacatgggagagaaacaatctgggtaacatgaaagtgatgctggttgctaagggaaggcaacttgattctgtgggaagggctgtagctgatccatccgttgtctagaagcggatgaaatagactcagaagatagtattgaacctccacataaaaggctttgtttgtcctctgaggatgatcagagtattgatgattctactccttgcatatcagttgttgcacttccactttcagaaaatgatcagagctttgaagtgaccatgactgcaaccacagaagtagcagatgatg

SEQ ID NO: 307888 - DNA, 524 bp, Artificial Sequence
  derived and/or modified sequence
aaagcacaaaaaccagcctgattgtatctggaaaaaaccattatgttacagttgataggctcaccccaaaatatgcttttggggactgatttagcacctgcatattctgcgtgaatctctttaattggttgcagttgagctaatggtggagccaaaatgctattgccctgtcttcatcaacatttaatcaagaacgtttgtctgcctgatgagagccacttgggttaagaaactacctgtgaatagtcatcatttctgtccttcattggggaatacttttagagagtgttgcggagataggaacatgggagagaaacaatctgggtaacatgaaagtgatgctggttgctaagggaaggcaacttgattctgtgggaagggctgtagctgatccatccgttgtctagatttgagtatgagcacagtggaagaggattctgacacagtaacagtagaaactgtgaactctgtgactttgactcaggacacagaagggaatctcattcttcactgccctcagaatg

SEQ ID NO: 307889 - DNA, 845 bp, Artificial Sequence
  derived and/or modified sequence
aagaattctggttttgtcttactcttccagatgagatatcacagaggcttgggcctagattgtcatcagcatactgctatactattcgtttgttcttattaagccttattgtgtgtaatgctgttactttttcagagtgttgcggagataggaacatgggagagaaacaatctgggtaacatgaaagtgatgctggttgctaagggaaggcaacttgattctgtgggaagggctgtagctgatccatccgttgtctagatttgagtatgagcacagtggaagaggattctgacacagtaacagtagaaactgtgaactctgtgactttgactcaggacacagaagggaatctcattcttcactgccctcagaatgaagcggatgaaatagactcagaagatagtattgaacctccacataaaaggctttgtttgtcctctgaggatgatcagagtattgatgattctactccttgcatatcagttgttgcacttccactttcagaaaatgatcagagctttgaagtgaccatgactgcaaccacagaagtagcagatgatgaggttactgaggggactgtgacacagatacagattttgcagaatgagcaactagatgaaatatctcccttgggtaacgaggaagtttcagcagttagccaagcatggtttacaactaaagaagataaggattctctgactaataaaggacataaatggaagcaggggatgtggtccaaggaagaaattgatattttgatgaacaatattgaacgctatcttaaggcacgcggaataaaagatgctacagaaatcatctttgagatgtcaaaagacgaaagaaaa

SEQ ID NO: 307890 - DNA, 553 bp, Artificial Sequence
  derived and/or modified sequence
actccagctgcagccactctcgcccgtggctgcttcctccatcctggtattttttggagcttccatcctggttcttccaaagtgcccggacccaaaacaggaaatttgagtatgagcacagtggaagaggattctgacacagtaacagtagaaactgtgaactctgtgactttgactcaggacacagaagggaatctcattcttcactgccctcagaatgaagcggatgaaatagactcagaagatagtattgaacctccacataaaaggctttgtttgtcctctgaggatgatcagagtattgatgattctactccttgcatatcagttgttgcacttccactttcagaaaatgatcagagctttgaagtgaccatgactgcaaccacagaagtagcagatgatgaggttactgaggggactgtgacacagatacagattttgcagaatgagcaactagatgaaatatctcccttgggtaacgaggaagtttcagcagttagccaagcatggtttacaactaaagaagataaggattctctgactaataaag

SEQ ID NO: 307891 - DNA, 532 bp, Artificial Sequence
  derived and/or modified sequence
ttgataggctcaccccaaaatatgcttttggggactgatttagcacctgcatattctgcgtgaatctctttaattggttgcagttgagctaatggtggagccaaaatgctattgccctgtcttcatcaacatttaatcactcctttatgtctccaaatgatacaagaagacccgagaaagtgagtgttgcggagataggaacatgggagagaaacaatctgggtaacatgaaagtgatgctggttgctaagggaaggcaacttgattctgtgggaagggctgtagctgatccatccgttgtctagatttgagtatgagcacagtggaagaggattctgacacagtaacagtagaaactgtgaactctgtgactttgactcaggacacagaagggaatctcattcttcactgccctcagaatgaagcggatgaaatagactcagaagatagtattgaacctccacataaaaggctttgtttgtcctctgaggatgatcagagtattgatgattctactccttgcatatcagtt

SEQ ID NO: 307892 - DNA, 581 bp, Artificial Sequence
  derived and/or modified sequence
gctgcccgctagctcccgccggctggcgcaagctgtcggcgccggggcactgcgggcggggtcggagcctggccttcctgacgttgcagctgccgtccccgcacgttccggccagggcctccctcttagggccgggcggtgcccgtggctcaggctgcagaagtgttgcggagataggaacatgggagagaaacaatctgggtaacatgaaagtgatgctggttgctaagggaaggcaacttgattctgtgggaagggctgtagctgatccatccgttgtctagatttgagtatgagcacagtggaagaggattctgacacagtaacagtagaaactgtgaactctgtgactttgactcaggacacagaagggaatctcattcttcactgccctcagaatgaagcggatgaaatagactcagaagatagtattgaacctccacataaaaggctttgtttgtcctctgaggatgatcagagtattgatgattctactccttgcatatcagttgttgcacttccactttcagaaaatgatcagagctttgaagtgaccatgactgcaaccacagaagtagcag

SEQ ID NO: 307893 - DNA, 572 bp, Artificial Sequence
  derived and/or modified sequence
actccagctgcagccactctcgcccgtggctgcttcctccatcctggtattttttggagcttccatcctggttcttccaaagtgcccggacccaaaacaggaaaaagcacaaaaaccagcctgattgtatctggaaaaaaccattatgttacagttgataggctcaccccaaaatatgcttttggggactgatttagcacctgcatattctgcgtgaatctctttaattggttgcagttgagctaatggtggagccaaaatgctattgccctgtcttcatcaacatttaatcaagtgttgcggagataggaacatgggagagaaacaatctgggtaacatgaaagtgatgctggttgctaagggaaggcaacttgattctgtgggaagggctgtagctgatccatccgttgtctagatttgagtatgagcacagtggaagaggattctgacacagtaacagtagaaactgtgaactctgtgactttgactcaggacacagaagggaatctcattcttcactgccctcagaatgaagcggatgaaatagactcagaagatagtattgaacctc

SEQ ID NO: 307894 - DNA, 700 bp, Artificial Sequence
  derived and/or modified sequence
actccagctgcagccactctcgcccgtggctgcttcctccatcctggtattttttggagcttccatcctggttcttccaaagtgcccggacccaaaacaggaattgataggctcaccccaaaatatgcttttggggactgatttagcacctgcatattctgcgtgaatctctttaattggttgcagttgagctaatggtggagccaaaatgctattgccctgtcttcatcaacatttaatcaagtgttgcggagataggaacatgggagagaaacaatctgggtaacatgaaagtgatgctggttgctaagggaaggcaacttgattctgtgggaagggctgtagctgatccatccgttgtctagatttgagtatgagcacagtggaagaggattctgacacagtaacagtagaaactgtgaactctgtgactttgactcaggacacagaagggaatctcattcttcactgccctcagaatgaagcggatgaaatagactcagaagatagtattgaacctccacataaaaggctttgtttgtcctctgaggatgatcagagtattgatgattctactccttgcatatcagttgttgcacttccactttcagaaaatgatcagagctttgaagtgaccatgactgcaaccacagaagtagcagatgatgaggttactgaggggactgtgacacagatacag

SEQ ID NO: 307895 - DNA, 585 bp, Artificial Sequence
  derived and/or modified sequence
cactccagctgcagccactctcgcccgtggctgcttcctccatcctggtattttttggagcttccatcctggttcttccaaagtgcccggacccaaaacaggaaagtgttgcggagataggaacatgggagagaaacaatctgggtaacatgaaagtgatgctggttgctaagggaaggcaacttgattctgtgggaagggctgtagctgatccatccgttgtctagccatgagatgctatattctgagactagttattccatctgtctgaacaagaggaaaataatatttgtgtaaaatagcagatttgagtatgagcacagtggaagaggattctgacacagtaacagtagaaactgtgaactctgtgactttgactcaggacacagaagggaatctcattcttcactgccctcagaatgaagcggatgaaatagactcagaagatagtattgaacctccacataaaaggctttgtttgtcctctgaggatgatcagagtattgatgattctactccttgcatatcagttgttgcacttccactttcagaaaatgatcagagctttgaagtgaccatgactgc

SEQ ID NO: 307896 - DNA, 858 bp, Artificial Sequence
  derived and/or modified sequence
atgtccacggtggaagaagatagcgatactgttacagtcgaaactgttaacagtgtcaccctaacacaggatacagaaggtaacctaattcttcattgccctcaaaatgaagctgatgagatcgattccgaagattccatcgaacccccacacaagaggctgtgtctatctagtgaagatgatcaatcaattgacgatagtacaccttgcatcagtgtggtagccctcccactttctgaaaacgaccaatcattcgaggttaccatgactgccaccacggaggtggcagatgatgaagtgacagaaggtaccgtgacccaaatacagattcttcagaatgagcagctggacgagattagccccctgggtaacgaggaagtcagtgctgtgagtcaagcttggtttaccacgaaggaggataaggactctctgacaaacaagggccataaatggaagcaggggatgtggtctaaagaggaaatcgacatcctcatgaacaatatcgaacgatacctgaaggctcgcggtatcaaagacgctacagaaataatttttgagatgagcaaggatgaacgcaaagatttctatcggacaatagcctggggcctgaatagacctctgttcgcagtgtaccgacgcgtactgcgtatgtatgatgatcgcaatcacgtcggaaagtatacacccgaagagattgagaaactgaaagagaaaaaggccattgccgcttgtttctttttcacccatcggcagctgtggactccaaagaaaggccatacctttaagctgtggctttccaagtactgctgcccacagttgccaaatcaatccaacgggaagaaaaagaacgaagagtag

SEQ ID NO: 307897 - DNA, 819 bp, Artificial Sequence
  derived and/or modified sequence
atgtcaaccgttgaggaggatagtgacacagtcaccgtagagacagtgaactccgtgacgctgactcaagatacagaggggaatctaatcttgcattgtccgcagaacgaggctgacgaaattgactccgaagactctattgaacccccacacaaaagattgtgtctatcctctgaggatgaccagagcatcgatgacagcactccgtgcatttccgtggtggctctgcccctgagtgaaaatgatcagtccttcgaggtgacaatgaccgcgaccacagaagtggccgacgatgaggtcacagagggtacagtgacgcagatacagatcctgcaaaacgagcagctggatgagatcagccccctgggaaacgaggaagtgtccgccgtgtcccaggcgtggttcacaacaaaagaggacaaggattccctcacaaacaagggtcataagtggaaacagggtatgtggagtaaagaagaaattgatatactcatgaacaacatcgagcgatatttaaaagcgagaggaataaaggacgccacagagataatcttcgagatgtcaaaagacgaaaggaaggatttctatcgcacaattgcttggggcttaaataggccactgttcgccgtatatcgtagagttttgcggatgtatgacgaccgcaaccacgtgggtaagtacactcctgaggagattgagaagctcaaagagcagctgtggacgcccaagaaaggccacacgtttaaactctggctgtccaagtattgttgtccccagctccctaatcaatctaatggcaaaaagaagaatgaagaatag

SEQ ID NO: 307898 - DNA, 111 bp, Artificial Sequence
  derived and/or modified sequence
atgtcaacagttgaggaggacagcgacacggtgacagtggagaccgtaaacagtgtgactctgacccaggacactgagggcaacttaatactgcattgtcctcagaattag

SEQ ID NO: 307899 - DNA, 111 bp, Artificial Sequence
  derived and/or modified sequence
atgtctaccgtggaagaggactctgacaccgtcaccgttgaaacagttaattctgtgacactgactcaggatacagaagggaacctcatactccattgtccccagaattag

SEQ ID NO: 307900 - DNA, 582 bp, Artificial Sequence
  derived and/or modified sequence
atgagcactgttgaagaggattctgatacggtgaccgtcgagaccgtcaatagtgtaacactgactcaggacactgaaggaaacctgatcctccattgcccccagaacgaagccgatgagatcgattcagaggactcaatcgagcccccgcacaagagactctgtctgagcagcgaggacgaccagagcatcgacgacagcaccccttgcatttccgtggttgcactgcccctttcggaaaatgaccagtctttcgaggtgacgatgaccgcaacaacagaggtggccgacgacgaggtaaccgagggcactgttactcagatccagatcctccagaacgagcaattagacgagatcagtccgctaggcaatgaggaagtatcagccgtgtcacaggcttggtttactacgaaggaggataaggatagcttgacaaataaaggacacaaatggaagcagggaatgtggtccaaggaagagattgacattcttatgaacaacatcgagagataccttaaagccaggggaataaaagacgccaccgagatcatcttcgaaatgtccaaggacgaacgcaagtag

SEQ ID NO: 307901 - DNA, 444 bp, Artificial Sequence
  derived and/or modified sequence
atgagcacggtagaggaggactccgacaccgtgacggtagagacagtgaactctgtgacgctaacccaggatacagaagggaatctgatacttcattgccctcagaacgaagctgacgaaatcgatagcgaggactctatcgagccccctcataaacggttgtgtctgagcagcgaagacgaccagtccattgatgacagcaccccatgcatcagcgtggttgcactgccactctctgaaaacgatcagtcattcgaggtgacgatgacagctacaactgaggttgcagatgacgaagtgacggagggaacagtcacacagattcaaatccttcagaatgaacaactggatgaaatctcccctctgggcaacgaagaagtgagtgctgtgagccaggcttggttcactactaaggaggataaggatagcctgacgaataagtag

SEQ ID NO: 307902 - DNA, 222 bp, Artificial Sequence
  derived and/or modified sequence
atgagcaccgtggaggaagattccgatacagtgacagtcgaaactgtgaattccgtcacgctcacgcaagacaccgaaggcaacttgattctgcattgccctcagaatgaggctgacgagattgactccgaagattctattgagcctccccacaagaggctttgcctgtcctccgaggacgatcagagcatcgatgactccaccccgtgtatttccgtctag

SEQ ID NO: 307903 - DNA, 291 bp, Artificial Sequence
  derived and/or modified sequence
atgtcgacagtcgaggaagactctgacactgtgaccgtcgagaccgtcaacagtgttacactcacccaggacaccgagggcaatctgatactacattgtcctcaaaacgaagccgatgagatcgattctgaggactcgatcgaacccccgcacaagcgcttgtgcctttctagtgaagacgaccagagcatcgacgattcaacaccttgcatttccgttgtggccttgcccctcagcgaaaacgaccagagcttcgaggtcactatgactgctaccactgaggtcgcctag

SEQ ID NO: 307904 - DNA, 171 bp, Artificial Sequence
  derived and/or modified sequence
atgtcaacagtcgaggaggatagtgataccgtcacagtcgaaaccgttaactcggtgaccttgactcaggatacggagggaaatcttatactgcactgtcctcagaatgaggctgacgaaatcgactcagaggacagtatcgaacctcctcacaagcggctctgcttatag

SEQ ID NO: 307905 - DNA, 858 bp, Artificial Sequence
  derived and/or modified sequence
atgtcaacagtggaggaggattctgataccgtgacagtcgagaccgtgaattctgtaactttgacacaggatactgaaggtaacctcatcctgcactgccctcagaacgaggctgacgagatcgattccgaagattcgatcgagcctccacataaacgcttgtgcctatcatcagaggacgaccagagcattgatgacagcacaccctgtatttccgtggttgctctgccactgtccgagaacgaccagagctttgaagtgacaatgaccgccactacagaagtcgccgatgatgaggttacggagggcacagtgacacagatccagatattgcagaatgagcaactggacgagattagtcccctgggaaatgaggaagtctctgccgtgtcacaggcctggtttacgacaaaggaggacaaagatagtctgaccaacaaagggcacaagtggaagcagggaatgtggagcaaggaagaaatcgatattttgatgaataatatcgaacggtacttaaaggctcgcggcatcaaggacgccacagaaatcatcttcgagatgtccaaagatgaacggaaagatttttatcgtacgatcgcctgggggctcaaccgtccgctctttgcagtatacaggcgcgtgctgcgaatgtacgatgaccggaaccacgtaggaaaatatactcctgaagaaatagagaagctaaaggagaaaaaagctattgcagcttgttttttcttcacacatcgacaactgtggaccccaaagaagggccacactttcaaactgtggctgtctaaatattgctgtcctcagctccccaaccagtctaacggcaaaaagaaaaatgaagaatag

SEQ ID NO: 307906 - DNA, 150 bp, Artificial Sequence
  derived and/or modified sequence
atgtctacagtcgaagaggactctgacaccgttaccgtggaaaccgtcaatagcgtcacccttacgcaagataccgaagggaacctgattctgcactgcccacagaatgaggcggacgaaattgacagcgaagactcaattgagccctag

SEQ ID NO: 307907 - DNA, 330 bp, Artificial Sequence
  derived and/or modified sequence
atgtctaccgttgaagaggacagcgacaccgtgactgtggagacggtgaatagcgtgacgttgacacaggatacagagggcaatctcattcttcactgccctcagaacgaagcagacgaaatcgactccgaagactcaatagaacctccccacaaacgactctgcctaagtagcgaagacgaccagagcattgatgacagcaccccatgtatcagcgtggttgcgctgccattaagcgagaatgaccaatccttcgaggtgacaatgacagctacaactgaggtcgccgacgacgaggtgaccgagggtacggtgactcaaattcagtag

SEQ ID NO: 307908 - DNA, 276 bp, Artificial Sequence
  derived and/or modified sequence
atgagcacagtcgaagaagactcggatactgtgacagtagagactgtcaatagcgtgactctgacccaggataccgaggggaatctcatcctgcactgccctcagaatgaggccgacgagatcgactcagaggattcaattgagcccccacataaacgactctgtctatcatcagaagatgaccagagcatcgacgattccacaccttgcattagcgtcgtcgccctgcccctgtccgaaaacgaccaatccttcgaagttaccatgacagcctag

SEQ ID NO: 307909 - DNA, 858 bp, Artificial Sequence
  derived and/or modified sequence
atgagcacagtggaggaggacagcgacacagtgacagtggagaccgtgaacagcgtgaccctgacccaggacacagagggcaacctgatcctgcactgcccccagaatgaagcagatgaaattgattctgaggacagcattgagcccccccacaagaggctgtgcctgagcagtgaagatgaccagagcattgatgacagcaccccctgcatctctgtggtggccctgcccctgtctgaaaatgaccagagctttgaggtgaccatgacagccaccacagaggtggctgatgatgaggtgacagagggcaccgtgacccagatccagatcctgcagaatgagcagctggatgagatcagccccctgggcaatgaggaggtgtctgctgtgtcccaggcctggttcaccaccaaggaggacaaggacagcctgaccaacaagggccacaagtggaagcagggcatgtggagcaaggaggagattgacatcctgatgaacaacatcgagcgctacctgaaggcccggggcatcaaggatgccacagagatcatctttgagatgagcaaggatgagaggaaggacttctaccgcaccatcgcctggggcctgaaccggcccctgtttgctgtgtaccgccgggtgctgaggatgtatgatgacagaaatcatgtgggcaagtacaccccagaggagattgagaagctgaaggagaagaaggccatcgccgcctgcttcttcttcacccaccggcagctgtggacccccaagaagggccacaccttcaagctgtggctgagcaagtactgctgcccccagctgcccaaccagagcaatggcaagaagaagaatgaggagtag

SEQ ID NO: 307910 - DNA, 819 bp, Artificial Sequence
  derived and/or modified sequence
atgagcacagtggaggaggacagcgacacagtgacagtggagaccgtgaacagcgtgaccctgacccaggacacagagggcaacctgatcctgcactgcccccagaatgaagcagatgaaattgattctgaggacagcattgagcccccccacaagaggctgtgcctgagcagtgaagatgaccagagcattgatgacagcaccccctgcatctctgtggtggccctgcccctgtctgaaaatgaccagagctttgaggtgaccatgacagccaccacagaggtggctgatgatgaggtgacagagggcaccgtgacccagatccagatcctgcagaatgagcagctggatgagatcagccccctgggcaatgaggaggtgtctgctgtgtcccaggcctggttcaccaccaaggaggacaaggacagcctgaccaacaagggccacaagtggaagcagggcatgtggagcaaggaggagattgacatcctgatgaacaacatcgagcgctacctgaaggcccggggcatcaaggatgccacagagatcatctttgagatgagcaaggatgagaggaaggacttctaccgcaccatcgcctggggcctgaaccggcccctgtttgctgtgtaccgccgggtgctgaggatgtatgatgacagaaatcatgtgggcaagtacaccccagaggagattgagaagctgaaggagcagctgtggacccccaagaagggccacaccttcaagctgtggctgagcaagtactgctgcccccagctgcccaaccagagcaatggcaagaagaagaatgaggagtag

SEQ ID NO: 307911 - DNA, 111 bp, Artificial Sequence
  derived and/or modified sequence
atgagcacagtggaggaggacagcgacacagtgacagtggagaccgtgaacagcgtgaccctgacccaggacacagagggcaacctgatcctgcactgcccccagaactag

SEQ ID NO: 307912 - DNA, 582 bp, Artificial Sequence
  derived and/or modified sequence
atgagcacagtggaggaggacagcgacacagtgacagtggagaccgtgaacagcgtgaccctgacccaggacacagagggcaacctgatcctgcactgcccccagaatgaagcagatgaaattgattctgaggacagcattgagcccccccacaagaggctgtgcctgagcagtgaagatgaccagagcattgatgacagcaccccctgcatctctgtggtggccctgcccctgtctgaaaatgaccagagctttgaggtgaccatgacagccaccacagaggtggctgatgatgaggtgacagagggcaccgtgacccagatccagatcctgcagaatgagcagctggatgagatcagccccctgggcaatgaggaggtgtctgctgtgtcccaggcctggttcaccaccaaggaggacaaggacagcctgaccaacaagggccacaagtggaagcagggcatgtggagcaaggaggagattgacatcctgatgaacaacatcgagcgctacctgaaggcccggggcatcaaggatgccacagagatcatctttgagatgagcaaggatgagaggaagtag

SEQ ID NO: 307913 - DNA, 444 bp, Artificial Sequence
  derived and/or modified sequence
atgagcacagtggaggaggacagcgacacagtgacagtggagaccgtgaacagcgtgaccctgacccaggacacagagggcaacctgatcctgcactgcccccagaatgaagcagatgaaattgattctgaggacagcattgagcccccccacaagaggctgtgcctgagcagtgaagatgaccagagcattgatgacagcaccccctgcatctctgtggtggccctgcccctgtctgaaaatgaccagagctttgaggtgaccatgacagccaccacagaggtggctgatgatgaggtgacagagggcaccgtgacccagatccagatcctgcagaatgagcagctggatgagatcagccccctgggcaatgaggaggtgtctgctgtgtcccaggcctggttcaccaccaaggaggacaaggacagcctgaccaacaagtag

SEQ ID NO: 307914 - DNA, 222 bp, Artificial Sequence
  derived and/or modified sequence
atgagcacagtggaggaggacagcgacacagtgacagtggagaccgtgaacagcgtgaccctgacccaggacacagagggcaacctgatcctgcactgcccccagaatgaagcagatgaaattgattctgaggacagcattgagcccccccacaagaggctgtgcctgagcagtgaagatgaccagagcattgatgacagcaccccctgcatctctgtgtag

SEQ ID NO: 307915 - DNA, 291 bp, Artificial Sequence
  derived and/or modified sequence
atgagcacagtggaggaggacagcgacacagtgacagtggagaccgtgaacagcgtgaccctgacccaggacacagagggcaacctgatcctgcactgcccccagaatgaagcagatgaaattgattctgaggacagcattgagcccccccacaagaggctgtgcctgagcagtgaagatgaccagagcattgatgacagcaccccctgcatctctgtggtggccctgcccctgtctgaaaatgaccagagctttgaggtgaccatgacagccaccacagaggtggcctag

SEQ ID NO: 307916 - DNA, 171 bp, Artificial Sequence
  derived and/or modified sequence
atgagcacagtggaggaggacagcgacacagtgacagtggagaccgtgaacagcgtgaccctgacccaggacacagagggcaacctgatcctgcactgcccccagaatgaagcagatgaaattgattctgaggacagcattgagcccccccacaagaggctgtgcctgtag

SEQ ID NO: 307917 - DNA, 150 bp, Artificial Sequence
  derived and/or modified sequence
atgagcacagtggaggaggacagcgacacagtgacagtggagaccgtgaacagcgtgaccctgacccaggacacagagggcaacctgatcctgcactgcccccagaatgaagcagatgaaattgattctgaggacagcattgagccctag

SEQ ID NO: 307918 - DNA, 330 bp, Artificial Sequence
  derived and/or modified sequence
atgagcacagtggaggaggacagcgacacagtgacagtggagaccgtgaacagcgtgaccctgacccaggacacagagggcaacctgatcctgcactgcccccagaatgaagcagatgaaattgattctgaggacagcattgagcccccccacaagaggctgtgcctgagcagtgaagatgaccagagcattgatgacagcaccccctgcatctctgtggtggccctgcccctgtctgaaaatgaccagagctttgaggtgaccatgacagccaccacagaggtggctgatgatgaggtgacagagggcaccgtgacccagatccagtag

SEQ ID NO: 307919 - DNA, 276 bp, Artificial Sequence
  derived and/or modified sequence
atgagcacagtggaggaggacagcgacacagtgacagtggagaccgtgaacagcgtgaccctgacccaggacacagagggcaacctgatcctgcactgcccccagaatgaagcagatgaaattgattctgaggacagcattgagcccccccacaagaggctgtgcctgagcagtgaagatgaccagagcattgatgacagcaccccctgcatctctgtggtggccctgcccctgtctgaaaatgaccagagctttgaggtgaccatgacagcctag

SEQ ID NO: 307920 - DNA, 858 bp, Artificial Sequence
  derived and/or modified sequence
atgagcaccgtggaggaggacagcgacaccgtgaccgtggagaccgtgaacagcgtgaccttaacgcaggacaccgaaggaaacctgatcctgcattgccctcagaacgaagctgacgaaatcgattccgaagattccattgaacccccccataagcgattatgcctttcctcagaagacgatcaatcgattgacgattctacgccctgcatcagcgtggtggctttaccactcagtgaaaatgatcagtcatttgaggtgactatgacagcaacaaccgaagtcgctgacgatgaggtcaccgaaggtaccgtgactcaaattcagatactgcagaatgagcagttagatgagatttcgcccctggggaatgaggaggtatctgctgtctctcaggcctggtttaccaccaaagaagacaaggactctctgaccaataagggtcataaatggaaacagggaatgtggagtaaggaagagatcgacatactgatgaataatattgaacgctacctgaaggcgaggggtatcaaggatgctacggaaatcatttttgaaatgagtaaggatgaacgtaaggacttctaccggaccatcgcatgggggctgaatcgccccctgtttgccgtctacagacgagtactgcgtatgtatgatgacagaaaccacgtgggaaagtatactcctgaggaaattgagaagctgaaggagaaaaaagccatcgccgcctgcttcttcttcacacatagacagctctggaccccaaagaaaggacatacctttaaactctggttaagtaaatactgctgtccacagctgcctaaccagtcaaatggcaaaaaaaagaatgaggaatag

SEQ ID NO: 307921 - DNA, 819 bp, Artificial Sequence
  derived and/or modified sequence
atgagcaccgtggaggaggacagcgacaccgtgaccgtggagaccgtaaatagcgtgactctgacccaggatactgaagggaacctcatcctgcattgtcctcagaacgaggctgatgagatagattctgaagattccatagaaccacctcataagcgactgtgtctttcttccgaggatgatcagagtatcgacgacagtacgccttgtatttccgtggttgcattgccactgagcgagaacgaccagtcgttcgaggtcaccatgaccgccacaacagaggttgcggatgacgaggtcaccgagggaacggtgactcagatccaaatcctgcagaatgagcagctggacgaaatcagccctctgggaaacgaagaggtgtcagccgtaagtcaagcttggttcaccactaaggaggacaaggactcactgactaacaagggacataagtggaaacagggcatgtggtccaaagaggaaatcgacatcctgatgaataacattgagaggtacctgaaggccagaggaataaaggacgcaactgagataatattcgagatgtccaaagacgagcggaaagacttttaccgaacgatcgcttgggggctgaacagaccgctgtttgcagtgtaccgccgcgtcctcaggatgtatgatgatagaaatcatgtaggtaaatacactcccgaggaaatcgagaaattgaaagagcagctctggacgccaaagaagggccatacattcaaactttggctgagtaaatattgctgtccccaattgccaaaccaatcaaatgggaagaaaaaaaacgaggaatag

SEQ ID NO: 307922 - DNA, 111 bp, Artificial Sequence
  derived and/or modified sequence
atgagcaccgtggaggaggacagcgacaccgtgaccgtggagaccgtgaattccgtcacacttactcaggacaccgagggcaacctgattctccactgccctcagaactag

SEQ ID NO: 307923 - DNA, 111 bp, Artificial Sequence
  derived and/or modified sequence
atgagcaccgtggaggaggacagcgacaccgtgaccgtggagaccgtcaactctgtgacactgacacaggacactgaagggaatctgatcttacactgccctcaaaattag

SEQ ID NO: 307924 - DNA, 582 bp, Artificial Sequence
  derived and/or modified sequence
atgagcaccgtggaggaggacagcgacaccgtgaccgtggagaccgttaattccgtgacccttacacaagacaccgagggaaacctgatcctgcattgcccgcaaaacgaggcagatgagattgattctgaggactctatcgagccaccccacaagaggctgtgtttatcttcagaggacgaccagtctattgacgattctaccccttgtatctccgtggtggctcttcctctgtcagagaatgatcaaagtttcgaggtaacaatgacagctacaacagaggtggcagacgacgaggtgaccgagggaaccgtaacccagatccagattttacagaacgaacaactggatgagatcagtccccttggtaacgaggaggtctctgccgtgtcgcaagcttggtttaccaccaaggaggacaaggatagcctgaccaacaaaggccataagtggaaacagggcatgtggtccaaggaggaaattgacattctgatgaacaatatcgaacggtaccttaaagccaggggaatcaaggacgcaacagagatcattttcgagatgagtaaggatgaacgaaaatag

SEQ ID NO: 307925 - DNA, 444 bp, Artificial Sequence
  derived and/or modified sequence
atgagcaccgtggaggaggacagcgacaccgtgaccgtggagaccgttaactctgtgacattgacccaggacaccgagggtaacctgattctgcattgcccacaaaatgaggccgacgaaattgattccgaggatagcatcgaaccccctcacaaacgactgtgcctctcctctgaggacgaccagagcatagacgactccaccccttgtatctccgtggtagcacttccactgtccgagaacgaccagtccttcgaggtcacaatgaccgccacaacggaggtcgcagacgacgaagtgaccgagggaacagtaacacagatccagatacttcagaatgaacagcttgatgaaattagccccctcggcaacgaggaggtgtctgctgtatctcaagcttggttcaccaccaaggaggacaaagactccttgacaaataagtag

SEQ ID NO: 307926 - DNA, 222 bp, Artificial Sequence
  derived and/or modified sequence
atgagcaccgtggaggaggacagcgacaccgtgaccgtggagaccgtgaatagtgtgacccttacccaagataccgagggtaacttgattctgcactgtccccaaaacgaggccgacgagatcgattccgaagactcgattgagcctccccacaagcgattgtgcttatcatctgaagacgatcagagcatcgacgattctacgccttgcatcagcgtctag

SEQ ID NO: 307927 - DNA, 291 bp, Artificial Sequence
  derived and/or modified sequence
atgagcaccgtggaggaggacagcgacaccgtgaccgtggagaccgtgaacagcgtaactctgactcaggataccgaaggaaatctcatattgcactgtcctcaaaacgaagccgatgagatcgattccgaagactctatcgagcctccccataagcgtctgtgcctgtctagcgaggatgatcagtctatcgacgactcaacgccttgtatctcagttgtggccctgccactcagcgaaaacgatcagagtttcgaggtgacgatgacggccaccactgaagtggcgtag

SEQ ID NO: 307928 - DNA, 171 bp, Artificial Sequence
  derived and/or modified sequence
atgagcaccgtggaggaggacagcgacaccgtgaccgtggagaccgttaactccgtgactctgacccaagataccgagggaaatctgattctacattgtccccagaacgaggcggatgagatcgacagtgaggactccatcgagcctccacataagagactttgtctttag

SEQ ID NO: 307929 - DNA, 858 bp, Artificial Sequence
  derived and/or modified sequence
atgagcaccgtggaggaggacagcgacaccgtgaccgtggagaccgttaactctgttaccctgacccaggatactgagggtaatctgatcctgcattgtccacaaaacgaggccgacgaaatcgatagcgaggatagcatcgaaccaccccacaagagactctgtttatcaagtgaagacgatcagagcatcgacgacagtacaccatgtataagtgttgtggctttgcccctgtcagagaacgatcaatcctttgaggtgacaatgaccgcaaccactgaagttgccgacgacgaagtaactgagggaaccgtgacacaaatccagattctccaaaacgagcaactagatgagatatcaccgcttgggaacgaggaagtgtctgcggtgagtcaggcgtggttcaccacaaaggaggacaaggattccctgaccaataaaggtcataagtggaaacaggggatgtggagcaaagaggagatagacatcctcatgaataacattgagcggtatctgaaagcaagaggcataaaggatgccacagaaattatctttgaaatgagcaaggatgagcggaaggacttctacagaactatagcgtggggtctaaacagaccactttttgctgtttatcggcgtgtgctcagaatgtatgacgataggaaccatgtgggaaagtatacaccagaggagatcgagaagctgaaggagaaaaaggccattgcggcctgttttttcttcacgcatcgacagctatggacgcctaagaagggacataccttcaagctctggctgtctaaatattgctgtccacaactgcccaaccagagcaatggaaagaaaaagaacgaagagtag

SEQ ID NO: 307930 - DNA, 150 bp, Artificial Sequence
  derived and/or modified sequence
atgagcaccgtggaggaggacagcgacaccgtgaccgtggagaccgttaactctgtgaccctgactcaggacaccgaagggaacctgattctccactgtccacagaacgaggctgacgagattgactcagaagattccattgaaccatag

SEQ ID NO: 307931 - DNA, 330 bp, Artificial Sequence
  derived and/or modified sequence
atgagcaccgtggaggaggacagcgacaccgtgaccgtggagaccgtgaatagcgtgacactgacccaagacaccgagggaaacctgattctgcattgtccacagaacgaggcggatgaaatcgattccgaggactctatcgagcccccccacaagcgcctgtgcttgtcaagtgaggacgaccagtccattgatgactcaactccatgcatatccgtcgtggccctgcctctgagcgaaaacgatcaatcttttgaggtcactatgactgccactaccgaggtggcagacgacgaagtgacagaaggaaccgtcacacagatccagtag

SEQ ID NO: 307932 - DNA, 276 bp, Artificial Sequence
  derived and/or modified sequence
atgagcaccgtggaggaggacagcgacaccgtgaccgtggagaccgtcaattcagtaacactcactcaggacaccgagggaaacctgatcttacattgtccacagaacgaagcagacgagatcgattcagaggattcaatcgaacctccgcacaagcggctgtgcctctcatcagaggatgatcaaagcatcgacgatagcaccccatgtatctccgtggttgcccttccgctcagcgagaacgatcagagtttcgaggtcactatgacggcctag

SEQ ID NO: 307933 - DNA, 858 bp, Artificial Sequence
  derived and/or modified sequence
atgagtacagttgaagaagactctgacacagtgactgtggaaacagtaaacagcgtgaccctcacacaggacaccgaaggaaatctgattctgcactgtccacagaacgaagccgatgagatcgattctgaggacagtatagaaccccctcacaaacgactctgtctttccagcgaggacgaccaaagcatcgatgattctactccatgtatcagcgtggtcgccctaccactgtccgagaacgaccagagtttcgaagttaccatgaccgcgacaacagaagtggcagatgacgaggtaacagaaggcaccgtgacccaaatccagatacttcaaaatgaacaactcgacgaaatcagtccactcggcaacgaagaggtgtcagccgtgtcccaggcctggttcaccactaaggaagataaggacagcctcactaataagggccacaagtggaagcagggaatgtggagtaaagaggagatagacatcctgatgaataatatcgagcggtacctcaaagctcggggtatcaaagatgctacggaaattatattcgagatgtctaaggatgagaggaaggacttttacaggacaattgcatggggccttaaccgcccactgtttgccgtgtacagaagagtgcttcgcatgtacgacgaccggaaccacgtgggaaaatacactccggaggaaatcgaaaaactaaaagagaaaaaggccatcgcagcttgttttttctttactcacagacagctctggactccaaaaaaagggcacacttttaagctctggctgagcaaatactgctgtcctcagctccctaatcagtccaatggaaagaagaaaaacgaggaatag

SEQ ID NO: 307934 - DNA, 819 bp, Artificial Sequence
  derived and/or modified sequence
atgagcaccgttgaagaagatagtgataccgttacagtcgagaccgttaatagcgtgaccctcacacaggatacagaaggtaatttgatattgcactgtccgcagaatgaggcggatgagatagatagcgaggattccatcgagcctcctcataaacggctctgcctaagttctgaggacgatcagtctattgacgactccacaccttgtatttctgttgtagccctccctttgtcagaaaatgaccagagcttcgaggtaactatgaccgccaccactgaggttgccgacgacgaagtgacagagggcactgtcacacagatacagatcctgcagaatgagcagcttgatgagatcagccccttgggcaacgaagaggtgagcgccgtctcccaagcctggttcacgactaaggaggataaggacagcctgacgaacaaaggccacaagtggaaacagggaatgtggagcaaggaagagatcgacatcctgatgaataatatcgaacggtacctgaaggcacgcggaattaaagatgccactgagatcatatttgagatgtccaaggatgaaagaaaggacttctaccggacaattgcatggggtctgaaccgacctctattcgctgtgtaccggcgagtcctgcgaatgtacgatgaccgtaatcacgtaggcaaatacacacccgaggaaatcgagaagctgaaggagcagctttggacgcccaagaaggggcacacattcaaactctggctctccaagtactgttgccctcaattacctaaccagagcaatggtaagaagaaaaacgaagagtag

SEQ ID NO: 307935 - DNA, 111 bp, Artificial Sequence
  derived and/or modified sequence
atgagcaccgtggaggaggatagcgacactgtgacagtggaaacagtgaactctgtgactttaactcaggacacagagggtaacctcattttacactgccctcaaaactag

SEQ ID NO: 307936 - DNA, 111 bp, Artificial Sequence
  derived and/or modified sequence
atgagcaccgtggaggaggatagcgacaccgtcactgtggagacggttaatagcgtcaccctgacccaggacaccgagggaaacctgatcctccattgcccacagaattag

SEQ ID NO: 307937 - DNA, 582 bp, Artificial Sequence
  derived and/or modified sequence
atgtcaacagtggaggaagatagcgacaccgtgaccgtggaaacagtcaatagcgtgacactgactcaggatacagaggggaatttaatactccattgccctcagaacgaggcggatgagattgattcagaggatagtattgaaccacctcataagcggctatgcttgtcctctgaagatgatcagagcatagatgactctaccccatgtatatctgtggtggctctgcccctgtcggagaacgatcaatcttttgaagtgactatgactgcaactacagaagtcgccgatgacgaggtgaccgaaggcaccgtgactcagatccagatcctgcagaatgagcaactcgacgaaatcagccctctgggtaacgaagaggtgtctgctgtctcacaagcatggtttaccaccaaagaggataaggattctctgaccaataaaggacataaatggaaacagggaatgtggagtaaagaggaaatcgatatactgatgaacaacattgagcgctacctgaaggctaggggcatcaaggacgctacggagataatttttgaaatgtcaaaagatgaacggaagtag

SEQ ID NO: 307938 - DNA, 444 bp, Artificial Sequence
  derived and/or modified sequence
atgtcaacagtcgaggaagattccgatacagttacagtcgagactgtgaactctgtgacgttgactcaggatacggagggtaacctaattctccactgccctcaaaacgaagcagacgagattgatagtgaagactccatcgaaccccctcacaaacgtctatgcttgagctctgaggacgatcagtctattgatgactccaccccctgcatctccgtcgttgcattgccactgagcgagaatgatcaaagctttgaggtgaccatgaccgcaacaacggaagtggctgatgacgaagttaccgagggaactgtaactcagatccagatcctccaaaacgagcagcttgatgagatatccccacttggtaatgaggaggtgtctgcagtgtctcaggcatggttcacaactaaagaggacaaagactcccttacaaacaaatag

SEQ ID NO: 307939 - DNA, 222 bp, Artificial Sequence
  derived and/or modified sequence
atgagcacagtggaagaagactctgataccgttacagtggaaactgttaactcagtgacacttacccaggacactgaggggaatctgatccttcactgcccgcagaacgaagccgatgaaatcgattctgaggactccattgaaccacctcacaagaggctgtgtctgtcgtccgaggacgaccagtccattgacgattccactccatgtatttcagtatag

SEQ ID NO: 307940 - DNA, 291 bp, Artificial Sequence
  derived and/or modified sequence
atgagcaccgttgaggaggatagcgacacagtcaccgtggagacagtcaactctgtcaccctgacccaggacacggaaggtaacctcattctgcattgtcctcaaaacgaggcggatgaaatagacagtgaggattccattgagcccccacacaaacgcttgtgcctgtcatccgaggatgatcagagtattgatgattctacaccctgcataagcgtggtggccctcccgttgtcagagaacgaccagagtttcgaggtgaccatgaccgccaccactgaggttgcgtag

SEQ ID NO: 307941 - DNA, 171 bp, Artificial Sequence
  derived and/or modified sequence
atgagcaccgttgaagaagattctgatactgtgacggtggagaccgtaaactcagttacactgacgcaggatactgaagggaaccttattttacactgccctcagaacgaagcagatgagatcgatagcgaggactccatcgagccacctcacaaacgcctttgcttatag

SEQ ID NO: 307942 - DNA, 858 bp, Artificial Sequence
  derived and/or modified sequence
atgtctaccgtggaggaggacagcgataccgtgacagtggagacagtgaacagcgtcaccctgactcaggatactgaaggcaacctgatccttcattgcccccaaaacgaggccgatgaaatcgatagcgaagatagcattgagccaccccataagagactttgcctgtcctcagaagacgaccaaagcattgacgacagcaccccctgtattagcgtggtcgctttgcccctcagcgagaatgatcaatcttttgaggtcaccatgacagcaacgaccgaagtggcagatgacgaggttaccgagggaactgtgacccagatacaaattctgcagaacgaacaactcgacgagatctccccactaggaaacgaagaagtaagtgctgtgtcccaggcgtggtttacaacaaaggaggacaaagactccctaacaaacaaaggacataaatggaaacagggcatgtggtctaaggaggagatcgatatcttgatgaacaacatcgagcgatacctgaaggctcggggaataaaggacgcaaccgaaatcatcttcgagatgagtaaggacgagcgcaaggatttctatcgcacaatcgcttgggggctgaaccgtccgttgtttgccgtctatcgtcgcgtgcttcgcatgtacgacgacaggaaccatgttggcaaatatacgcctgaagagatagaaaagctgaaggaaaagaaggcgattgctgcatgcttcttcttcactcaccgacagctgtggaccccgaagaagggacacacattcaagttatggctgagcaaatactgctgcccccaattgccaaaccaatctaacggcaagaagaagaacgaggagtag

SEQ ID NO: 307943 - DNA, 150 bp, Artificial Sequence
  derived and/or modified sequence
atgagtaccgttgaagaggactcagacactgttacggtagagacagtgaacagcgtgacattgactcaggacaccgaggggaacttgatcctgcactgcccccaaaatgaagctgacgagattgactccgaggactccattgagccatag

SEQ ID NO: 307944 - DNA, 330 bp, Artificial Sequence
  derived and/or modified sequence
atgtctactgtcgaggaggatagcgatactgtcacagtggagaccgtgaatagtgtaaccctgactcaggataccgaaggtaatctgatcctgcattgtcctcaaaacgaagccgacgagatcgattcagaggacagcattgagcctcctcacaagagactttgtctatcatctgaagacgatcaaagtattgatgactctaccccttgcattagtgtggtagctctccccctttcagagaacgaccagtcatttgaagtcaccatgaccgctaccactgaagtggccgacgatgaagtcacagagggtacagtgacccagatccagtag

SEQ ID NO: 307945 - DNA, 276 bp, Artificial Sequence
  derived and/or modified sequence
atgtccactgtcgaggaggactccgacaccgttactgtggaaaccgtaaattccgtcacgctaacccaggatactgagggtaacttgatactccactgcccccagaatgaggcagacgagatcgattctgaggactccattgagcctccacacaaaagattgtgcctaagcagtgaagatgaccagtccatcgatgatagtaccccatgcattagcgtcgtcgccttacccctttctgagaatgaccaatcttttgaagtgaccatgactgcttag

SEQ ID NO: 307946 - protein, 147 aa, Artificial Sequence
  derived and/or modified sequence
MILQAHLHSLCLLMLYLATGYGQEGKFSGPLKPMTFSIYEGQEPSQIIFQFKANPPAVTFELTGETDNIFVIEREGLLYYNRALDRETRSTHNLQVAALDANGIIVEGPVPITIKVKDINDNRPTFLQSKYEGSVRQNSRPGKPFLY

SEQ ID NO: 307947 - DNA, 444 bp, Artificial Sequence
  derived and/or modified sequence
atgatccttcaggcccatctgcatagcctctgtcttctgatgctgtacctggctaccgggtacggacaggaaggcaagtttagcgggcccctcaaacccatgacattttctatatacgagggccaagagcccagtcagataatcttccagttcaaggccaacccgcctgctgtcacttttgaattaactggcgagactgacaatatatttgtgatcgagcgagagggactactctactataatagggccctggatcgggaaacacggagcacacataatcttcaagttgccgccttggatgcaaacgggatcatcgtagaaggtcccgtgccgattacaattaaagtgaaggatattaacgacaacagacctaccttcctgcagtctaagtatgaagggtctgtgaggcagaattccagaccaggaaagccttttctctactag

SEQ ID NO: 307948 - DNA, 444 bp, Artificial Sequence
  derived and/or modified sequence
atgatcctgcaggcccacctgcacagcctgtgcctgctgatgctgtacctggccaccggctacggccaggagggcaagttcagcggccccctgaagcccatgaccttcagcatctatgagggccaggagcccagccagatcatcttccagttcaaggccaaccccccagctgtgacctttgagctgactggagaaacagacaacatcttcgtcatcgagcgggagggcctgctgtactacaacagagccctggaccgggagaccaggagcacccacaacctgcaggtggccgccctggatgccaacggcatcatcgtggagggccctgtgcccatcaccatcaaggtgaaggacatcaatgacaaccggcccaccttcctgcagagcaaatatgagggctctgtgcggcagaacagcaggcctgggaagcccttcctgtactag

SEQ ID NO: 307949 - DNA, 444 bp, Artificial Sequence
  derived and/or modified sequence
atgatcctgcaggcccacctgcacagcctgtgcctgctgatgctgtatcttgcaactggatatggccaagaggggaaattcagtgggcctctgaaaccgatgactttctctatctacgaaggccaggagcccagtcagataatttttcagtttaaagcaaacccccccgcggtgacgttcgagctgacaggagagacagataacatattcgttatcgagagagagggccttctgtactataatcgtgctctggatagagagacacgcagcactcacaatcttcaggtagcagccctggacgccaatgggatcattgtggaagggcctgtgccgattaccatcaaggtgaaagacattaacgataatcgacctacattcctgcagtcaaaatatgagggctctgtaagacagaattctcgccccggcaaacctttcctctactag

SEQ ID NO: 307950 - DNA, 444 bp, Artificial Sequence
  derived and/or modified sequence
atgatcctgcaggcgcacttacactctttgtgcctcttaatgctgtatctggcaaccggatatggtcaggagggcaagttcagcggacctctcaagccaatgacgttctcaatctacgaagggcaggagccgtctcagattatttttcaatttaaggcgaatccacccgcagtgacctttgagctgaccggtgagaccgataacatctttgttatcgagagggaaggcctgctgtattacaacagggcgttagatcgggaaactcggtcgacgcacaatttgcaggtggccgctctggatgccaacggtatcatcgtcgaaggacctgtgccaatcaccattaaagtaaaagacattaatgataatcggcctactttcctgcagtccaagtatgagggaagtgtacgtcagaacagccgacccggtaagcctttcctctattag

SEQ ID NO: 307951 - DNA, 637 bp, Artificial Sequence
  derived and/or modified sequence
agtcgtagcaagagtctcgaccactgaatggaagaaaaggacttttaaccaccattttgtgacttacagaaagggtctcgctctgtcacccaggctgcagtgcagtggcgcaatcatggctggctgcaacctctgcctcctgggctcaagtgatcctcccacctcagcctcccaggaatttgaataaagaaaactatgatacttcaggcccatcttcactccctgtgtcttcttatgctttatttggcaactggatatggccaagaggggaagtttagtggacccctgaaacccatgacattttctatttatgaaggccaagaaccgagtcaaattatattccagtttaaggccaatcctcctgctgtgacttttgaactaactggggagacagacaacatatttgtgatagaacgggagggacttctgtattacaacagagccttggacagggaaacaagatctactcacaatctccaggttgcagccctggacgctaatggaattatagtggagggtccagtccctatcaccataaaagtgaaggacatcaacgacaatcgacccacgtttctccagtcaaagtacgaaggctcagtaaggcagaactctcgcccaggaaagcccttcttgtatg

SEQ ID NO: 307952 - DNA, 444 bp, Artificial Sequence
  derived and/or modified sequence
atgatcctgcaggcccacctgcacagcctgtgcctgctgatgctgtacctggccaccggctacggccaggagggcaagttcagcggccccctgaagcccatgaccttcagcatctacgagggccaggagcccagccagatcatcttccagttcaaggccaacccccccgccgtgaccttcgagctgaccggcgagaccgacaacatcttcgtgatcgagagagagggcctgctgtactacaacagagccctggacagagagaccagaagcacccacaacctgcaggtggccgccctggacgccaacggcatcatcgtggagggccccgtgcccatcaccatcaaggtgaaggacatcaacgacaacagacccaccttcctgcagagcaagtacgagggcagcgtgagacagaacagcagacccggcaagcccttcctgtactag

SEQ ID NO: 307953 - protein, 165 aa, Artificial Sequence
  derived and/or modified sequence
MSREMQDVDLAEVKPLVEKGETITGLLQEFDVQEQDIETLHGSVHVTLCGTPKGNRPVILTYHDIGMNHKTCYNPLFNYEDMQEITQHFAVCHVDAPGQQDGAASFPAGYMYPSMDQLAEMLPGVLQQFGLKSIIGMGTGAGAYILTRFALNNPEMVEGLVLINV

SEQ ID NO: 307954 - protein, 133 aa, Artificial Sequence
  derived and/or modified sequence
MSREMQDVDLAEVKPLVEKGETITGLLQEFDVQEQDIETLHGSVHVTLCGTPKGNRPVILTYHDIGMNHKTCYNPLFNYEDMQEITQHFAVCHVDAPGQQDGAASFPAGYMYPSMDQLAEMLPGVLQQFGLKS

SEQ ID NO: 307955 - protein, 149 aa, Artificial Sequence
  derived and/or modified sequence
MSREMQDVDLAEVKPLVEKGETITGLLQEFDVQEQDIETLHGSVHVTLCGTPPAKLAEAFKYFVQGMGYMPSASMTRLMRSRTASGSSVTSLDGTRSRSHTSEGTRSRSHTSEGTRSRSHTSEGAHLDITPNSGAAGNSAGPKSMEVSC

SEQ ID NO: 307956 - DNA, 288 bp, Artificial Sequence
  derived and/or modified sequence
atgagcagggaaatgcaggacgtggatctcgcagaggtgaagccactcgtggagaaaggagagacgatcaccggcctcttgcaggagttcgatgtgcaaactaagcccgcaaccaccccttcatcgacaacccgcacctgccgaagatctccatcaacactaccaagtgccacttggacaccactggcatctaggacagcgcaacccccctccccacagggcacatgcacacctccctggatctcgtggctgaagtgtttcctggagagctttaatagtttagggtag

SEQ ID NO: 307957 - DNA, 288 bp, Artificial Sequence
  derived and/or modified sequence
atgagccgggagatgcaggacgtggacctggccgaggtgaagcccttggttgagaagggcgagacaattacaggtctgcttcaggagtttgacgtgcaaacgaagcctgctactacaccgtcttctacaacccgtacttgccgtcgctcaccgagcacacttcccagcgccacttggacccccctggccagtcgcacagctcaacccccgagtccgcaaggcacatgcacacctccatggatctcatggctgaagtgtttcctcgaaagcttcaatagcctgggctag

SEQ ID NO: 307958 - DNA, 288 bp, Artificial Sequence
  derived and/or modified sequence
atgtcaagagaaatgcaggatgttgacctggctgaggtgaagcctctggtggaaaaaggcgaaaccatcaccgggctccttcaggagtttgacgtgcagacaaaacccgcaacgacaccaagttccacaacgaggacttgtagaagatctccttccaccctgccaagcgctacgtggactcccctcgcttcccgcactgctcagcctccaagccctcagggaacttgtacaccaccctggatttcctggctgaaatgttttctcgaatctttcaattcactgggctag

SEQ ID NO: 307959 - DNA, 288 bp, Artificial Sequence
  derived and/or modified sequence
atgagcagagagatgcaggacgtggacctggccgaggtgaagcccctggtggagaagggcgagaccatcaccggcctgctgcaggagttcgacgtgcagaccaagcccgccaccacccccagcagcaccaccagaacctgcagaagaagccccagcaccctgcccagcgccacctggacccccctggccagcagaaccgcccagccccccagcccccagggcacctgcacccccccctggatcagctggctgaagtgcttcctggagagcttcaacagcctgggctag

SEQ ID NO: 307960 - DNA, 450 bp, Artificial Sequence
  derived and/or modified sequence
atgtcccgggaaatgcaggacgttgatttggctgaagtgaagccccttgtggagaaaggtgagaccatcaccggtctgctgcaggagttcgatgtccaagaacaggatattgaaacgctccacggatctgtgcatgtgactttatgtggcacaccccctgccaaactggcggaggcattcaaatacttcgttcaaggcatggggtatatgccttctgcgtctatgacccgactcatgcgtagcagaaccgccagcgggtctagcgtcacatcattagatggcactagaagtcgatcccacacaagtgaaggtaccaggtccaggtctcatactagcgaagggactcggtccaggtcgcacacttccgaaggtgcccaccttgatattaccccaaacagtggcgcagccggtaattcggccggaccaaagagcatggaagtgagctgctag

SEQ ID NO: 307961 - DNA, 450 bp, Artificial Sequence
  derived and/or modified sequence
atgagccgggagatgcaggatgtggacctggccgaggtgaagcccctggtggagaagggggagaccatcaccggcctgctgcaggagtttgatgtgcaggagcaggacatcgagaccctgcacggctctgtgcacgtgaccctgtgtggcaccccaccagccaagctggccgaggccttcaagtactttgtgcagggcatgggctacatgcccagcgcctccatgacccggctgatgaggagcaggacagccagcggcagctctgtgaccagcctggatggcaccaggagccgcagccacaccagcgagggcaccaggagccgcagccacaccagcgagggcaccaggagccgcagccacaccagcgagggcgcccacctggacatcacccccaacagcggggccgccggcaacagcgctggccccaagtccatggaggtgtcctgctag

SEQ ID NO: 307962 - DNA, 450 bp, Artificial Sequence
  derived and/or modified sequence
atgagccgggagatgcaggacgtggacctggccgaggtgaagcccctggttgagaagggggaaactatcaccggcctgttgcaggagttcgacgttcaggagcaggacatcgagaccctgcacgggtctgtgcacgtcaccctgtgtgggaccccacccgccaagctggctgaggctttcaagtacttcgttcaagggatgggctatatgcctagcgcatcaatgacacgactgatgagatcacgaaccgcctccggcagctccgtcacatctctggatggaactagatcacgctcacacacatcagagggaacgaggtcccgcagccacactagtgaaggcactcgcagcaggtctcatacaagcgaaggagctcacttggatattactccaaattctggagcagcaggaaactccgccggtccaaaatcaatggaagtgagctgttag

SEQ ID NO: 307963 - DNA, 2346 bp, Artificial Sequence
  derived and/or modified sequence
gcgggggcggggccgcggcgcctataaagtcgccctccgcccggacgtaaacaaacctcgcctggctcccagctggtgctgaagctcgtcagttcaccatccgccctcggcttccgcggggcgctgggccgccagcctcggcaccgtcctttcctttctccctcgcgttaggcaggtgacagcagggacatgtctcgggagatgcaggatgtagacctcgctgaggtgaagcctttggtggagaaaggggagaccatcaccggcctcctgcaagagtttgatgtccaggagcaggacatcgagactttacatggctctgttcacgtcacgctgtgtgggactcccccggccaagctcgctgaggccttcaagtacttcgtgcagggcatgggatacatgccctcggctagcatgacccgcctgatgcggtcccgcacagcctctggttccagcgtcacttctctggatggcacccgcagccgctcccacaccagcgagggcacccgaagccgctcccacaccagcgagggcacccgcagccgctcgcacaccagcgagggggcccacctggacatcacccccaactcgggtgctgctgggaacagcgccgggcccaagtccatggaggtctcctgctaggcggcctgcccagctgccgcccccggactctgatctctgtagtggccccctcctccccggccccttttcgccccctgcctgccatactgcgcctaactcggtattaatccaaagcttattttgtaagagtgagctctggtggagacaaatgaggtctattacgtgggtgccctctccaaaggcggggtggcggtggaccaaaggaaggaagcaagcatctccgcatcgcatcctcttccattaaccagtggccggttgccactctcctcccctccctcagagacaccaaactgccaaaaacaagacgcgtagcagcacacacttcacaaagccaagcctaggccgccctgagcatcctggttcaaacgggtgcctggtcagaaggccagccgcccacttcccgtttcctctttaactgaggagaagctgatccagtttccggaaacaaaatccttttctcatttggggaggggggtaatagtgacatgcaggcacctcttttaaacaggcaaaacaggaagggggaaaaggtgggattcatgtcgaggctagaggcatttggaacaacaaatctacgtagttaacttgaagaaaccgatttttaaagttggtgcatctagaaagctttgaatgcagaagcaaacaagcttgatttttctagcatcctcttaatgtgcagcaaaagcaggcgacaaaatctcctggctttacagacaaaaatatttcagcaaacgttgggcatcatggtttttgaaggctttagttctgctttctgcctctcctccacagccccaacctcccacccctgatacatgagccagtgattattcttgttcagggagaagatcatttagatttgttttgcattccttagaatggagggcaacattccacagctgccctggctgtgatgagtgtccttgcaggggccggagtaggagcactggggtgggggtggaattggggttactcgatgtaagggattccttgttgttgtgttgagatccagtgcagttgtgatttctgtggatcccagcttggttccaggaattttgtgtgattggcttaaatccagttttcaatcttcgacagctgggctggaacgtgaactcagtagctgaacctgtctgacccggtcacgttcttggatcctcagaactctttgctcttgtcggggtgggggtgggaactcacgtggggagcggtggctgagaaaatgtaaggattctggaatacatattccatgggactttccttccctctcctgcttcctcttttcctgctccctaacctttcgccgaatggggcagcaccactgacgtttctgggcggccagtgcggctgccaggttcctgtactactgccttgtacttttcattttggctcaccgtggattttctcataggaagtttggtcagagtgaattgaatattgtaagtcagccactgggacccgaggatttctgggaccccgcagttgggaggaggaagtagtccagccttccaggtggcgtgagaggcaatgactcgttacctgccgcccatcaccttggaggccttccctggccttgagtagaaaagtcggggatcggggcaagagaggctgagtacggatgggaaactattgtgcacaagtctttccagaggagtttcttaatgagatatttgtatttatttccagaccaataaatttgtaactttgcagcgg

SEQ ID NO: 307964 - DNA, 450 bp, Artificial Sequence
  derived and/or modified sequence
atgagcagggagatgcaagacgtggacctcgccgaagtgaagcccctcgttgagaagggtgagacaattactggactcctgcaggaattcgacgtgcaggaacaggacattgaaacattacacgggtctgtgcatgtgacgttatgcggcacaccaccagcaaagctggctgaggccttcaaatactttgtgcaggggatgggatacatgccttccgcctctatgacacgcctgatgagatcacgaaccgcttcagggagctccgtcactagtctggatggcacccggtcacgatcccatacctctgagggtacacggtcaaggtcccataccagcgaaggaacgcgcagcaggagtcatacatccgagggcgcacaccttgatatcacacccaatagtggtgccgctggtaactccgcgggtcccaagtccatggaagtttcctgttag

SEQ ID NO: 307965 - DNA, 450 bp, Artificial Sequence
  derived and/or modified sequence
atgagcagagagatgcaggacgtggacctggccgaggtgaagcccctggtggagaagggcgagaccatcaccggcctgctgcaggagttcgacgtgcaggagcaggacatcgagaccctgcacggcagcgtgcacgtgaccctgtgcggcaccccccccgccaagctggccgaggccttcaagtacttcgtgcagggcatgggctacatgcccagcgccagcatgaccagactgatgagaagcagaaccgccagcggcagcagcgtgaccagcctggacggcaccagaagcagaagccacaccagcgagggcaccagaagcagaagccacaccagcgagggcaccagaagcagaagccacaccagcgagggcgcccacctggacatcacccccaacagcggcgccgccggcaacagcgccggccccaagagcatggaggtgagctgctag

SEQ ID NO: 307966 - protein, 183 aa, Artificial Sequence
  derived and/or modified sequence
MSNAKERKHAKKMRNQPTNVTLSSGFVADRGVKHHSGGEKPFQAQKQEPHPGTSRQRQTRVNPHSLPDPEVNEQSSSKGMFRKKGGWKAGPEGTSQEIPKYITASTFAQARAAEISAMLKAVTQKSSNSLVFQTLPRHMRRRAMSHNVKRLPRRLQEIAQKEAEKAVHQKKEHSKNKCHKARR

SEQ ID NO: 307967 - DNA, 552 bp, Artificial Sequence
  derived and/or modified sequence
atgtcgaatgccaaagaaaggaaacacgctaaaaaaatgaggaatcagcccactaatgtcactctgagttcagggttcgtggccgataggggcgtcaaacaccattctggtggggagaaaccttttcaagcccaaaagcaggaaccccatcctgggacatctcgccaaagacagactcgcgtaaatccacattccctgccagatccagaggtcaacgagcagtcctcttcaaaggggatgttccgtaagaaggggggatggaaggccggcccagaggggacatctcaggaaatccccaaatacataacagcgagcaccttcgcccaggctagggcagccgaaatctccgccatgttaaaagctgttacccagaagtcgtccaatagcctggtgttccagacccttccccgtcacatgcgacgtagggctatgtcccacaacgtaaagaggttaccccggaggctgcaagaaattgcgcaaaaggaggctgaaaaggctgttcaccaaaagaaggagcatagcaaaaacaaatgtcacaaagcaaggcggtag

SEQ ID NO: 307968 - DNA, 552 bp, Artificial Sequence
  derived and/or modified sequence
atgagcaatgccaaggagaggaagcacgccaagaagatgaggaaccagcccaccaacgtgaccctgagcagcggctttgtggccgacagaggagtgaagcaccacagcggcggggagaagcccttccaggcccagaagcaggagccccaccctggcaccagccggcagaggcagaccagggtgaacccccacagcctgcctgaccctgaggtgaatgagcagagcagcagcaagggcatgttcaggaagaagggcggctggaaggccggccctgagggcaccagccaggagatccccaagtacatcacagccagcacctttgcccaggcccgggctgctgagatcagcgccatgctgaaggctgtgacccagaagagcagcaacagcctggtgttccagaccctgcccaggcacatgagaagaagagccatgagccacaacgtgaagaggctgccccggcggctgcaggagatcgcccagaaggaggccgagaaggctgtgcaccagaagaaggagcacagcaagaacaagtgccacaaggcccggaggtag

SEQ ID NO: 307969 - DNA, 585 bp, Artificial Sequence
  derived and/or modified sequence
gctctccagcgcgctctccaggagctttggctcgaaatgtcaaatgcaaaagaaagaaaacacgccaagaaaatgagaaaccagcctaccaatgtgactctgtcctctggctttgtggctgacagaggtgtaaagcaccacagtggaggtgaaaaacctttccaagctcaaaaacaagagcctcatcctggaacttcacgacagcggcaaaccagagtcaacccccattctctgcctgaccctgaagtgaatgagcagtcttcctccaaagggatgtttagaaaaaagggaggatggaaagcaggtcccgagggcacgtctcaggagatccccaagtatataactgcttctacttttgctcaagcacgagctgctgaaatcagtgctatgttaaaagctgtgacccagaagtcttcgaattcactggtttttcagactctgccacggcacatgcgacgaagagccatgagccacaacgtcaaacgccttcccagacggttacaggagattgcccagaaagaggcggagaaagccgtacatcagaaaaaagaacattcaaaaaataaatgccataaagctcgaaga

SEQ ID NO: 307970 - DNA, 552 bp, Artificial Sequence
  derived and/or modified sequence
atgagcaacgccaaggagcggaagcacgccaagaagatgcggaaccagccaaccaacgttacactctcatccggctttgttgctgaccgaggggtgaagcatcactccgggggcgagaaaccgttccaagctcaaaagcaggaaccacaccccgggaccagccggcaacggcagactagagtcaatcctcatagtctacctgatcctgaagtgaacgagcaatccagtagtaagggtatgttcagaaagaaaggcggctggaaagctggacccgaaggaaccagtcaggaaattccgaagtacatcaccgcctctacctttgctcaagcgcgcgctgccgaaatttcagctatgctcaaggcagtgacccaaaagtcatcaaatagcctagtgttccagaccttgccacggcatatgaggcgtcgggccatgagccacaatgttaagaggctcccgaggaggctgcaagaaatcgcccagaaggaagcggaaaaggccgttcaccagaagaaggagcactccaagaacaagtgccataaggcgcgtaggtag

SEQ ID NO: 307971 - DNA, 552 bp, Artificial Sequence
  derived and/or modified sequence
atgtcgaatgcgaaggaacgaaagcatgccaaaaagatgaggaatcaaccaactaacgtgactctgtccagtgggttcgtcgcagatagaggagtcaaacatcacagcggaggagaaaaacccttccaggcccagaaacaggaaccccacccaggtacctccaggcaacggcagacacgcgtgaatccacactctttgcctgaccctgaagtgaacgagcagtcctcatccaaaggaatgttccggaagaaagggggttggaaggccggacctgaggggaccagtcaggagattcccaaatacatcactgcaagtacattcgcacaggctcgcgcagcagaaatctcggcaatgctgaaggccgtcacacagaagagctctaacagtctggtattccagaccctcccgagacacatgcggaggcgtgccatgtcccataatgtgaaacggctgccccgtaggctgcaggaaattgcccaaaaggaggccgaaaaagctgttcatcagaaaaaggagcactccaaaaacaagtgtcacaaagcaaggcgctag

SEQ ID NO: 307972 - DNA, 552 bp, Artificial Sequence
  derived and/or modified sequence
atgagcaacgccaaggagagaaagcacgccaagaagatgagaaaccagcccaccaacgtgaccctgagcagcggcttcgtggccgacagaggcgtgaagcaccacagcggcggcgagaagcccttccaggcccagaagcaggagccccaccccggcaccagcagacagagacagaccagagtgaacccccacagcctgcccgaccccgaggtgaacgagcagagcagcagcaagggcatgttcagaaagaagggcggctggaaggccggccccgagggcaccagccaggagatccccaagtacatcaccgccagcaccttcgcccaggccagagccgccgagatcagcgccatgctgaaggccgtgacccagaagagcagcaacagcctggtgttccagaccctgcccagacacatgagaagaagagccatgagccacaacgtgaagagactgcccagaagactgcaggagatcgcccagaaggaggccgagaaggccgtgcaccagaagaaggagcacagcaagaacaagtgccacaaggccagaagatag

SEQ ID NO: 307973 - DNA, 336 bp, Artificial Sequence
  derived and/or modified sequence
atggccaccgccagccccagaagcgacaccagcaacaaccacagcggcagactgcagctgcaggtgaccgtgagcagcgccaagctgaagagaaagaagaactggttcggcaccgccatctacaccgaggtggtggtggacggcgagatcaccaagaccgccaagagcagcagcagcagcaaccccaagtgggacgagcagctgaccgtgaacgtgaccccccagaccaccctggagttccaggtgtggagccacagaaccctgaaggccgacgccctgctgggcaaggccaccatcgacctgaagcaggccctgctgatccacaacagaaagtag

SEQ ID NO: 307974 - DNA, 336 bp, Artificial Sequence
  derived and/or modified sequence
atggctactgctagcccccggtccgatacctcaaacaaccattctggaagactgcagctccaggttaccgtcagctccgctaaacttaagcggaaaaagaattggtttgggaccgctatctacactgaggtggtggtggacggtgaaatcaccaaaacagctaaatcctcctcctctagtaaccctaagtgggacgaacagctgaccgtgaatgtgactccccagacaacgttggaatttcaggtctggagccatagaacgctcaaagccgatgcattactagggaaggccacaatcgatctgaagcaagcccttctaatacataaccgaaaatag

SEQ ID NO: 307975 - DNA, 336 bp, Artificial Sequence
  derived and/or modified sequence
atggccacagccagccccaggagtgacaccagcaacaaccacagcggccgcctgcagctgcaggtgacagtgagcagcgccaagctgaagaggaagaagaactggtttggaacagccatctacacagaggtggtggtggatggagagatcaccaagacagccaagagcagcagcagcagcaaccccaagtgggatgagcagctgactgtgaatgtgaccccccagaccaccctggagttccaggtgtggagccacaggaccctgaaggcagatgccctgctgggcaaggccaccatcgacctgaagcaggccctgctgatccacaacaggaagtag

SEQ ID NO: 307976 - DNA, 336 bp, Artificial Sequence
  derived and/or modified sequence
atggccaccgccagcccccggagcgacaccagcaacaaccacagcgggagactccagctgcaggttactgtgtcaagtgccaagttaaagcgcaaaaaaaactggttcgggaccgcgatatacacagaagtggtggtcgatggagagatcacaaagacagccaagtcgtccagtagttcaaatcccaagtgggatgagcagttgacagtaaatgttactcctcaaacgacccttgagtttcaagtgtggagccatcggaccctgaaggcggacgcgcttttaggcaaggccacaattgatctcaaacaggctttgctcatacacaaccggaagtag

SEQ ID NO: 307977 - DNA, 336 bp, Artificial Sequence
  derived and/or modified sequence
atggcgacggccagcccaagaagtgatacatcaaacaaccactccggcagactgcagctgcaggtgacagtctcttccgccaaacttaaaaggaaaaaaaactggtttggcaccgcaatttatacagaagtggtggtcgacggggagataacgaagacagccaagagttccagctcgtccaaccccaaatgggatgagcagctcaccgtcaatgttacgccacagaccaccttggagttccaggtctggagccacaggactttgaaagctgacgccctgctgggcaaggcaaccattgaccttaaacaagccctacttattcataataggaagtag

SEQ ID NO: 307978 - DNA, 141 bp, Artificial Sequence
  derived and/or modified sequence
atgctgagtcgcaatgatgacatttgcatttatggtgggctcggactgggaggactcctgctgctggccgtggtcctactatctgcatgtttgtgttggcttcacagacgggaacattgccttgccctggaacctctttag

SEQ ID NO: 307979 - DNA, 10914 bp, Artificial Sequence
  derived and/or modified sequence
atgaagggcattagaaagggcgaatctcgggccaaggaaagcaagccttgggaacctgggaaacgaaggtgtgccaagtgcgggcggctggacttcatccttatgaaaaagatgggaataaaatccggattcaccttctggaatctagtgttcctcctcaccgtcagttgtgttaagggcttcatctatacctgcggcggcaccctgaagggactcaacggtactatcgaaagcccgggcttcccttacggatatcccaacggagccaactgcacttgggtgataattgcggaggagagaaataggatccagatcgtcttccagagttttgcccttgaggaggagtatgattacctctccctgtacgacggccatccccacccaactaattttaggaccagactcaccgggtttcacctgcccccacccgtgacatcaacgaagagcgtgttcagcttaagactgaccagtgattttgccgtaagcgcccatggatttaaagtatactacgaagagttacagagcagctcgtgtggcaaccctggtgtcccacctaaaggtgtcttgtacggaacccgttttgacgtgggagacaagattagatactcctgcgtcaccggttacatcctcgatgggcaccctcagctgacatgtatcgccaactccgtgaatacagcatcttgggatttccccgttccgatatgccgagccgaggatgcgtgtggcggtaccatgcgcggctcctcagggatcattagctctcctagcttccctaacgagtatcataataacgctgactgcacatggactatagtggccgaacccggtgacaccatctccctcatcttcactgactttcagatggaggagaaatacgattatctggaaattgaaggctcagagccgccaacaatttggctgagtggaatgaacatccctcccccaattatttcaaacaaaaattggctgcgactgcactttgtcaccgattctaatcacagatatcggggcttcagcgcaccttaccaaggtagtagcacgttaactcacacgacgagtacaggtgaactggaggagcataacagaactaccaccggagccattgcagtggcttctacgccggctgatgtgaccgtcagcagtgtaacggccgtgaccatccacaggttgtctgaagaacagagggtgcaggtcactagtctacgcaattctgggctcgatcctaatacatccaaggatgggctgagtccccatcctgccgacacacagtctactaggcggcgcccccgccatgccgaacaaatcgaaaggacaaaggaactggccgtggtgacccatagggtgaagaaagcgatcgacttcaagagccgaggctttaagctgttcccaggcaaggacaattccaacaagttctctatactgaacgaaggaggcataaagactgcttccaacctctgcccagacccgggtgaacccgaaaacggcaaaagaatcggatctgacttcagccttggaagtaccgttcagttcagttgtgatgaagactatgtactgcagggcgcgaagagcatcacttgccaacgaattgctgaagttttcgctgcctggagtgaccaccgtccggtgtgcaaagttaagacgtgcggatccaatctgcagggcccctccggaactttcacctccccaaattttccctttcagtacgatagcaacgctcaatgcgtgtgggtgatcaccgccgttaacaccaacaaagtcattcagattaacttcgaagaattcgatctggaaatagggtacgatactctgaccattggcgacggaggcgaagttggagatcccaggactgtgctgcaggttctcaccgggagctttgtgcctgacctgatcgtatccatgagcagccagatgtggctgcatttgcagactgacgaaagtgtgggaagcgttggattcaaggtcaactacaaggagatcgagaaggagtcctgtggggacccagggacccccctgtatgggatacgcgaaggtgatggatttagcaatagagacgttctgcgcttcgaatgccagtttggctttgagctgatcggagaaaagtccattgtgtgtcaggagaataaccagtggtcagcaaatatccctatatgtattttcccctgcctttctaacttcacagcccctatgggtaccgtgctgtctcccgattatcccgaaggatacggcaataacttgaattgcatctggaccatcatcagcgaccctggctcaaggattcatctgagtttcaacgattttgatctggagagtcagttcgacttccttgcggtgaaagatggcgactctcccgaaagtccgatccttggcaccttcactggggccgaagtcccctcccatctgaccagcaacagtcatatcctcagactggaatttcaggcagatcattcgatgagtgggagaggattcaatatcacctataatacattcggtcacaatgagtgtcccgaccccggaattccaataaatgccagaagattcggtgataacttccagcttggatctagcataagcgtgatttgcgaggaggggtttatcaagacacaagggaccgagacgatcacctgtatcctcatggacggcaaggtgatgtggtcgggccttattccgaagtgcggagccccatgtggaggtcacttttcggcaccatctggtgtcattttaagcccggggtggccagggtattataaggactccctaaactgtgagtgggtgatcgaagccgagccaggacacagtataaaaatcaccttcgagagattccagaccgaactgaactatgatgttttggaagtgcacgacggccccaatttgctctccccactgcttggaagctacaatgggacccaggtcccccaatttctgttttcctcaagtaattttatttacctcttattcactactgacaactcccgctctaataacggcttcaagatccactatgaaagcgtgacagtcaacacctatagctgtctggatcctgggatcccagtgcacggaagaaggtacggccatgattttagcataggctcaaccgtgtcattctcctgtgatagcgggtatagactttcacacgaggaaccactgttgtgcgaaaaaaatcattggtggagccaccccctgcctacttgcgatgccttgtgcggcggcgatgtgagaggcccctctggcaccatcctgtctcctggttatcctgaattctacccaaacagtcttaattgcacgtggactgtggatgtaacccacggcaagggcgttcagtttaacttccacacgtttcaccttgaggaccaccacgactacctgctgatcaccgagaatgggtctttcacccagcccctggctcggctgacgggaagcgatttacccccaacaataaacgcaggcctgtacggcaattttcgcgctcagctacgctttattagcgactttagcatttcttatgaggggttcaacatcacgttcagcgaatataatctggaaccctgtgaagatccgggcatccctcaatacggtagccgtatcggcttcaactttggtatcggtgatactctgacgttctcctgcagtagcggataccggctagaagggacgtccgaaatcatctgcctgggtggtggccgccgggtgtggagcgcccccttgccacgttgtgtcgccgaatgtggtgcaagcgctacgaacaatgaaggaatcttgctcagcccgaactatcctctcaattatgagaataatcatgaatgtatttattctatacaagtgcaggcaggaaagggcatcaatatctccgctcgaacgttccacctcgctcaaggcgatgttctcaagatatacgatggcaaagacaagaccacccacctgctaggcgcttttaccggggcgtccatgcggggcttgacactctcctctacatccaatcagctctggctcgagtttaactctgacaccgagggtaccgatgaagggttccagctggtgtacacctcatttgagttgtcacattgcgaagatccaggaattccccaattcgggtacaagatttcagaccagggacacttcgctggaagtacgattatatatggatgcaatcccgggtataccctacacggatctagcttgcttaagtgcatgactggggaaaggcgtgcttgggattaccctcttccgtcctgcattgccgagtgtggcggccggtttaaaggcgagagtagtggccgaatactctccccaggataccccttcccctacgataataacctacgttgtatgtggatgattgaggtggacccagggaacatcgtctccctccagtttctcgcctttgacacggaagcttcccatgatatcttacgcgtgtgggatgggcctcctgagaacgacatgcttctgaaagagataagtggctcgctgatccccgaaggaatccattccaccctgaatatcgtgacaatccagttcgacaccgatttttacatatctaaatctggatttgctatccagttttcgtcctccgtcgccacggcctgtagagacccaggggtgccaatgaatggtacacgcaacggggacggaagagagcctggagacacagtggtctttcaatgtgatcccggatacgagctgcaaggggaggaacgcataacttgcatccaggtggagaaccgctacttctggcagcccagccctcccgtctgcatcgctccttgtgggggaaacttaacagggtcatctgggttcattctctcaccgaatttcccacacccttacccacacagtcgtgattgcgattggaccatcaccgtaaatgccgattatgtgatcagtctcgccttcatcagctttagcatcgaacctaattacgatttcctgtacatctacgatgggcccgactccaatagccctctgataggctccttccaagactccaagttaccggagcgtattgagtcttcttcaaacaccatgcacctggcatttcgcagtgatggttctgtatcttatactgggtttcatctggagtataaagctaaactgcgggaatcttgtttcgaccctgggaatatcatgaacggcacacggctaggcatggactataaattggggtctacagtgacctactattgcgatgcgggctacgtgctccagggctactcgactctgacttgtattatgggcgacgacggacggcctgggtggaacagggctctgccttcttgccacgccccttgcgggagtcgatccactggtagcgagggcacagtgcttagtccaaactacccaaagaattactccgttgggcataactgcgtctattctattgccgtgcccaaagaattcgctgtccctcgcacaagcagtacccagtgctcttcagtgccagaacccaggttcggaagacgcattggtaacgaattcgctgtcggaagttccgtactctttgattgcaatcccgggtacatcctgcacgggtccatcgctatacgctgtgagaccgtgcctaactcattggcgcagtggaatgactcactcccaacctgcattgtgccctgcggcggcatccttactaaacgcaaggggaccattttgagccccggatatccagagccttatgataacaacctcaactgcgtctggaagatcactgtgccagaaggcgctggcattcaggtacaggtggtgtccttcgccacagagcataattgggattctctggatttttatgacggcggcgacaataacgcccccagactgggttcctatagcgggaccaccatccctcatttgctgaacagtacgtccaataatctttatcttaatttccaaagtgacataagtgtcagcgcagccgggttccatctggagtataccgccattgggctggactcgtgtccggaaccgcaaaccccttcctccggaattaagattggagataggtatatggtaggggacgttgttagctttcagtgcgatcaagggtacagcctacaaggccactcccatataacgtgcatgccagggcctgtgcgtcgatggaattaccctatccctatttgtctagcccagtgcggaggtgctatgtcagacttttcaggcgtaatcctcagccccggattcccagggaactatccatcttccctggattgtacgtggacaatcaacctgcccatcgggttcggcgtccacttgcaatttgtgaacttctctacagagacaatccatgactatctagaggttaggtctggcagctccgaaacctcaaccgtcataggcagactatccggtccccagattccttccagtctgttttccaccacccatgagacatctctgtatttccattccgattattcccagaacaaacagggcttccacatcgtctaccaggcataccagctgcagtcttgcccagatccaagaccctttcgcaacggctttgtgatcgggaacgactttactgtggggcagacgatatcattcgagtgttttcctggctacacattgatcgggaactccgcactaacatgcctccacggagtgtcgcgcaattggaatcacccactcccccgctgtgaggccttgtgcggcggtaacatcactgccatgaacggcaccatctactctccagggtaccctgatgagtaccccaattttcaggattgcttctggttggtgcgtgtgcctcccggaaacggaatttacattaattttaccgttctacagaccgaaccaatctacgactttattaccgtttgggacggccccgatcaaaactccccgcaaatcgggcagttcagtggaaatactgccctggagtctgtttactcaacttcgaaccagatcttgattaagttccatagtgactttaccacgtctggcttcttcgtcctttcctaccatgcttatcagttgcgggtctgtcagcctcctcccccagtccccaatgccgaaattctaacagaggatgacgaattcgaaatcggcgatatcattaggtaccagtgtctccctggcttcacccttgtgggaaatgccatcctgacttgtcgcctaggggagcgcctccaaatggacggcgctccccctgtatgccaggtgctctgtcccgcaaacgagctgcgcctggattctacaggcgtcatattaagccctggatatcccgactcctacccgaatcttcagatgtgcgcatggtccatttcagttgagaagggttataacatcactatgtttgtagagtttttccagactgaaaaggagttcgatgtgctgcaagtttacgatggtccgaacatccaaagcccggtcctgattagcttgtcgggagactactccagcgccttcaacataacttcgaatggccatgaggtgtttctgcagtggtctgccgatcatggcaacaacaagaaaggttttcgaattcgttacatcgccttctattgcagcactcccgagtccccaccgcatgggtacatcatttcacagaccggcggacagcttaattccgtggtaaggtgggcgtgtgatcgaggtttccgtctcgttggcaagtcctcagctgtgtgtaggaagtctagctatggatatcatgcatgggatgcccccgtgcctgcttgtcaagctatctcatgtgggattccaaaagctcccaccaacgggggaatccttacgacagactatctggttggaacaagggtcacctatttttgcaatgatggttatcgcctatcttcaaaagaactaactaccgcagtctgtcagtcagacgggacttggtcaaatcacaataagactcccaggtgcgttgtcgtcacctgtccaagtatcaacagtttcatccttgaacacgggcggtggagaatcgtgaacggtagccactatgagtataagaccaaggtggtattttcatgcgacccaggctaccacggactgggacctgcttctattgaatgcctgcctaatggcacatggagttggagaaatgagagaccttattgccagatcatctcctgtggggaacttcctactcctccaaatggcaataaaatcgggacgcagacttcttacggcagcacagccatctttacttgtgacctgggcttcatgctggtcgggtcagctgtccgggaatgtctcagctccggactttggtctgagagcgaaacccgatgtcttgccggccattgcggaatcccagaactgatcgtgaacgggcaggtgattggtgagaactacggatatcgcgatacagtcgtgtaccagtgcaacccaggcttcaggttaatcggatccagtgtccgaatttgccagcaggaccacaattggtctgggcagctgccctcatgtgtccccgtgagctgcggtcacccaggatcgcccatctacggaaggacttcggggaacggtttcaactttaatgatgtggtgaccttctcttgtaatatcggatacttgatgcaagggccgaccaaggcccaatgccaggccaatcgccagtggtcccatcccccgcctatgtgtaaagtagtgaactgtagcgaccccggtatccctgccaatagcaaaagggagtccaagatcgaacacgggaacttcacatacggaactgtcgtattctatgactgcaacccgggttattttttattcggttcttcagtcctgatctgccagcctaacgggcaatgggacaagccactgcccgagtgcataatgattgactgcggccacccgggggtgccccctaatgctgtgttatcaggtgagaaatacacgtttggttcaactgtccactactcgtgtaccggaaaacgctctctgctgggccaaagctcgcgcacctgccagcttaatggccattggagtgggtcccagccacattgttctggcgatgccaccggaacttgcggagatcccgggacccctggccacgggtcccgtcaggagagcaacttccggacgaaaagcacggtcaggtacgcgtgcgatacgggctatattctgcacggctccgaagagcggacttgcctggcgaacggttcatggactggcaggcagccagagtgtaaggctgttcaatgcggtaaccctgggaccacggctaatggcaaagttttccgcatcgacgggacaaccttttctagctcagtgatttatagctgcatggagggatatattctcagcggtccctccgttcgccagtgtactgctaatgggacctggagtggaacgctgcctaattgcaccattatctcttgcggcgatcctggaattcctgcgaacggccttagatatggggatgattatgttgtgggccagaatgtctcatacatgtgccagccgggctatactatggagctgaacggctcccgcattagaacctgcactattaatggaacttggtccggggtcatgcccacgtgcagggccgtcacttgtcctacccccccgcaaatcagcaatgggaggctcgaaggaacaaactttgattggggctttagcatatcctatatttgctccccaggatatgagctgtcttttccagccgtgctaacctgtgtcggtaatggcacttggagcggggaagtgcctcaatgtctgccaaaattttgcggcgatcccgggatccccgcacaaggaaagagagaaggcaagtctttcatatatcaatccgaggtgagttttagctgtaacttcccattcatcctggtcgggagttcgacccggatctgtcaggcagatggcacctggagtggcagcagtccgcactgcatcgaacccacacagacgtcctgtgagaatcctggggtgccacgccatggcagccagaataatactttcgggtttcaagtcggctcagtggtgcagttccattgtaaaaaggggcatctgctgcaaggaagcaccacacggacatgtctcccagaccttacatggtccggcatacagcctgaatgtatcccccacagctgcaagcaaccagagaccccggcacacgccaacgtggtgggaatggacctgccctcacatggctatacactgatatacacgtgccaacctggctttttcttggccggcggcaccgagcatagagtgtgccggagcgataacacctggacgggcaaggtgcccatttgtgaggctggatcgaagattttagttaaggacccacgacccgccctggggaccccctcaccaaaactatcagtgcccgacgatgtcttcgctcagaactacatctggaaggggtcttacaattttaaggggcggaagcagcctatgacactcaccgtgactagctttaacgcctccactggtagagttaatgccacactctccaatagcaatatggaactcctgttgagcggggtatataagtcccaggaggctagactaatgctgcgcatctatctcatcaaagtgcctgctcatgctagcgtgaagaaaatgaaagaggagaattgggcaatggatggatttgtctctgccgaacccgatggggcaacttatgtgtttcagggcttcatccagggaaaggactatgggcagttcggtctgcagagactcggtctcaatatgtccgagggttccaactcaagcaaccaaccccatggcacaaacagttcctccgtcgctatcgcgattcttgttccattcttcgccctgatttttgccggatttggcttctacctatataagcagcggacagcgcccaagacacagtacacgggctgcagcgtgcacgagaacaacaatggacaggccgcattcgaaaatccaatgtatgatacgaatgctaaaagcgtggaaggtaaggcggtgagatttgaccccaatctcaatacagtgtgcactatggtgtag

SEQ ID NO: 307980 - DNA, 10914 bp, Artificial Sequence
  derived and/or modified sequence
atgaagggcatcaggaagggggagagccgggccaaggagagcaagccctgggagcccgggaagaggcgctgtgccaagtgtggccgcctggacttcatcctgatgaagaagatgggcatcaagagcggcttcaccttctggaacctggtgttcctgctgactgtgtcctgtgtgaagggcttcatctacacctgtggcggcaccctgaagggcctgaatggcaccatcgagagccctggcttcccctacggctacccaaatggagccaactgcacctgggtgatcatcgccgaggagaggaaccgcatccagatcgtgttccagagctttgccctggaggaggagtatgactacctgagcctgtatgatggccacccccaccccaccaacttccgcacccggctgaccggcttccacctgcccccacctgtgaccagcaccaagtctgtgttcagcctgcggctgaccagtgactttgctgtgtctgcccacggcttcaaggtgtactatgaggagctgcagagcagcagctgtggcaaccctggggtgccccccaagggcgtgctgtatggcaccaggtttgatgtgggggacaagatccgctacagctgtgtgacaggctacatcctggatggccacccccagctgacctgcatcgccaacagcgtgaacacagcctcctgggacttccctgtgcccatctgcagagcagaagatgcctgtggcggcaccatgaggggcagcagcggcatcatcagcagccccagcttccccaatgagtaccacaacaatgctgactgcacctggaccatcgtggccgagcccggggacaccatcagcctcatcttcacagacttccagatggaggagaagtatgactacctggagattgagggcagcgagccccccaccatctggctgagcggcatgaacatccccccacccatcatcagcaacaagaactggctgcggctgcactttgtgacagacagcaaccaccgctaccggggcttcagcgccccctaccagggcagcagcaccctgacccacaccaccagcactggagagctggaggagcacaacagaaccaccactggagccatcgctgtggccagcaccccagcagatgtgacagtgtcctctgtgacagctgtgaccatccaccggctgtctgaggagcagagggtgcaggtgaccagcctgaggaacagcggcctggaccccaacaccagcaaggatggcctgagcccccaccctgctgacacccagagcaccaggagaagacccaggcatgctgagcagattgaaagaaccaaggagctggccgtggtgacccaccgggtgaagaaggccatcgacttcaagagccggggcttcaagctgtttcctgggaaggacaacagcaacaagttcagcatcctgaatgaaggaggcatcaagacagccagcaacctgtgcccagaccctggagagccagaaaatggcaagagaattggaagtgacttcagcctgggcagcacagtgcagttcagctgtgatgaggactatgtgctgcagggcgccaagagcatcacctgccagagaattgctgaggtgtttgctgcctggagcgaccacaggcctgtgtgcaaggtgaagacctgtggcagcaacctgcagggccccagcggcaccttcaccagccccaacttccccttccagtatgacagcaatgcccagtgtgtgtgggtgatcacagctgtgaacaccaacaaggtgatccagatcaactttgaggagtttgacctggagatcggctatgacaccctgaccatcggagatggaggagaggtgggggaccccaggacagtgctgcaggtgctgaccggcagctttgtgcctgacctgattgtgtccatgagcagccagatgtggctgcacctgcagacagatgagagcgtgggctctgtgggcttcaaggtgaactacaaggagattgagaaggagagctgtggggaccccggcacccccctgtatggcatccgggagggagatggcttcagcaacagagatgtgctgcgctttgagtgccagtttggatttgagctgattggagagaagagcatcgtgtgccaggagaacaaccagtggagcgccaacatccccatctgcatcttcccctgcctgagcaacttcaccgcccccatgggcaccgtgctgagcccagactacccagagggctacggcaacaacctgaactgcatctggaccatcatcagtgaccccggcagccgcatccacctgtccttcaatgactttgacctggagagccagtttgacttcctggccgtgaaggatggagacagccctgagagccccatcctgggcaccttcaccggggctgaggtgcccagccacctgaccagcaacagccacatcctgcggctggagttccaggccgaccacagcatgagcggccggggcttcaacatcacctacaacaccttcggccacaatgaatgtcctgaccccggcatccccatcaatgccaggagatttggagacaacttccagctgggcagcagcatcagcgtcatctgtgaggagggcttcatcaagacccagggcacagagaccatcacctgcatcctgatggatggcaaggtgatgtggagcggcctcatccccaagtgtggggccccctgtggcggccacttcagcgcccccagcggggtcatcctgagccctggctggccaggctactacaaggacagcctgaactgtgagtgggtgattgaagctgagcccggccacagcatcaagatcacctttgagcgcttccagacagagctgaactatgatgtgctggaggtgcatgatggccccaacctgctgagccccctgctgggcagctacaacggcacccaggtgccccagttcctgttcagcagcagcaacttcatctacctgctcttcaccacagacaacagccgcagcaacaacggcttcaagatccactatgagagcgtgacagtgaacacctacagctgcctggaccccggcatccctgtgcacggccgccgctatggccatgacttcagcatcggcagcacagtgtccttcagctgtgacagcggctaccgcctgagccatgaggagcccctgctgtgtgagaagaaccactggtggagccaccccctgcccacctgtgatgccctgtgtggaggagatgtgcggggccccagcggcaccatcctgagccctggctacccagagttctaccccaacagcctgaactgcacctggacagtggatgtgacccatggaaaaggagtgcagttcaacttccacaccttccacctggaggaccaccacgactacctgctgatcacagaaaatggcagcttcacccagcccctggcccggctgactggaagtgacctgccccccaccatcaatgccggcctgtatggcaacttccgggcccagctgcgcttcatcagtgacttcagcatctcctatgagggcttcaacatcaccttcagcgagtacaacctggagccctgtgaagatcctggcatcccccagtatggcagccgcatcggcttcaactttggcatcggggacaccctgaccttcagctgcagcagcggctaccgcctggagggcaccagcgagatcatctgcctgggcggcggcagaagagtgtggagcgcccccctgccccgctgtgtggccgagtgtggggccagcgccaccaacaatgaaggcatcctgctgagccccaactaccccctgaactatgagaacaaccacgagtgcatctacagcatccaggtgcaggccggcaagggcatcaacatcagcgcccggaccttccacctggcccagggagatgtgctgaagatctatgatggcaaggacaagaccacccacctgctgggcgccttcaccggggcctccatgaggggcctgaccctgagcagcaccagcaaccagctgtggctggagttcaacagcgacacagagggcacagatgagggcttccagctggtgtacaccagctttgagctgagccactgtgaagatcctggcatcccccagtttggctacaagatcagtgaccagggccactttgctggcagcaccatcatctacggctgcaaccctggctacaccctgcacggcagcagcctgctgaagtgcatgactggagagcggcgggcctgggactaccccctgcccagctgcatcgcagaatgtggcggccgcttcaagggggagagcagcggccgcatcctgagccctggctaccccttcccctatgacaacaacctgcgctgcatgtggatgattgaggtggaccccggcaacatcgtgtccctgcagttcctggcctttgacacagaggccagccatgacatcctgcgggtgtgggatggccccccagaaaatgacatgctgctgaaggagatcagcggcagcctcatccctgagggcatccacagcaccctgaacatcgtgaccatccagtttgacacagacttctacatcagcaagagcggctttgccatccagttcagcagctctgtggccacagcctgccgggaccccggggtgcccatgaatggcaccagaaatggagatggccgggagcccggggacacagtggtgttccagtgtgaccccggctatgagctgcagggcgaggagcgcatcacctgcatccaggtggagaaccgctacttctggcagcccagcccccctgtgtgcatcgccccctgtggcggcaacctgaccggcagcagcggcttcatcctgagccccaacttcccccacccctacccccacagccgggactgtgactggaccatcaccgtgaatgctgactatgtgatcagcctggccttcatctccttcagcattgagcccaactatgacttcctgtacatctatgatggccctgacagcaacagccccctgattggcagcttccaggacagcaagctgcctgagagaattgagagcagcagcaacaccatgcacctggccttcagaagtgatggctctgtgtcctacacaggcttccacctggagtacaaggccaagctgcgggagagctgctttgaccccggcaacatcatgaatggcacccggctgggcatggactacaagctgggcagcacagtgacctactactgtgatgctggctacgtgctgcagggctacagcaccctgacctgcatcatgggagatgatggccggcccggctggaacagagccctgcccagctgccacgccccctgtggcagccgcagcactggaagtgagggcaccgtgctgagccccaactaccccaagaactacagcgtgggccacaactgtgtgtacagcattgctgtgcccaaggagtttgctgtgcccaggaccagcagcacccagtgcagctctgtgcctgagccccgcttcggcagaagaattggaaatgaatttgctgtgggcagctctgtgctgtttgactgcaaccctggctacatcctgcacggcagcatcgccatccgctgtgagaccgtgcccaacagcctggcccagtggaatgacagcctgcccacctgcatcgtgccctgtggcggcatcctgaccaagaggaagggcaccatcctgagccctggctacccagagccctatgacaacaacctgaactgtgtgtggaagatcaccgtgcctgagggcgccggcatccaggtgcaggtggtgtcctttgccacagagcacaactgggacagcctggacttctatgatggaggagacaacaatgccccccggctgggcagctacagcggcaccaccatcccccacctgctgaacagcaccagcaacaacctgtacctgaacttccagagcgacatctctgtgtctgctgctggcttccacctggagtacacagccatcggcctggacagctgcccagagccccagacccccagcagcggcatcaagatcggggaccgctacatggtgggagatgtggtgtccttccagtgtgaccagggctacagcctgcagggccacagccacatcacctgcatgcctggccctgtgcggcgctggaactaccccatccccatctgcctggcccagtgtggcggggccatgtctgacttctctggagtcatcctgagccctggcttccctggcaactaccccagcagcctggactgcacctggaccatcaacctgcccatcggctttggagtgcacctgcagtttgtgaacttcagcacagagaccatccatgactacctggaggtgcgcagcggcagcagcgagaccagcaccgtcatcggccgcctgagcggcccccagatccccagcagcctcttcagcaccacccatgagaccagcctgtacttccacagcgactacagccagaacaagcagggcttccacatcgtgtaccaggcctaccagctgcagagctgcccagacccccggcccttcagaaatggatttgtgattggaaatgacttcaccgtgggccagaccatcagctttgagtgcttccctggctacaccctgattggcaacagcgccctgacctgcctgcacggcgtgtccaggaactggaaccaccccctgccccgctgtgaggccctgtgtggcggcaacatcacagccatgaatggcaccatctacagccctggctacccagatgagtaccccaacttccaggactgcttctggctggtgcgggtgcccccaggaaatggcatctacatcaacttcaccgtgctgcagacagagcccatctatgacttcatcaccgtgtgggatggccctgaccagaacagcccccagatcggccagttcagcggcaacacagccctggagagcgtgtacagcaccagcaaccagatcctgatcaagttccacagcgacttcaccaccagcggcttctttgtgctgagctaccacgcctaccagctgcgggtgtgccagcccccacctcctgtgcccaatgctgagatcctgacagaagatgatgaatttgaaattggagacatcatccgctaccagtgcctgcccggcttcaccctggtgggcaatgccatcctgacctgccgcctgggggagcggctgcagatggatggagcccctcctgtgtgccaggtgctgtgcccagccaatgagctgcggctggacagcactggagtcatcctgagccctggctacccagacagctaccccaacctgcagatgtgtgcctggagcatctctgtggagaagggctacaacatcaccatgtttgtggagttcttccagacagagaaggagtttgatgtgctgcaggtgtatgatggccccaacatccagagccctgtgctgatcagcctgagcggggactacagcagcgccttcaacatcaccagcaatggacatgaggtgttcctgcagtggagcgctgaccacggcaacaacaagaagggcttccgcatccgctacatcgccttctactgcagcaccccagagagcccccctcatggctacatcatcagccagacaggaggccagctgaacagcgtggtgcgctgggcctgtgaccggggcttccggctggtgggcaagagcagcgctgtgtgcaggaagagcagctatggctaccacgcctgggatgcccctgtgcctgcctgccaggccatcagctgtggcatccccaaggcccccaccaacggcggcatcctgaccacagactacctggtgggcaccagggtgacctacttctgcaatgatggctaccgcctgagcagcaaggagctgaccacagctgtgtgccagagtgatggcacctggagcaaccacaacaagaccccccgctgtgtggtggtgacctgccccagcatcaacagcttcatcctggagcacggccgctggagaattgtgaatggcagccactatgagtacaagaccaaggtggtgttcagctgtgaccccggctaccacggcctgggccctgccagcattgagtgcctgcccaacggcacctggagctggagaaatgaaagaccctactgccagatcatcagctgtggggagctgcccaccccaccaaatggaaacaagattggcacccagaccagctatggcagcacagccatcttcacctgtgacctgggcttcatgctggtgggcagcgctgtgcgggagtgcctgagcagcggcctgtggagcgagagcgagacccgctgcctggccggccactgcggcatccctgagctgattgtgaatggccaggtgattggagaaaattatggctacagagacacagtggtgtaccagtgcaaccctggcttccgcctcatcggcagctctgtgcgcatctgccagcaggaccacaactggagcggccagctgcccagctgtgtgcctgtgtcctgtggccaccctggcagccccatctacggccgcaccagcggaaatggcttcaacttcaatgatgtggtgaccttcagctgcaacatcggctacctgatgcagggccccaccaaggcccagtgccaggccaaccggcagtggagccaccccccacccatgtgcaaggtggtgaactgcagcgaccccggcatcccagccaacagcaagcgggagagcaagattgagcacggcaacttcacctatggaacagtggtgttctatgactgcaaccctggctacttcctgtttggcagctctgtgctgatctgccagcccaacggccagtgggacaagcccctgcctgagtgcatcatgattgactgtggccaccctggggtgcccccaaatgctgtgctgtctggagagaagtacaccttcggcagcacagtgcactacagctgcaccgggaagaggagcctgctgggccagagcagcaggacctgccagctgaatggccactggagcggcagccagccccactgcagcggagatgccaccggcacctgtggggaccccggcaccccaggccacggcagccggcaggagagcaacttccgcaccaagagcacagtgcgctatgcctgtgacaccggctacatcctgcacggcagcgaggagaggacctgcctggccaacggctcctggacaggccggcagcctgagtgcaaggctgtgcagtgtggcaaccctggcaccacagccaacgggaaggtgttcagaattgatggcaccaccttcagcagcagcgtcatctacagctgcatggagggctacatcctgagcggccccagcgtgcggcagtgcacagccaacggcacctggagcggcaccctgcccaactgcaccatcatcagctgtggggaccccggcatcccagccaacggcctgcgctatggagatgattatgtggtgggccagaatgtgtcctacatgtgccagcccggctacaccatggagctgaatggcagccgcatccgcacctgcaccatcaatggcacctggagcggcgtgatgcccacctgcagagctgtgacctgccccaccccaccccagatcagcaatggccgcctggagggcaccaactttgactggggcttcagcatctcctacatctgcagccctggctatgagctgtccttccctgctgtgctgacctgtgtgggcaatggcacctggagcggggaggtgccccagtgcctgcccaagttctgtggggaccccggcatcccagcccagggcaagcgggagggcaagagcttcatctaccagagcgaggtgtccttcagctgcaacttccccttcatcctggtgggcagcagcacccgcatctgccaggctgatggcacctggagcggcagcagcccccactgcatcgagcccacccagaccagctgtgaaaatcctggggtgcccaggcatggcagccagaacaacaccttcggcttccaggtgggctctgtggtgcagttccactgcaagaagggccacctgctgcagggcagcaccaccaggacctgcctgcctgacctgacctggagcggcatccagcctgagtgcatcccccacagctgcaagcagcctgagaccccagcccacgccaacgtggtgggcatggacctgcccagccacggctacaccctcatctacacctgccagcccggcttcttcctggccggcggcacagagcaccgggtgtgccgcagtgacaacacctggacaggcaaggtgcccatctgtgaggccggcagcaagatcctggtgaaggaccccaggcctgccctgggcacccccagccccaagctgtctgtgcctgatgatgtgtttgcccagaactacatctggaagggcagctacaacttcaagggcaggaagcagcccatgaccctgactgtgaccagcttcaatgccagcacaggccgggtgaatgccaccctgagcaacagcaacatggagctgctgctgagcggcgtgtacaagagccaggaggcccggctgatgctgcgcatctacctgatcaaggtgcctgcccacgcctctgtgaagaagatgaaggaggagaactgggccatggatggctttgtgtctgctgagccagatggagccacctacgtgttccagggcttcatccagggcaaggactatggccagtttggcctgcagaggctgggcctgaacatgtctgagggcagcaacagcagcaaccagccccacggcaccaacagcagctctgtggccatcgccatcctggtgcccttctttgccctgatctttgctggcttcggcttctacctgtacaagcagaggacagcccccaagacccagtacacaggctgcagcgtgcatgagaacaacaacggccaggccgcctttgagaaccccatgtatgacaccaatgccaagtctgtggagggcaaggctgtgcgctttgaccccaacctgaacacagtgtgcaccatggtgtag

SEQ ID NO: 307981 - DNA, 10914 bp, Artificial Sequence
  derived and/or modified sequence
atgaagggcatccggaagggcgagagccgggccaaggagagcaagccttgggagcccgggaaaaggaggtgcgcaaaatgtgggagactcgactttatactgatgaagaagatgggaatcaaatctggatttactttttggaatcttgtctttctgctcactgtgtcttgcgttaagggtttcatctacacttgcggcggaaccttaaagggtttgaatggcactatagagagccctggttttccatacggatacccgaatggcgcaaactgcacctgggtgataatagcagaggaaagaaataggatccagatcgtattccagagcttcgcacttgaagaggagtacgattacctgtcactgtatgacgggcacccccacccaactaatttcagaacccggttgacgggttttcacctgcccccacctgtgacctcgaccaagagcgtgttctccctcagactcacttcagacttcgcggtgtctgcccacggattcaaagtctactacgaggaacttcaatctagttcctgcggcaatccaggggtgccgcccaagggggtcttgtatggaactcgattcgatgttggtgacaagatccgttatagctgcgtaacagggtacatactggatgggcatcctcagctaacctgtatagccaactcagtaaacactgcctcttgggatttcccagtgcctatttgccgcgccgaggacgcatgcggggggacaatgcgggggagttcagggattatctcttcccccagctttcccaatgagtaccataacaatgctgactgtacgtggacgattgtagcagagccaggagacacaataagcttgatttttaccgatttccagatggaggagaagtacgactatctcgaaattgaaggctccgagccccccaccatatggctgagcggaatgaacatacctccacccattattagtaataagaattggctaagactgcatttcgtgacagactctaatcatagatacagaggattctccgctccatatcagggttctagtaccctcacacacacaacttcaactggcgagctggaagagcataacagaaccacaacaggcgctattgctgtcgcttccacccccgccgacgtgaccgtttcttcagtgacggcagtgacaatccaccgtcttagtgaagagcagcgggttcaggtcacctctcttcggaattctggactggatcctaatacctccaaggatgggctcagcccacaccctgcggacacccagtccactagaaggaggcctcgccatgctgaacagattgaaagaacgaaagagctggctgtggttactcacagggtaaagaaggctatagactttaagtcacgcggttttaaactgtttcctggaaaagacaacagcaacaaattctccatcctgaatgagggtggcattaagaccgcatcaaatctgtgcccagatcccggagagcccgaaaacggaaagaggatcggatcagacttctccctgggatctactgtgcagttttcctgtgatgaggattacgttctgcagggagcaaagagcattacgtgccaacggatcgcagaagtatttgccgcgtggtccgatcaccgccccgtttgtaaagttaagacctgcggctctaatctgcagggtccgagtggtacctttacctctccaaatttcccttttcaatatgattctaatgcacagtgtgtgtgggtcattactgccgtgaacacaaataaggttattcagataaactttgaggaatttgatctggaaatcggctacgatacactgaccattggcgacggaggagaagtgggggatcccaggactgtccttcaggtcctcaccgggagttttgtacccgatcttatcgtgagcatgagttctcagatgtggctgcaccttcagaccgatgagagcgtgggctctgtaggattcaaagtgaactataaggagatagaaaaggagagctgtggtgatccgggaacccctctctacggaattcgggaaggagacggcttcagtaacagggacgtcctgagattcgagtgtcaattcggcttcgaactgatcggagaaaagtctatcgtgtgtcaagagaacaatcagtggagcgccaacattcctatctgcatcttcccatgtctgagcaacttcactgccccaatgggtacagtgctctcccctgactatccggagggctacggaaataacctcaattgcatttggacgatcatcagtgaccccggctccaggatccatctgtctttcaatgattttgacctggagtctcagttcgacttcctggcagtcaaggatggtgacagccctgagtcccctatactgggcacgtttacaggagcagaggtccctagtcatttgactagcaatagtcacatactgcggttggagttccaggctgaccatagcatgtcagggagaggattcaacattacgtacaatacatttggccacaatgagtgtccggatcccggaataccaataaatgctaggcgtttcggcgacaattttcagctgggttcctccatttccgtcatatgcgaagagggatttatcaaaactcagggcactgaaacaatcacctgcatcctgatggatggcaaggttatgtggtctggactgatccctaaatgtggggccccatgcggtggacacttctcagccccgtccggggtgatcctgagtcctggctggcctgggtactacaaagatagtctgaactgtgagtgggtgattgaggctgagcctggacacagtatcaagataacctttgaacgattccagaccgaactgaattatgatgtcctggaagtccatgatggccccaacctcttgtcccctttactgggatcatacaatggcactcaggtgccccagtttctcttcagctcttcaaattttatctatctgctgttcactacagataactccagaagcaataatggcttcaagatccactacgaatccgttaccgtgaatacctattcctgcctggatcccgggattccagttcacgggaggcgctacgggcacgacttctctatcggcagcacagtttcattctcatgcgatagcggatatcgactgagccatgaagagcctctcttatgtgagaaaaaccactggtggagccacccactgccaacctgtgatgccttatgtgggggggatgtgcgcggtcccagtggcaccattctctcacctggctatcccgaattttaccctaatagtctgaactgtacctggaccgtagacgtcacacatgggaaaggggttcagttcaactttcacacatttcacctggaggaccatcacgactatctgctgataaccgaaaacggctccttcacccagccgctggccagactgaccgggtccgacctgccacccaccataaacgcgggcctgtacggaaatttccgtgcccagttgcgcttcattagcgatttctcaatcagttacgaaggctttaatatcaccttttccgaatacaatctggaaccttgtgaagatcctggcattccccagtatggatccaggatcggctttaacttcggtatcggggacactttgacattctcctgttcttctgggtacagactggagggcacttccgaaattatttgtctgggcggcggcaggcgggtgtggagcgctcctttgcctcgatgcgtagccgagtgcggggcctcagccaccaacaacgagggtatactgttgtcaccgaactatcccttgaactacgagaacaatcatgagtgtatctacagtattcaggtgcaggcgggtaaggggatcaacattagcgcgcgaacgtttcacctggcgcaaggcgatgttcttaagatatacgatggaaaggataagactacacacctcttgggagcgttcacaggagcctcaatgagagggttgacccttagttccacatccaaccagctctggctcgagttcaactctgacacggaggggacagacgagggatttcagctggtatatacatccttcgagctgtcacattgcgaagatcctggcatacctcagttcggttacaagatctctgatcaggggcatttcgcaggttccactatcatttatggctgcaaccctgggtatacccttcacgggtcttccctactgaaatgtatgactggggagaggagggcctgggattaccccttaccctcgtgtatcgccgagtgcggtgggcgctttaagggggaatctagcgggcggatcctctcacctgggtacccattcccttatgataacaacctccgctgcatgtggatgatcgaggtcgaccccgggaacatcgtcagtctgcagtttttggccttcgatactgaggcctcccatgacattctcagagtctgggatggcccaccggaaaacgatatgctgctaaaagaaatctctggcagtttgataccagaaggcatccattcaactctgaacatcgttacaatccagttcgacacagatttttatattagcaaatcaggttttgccatccaattttcttcatcggtggccactgcctgccgggatcccggagtgcctatgaatggcacacgcaatggcgacgggagagaacccggggacaccgtggttttccagtgcgatcccggctatgagctccagggggaggagcgaattacttgcatacaggtggaaaataggtacttctggcaacccagtcccccagtgtgcatcgccccatgtgggggcaacctcacagggagttcaggatttatcctgtccccaaactttcctcatccatacccacacagtcgggactgtgattggaccatcaccgtcaatgccgattatgtaatatcccttgctttcatttcttttagcattgagccaaattacgactttctctacatatacgacgggcctgattctaattcccccctaattgggtcatttcaggactctaagttgcctgaaaggattgagtcatcaagcaatacaatgcacttagccttcagatctgacgggtctgtgagttatactggttttcacctcgagtataaagccaaattgagagaatcatgctttgaccccgggaatatcatgaacggcaccaggctcggcatggactacaaattggggtcaaccgtcacctattactgtgacgcagggtacgtgctgcagggatactctactctaacatgcatcatgggagacgatggtcgccccggttggaaccgcgcgttaccctcctgtcacgcgccctgtggctccagatctaccgggtcagagggcacggtcctcagcccaaactaccccaagaactacagcgtcggccataattgcgtctattctatcgcagtgccaaaggagtttgcggtgcctagaacctcttccacccagtgtagtagcgtccctgaaccacgattcggtagacgaatcgggaatgaatttgcagtgggatcctctgtcctgtttgattgcaatccagggtacatcctgcatggcagcatcgccataaggtgcgaaactgtgccgaacagcctggcccagtggaacgatagcctccctacatgcatcgttccctgcgggggaatcttgaccaaacgcaaaggaaccatcctgtcacccggttatcctgagccttacgacaacaacctgaactgcgtgtggaagatcacagttccggagggcgcgggtattcaggtccaggtagtgagtttcgctacggagcacaattgggatagcttagacttctatgacgggggcgacaataacgccccaagactgggctcatatagtggtactaccatccctcatctgctgaactccacgagtaacaatctgtatttaaacttccagagcgatatttctgtatccgcagctgggttccacctcgaatatacggcaattgggctggactcttgcccagaaccccagaccccatcctctgggataaaaatcggggacagatacatggtcggggatgtggtatcttttcagtgcgaccaaggatatagcctgcagggtcatagccacattacctgcatgcccggtccagtgcggagatggaattaccccatcccaatttgccttgcacagtgcggtggcgctatgtcagatttttctggagtgatcttgtccccaggtttccccgggaactacccttcttccctggattgtacgtggaccatcaatctgcctatcggttttggcgtccacctacagtttgttaattttagcacagaaacgatccatgattacctcgaggtgagatccggctcctcagagacctcaacagttatcggccgcctgagtgggccgcagatcccatcctccctgttcagcacaacccacgagactagcctttattttcatagcgactactctcagaacaagcaagggttccacatagtgtatcaggcgtaccagttgcaaagttgtcctgatccccgtccatttcgaaatgggtttgtgataggaaatgacttcaccgtgggccagaccatcagttttgagtgtttcccaggctacactttgattggaaatagcgctctcacctgcctgcatggcgtaagcagaaactggaaccatccattgccaaggtgcgaagcactgtgtggggggaatatcacagctatgaatggaacaatatacagccccggctacccagacgaataccctaattttcaggattgtttctggctagttcgcgtgccgcctggaaacgggatctacatcaacttcaccgtactgcaaacagagcctatctatgattttataaccgtttgggatgggcctgatcagaattcaccgcagatcggccaattttccggtaacacagccttggagagcgtctatagtacaagcaatcagattctgataaagttccatagtgatttcactaccagtggcttttttgttctgtcataccacgcatatcaattgcgagtctgccagcccccaccgccagtgccaaatgcggaaatcctgaccgaagacgatgaatttgaaattggcgacatcatacgctatcagtgtctcccgggctttacactggtcggtaatgccatccttacctgtcgacttggagagcggctccagatggatggcgcacctcctgtatgtcaggtgctgtgccctgcaaacgaactcagactggacagcaccggcgtgattctgtctcccggctatccagactcatatccaaacctgcagatgtgtgcctggtcaataagcgttgaaaaagggtataacatcactatgtttgttgaattctttcagaccgaaaaagagtttgacgtgttacaggtgtatgacggtccaaacatccagtctcccgtgttgatctcgctgtccggcgattacagctctgcttttaacattacttctaatggacatgaggtctttttgcagtggagcgccgaccatggcaataacaaaaaaggctttagaattagatacatcgccttttattgctctacgccagaatcaccgcctcacggatatattattagtcagaccggcggacagctgaattcagtggtccgctgggcttgtgacaggggcttcaggctggtcgggaaatcttctgctgtctgtaggaagtcgtcatatggctatcacgcgtgggacgcgccagtgcccgcatgccaggcaatttcctgtgggattcctaaggcccccaccaatggagggatcctgaccacagattacctagtcggaaccagagtgacttacttttgtaacgatggctaccgcctctcgtccaaggagctcaccacagcggtctgccagtctgacggaacatggtccaatcacaacaagactcctagatgtgtggtcgtgacttgtccttcaatcaacagctttatcttggaacacggtcgctggcgtatagtcaacggatctcactacgagtataagacaaaagttgtgttctcctgtgatcctggctaccacggcctcggtcctgccagtatcgaatgtctgcccaacggaacctggagttggcgcaacgagagaccatattgtcaaattatctcatgtggcgagcttcccacacctcctaacggtaacaagattgggactcagactagctacgggtcgaccgccatattcacatgcgacctgggctttatgctggtgggctcagccgtgcgggagtgcctgagctctgggttgtggagtgagtccgaaacccgctgccttgctggacactgcggcatcccggagctgattgttaatgggcaggtcattggagaaaactatgggtaccgggacactgttgtgtatcagtgtaatcccggatttcgccttatcggctcctcggtcagaatttgccaacaggatcacaattggtccggacagctcccctcctgcgtccccgtgagttgtggacaccccggtagccctatttatggccgaacatcaggaaacggcttcaactttaacgacgtggtgacattcagttgcaatatcggctatttgatgcagggtcccacgaaagcccagtgtcaggcaaaccgtcagtggagccacccaccccccatgtgtaaagtggttaactgttctgaccctggcatccccgccaattctaagcgagagagcaagatcgaacacggaaacttcacatacggaacggtggtgttctacgattgtaacccaggatactttttgtttggctccagcgtcctcatatgtcagcccaacggacagtgggataaaccactgcctgaatgcattatgatagattgcggccaccctggagtgccgcctaacgctgttctatctggtgagaaatatacttttggatctaccgtccattatagctgtacaggcaaacgttcccttctgggacagagcagccgaacctgccagctcaacggccactggtctgggtcccagcctcactgcagtggtgatgcgactggaacatgcggtgatcccggcacaccagggcacggtagtcggcaagaaagcaatttcagaacgaaatccactgtgagatacgcgtgcgatacaggctacatcctgcacgggagcgaggaacgtacatgcctggcaaacggctcttggaccgggaggcaacctgagtgcaaagccgtccagtgcggcaatcctggaaccaccgctaacgggaaggtatttcgaatcgatggcacgactttctcatccagcgtgatatacagctgcatggagggatacatactgtcgggtccatctgtcaggcagtgtactgccaatgggacctggtcaggtacgttgccaaactgcactattatttcatgcggtgatccaggaatccctgctaatggtctgagatacggagacgattacgtggtgggtcaaaatgtttcctacatgtgtcagcccgggtatactatggagctcaacgggagcaggattagaacatgtacgattaacggcacttggtctggagttatgccgacatgtagagccgtgacctgtcctaccccccctcagatctcaaatggtcggctggagggaacgaattttgactggggtttcagtatctcttatatctgtagccctggatatgaactgagctttccagccgtgctgacctgtgtgggtaacggcacgtggtcgggggaagttcctcaatgcctacctaagttttgtggggatccaggcatccccgcacagggtaaaagggaggggaaaagtttcatttatcagtctgaggtgtctttctcatgtaacttccctttcattctggtcggctcatccactcgcatatgccaggctgatggcacatggtccggaagttcaccccactgcatagagcccacacaaacctcatgcgagaatcccggggtgcctcgtcacggctctcaaaacaacaccttcggtttccaggttggttccgtagttcaatttcactgcaagaagggccatctgcttcaagggtcaacaacacgtacctgtctccctgacttaacgtggagcggtatccagcctgaatgtatcccacactcctgcaagcagcctgagacccctgcacatgctaatgtggtaggcatggacttaccatcccatggctacactctgatttacacctgccagccaggtttctttctggctggtggaacagaacatcgcgtgtgtcggtctgataacacctggactggaaaagtgcccatatgcgaagctggttcgaagatcctcgtgaaggacccaagacctgctctggggacaccctctcccaagctgagcgtgcctgatgacgtgttcgcacagaattatatctggaaagggagttataactttaaaggcaggaaacagcctatgacactaacagtcacctccttcaatgcatctaccggacgagtgaatgctactctctcaaactcaaatatggagttattgcttagcggggtgtataagtcccaagaggcccgcctcatgttgcgcatctatctcatcaaggttcctgcccacgcctcagtaaaaaagatgaaagaggagaattgggcaatggatggattcgtttctgctgagcccgacggcgccacttacgtgttccagggctttattcagggcaaggactacggccagtttggcctccagcgcttaggactgaacatgtcggagggaagcaactcctctaatcagcctcatgggacaaattcctccagtgttgctatcgcaattttggttccattctttgcacttatcttcgcgggctttggattctatctgtataaacagagaaccgctccgaaaacccagtacaccggttgcagcgtgcacgaaaataataacggacaggctgctttcgaaaatcccatgtacgacacaaatgcaaagtccgtggaggggaaggcagtcaggttcgatccaaatttgaacacggtctgtactatggtttag

SEQ ID NO: 307982 - DNA, 10914 bp, Artificial Sequence
  derived and/or modified sequence
atgaaggggatcaggaagggggagtccagggcgaaggagagtaagccttgggaacccggaaagcgaaggtgtgctaagtgcggcagactggactttatcctgatgaagaagatgggaataaagtccggatttaccttctggaatctggtctttcttctcactgtaagttgtgtcaagggttttatatacacatgcggcggaactctgaaaggccttaatggtacaatcgaaagcccaggttttccctatggttatcctaatggggcaaactgcacgtgggttatcatcgccgaggagcgcaaccggatccaaattgtgtttcaaagcttcgcgctggaggaggagtatgactacctatccctgtatgacgggcacccccatcctacaaacttcagaacacggcttaccggcttccatctgcctccacccgtaacctcaacaaagagcgtcttctcgctccgtctgacatcagatttcgcagtctcggcccacgggttcaaggtttattacgaggagctccagtcaagtagctgcggaaatcccggtgtgccccctaagggcgttttgtacggtacccggtttgatgtcggagacaaaattaggtatagttgtgttaccggctatatcctggatggacatccccagctgacatgtatcgcaaattccgtcaacaccgcttcatgggattttcccgtccccatttgtcgtgccgaggacgcttgcggtggcacaatgcgagggagcagtggtatcatctcctccccaagcttcccaaacgaataccataataacgccgattgcacttggacaattgtggcggaacccggtgacacgatctcactcatttttactgacttccagatggaagaaaagtatgattacctcgaaatcgagggctcagagccgccaacaatatggttatccggcatgaatattccccctccaattatctcaaataagaattggctcaggctacacttcgtcaccgattcaaaccaccgctacagaggtttctctgccccttatcaggggtcgagcacccttactcacaccactagcaccggcgagcttgaggaacacaatcgcacaaccaccggcgctatcgctgtggcttccacacccgctgatgtgacggtgtcctcggttaccgccgtaacgatccatcgcctcagcgaggaacagcgagtgcaggtgacttcccttcggaactctggtctggacccaaatacttccaaagatgggctaagcccccaccctgcggacacacagtcgacaaggagacggccaagacacgctgaacagatcgagaggactaaggaactggccgtagtgacacacagggttaagaaagccatcgatttcaaatcgaggggattcaaactgtttccaggcaaagacaattccaacaagttctccattcttaacgaaggcggaattaaaacagccagtaacctctgcccagaccccggtgagcctgagaacggaaaacggatcggctccgatttcagtctcggatctaccgtacagttttcatgcgatgaggattacgtgctccagggtgctaaatctatcacttgccagcgtatcgctgaggtttttgcagcttggtcagaccacaggcctgtttgcaaggttaagacctgcggatctaatctgcagggtccaagtggcactttcacctctcccaattttccatttcagtacgattccaacgcacagtgcgtgtgggtcattacggcggttaacacaaacaaagtgattcagataaattttgaagaattcgaccttgagattggttatgacacactaactataggagatgggggagaggttggggatcctcgaactgtgctacaggtactgactggtagttttgtaccagatctgatcgtctcaatgtccagccagatgtggctccacttgcaaactgatgaatcggtgggatctgtggggtttaaagtgaattataaggagatcgaaaaggaaagctgtggcgatccgggtactccgctgtatggcatccgcgagggagacggattctctaacagagatgtgctgcgattcgaatgccagttcggctttgagttgatcggagaaaagtccatagtttgtcaggagaacaaccagtggagtgcaaacatcccaatctgtatatttccttgcctgtccaacttcactgccccaatgggcactgtcctctcaccagattaccctgagggttatggcaataatctcaactgtatttggacaataatctcagacccaggcagcaggattcatctgagtttcaacgattttgatctcgaatctcagttcgactttctggccgtgaaagatggtgactcacccgagtccccgatccttggcacttttacaggagccgaagtcccgtctcacttgacatccaactcgcatattctccgactggagttccaggccgatcattctatgagcgggcgtggctttaacatcacatacaatacttttggtcacaacgagtgccctgatcctggaattcctatcaacgcacggagattcggagacaacttccagctgggcagttccattagtgtgatctgtgaagaaggattcatcaagacgcagggaacggagaccattacttgtatcttgatggacggaaaagttatgtggtccgggctgattcctaagtgcggcgctccgtgcggtggtcacttctctgccccttctggcgtgatactgtctcccggatggccagggtactacaaggattctcttaactgtgaatgggtcatcgaagccgagccaggacacagcataaagataacgtttgagaggttccagaccgagctcaattacgatgtgctcgaagtgcacgatggcccaaatctgctaagtcctctcctcggcagctacaacgggacacaggtgccacagttcctattctcctcttctaacttcatctacctgctgtttacaaccgataacagtaggagcaacaacggctttaaaattcactatgaatcagtcaccgtgaacacatactcttgcctggacccaggcattcccgtgcatggtagaaggtatgggcacgatttttctatcggttctacagtcagcttctcctgtgacagcgggtatcggctctcccatgaggagcccctgctgtgtgaaaagaatcactggtggtcccaccccttacccacctgtgacgctctgtgtgggggagatgtgcgaggaccctccggaaccattctgtccccgggttacccagagttctatcctaattcactaaattgtacatggacagttgatgtcactcatggtaaaggcgtgcagtttaatttccacactttccatctggaggatcaccacgattatcttttaatcacggaaaacggcagctttacccaacccctggccaggctgactggaagcgatctcccacccaccataaacgcaggcctgtacggaaatttccgggcacagctccgctttatttctgactttagcataagttacgagggttttaatatcaccttttctgaatataatctggagccatgtgaagaccccggaattcctcagtatggctccagaataggtttcaacttcggaatcggggataccctgacatttagctgctctagcggttatagactggagggtactagcgagattatttgcctgggaggaggacgcagggtgtggtccgctcccctaccaagatgcgtcgccgagtgcggggcaagtgcaaccaacaatgaaggcatcctgctgtcgcccaattacccactcaactacgaaaacaatcacgaatgtatctattccattcaggttcaagcagggaagggcatcaatataagcgcccgaacattccaccttgcccagggagatgtgctgaagatctacgatggcaaggataagaccacccatctgctgggcgcattcactggggcttctatgcgcggtctgaccctgagtagtacaagcaaccagctctggttggagttcaacagtgataccgaggggacagacgaaggtttccagctggtttataccagtttcgagctctcacactgtgaggacccagggatcccccagtttggttacaaaatcagcgatcagggccacttcgctgggtccacaatcatctatggctgtaatccaggctacaccctgcacggttcgtcactgctgaaatgcatgaccggagaaagaagggcatgggattatcccttaccaagctgcatcgcggaatgcggcggtcgatttaaaggagaatcctccggccgaatcctctcccccggatacccattcccatacgataataacttgagatgtatgtggatgatagaggtggatccaggcaacatcgtgtctctccagtttttagctttcgacaccgaagcgtcccatgatattctgagggtctgggatggaccacccgagaacgacatgctgctgaaggagatttctggaagcctcattccagagggcattcactccaccctgaacatcgttacaatacagtttgacaccgatttctatatcagcaagagcggttttgcaatccaattcagcagtagtgtggctaccgcctgcagagacccgggtgtgcccatgaacgggacaagaaacggcgacgggagggagcccggagacactgtggtgttccaatgtgatcccggttacgaactgcaaggagaggaaagaatcacttgcattcaagtggagaacaggtacttttggcagccttcacccccagtctgtatcgccccttgcggtgggaacctgacagggagctctggttttattctgtctccaaattttcctcatccatacccccactctcgcgattgcgattggaccattaccgttaacgctgactatgttataagtttagcctttataagtttttccattgaaccgaactatgacttcctgtatatctatgatggccctgactcgaattctccactgatcggctctttccaggacagcaagctcccggaacgaatcgagtcctcgtctaataccatgcatctcgccttccggtcagatggaagcgtgagctatacaggctttcacctggagtataaggctaaactacgcgagtcctgcttcgatccgggaaacataatgaacggtacgaggctgggcatggactacaagcttgggtctaccgtgacctactactgtgatgcaggctacgtcctacaggggtattcaacattaacctgcatcatgggcgacgatggtcgacccggttggaatagagcgctcccctcttgtcatgccccttgcggaagcagatctacaggttctgaggggactgtcctctcccctaactatcccaaaaattactctgtcggccacaactgcgtttatagcattgctgtgcccaaagaatttgccgtgccgaggactagctccacccagtgctctagtgtgcctgaaccgagatttgggaggcggatcggaaacgagttcgccgtggggagctcagtgcttttcgactgcaaccctggctatatccttcacgggagcatcgccatccggtgtgaaaccgtacccaactcactggcccagtggaacgattctctgcctacttgtatcgtaccttgcggaggaatcctgaccaaaaggaaagggacgattctgtccccaggctatcccgagccatatgacaacaaccttaattgtgtgtggaagataaccgtgcctgagggcgcaggaatccaggtgcaggttgtatctttcgccaccgagcacaattgggactctttagatttttacgatggcggtgacaacaacgctcctaggctgggcagttacagcggaaccacaatacctcaccttcttaactcaacatcgaacaacttatacctcaatttccaaagtgacatatccgtgtctgcagccggtttccacctggagtacaccgccattggtttagatagctgccccgaaccccagactccatcatctgggatcaaaataggtgacagatacatggttggtgatgtggtttcttttcagtgtgatcagggttactcactgcagggccattcccatattacctgtatgccgggaccagtcagacggtggaattatcctatccccatttgcctcgctcagtgcggcggagccatgtctgacttttctggcgtcattttaagcccagggtttcccggaaattatccctctagcctggactgcacatggaccataaatctgcctataggcttcggcgtccacctccaattcgtcaatttttcaacagaaacgatacacgattacctggaggtcaggtctgggtcgtctgagaccagcacggtgattgggagactttcagggccacagatcccttccagcctgttctctacgacgcacgaaacttccctgtacttccatagtgactacagtcagaacaagcagggattccacatcgtctatcaggcttatcagctgcagtcatgtcccgacccgaggccgtttcgtaacggctttgtaatcggaaacgattttactgttgggcaaacaatatcctttgaatgcttccctggctatactctaatcggcaacagtgctctgacctgcttgcacggagtcagccgcaactggaaccacccattgccccgatgtgaggcactgtgcggtggaaatatcaccgccatgaatggcacgatttattcacctggctatcccgacgaataccctaattttcaggattgtttttggttggtacgggtgcctcctggaaacggcatctacatcaacttcactgtcctacaaaccgagcccatctatgacttcatcacagtgtgggacggaccagatcagaatagcccacagatcggacagttctctgggaatacagcgctggaatctgtgtatagtacttcaaatcaaattctcatcaagtttcactctgatttcaccacctcaggattctttgtgctgtcttatcacgcctatcagctgcgggtgtgccaaccaccaccaccagttcccaatgctgaaatcctgaccgaagacgacgagttcgagatcggagacattatcagatatcagtgcctgcccggtttcactctagtgggaaatgcgatccttacttgcaggctgggggagagactgcaaatggacggtgcacccccagtctgccaggtgctttgtcccgctaacgagcttcgtctggattccacgggggttattctctctcctggttaccctgactcatatcctaacttgcagatgtgcgcttggtccatttccgttgaaaagggttataacatcaccatgttcgtggaattctttcagaccgagaaggagtttgatgtgctacaggtctacgacggcccaaacatccaatcgccggtgctgattagtctgtctggcgattatagctctgcctttaatataactagcaacggacatgaagtctttctccagtggagtgcagaccatggcaataacaaaaagggattccgcatacgatatatcgccttttattgctcgacgccagagtctccaccccatggctacatcatcagtcagaccggaggacagcttaacagcgtcgtgcggtgggcttgcgataggggttttagactcgtggggaagtcttctgccgtttgccggaaatctagttacggctatcatgcatgggacgctcctgtgccagcttgtcaggcgattagctgcgggattcccaaggctcccactaacgggggaatcctcacgaccgactacctagtggggactcgcgtgacgtatttctgtaacgacggttaccggttgagctcaaaggaactgactactgctgtatgtcagtctgacggaacttggtcaaatcataataaaaccccaagatgtgtagtggtcacctgtccgagtatcaactcatttatcctggaacatggccgatggaggattgtaaatgggagccactatgaatacaaaaccaaagtcgtgttctcctgtgacccagggtatcacggcctgggaccagcttcaatagagtgcctgcctaacggcacttggtcctggaggaacgaaagaccttattgtcagattatttcttgtggcgagctgccaaccccaccgaacggcaacaagattggcacccagacctcatatggtagcacagctatttttacctgtgatctgggctttatgctggtgggttccgccgtgcgcgagtgtttatcctctggcttatggtccgagagcgagacaaggtgtctcgcgggtcactgcggtattccagaattgatcgtgaatggtcaagtgatcggtgagaactacgggtaccgggataccgtggtgtatcagtgcaacccaggtttcagactaataggctcctccgtccgtatttgccagcaagatcacaattggtccggtcagctgccctcttgcgtgccagtgtcttgcggccatcccggtagtccgatctacgggcgtactagcgggaatgggtttaatttcaacgacgtggtgactttttcctgcaatattgggtatttgatgcagggcccaacaaaagcccaatgtcaggccaatcggcagtggagccatcccccaccaatgtgtaaagtggttaattgttccgacccaggcattcccgctaattcaaagcgggagagcaaaattgagcacggtaacttcacttacgggacagtggtgttctacgactgtaatcccggatatttcttatttggaagttctgtacttatatgtcagcccaatgggcagtgggataaaccccttcctgagtgcattatgatagattgtggtcaccctggcgtacccccaaacgccgtgctatcaggtgagaagtacacttttggtagcaccgtccactactcatgtaccggtaagcggtctttgcttggccaaagtagtcgaacttgccagcttaacgggcactggtcgggatcacagcctcactgcagtggcgatgctaccggaacctgtggggatccgggtactcccggacatggttctaggcaggaaagcaactttaggacaaaaagcaccgtccggtatgcttgcgatacaggctatattctgcacgggagcgaagagagaacctgcctcgccaatggctcatggactggacgccagccagagtgcaaggcagtacagtgtgggaacccaggaaccacagccaatggtaaggtattccgaatcgacggaaccacattcagctcaagcgtgatatatagttgcatggaaggatatatacttagcgggccttctgtgcgtcaatgcaccgcaaatgggacatggtctggcaccctgcccaattgtaccatcatatcctgcggtgaccctggtataccagcaaacggactgcggtatggggatgactacgttgttggtcagaacgtgagctacatgtgccagccaggctatacaatggaactcaatggttcccggattcggacctgtacaatcaatggcacatggtccggggtcatgccgacctgtcgggctgtgacttgtccaaccccccctcaaatttccaacggcagactcgagggcaccaattttgattggggtttcagtatttcctatatttgttcgcctggctatgagttaagctttcctgcggtccttacatgcgtgggaaatggtacttggtctggagaggtgccacagtgtctccctaaattttgtggagatcctgggattcctgcacagggcaaacgtgagggtaaaagcttcatctatcagagtgaggtgtctttttcgtgtaatttccccttcatcttagttgggagttcgaccaggatatgccaggccgatgggacttggtccggctcaagcccacactgtatcgagccaacacagacaagttgtgaaaatccgggagtacccagacacgggtctcagaacaacacatttggttttcaggtgggcagcgtggtccagtttcattgtaaaaagggccatctactccaggggtcgactactaggacgtgtcttcccgatcttacttggagtgggatccagcccgagtgtatccctcattcttgtaagcagcccgagacccccgctcacgccaacgtcgtcggaatggacttaccctcacacggatataccctgatttatacttgccagccagggtttttcttggccggtggaactgaacaccgcgtgtgtcggagcgataacacgtggaccggaaaggtgccaatctgcgaggcgggaagtaaaattttggtcaaggaccccaggcctgcattgggcacaccgtctcccaagctctcagtacctgatgacgtctttgcgcaaaattacatttggaagggttcctataactttaaagggcgaaaacagccgatgaccctgactgtgacctcattcaatgcctctaccggcagagtgaatgctaccctgagtaactccaatatggagcttttactgtctggtgtgtataaatcccaggaagctcggcttatgctgaggatctatctcattaaggttcccgctcacgcctctgtgaaaaagatgaaggaagagaactgggcaatggacggtttcgtgtcagcggagccagatggggctacatatgtgtttcagggcttcattcagggtaaggattacggccagttcggactccaaagactcggactgaatatgagtgaggggagcaatagtagtaatcagccacatggcactaattccagttcggtcgcaatagctattctggtgcctttttttgcacttatctttgctgggtttggcttctacttgtataagcagaggactgcgcctaagactcagtacactggctgttccgttcacgagaataataatgggcaggccgctttcgagaaccccatgtatgatactaatgctaaatctgtggagggtaaagccgtgcgatttgatccaaacctgaacaccgtgtgtactatggtttac

SEQ ID NO: 307983 - DNA, 12912 bp, Artificial Sequence
  derived and/or modified sequence
gagactttgtgcccccgttggagagatggttgagtcctcgtcaaggttgctgtggtatcccagaaacaccattcactccgagctgtgaccgcgcaccaacaacagcaacaactccactgcgccgggctgaggagcaggaattaggagctcgcgaataatatgaaagggatccgcaaaggggaaagccgagcaaaggaatccaaaccctgggagcctggcaagcgaagatgcgctaaatgtggccgcctagacttcatcctgatgaagaaaatggggattaaaagtggatttacgttttggaacctcgtctttttattgacggtgtcttgtgtgaaaggatttatttatacatgtggtggaactttaaaaggacttaatggcactatagaaagccctggttttccatatggatatccaaatggtgcaaactgcacatgggtaataatagcagaagaacgaaatagaatacaaattgtttttcagtcatttgctctagaagaagaatacgactacttatcattatatgatggacatcctcatcctacaaactttaggacaaggttaacaggattccatctgccacctccagtgacaagtaccaaatctgtgttctcactacgtttgaccagtgattttgcagttagtgctcatggatttaaggtatattacgaagaattgcagagtagctcttgtggaaatcctggtgttccacccaaaggtgtattatatggcacaagattcgacgtcggggacaagatccgctacagctgtgtaactggatacatccttgatggccaccctcagctcacctgcatagccaattcagttaatacagcttcgtgggattttcctgttcctatctgtagagctgaagatgcttgtggaggaacaatgagaggatccagtggcatcatatccagccctagttttcctaatgagtaccataacaatgctgattgcacttggaccattgtagcagagcctggggacacaatttcactcatatttactgattttcaaatggaagagaaatatgattacttagaaatagaaggttctgagccacctaccatatggttatctggaatgaatataccaccaccaattatcagcaacaaaaactggctcagactgcattttgttacagacagcaatcatcgataccgtggatttagtgctccctatcaaggttcttctacattgacccacactacctccactggtgagttagaggagcataacaggactaccactggtgctattgctgttgctagcacacctgcagatgttactgtatccagtgttacagctgtcaccatccatagactttccgaggaacagcgagtgcaagttacgagtctcagaaattcaggtctggaccccaacacgtccaaggacgggctctctcctcatccagcagatacacaaagtaccaggagaagaccaagacatgctgaacagatagaaagaactaaagagcttgcagttgttactcatagagtgaaaaaggccatagattttaaatctagaggatttaaattgtttccagggaaagacaacagcaacaagttttctatcttaaatgagggaggtattaaaacagcttccaatttatgcccagatccaggagaaccagaaaatgggaagagaatcggatcagattttagccttggatcaactgtgcagttctcttgtgatgaagattatgtcctacagggcgcaaagagcatcacctgtcaacggatagctgaagtttttgctgcttggagtgatcacaggcctgtgtgtaaagtgaaaacgtgtggctctaatcttcaaggaccaagtggtacctttacatctcccaactttccgttccagtatgacagcaatgcacaatgtgtctgggtcatcacagcagtgaatacaaataaggttatccagataaattttgaagaatttgatctggagattggctatgataccttgacaattggcgatgggggcgaagttggagatcctaggacagtgctccaagtgctgactggaagctttgtaccagacttgatagtgagcatgagtagccaaatgtggctgcaccttcaaacggacgaaagtgttggatctgttggtttcaaggttaactacaaagaaattgagaaagaaagttgtggtgatcctggtacacccttatatggaattagagaaggcgatggattttctaatcgtgatgttttaaggtttgaatgccagtttgggtttgaattaattggagagaaatccattgtttgtcaagagaataaccaatggtctgcaaacatacccatctgtatctttccctgcctgtctaactttactgcaccaatgggaacagttctttctcctgattacccagaagggtatggaaataatttaaattgcatctggacgataatctctgatccagggagccggatacatctttctttcaatgactttgacctggaatcccagtttgatttccttgctgttaaagatggtgactctccagaatccccaattcttggaacctttactggggctgaggtgccttcccatcttactagtaatagtcacatactgcgattggaatttcaggctgaccactcaatgtcaggacgtggctttaacatcacttacaacacatttggacataatgaatgccctgatcctggaataccaatcaatgcacggcggtttggggacaactttcaattaggaagttcaatttcagttatttgtgaagaaggatttattaaaacccagggaacagaaacaattacatgtattcttatggatggaaaagtaatgtggagtggactgattccaaaatgtggagccccatgtggtggccatttttcagctcccagtggagtgattctctcaccaggatggccaggatactacaaagactctttgaattgtgagtgggtgattgaagctgaacctggacactctatcaaaattacatttgaaagatttcagactgaactgaattatgatgttctggaagttcatgatgggccaaatcttctgtcacccttgcttggatcttacaatggcacccaagtgccccagtttctatttagtagcagtaattttatataccttctatttacaacagacaacagtcgttccaataatggtttcaagattcattatgaaagtgttacagtgaacacgtattcttgtttggaccctggcatacctgtacatggccgtcgctatggtcatgatttctccattggctctactgtttcatttagttgtgattcaggatacaggttgagtcatgaagagccccttctatgcgaaaaaaaccactggtggagtcatccacttccaacctgtgatgcattatgtggaggagatgttagagggcctagtggaacaatcttatcacctggttacccggaattttatccaaattctctgaattgtacatggactgttgatgtaacccatggaaaaggtgtgcagttcaacttccacacttttcatttggaagaccatcatgactacttactgatcacagagaatggcagttttacccaaccactggcacgcctgactggttcagatcttcctccaacaatcaatgctggtctctatggaaatttcagggctcaattgcgtttcatttcagatttttcaatatcatatgaaggatttaacataacattctctgaatataaccttgaaccttgtgaagatcctggcattcctcaatatggtagtcgaatcgggttcaactttgggattggtgacactctgaccttctcatgctcttcgggttatcgactggaaggaacatcagagatcatctgtcttggtggtggccgacgagtgtggagtgcacctctgccaaggtgtgtggctgaatgtggtgcatctgcaacgaataatgaaggaattttgctgtctccaaattatccactcaactatgaaaacaaccatgaatgcatttatagtattcaggttcaagcaggaaagggaatcaatatttcagccagaacatttcatttagcacaaggagatgttcttaagatttatgatggaaaagataaaacgactcatctactaggtgcttttactggtgcatctatgcgcggactgacacttagtagtacttcaaatcaactctggctagaatttaattccgatactgaagggacagatgaaggctttcaacttgtgtataccagttttgaactctcacactgtgaagatcctggcattccacaatttggatacaagatcagtgaccaaggccactttgctggtagcaccatcatttatggatgcaatccaggctacactctccacggaagtagccttctcaagtgcatgacaggggagagaagggcatgggactatcctctgccttcctgtattgctgaatgtggaggtcgttttaaaggagaatcatcaggaagaatcttatctcctggctatccttttccatatgacaataacctgcgttgcatgtggatgattgaggtagatcctggaaatattgtcagcttgcagtttcttgcttttgatacggaagcatcacatgatatactccgagtctgggacggtccaccagaaaatgatatgcttttaaaggaaattagtggatctcttattcctgaaggaattcatagcaccctcaatatagtaaccatccagtttgacacggatttttatattagcaaatctggatttgcaattcagttttcaagttctgttgccactgcgtgtcgtgacccaggggtccccatgaatgggactcgaaatggggatggaagagaacctggggacactgttgtttttcaatgtgacccaggatatgaacttcaaggagaggaaagaataacctgcattcaggtagaaaatcggtacttctggcagcccagcccaccagtctgtatagcaccctgtggaggcaatttaacaggatcttcaggctttattctttcaccaaacttccctcatccatatccgcatagcagagactgtgactggactatcaccgtcaatgcagactatgttatctccttggcgttcatcagttttagcatagaaccaaactatgacttcctctatatctatgatggaccagacagtaatagcccactgattggaagttttcaagacagcaagttaccagagagaatagaaagcagctcaaatacaatgcatttggcttttcggagtgatggatctgttagttacactggatttcatctagaatacaaagcaaaactgcgagagtcctgctttgatccaggcaatataatgaatggcaccagacttggaatggattataaattagggtcaacagtcacctattactgtgatgctggttatgttcttcaaggttattcaacactcacctgtatcatgggagatgatggaagacctggatggaatagagccttgccaagttgtcatgcgccctgtggaagtcgttcaacaggttcagaaggcactgttctatcaccaaactatccaaaaaattacagtgtgggacataattgtgtttattctatagcagttccaaaggagtttgctgttcctagaacaagttctacacaatgcagttctgtgcctgaaccaagattcggaagaagaattggcaatgaatttgcagtcggttcatcggttctttttgattgtaatccaggatatattctccatggatccatagcaattaggtgtgaaacagtgcccaattctttggcccagtggaatgattccttacctacttgtattgtgccctgtggtggaattttaactaagcgcaaagggactattttgtcacctggataccctgagccttatgacaacaatctgaattgtgtgtggaagatcacagtgccagagggagctggcattcaagtgcaagttgttagctttgctacagaacataattgggattctctggacttttatgatgggggagacaacaatgctccaagacttggaagctattcaggaacaacaataccccatcttttgaatagtacgtctaataatctgtatctaaattttcaatcagacatcagtgtttctgctgcaggatttcatcttgaatacacagcaattggtttggattcctgtcctgaaccacaaactcctagcagtggaattaaaattggagacagatatatggttggagatgtagtatcctttcagtgtgatcaaggatattctcttcagggtcactctcacattacatgtatgccaggacctgtaagaagatggaattatccaatcccaatttgtttagctcagtgtggtggtgctatgtcagacttcagtggtgtgatcctcagtcctgggtttcctggaaactatcccagcagtttagattgcacatggacaataaatctacccataggttttggtgtacatctccagtttgtaaatttttctacagaaaccatacatgattatttggaagtacgaagtggatcctcagaaactagtactgttattggccggcttagtggtcctcaaataccatcttccttattcagcaccacccatgaaaccagcttatattttcacagtgactattcacaaaacaaacaagggtttcatattgtataccaagcctatcagttgcaaagctgtcctgatccacgcccgtttcgaaatggttttgtaattggtaatgattttactgtgggtcaaaccatttcatttgaatgtttcccaggatacacattaattggaaattcagctctcacatgccttcacggagtcagtcgtaattggaatcatccacttccaaggtgtgaagctctttgtggtgggaatataactgcaatgaatggcaccatttattctcctgggtatcctgatgaatatccaaactttcaagattgtttttggcttgtaagagtaccccctgggaatggcatctacatcaattttactgtccttcaaacagaaccaatatatgatttcattactgtatgggatggaccagaccaaaattcacctcagatcggtcagttcagtggcaataccgctttggaatcagtctacagtacttcaaatcagattctaatcaaattccacagtgatttcacaacaagtggcttttttgtgctcagttatcacgcctatcaactaagggtgtgccaacctccaccacctgtgcccaatgctgaaattttgacggaagatgatgaatttgaaataggtgatattattaggtatcagtgtcttccaggatttactttagttggtaatgcaattctgacgtgcagattaggagaacgactgcagatggatggagcacctccagtttgtcaagtgctctgtcctgccaatgaattacggctagattctactggagtcatattgagccctggatatcctgacagttacccaaatcttcaaatgtgtgcatggagcatttcagtggaaaagggttataatatcaccatgtttgtagaattcttccagacagaaaaggaatttgatgttcttcaggtgtatgatggaccaaatattcaaagtccagtgcttatttccctcagtggggattattcatctgcttttaatataacaagcaatggtcatgaagtatttcttcagtggtcagcagatcatggcaataacaaaaaaggcttccggataagatatatagctttctactgtagtacaccagaatccccacctcatggatatattatcagtcagacaggtgggcagcttaacagtgtggtccgttgggcctgtgatcgaggattccgacttgttggaaaaagcagtgctgtgtgcagaaagtcttcctatgggtatcatgcatgggatgcgccagtccctgcctgtcaagcaatttcctgtgggattcctaaagctccaacaaatggaggaatactaacaacagactatttggtaggaacgcgagttacctatttttgtaatgatggatatcgattgtcatccaaagaactcactacagctgtatgccaatcagatggaacatggagcaatcataacaagacccctcgctgtgttgttgttacatgtccaagcatcaattcctttatcttggaacatggaagatggcgaattgtgaatggctcccattatgaatacaaaaccaaagtagttttcagctgtgaccctggttatcatggactaggtcctgcctccatcgaatgtcttcctaatggtacttggagttggagaaatgaaagaccatattgccaaattatttcctgtggagaactacctacacctccaaatggaaataagattggaactcaaacttcatatggctcaacagctatctttacctgcgacttgggattcatgcttgtgggctctgctgtaagggaatgcctttcctcaggtctttggagtgaatctgaaaccagatgcctagcgggtcattgtggaattccagaactgattgtgaatggtcaagtcattggagaaaattatggatatagagacacagttgtatatcaatgtaatcctggttttcgattgattggttcttcagtgaggatatgtcaacaggatcacaattggtctggtcagctcccatcctgtgtgcctgttagctgtggtcaccctggtagtccaatttatggaagaacaagtggaaatgggttcaactttaatgatgtggtaacattctcatgcaatattgggtatcttatgcaagggccaacaaaggcacagtgccaggccaacagacagtggagccatcctccacctatgtgcaaagtggtcaactgttctgatcctggaattccagccaattctaaaagagaaagtaaaatagaacatggaaattttacttacggcactgtggtattctatgactgcaatcctggatattttttatttggatcttcagttttgatatgtcaaccaaatggacaatgggacaaacctttaccagaatgtatcatgattgactgtggacaccctggcgttcctcctaatgcagtcctgtctggcgagaagtatacttttgggtctactgttcactattcctgcacaggaaagcgttcccttttaggccagtcatcaagaacctgccaattgaatggccattggagtggatcacaacctcattgttcaggtgatgctactgggacatgtggcgatccaggtactcccggccatggctctagacaggaaagcaatttcagaactaaaagtactgtacgttatgcttgtgatactggttacatccttcatggctcagaagaaagaacatgtttagctaatggcagttggaccggaaggcagccagagtgcaaagctgtgcagtgtggtaacccaggaaccacagccaatgggaaagtcttccgaattgatggcacaacattttctagttcagtcatttattcctgcatggagggatacatcctttctggaccttcagttagacagtgcacagccaatggaacatggtctggaactttacctaactgtacaataatcagttgtggagacccaggtataccagccaatggactgagatatggagatgattatgtggttggacaaaatgtttcttacatgtgccagccaggctacacgatggaattgaatggctccagaatcaggacttgtacaattaatggcacatggagtggagtaatgccaacttgtagagctgttacctgcccaactcctccccagatctctaatggaaggctggaaggaacaaatttcgactggggctttagtattagctacatctgttctccaggctatgagctatccttccctgctgttttgacctgtgtagggaatggtacctggagtggtgaagtaccgcagtgcttaccaaagttttgtggtgaccctggtatacctgcccaaggaaaaagagaaggcaaaagctttatataccagtcagaggtttcattcagctgcaattttcctttcatattagtgggatcaagcaccagaatatgtcaagcagatggcacttggagtggttcatcacctcactgcatagagcctacccaaacctcttgtgaaaacccaggtgtgcctcggcatggatctcagaacaatacattcggatttcaagtaggaagtgttgtacagttccattgcaaaaaaggacaccttctccaagggtctacaacacgcacctgcctccctgatcttacgtggagtgggattcagcctgaatgcataccccacagctgtaaacagccagaaactcctgctcatgcaaatgtcgtagggatggaccttccatctcatgggtatacactgatttatacctgtcagcctggcttcttcttagcaggtggaacagaacatagagtgtgtagatccgataacacctggactggaaaagttcccatttgtgaagctggttctaaaatattggtgaaagatcctagacctgcactgggaacacccagcccaaagctaagtgttcctgatgatgtatttgcccaaaattatatatggaaaggctcttacaatttcaaaggaaggaaacaacccatgaccttaacagttactagtttcaatgcttccactgggagagttaacgcaacactgagcaatagcaacatggagctgctactttcaggggtatataaaagccaggaagctcgcctaatgttacgcatatatcttattaaagtacctgctcatgcttctgtgaagaaaatgaaggaagaaaattgggcaatggatggctttgtttctgctgagcctgatggagctacttatgtatttcaaggatttattcaaggcaaagattatggacaatttggcctacaaagactgggactgaatatgtcagaaggttcaaattcttcaaatcaacctcatggtacaaatagtagttctgtagccattgctattcttgtgcctttttttgcacttatatttgcaggatttggattttatctttataaacaaaggactgcacctaaaacacagtatacaggatgttcagttcatgaaaataacaatggccaagcagcttttgaaaatcccatgtatgacaccaacgcaaagtcagtggaagggaaggcggtacgatttgatcccaacttgaacacggtttgcacaatggtataacgaggcaacctttgccttcttcagaagcttggaaatcgacacacaaaacagtgcacatttagttcactgctaaacaaattaaagcacacttttcaggacttgctgggtcaccttttcctgaggaatgatacagaagagtgttttttcataaactggaccataattcttcatgtttaccatggagagttttacagaaatttggctgcactctgagagtgcttactcacagtttatttgctttttttaaaaaggagattattctaaaatataaacttatttgcatatattggaggagcatccactatcagtatttctgtgctttataaactatattagagggactgggtttaaaaaaaaagatatagggtagaaataagagctatacttacaagagtcaatagatcactgacttctctttaactgtcctgagctacatcacgcccacaaatctgtctttcataccactctatctgccattcattcttgttaaatgaggcattgttttctttatttaagattgagttatgactttaaatgtttatgagctagtttatgcctcggaagacataaggtttcccattccaatttgaatctttctatttctttagcatcatattgctcttcttcttttagactggttgtcatagtttctgcaaagggcaagttcattgtgctaccctcccaattcccccattatggagtaaccagtattattcagtgagctatggggtagtgtttcactccttgcttcaatatggttttttcctatttatttttattattttttaatcccaaatgtgatagtagcttcagtatgtttcctcacccaaaaaccatttggctggcagaaattatctagaaaaattattattttgcagttatctgagacaccaaacttaccatcctttattttacaatatttttgatcgaccaaataaaatgtcctaataatctactctatttatatctacatttccttccagctgagtcttcaaatttagcattattttgacacttttaattttcatttaacaatggattagaaaaatattttggtctagccactaaacataatgactgaaaaaaattattattataaatcaccaatataaatttattgcctacaattgtggacttatcatatttttatatatttttaaatttctgtacctttattgttaaacaccaagtttcacatacaagaggtttctttcattgtcaaattaagatatgtatttgtaagttattggtggctcatttaaactgtatcatacagtaatgccagcatttttatttaataggtcatcgtcttccttttatagctgttttacttcattgaatacgatcatgtacccagtgttaactctttgttgttgtccctttcaaatatggataactctgtgaacagtcttgactttttgtatcatgagacagagtgcctaagagaaacccttgcacctgggagcgctgcttggctctatctctacaacatttaatgaatttcttgtaaaccactttgagatacattgttttggaaattcatacaattttctcaacatggtactctactggcaggatgcagttttaaattttatgccatcagttatttattcttgtttattcaaatgactgcaataacaatgattcattcattaatgttaaggctaatacatttaagatcttgtttaaacaatgtttcttctgcaactggctactcctcttatattaatgcatacacttttgtaaagaagtatatttttatgaaaagaaactttgtaaaagtatgatgtaaattttcagtgcaatgtaaacaaaataaaaatggataattgcttttgt

SEQ ID NO: 307984 - DNA, 10914 bp, Artificial Sequence
  derived and/or modified sequence
atgaagggcatcagaaagggcgagagcagagccaaggagagcaagccctgggagcccggcaagagaagatgcgccaagtgcggcagactggacttcatcctgatgaagaagatgggcatcaagagcggcttcaccttctggaacctggtgttcctgctgaccgtgagctgcgtgaagggcttcatctacacctgcggcggcaccctgaagggcctgaacggcaccatcgagagccccggcttcccctacggctaccccaacggcgccaactgcacctgggtgatcatcgccgaggagagaaacagaatccagatcgtgttccagagcttcgccctggaggaggagtacgactacctgagcctgtacgacggccacccccaccccaccaacttcagaaccagactgaccggcttccacctgcccccccccgtgaccagcaccaagagcgtgttcagcctgagactgaccagcgacttcgccgtgagcgcccacggcttcaaggtgtactacgaggagctgcagagcagcagctgcggcaaccccggcgtgccccccaagggcgtgctgtacggcaccagattcgacgtgggcgacaagatcagatacagctgcgtgaccggctacatcctggacggccacccccagctgacctgcatcgccaacagcgtgaacaccgccagctgggacttccccgtgcccatctgcagagccgaggacgcctgcggcggcaccatgagaggcagcagcggcatcatcagcagccccagcttccccaacgagtaccacaacaacgccgactgcacctggaccatcgtggccgagcccggcgacaccatcagcctgatcttcaccgacttccagatggaggagaagtacgactacctggagatcgagggcagcgagccccccaccatctggctgagcggcatgaacatccccccccccatcatcagcaacaagaactggctgagactgcacttcgtgaccgacagcaaccacagatacagaggcttcagcgccccctaccagggcagcagcaccctgacccacaccaccagcaccggcgagctggaggagcacaacagaaccaccaccggcgccatcgccgtggccagcacccccgccgacgtgaccgtgagcagcgtgaccgccgtgaccatccacagactgagcgaggagcagagagtgcaggtgaccagcctgagaaacagcggcctggaccccaacaccagcaaggacggcctgagcccccaccccgccgacacccagagcaccagaagaagacccagacacgccgagcagatcgagagaaccaaggagctggccgtggtgacccacagagtgaagaaggccatcgacttcaagagcagaggcttcaagctgttccccggcaaggacaacagcaacaagttcagcatcctgaacgagggcggcatcaagaccgccagcaacctgtgccccgaccccggcgagcccgagaacggcaagagaatcggcagcgacttcagcctgggcagcaccgtgcagttcagctgcgacgaggactacgtgctgcagggcgccaagagcatcacctgccagagaatcgccgaggtgttcgccgcctggagcgaccacagacccgtgtgcaaggtgaagacctgcggcagcaacctgcagggccccagcggcaccttcaccagccccaacttccccttccagtacgacagcaacgcccagtgcgtgtgggtgatcaccgccgtgaacaccaacaaggtgatccagatcaacttcgaggagttcgacctggagatcggctacgacaccctgaccatcggcgacggcggcgaggtgggcgaccccagaaccgtgctgcaggtgctgaccggcagcttcgtgcccgacctgatcgtgagcatgagcagccagatgtggctgcacctgcagaccgacgagagcgtgggcagcgtgggcttcaaggtgaactacaaggagatcgagaaggagagctgcggcgaccccggcacccccctgtacggcatcagagagggcgacggcttcagcaacagagacgtgctgagattcgagtgccagttcggcttcgagctgatcggcgagaagagcatcgtgtgccaggagaacaaccagtggagcgccaacatccccatctgcatcttcccctgcctgagcaacttcaccgcccccatgggcaccgtgctgagccccgactaccccgagggctacggcaacaacctgaactgcatctggaccatcatcagcgaccccggcagcagaatccacctgagcttcaacgacttcgacctggagagccagttcgacttcctggccgtgaaggacggcgacagccccgagagccccatcctgggcaccttcaccggcgccgaggtgcccagccacctgaccagcaacagccacatcctgagactggagttccaggccgaccacagcatgagcggcagaggcttcaacatcacctacaacaccttcggccacaacgagtgccccgaccccggcatccccatcaacgccagaagattcggcgacaacttccagctgggcagcagcatcagcgtgatctgcgaggagggcttcatcaagacccagggcaccgagaccatcacctgcatcctgatggacggcaaggtgatgtggagcggcctgatccccaagtgcggcgccccctgcggcggccacttcagcgcccccagcggcgtgatcctgagccccggctggcccggctactacaaggacagcctgaactgcgagtgggtgatcgaggccgagcccggccacagcatcaagatcaccttcgagagattccagaccgagctgaactacgacgtgctggaggtgcacgacggccccaacctgctgagccccctgctgggcagctacaacggcacccaggtgccccagttcctgttcagcagcagcaacttcatctacctgctgttcaccaccgacaacagcagaagcaacaacggcttcaagatccactacgagagcgtgaccgtgaacacctacagctgcctggaccccggcatccccgtgcacggcagaagatacggccacgacttcagcatcggcagcaccgtgagcttcagctgcgacagcggctacagactgagccacgaggagcccctgctgtgcgagaagaaccactggtggagccaccccctgcccacctgcgacgccctgtgcggcggcgacgtgagaggccccagcggcaccatcctgagccccggctaccccgagttctaccccaacagcctgaactgcacctggaccgtggacgtgacccacggcaagggcgtgcagttcaacttccacaccttccacctggaggaccaccacgactacctgctgatcaccgagaacggcagcttcacccagcccctggccagactgaccggcagcgacctgccccccaccatcaacgccggcctgtacggcaacttcagagcccagctgagattcatcagcgacttcagcatcagctacgagggcttcaacatcaccttcagcgagtacaacctggagccctgcgaggaccccggcatcccccagtacggcagcagaatcggcttcaacttcggcatcggcgacaccctgaccttcagctgcagcagcggctacagactggagggcaccagcgagatcatctgcctgggcggcggcagaagagtgtggagcgcccccctgcccagatgcgtggccgagtgcggcgccagcgccaccaacaacgagggcatcctgctgagccccaactaccccctgaactacgagaacaaccacgagtgcatctacagcatccaggtgcaggccggcaagggcatcaacatcagcgccagaaccttccacctggcccagggcgacgtgctgaagatctacgacggcaaggacaagaccacccacctgctgggcgccttcaccggcgccagcatgagaggcctgaccctgagcagcaccagcaaccagctgtggctggagttcaacagcgacaccgagggcaccgacgagggcttccagctggtgtacaccagcttcgagctgagccactgcgaggaccccggcatcccccagttcggctacaagatcagcgaccagggccacttcgccggcagcaccatcatctacggctgcaaccccggctacaccctgcacggcagcagcctgctgaagtgcatgaccggcgagagaagagcctgggactaccccctgcccagctgcatcgccgagtgcggcggcagattcaagggcgagagcagcggcagaatcctgagccccggctaccccttcccctacgacaacaacctgagatgcatgtggatgatcgaggtggaccccggcaacatcgtgagcctgcagttcctggccttcgacaccgaggccagccacgacatcctgagagtgtgggacggcccccccgagaacgacatgctgctgaaggagatcagcggcagcctgatccccgagggcatccacagcaccctgaacatcgtgaccatccagttcgacaccgacttctacatcagcaagagcggcttcgccatccagttcagcagcagcgtggccaccgcctgcagagaccccggcgtgcccatgaacggcaccagaaacggcgacggcagagagcccggcgacaccgtggtgttccagtgcgaccccggctacgagctgcagggcgaggagagaatcacctgcatccaggtggagaacagatacttctggcagcccagcccccccgtgtgcatcgccccctgcggcggcaacctgaccggcagcagcggcttcatcctgagccccaacttcccccacccctacccccacagcagagactgcgactggaccatcaccgtgaacgccgactacgtgatcagcctggccttcatcagcttcagcatcgagcccaactacgacttcctgtacatctacgacggccccgacagcaacagccccctgatcggcagcttccaggacagcaagctgcccgagagaatcgagagcagcagcaacaccatgcacctggccttcagaagcgacggcagcgtgagctacaccggcttccacctggagtacaaggccaagctgagagagagctgcttcgaccccggcaacatcatgaacggcaccagactgggcatggactacaagctgggcagcaccgtgacctactactgcgacgccggctacgtgctgcagggctacagcaccctgacctgcatcatgggcgacgacggcagacccggctggaacagagccctgcccagctgccacgccccctgcggcagcagaagcaccggcagcgagggcaccgtgctgagccccaactaccccaagaactacagcgtgggccacaactgcgtgtacagcatcgccgtgcccaaggagttcgccgtgcccagaaccagcagcacccagtgcagcagcgtgcccgagcccagattcggcagaagaatcggcaacgagttcgccgtgggcagcagcgtgctgttcgactgcaaccccggctacatcctgcacggcagcatcgccatcagatgcgagaccgtgcccaacagcctggcccagtggaacgacagcctgcccacctgcatcgtgccctgcggcggcatcctgaccaagagaaagggcaccatcctgagccccggctaccccgagccctacgacaacaacctgaactgcgtgtggaagatcaccgtgcccgagggcgccggcatccaggtgcaggtggtgagcttcgccaccgagcacaactgggacagcctggacttctacgacggcggcgacaacaacgcccccagactgggcagctacagcggcaccaccatcccccacctgctgaacagcaccagcaacaacctgtacctgaacttccagagcgacatcagcgtgagcgccgccggcttccacctggagtacaccgccatcggcctggacagctgccccgagccccagacccccagcagcggcatcaagatcggcgacagatacatggtgggcgacgtggtgagcttccagtgcgaccagggctacagcctgcagggccacagccacatcacctgcatgcccggccccgtgagaagatggaactaccccatccccatctgcctggcccagtgcggcggcgccatgagcgacttcagcggcgtgatcctgagccccggcttccccggcaactaccccagcagcctggactgcacctggaccatcaacctgcccatcggcttcggcgtgcacctgcagttcgtgaacttcagcaccgagaccatccacgactacctggaggtgagaagcggcagcagcgagaccagcaccgtgatcggcagactgagcggcccccagatccccagcagcctgttcagcaccacccacgagaccagcctgtacttccacagcgactacagccagaacaagcagggcttccacatcgtgtaccaggcctaccagctgcagagctgccccgaccccagacccttcagaaacggcttcgtgatcggcaacgacttcaccgtgggccagaccatcagcttcgagtgcttccccggctacaccctgatcggcaacagcgccctgacctgcctgcacggcgtgagcagaaactggaaccaccccctgcccagatgcgaggccctgtgcggcggcaacatcaccgccatgaacggcaccatctacagccccggctaccccgacgagtaccccaacttccaggactgcttctggctggtgagagtgccccccggcaacggcatctacatcaacttcaccgtgctgcagaccgagcccatctacgacttcatcaccgtgtgggacggccccgaccagaacagcccccagatcggccagttcagcggcaacaccgccctggagagcgtgtacagcaccagcaaccagatcctgatcaagttccacagcgacttcaccaccagcggcttcttcgtgctgagctaccacgcctaccagctgagagtgtgccagccccccccccccgtgcccaacgccgagatcctgaccgaggacgacgagttcgagatcggcgacatcatcagataccagtgcctgcccggcttcaccctggtgggcaacgccatcctgacctgcagactgggcgagagactgcagatggacggcgccccccccgtgtgccaggtgctgtgccccgccaacgagctgagactggacagcaccggcgtgatcctgagccccggctaccccgacagctaccccaacctgcagatgtgcgcctggagcatcagcgtggagaagggctacaacatcaccatgttcgtggagttcttccagaccgagaaggagttcgacgtgctgcaggtgtacgacggccccaacatccagagccccgtgctgatcagcctgagcggcgactacagcagcgccttcaacatcaccagcaacggccacgaggtgttcctgcagtggagcgccgaccacggcaacaacaagaagggcttcagaatcagatacatcgccttctactgcagcacccccgagagccccccccacggctacatcatcagccagaccggcggccagctgaacagcgtggtgagatgggcctgcgacagaggcttcagactggtgggcaagagcagcgccgtgtgcagaaagagcagctacggctaccacgcctgggacgcccccgtgcccgcctgccaggccatcagctgcggcatccccaaggcccccaccaacggcggcatcctgaccaccgactacctggtgggcaccagagtgacctacttctgcaacgacggctacagactgagcagcaaggagctgaccaccgccgtgtgccagagcgacggcacctggagcaaccacaacaagacccccagatgcgtggtggtgacctgccccagcatcaacagcttcatcctggagcacggcagatggagaatcgtgaacggcagccactacgagtacaagaccaaggtggtgttcagctgcgaccccggctaccacggcctgggccccgccagcatcgagtgcctgcccaacggcacctggagctggagaaacgagagaccctactgccagatcatcagctgcggcgagctgcccaccccccccaacggcaacaagatcggcacccagaccagctacggcagcaccgccatcttcacctgcgacctgggcttcatgctggtgggcagcgccgtgagagagtgcctgagcagcggcctgtggagcgagagcgagaccagatgcctggccggccactgcggcatccccgagctgatcgtgaacggccaggtgatcggcgagaactacggctacagagacaccgtggtgtaccagtgcaaccccggcttcagactgatcggcagcagcgtgagaatctgccagcaggaccacaactggagcggccagctgcccagctgcgtgcccgtgagctgcggccaccccggcagccccatctacggcagaaccagcggcaacggcttcaacttcaacgacgtggtgaccttcagctgcaacatcggctacctgatgcagggccccaccaaggcccagtgccaggccaacagacagtggagccaccccccccccatgtgcaaggtggtgaactgcagcgaccccggcatccccgccaacagcaagagagagagcaagatcgagcacggcaacttcacctacggcaccgtggtgttctacgactgcaaccccggctacttcctgttcggcagcagcgtgctgatctgccagcccaacggccagtgggacaagcccctgcccgagtgcatcatgatcgactgcggccaccccggcgtgccccccaacgccgtgctgagcggcgagaagtacaccttcggcagcaccgtgcactacagctgcaccggcaagagaagcctgctgggccagagcagcagaacctgccagctgaacggccactggagcggcagccagccccactgcagcggcgacgccaccggcacctgcggcgaccccggcacccccggccacggcagcagacaggagagcaacttcagaaccaagagcaccgtgagatacgcctgcgacaccggctacatcctgcacggcagcgaggagagaacctgcctggccaacggcagctggaccggcagacagcccgagtgcaaggccgtgcagtgcggcaaccccggcaccaccgccaacggcaaggtgttcagaatcgacggcaccaccttcagcagcagcgtgatctacagctgcatggagggctacatcctgagcggccccagcgtgagacagtgcaccgccaacggcacctggagcggcaccctgcccaactgcaccatcatcagctgcggcgaccccggcatccccgccaacggcctgagatacggcgacgactacgtggtgggccagaacgtgagctacatgtgccagcccggctacaccatggagctgaacggcagcagaatcagaacctgcaccatcaacggcacctggagcggcgtgatgcccacctgcagagccgtgacctgccccacccccccccagatcagcaacggcagactggagggcaccaacttcgactggggcttcagcatcagctacatctgcagccccggctacgagctgagcttccccgccgtgctgacctgcgtgggcaacggcacctggagcggcgaggtgccccagtgcctgcccaagttctgcggcgaccccggcatccccgcccagggcaagagagagggcaagagcttcatctaccagagcgaggtgagcttcagctgcaacttccccttcatcctggtgggcagcagcaccagaatctgccaggccgacggcacctggagcggcagcagcccccactgcatcgagcccacccagaccagctgcgagaaccccggcgtgcccagacacggcagccagaacaacaccttcggcttccaggtgggcagcgtggtgcagttccactgcaagaagggccacctgctgcagggcagcaccaccagaacctgcctgcccgacctgacctggagcggcatccagcccgagtgcatcccccacagctgcaagcagcccgagacccccgcccacgccaacgtggtgggcatggacctgcccagccacggctacaccctgatctacacctgccagcccggcttcttcctggccggcggcaccgagcacagagtgtgcagaagcgacaacacctggaccggcaaggtgcccatctgcgaggccggcagcaagatcctggtgaaggaccccagacccgccctgggcacccccagccccaagctgagcgtgcccgacgacgtgttcgcccagaactacatctggaagggcagctacaacttcaagggcagaaagcagcccatgaccctgaccgtgaccagcttcaacgccagcaccggcagagtgaacgccaccctgagcaacagcaacatggagctgctgctgagcggcgtgtacaagagccaggaggccagactgatgctgagaatctacctgatcaaggtgcccgcccacgccagcgtgaagaagatgaaggaggagaactgggccatggacggcttcgtgagcgccgagcccgacggcgccacctacgtgttccagggcttcatccagggcaaggactacggccagttcggcctgcagagactgggcctgaacatgagcgagggcagcaacagcagcaaccagccccacggcaccaacagcagcagcgtggccatcgccatcctggtgcccttcttcgccctgatcttcgccggcttcggcttctacctgtacaagcagagaaccgcccccaagacccagtacaccggctgcagcgtgcacgagaacaacaacggccaggccgccttcgagaaccccatgtacgacaccaacgccaagagcgtggagggcaaggccgtgagattcgaccccaacctgaacaccgtgtgcaccatggtgtag

SEQ ID NO: 307985 - DNA, 1838 bp, Artificial Sequence
  derived and/or modified sequence
agcctggggagggacgcgggcggggacggagctcggcgtgcttgctgctggagggtgatggccctgcaaggctgtgggctccgacctcaccgggagtcgacagcgagaggttcgccgaagagcgaggttctgggcgagcgctgaacgccggccccaagcaccccgggtctttacacagtccgcgtccacagactctgacgaagacgtggatctgctctcgctttagctgctcgcggtcctccagatcatgtccgcgactcctgcgactccgcgcggaaaaaaaagtttgccaggcgtggactcaatgacctttccaagctgtgcgcctcgctgcctggaccgggtctgagcgcggctgcccaggttgacctttctgcgggagggctttctctacgtgctgttgtctcactgggtttttgtcggagccccacgccctccggcctctgattcctggaagaaagggttggtcccctcagcacccccagcatcccggaaaatggggagcaaggctctgccagcgcccatcccgctccacccgtcgctgcagctcaccaattactccttcctgcaggccgtgaacaccttcccggccacggtggaccacctgcagggcctgtacggtctcagcgcggtacagaccatgcacatgaaccactggacgctggggtatcccaatgtgcacgagatcacccgctccaccatcacggagatggcggcggcgcagggcctcgtggacgcgcgcttccccttcccggccctgccttttaccacccacctattccaccccaagcagggggccattgcccacgtcctcccagccctgcacaaggaccggccccgttttgactttgccaatttggcggtggctgccacgcaagaggatccgcctaagatgggagacctgagcaagctgagcccaggactgggtagccccatctcgggcctcagtaaattgactccggacagaaagccctctcgaggaaggttgccctccaaaacgaaaaaagagtttatctgcaagttttgcggcagacactttaccaaatcctacaatttgctcatccatgagaggacccacacggacgagaggccgtacacgtgtgacatctgccacaaggccttccggaggcaagatcacctgcgggatcacagatacatccattccaaagaaaaacccttcaaatgtcaggagtgtgggaaaggattttgtcagtctagaactctagcagttcacaaaactttacacatgcaggaatctccacacaaatgtcccacatgtggaagaacctttaatcagagaagtaatctgaaaactcaccttctcacccatacagacatcaagccctacagctgcgagcagtgcggcaaagtgttcaggcgaaactgtgatctgcggcggcacagcctgactcacaccccgcggcaggacttctagagaagcccaggatctgtcccgtgccgccgctgctcccctccccagacacctctccacgtctcctacccagggggtcgcatccctagcccttcactgaccccagctcttcccttgctgcagccgcacctgcagctccagggagttaactcttcttctgggggactgagaactgtagaaagccacacactactacatcccttcacaaagagtatatgctagtttcttgtagatattcacagctcattttagagctctgtacataatgttgtgggtctttgttttgttgttttgtttgctttgggatcttgttggatgcacttagatatggaaaatggaagccaaattttatctttaaagactgtattttcaaaataaaactttttcttgtttgtttcaaaactcc

SEQ ID NO: 307986 - DNA, 1048 bp, Artificial Sequence
  derived and/or modified sequence
caggagctccgaggcgcagcggcgacagaggttcgccccggcctgctagcattggcattgcggttgactgagcttcgcctaacaggcttggggagggtgggctgggctgggctgggctgggctgggtgctgcccggctgtccgcctttcgttttcctgggaccgaggagtcttccgctccgtatctgcctagagtctgaatccgactttctttcctttgggcacgcgctcgccagtggagcacttcttgttctggccccgggctgatctgcacgcggacttgagcaggtgccaagggctttctctacgtgctgttgtctcactgggtttttgtcggagccccacgccctccggcctctgattcctggaagaaagggttggtcccctcagcacccccagcatcccggaaaatggggagcaaggctctgccagcgcccatcccgctccacccgtcgctgcagctcaccaattactccttcctgcaggccgtgaacaccttcccggccacggtggaccacctgcagggcctgtacggtctcagcgcggtacagaccatgcacatgaaccactggacgctggggtatcccaatgtgcacgagatcacccgctccaccatcacggagatggcggcggcgcagggcctcgtggacgcgcgcttccccttcccggccctgccttttaccacccacctattccaccccaagcagggggccattgcccacgtcctcccagccctgcacaaggaccggccccgttttgactttgccaatttggcggtggctgccacgcaagaggatccgcctaagatgggagacctgagcaagctgagcccaggactgggtagccccatctcgggcctcagtaaattgactccggacagaaagccctctcgaggaaggttgccctccaaaacgaaaaaagagtttatctgcaagttttgcggcagacactttaccaaatcctacaatttgctcatccatgagaggacccacacggacgagaggccgtacacgtgtgacatctgccacaaggccttccggaggcaagat

SEQ ID NO: 307987 - protein, 159 aa, Artificial Sequence
  derived and/or modified sequence
MKIVDEREKNLDDKAYRNIKELENYAENTQSSLLYLTLEILGIKDLHADHAASHIGKAQGIVTCLRATPYHGSRRKVFLPMDICMLHGVSQEDFLRRNQDKNVRDVIYDIASQAHLHLKHARSFHKTVPVKAFPAFLQTEIKDADTQGVCLAQPASLGK

SEQ ID NO: 307988 - protein, 281 aa, Artificial Sequence
  derived and/or modified sequence
MPISISHSSWLVQRKRDYEGYLCSLLLPAESRSSVFALRAFNVELAQVKDSVSEKTIGLMRMQFWKKTVEDIYCDNPPHQPVAIELWKAVKRHNLTKRWLMKIVDEREKNLDDKAYRNIKELENYAENTQSSLLYLTLEILGIKDLHADHAASHIGKAQGIVTCLRATPYHGSRRKVFLPMDICMLHGVSQEDFLRRNQDKNVRDVIYDIASQAHLHLKHARSFHKTVPVKAFPAFLQTVSLEDFLKKIQRVDFDIFHPSLQQKNTLLPLYLYIQSWRKTY

SEQ ID NO: 307989 - DNA, 846 bp, Artificial Sequence
  derived and/or modified sequence
atgcctatcagcataagtcacagctcctggctagtgcaaaggaagagggactatgagggttacctgtgctctcttctgttgcctgcggagtcacggagctctgtgtttgcgctgcgggcgttcaatgtggaactcgctcaagtgaaggattcagtctcggaaaagacaatcgggctgatgaggatgcagttttggaaaaagactgtcgaggatatctactgcgataatccacctcatcaacctgttgctatcgagctgtggaaagccgttaaacggcataatctcaccaaacggtggctaatgaagatcgtagatgagcgtgagaaaaacctggacgacaaagcttaccgcaacatcaaggagttggaaaattatgctgagaatacacagtctagcttgctgtatctgaccctggaaatcctgggcatcaaggatctgcacgccgaccacgccgcttcccacatcggcaaggcacagggaatagttacgtgtctcagggcaactccttaccacggctccaggcgcaaggttttcctccctatggatatttgtatgctgcacggagtttctcaggaagatttccttcgccgaaaccaggataaaaatgtcagagacgtgatatatgatatcgcctctcaggcccatcttcatctgaaacacgctcgctctttccacaagaccgtgcccgttaaggctttccccgccttcctgcagaccgtctctctggaagacttcctcaaaaaaattcagcgagttgattttgatatcttccatccgtccctccagcaaaagaataccctgctccctctctacctatacatccaaagttggaggaagacctactag

SEQ ID NO: 307990 - DNA, 846 bp, Artificial Sequence
  derived and/or modified sequence
atgcccatcagcatcagccacagctcctggctggtgcagaggaagagggactatgagggctacctgtgcagcctgctgctgcctgctgagagccgcagctctgtgtttgccctgcgggccttcaacgtggagctggcccaggtgaaggacagcgtgtctgagaagaccatcggcctgatgaggatgcagttctggaagaagacagtggaggacatctactgtgacaaccccccccaccagcctgtggccatcgagctgtggaaggctgtgaagaggcacaacctgaccaagcgctggctgatgaagatcgtggatgagcgggagaagaacctggatgacaaggcctacagaaacatcaaggagctggagaactatgcagagaacacccagagcagcctgctgtacctgaccctggagatcctgggcatcaaggacctgcacgccgaccatgctgccagccacatcggcaaggcccagggcatcgtgacctgcctgcgggccaccccctaccacggcagcaggaggaaggtgttcctgcccatggacatctgcatgctgcatggagtgtcccaggaggacttcctgcggaggaaccaggacaagaatgtgagagatgtgatctatgacatcgccagccaggcccacctgcacctgaagcacgcccgctccttccacaagacagtgcctgtgaaggccttccctgccttcctgcagacagtgtccctggaggacttcctgaagaagatccagagggtggactttgacatcttccaccccagcctgcagcagaagaacaccctgctgcccctgtacctgtacatccagagctggaggaagacctactag

SEQ ID NO: 307991 - DNA, 846 bp, Artificial Sequence
  derived and/or modified sequence
atgcccatcagcatcagccacagcagctggctggtgcagcggaagagagactacgaagggtacctgtgctccctcctgctcccggctgagagccgcagctccgtgtttgccctgcgcgccttcaacgtggaactcgctcaggtgaaggactccgttagcgaaaagaccatagggctgatgcgtatgcagttttggaagaagacggtggaagacatttattgcgacaatcctccacaccaacccgtcgccattgagctgtggaaagccgtcaagcggcataatttaacaaaacggtggttaatgaagatcgttgacgagcgagaaaagaacctggatgacaaggcatatagaaatatcaaggaactggaaaactacgccgaaaacacccagagcagtctgctatatcttacgttggagattctcgggattaaggacctgcacgccgaccatgccgcatctcacatcggcaaagcgcaggggatcgtaacatgtctgagagccacaccataccacggttcccgcaggaaggtgtttctgcctatggatatttgcatgttgcatggggtctcccaggaagactttctgcgacggaatcaggataaaaacgtccgggacgtcatctacgatatagcttctcaggctcacctgcatctgaagcacgcccggtcctttcataagacagtgcccgtaaaagctttcccggcgtttttacaaactgtcagcttagaagattttctgaaaaagatccagagagtagactttgacatttttcacccctccttacagcagaaaaacacccttctgcctttgtacctgtatatccagtcgtggcgaaaaacttattag

SEQ ID NO: 307992 - DNA, 846 bp, Artificial Sequence
  derived and/or modified sequence
atgccgatctccattagccacagctcctggctggtacaacgaaagcgcgactacgagggttatttgtgttcgttactgcttccagccgagagtagatcatctgtcttcgcactgagggcctttaatgttgaactagcgcaggtcaaagacagcgtcagcgaaaagaccatcggtctgatgaggatgcaattttggaagaaaaccgtggaagatatctactgtgacaatccgccacaccaacctgtcgccatcgagctctggaaggctgtcaagcggcataacctcaccaagagatggctgatgaaaatcgttgacgaacgggaaaaaaacctagatgataaagcatacaggaacatcaaagagctggaaaactacgcggagaatactcaatcatccttgctgtatcttaccctggagatactcggcatcaaggatctgcatgctgaccacgccgcttctcatataggcaaggcccaggggatcgtgacttgtctccgagccactccataccacgggtcgcgacggaaggtcttcttgccaatggatatctgtatgctgcacggagtgtcccaagaagattttttgcgcagaaatcaagataagaatgtgcgggatgtgatttatgatatcgcctcgcaggcccatttgcatctcaaacatgcacgatctttccacaagacagttcctgtgaaagcctttccagcattcctccagaccgtaagcctggaagatttcttgaagaagattcagcgcgtggactttgatatcttccatccgagcctgcagcaaaagaacaccctgttaccattgtacttgtacattcagtcttggcgcaagacatattag

SEQ ID NO: 307993 - DNA, 860 bp, Artificial Sequence
  derived and/or modified sequence
atgccaatcagcatttcacattcctcatggttggttcaaaggaaacgggattatgaaggttatttatgctccctgctgctccctgcagaatcccgaagctctgtttttgcactgagggcctttaatgtggaactggctcaggttaaagactcagtctctgagaaaacaattggactgatgcgaatgcagttttggaaaaaaactgtggaagatatatactgtgacaatccaccacatcagcctgtggccattgaactatggaaggctgttaaaagacataatctgactaaaagatggcttatgaaaatcgtcgatgaaagagaaaaaaatctggatgacaaagcatatcgtaatatcaaggaactggaaaattatgctgaaaacacacagagctctcttctttacttaacactagaaatattgggtataaaggatcttcatgcagatcatgctgcaagtcatattggaaaagcacaaggcattgtcacttgcttgagagcaacaccatatcatgggagcagaagaaaggtgttccttcccatggatatttgtatgctgcatggtgtttcacaagaggactttctacggaggaaccaagataaaaatgtgagagatgtaatatatgacattgccagtcaagcacacttgcacctaaagcatgctaggtcctttcacaaaactgttcctgtgaaagcatttcctgcttttcttcagacggtttctctagaggactttctaaagaaaattcagcgagtggattttgatatattccacccatctttacagcagaagaatacattacttccattatatttgtatattcagtcatggagaaaaacatattaaaataatttcatggc

SEQ ID NO: 307994 - DNA, 846 bp, Artificial Sequence
  derived and/or modified sequence
atgcccatcagcatcagccacagcagctggctggtgcagagaaagagagactacgagggctacctgtgcagcctgctgctgcccgccgagagcagaagcagcgtgttcgccctgagagccttcaacgtggagctggcccaggtgaaggacagcgtgagcgagaagaccatcggcctgatgagaatgcagttctggaagaagaccgtggaggacatctactgcgacaaccccccccaccagcccgtggccatcgagctgtggaaggccgtgaagagacacaacctgaccaagagatggctgatgaagatcgtggacgagagagagaagaacctggacgacaaggcctacagaaacatcaaggagctggagaactacgccgagaacacccagagcagcctgctgtacctgaccctggagatcctgggcatcaaggacctgcacgccgaccacgccgccagccacatcggcaaggcccagggcatcgtgacctgcctgagagccaccccctaccacggcagcagaagaaaggtgttcctgcccatggacatctgcatgctgcacggcgtgagccaggaggacttcctgagaagaaaccaggacaagaacgtgagagacgtgatctacgacatcgccagccaggcccacctgcacctgaagcacgccagaagcttccacaagaccgtgcccgtgaaggccttccccgccttcctgcagaccgtgagcctggaggacttcctgaagaagatccagagagtggacttcgacatcttccaccccagcctgcagcagaagaacaccctgctgcccctgtacctgtacatccagagctggagaaagacctactag

SEQ ID NO: 307995 - DNA, 1474 bp, Artificial Sequence
  derived and/or modified sequence
gtgctgccgccggccgcctctgggtctgtacgcgcgcatgcggcggctgcccgggccggaggtgtctgggcggagcgtggctgcggccagcggaccgggcgcctggggcactgaccactactgcctggagctgctgcggaaacgggattatgaaggttatttatgctccctgctgctccctgcagaatcccgaagctctgtttttgcactgagggcctttaatgtggaactggctcaggttaaagactcagtctctgagaaaacaattggactgatgcgaatgcagttttggaaaaaaactgtggaagatatatactgtgacaatccaccacatcagcctgtggccattgaactatggaaggtctgcacaccagcagaggcaggcccagtttctgggccccagattgacttcacagagccccagtaaagatggaaagccagaaccccccaactggggattgagaagaaaaagtggatgggaagctgctgttaaaagacataatctgactaaaagatggcttatgaaaatcgtcgatgaaagagaaaaaaatctggatgacaaagcatatcgtaatatcaaggaactggaaaattatgctgaaaacacacagagctctcttctttacttaacactagaaatattgggtataaaggatcttcatgcagatcatgctgcaagtcatattggaaaagcacaaggcattgtcacttgcttgagagcaacaccatatcatgggagcagaagaaaggtgttccttcccatggatatttgtatgctgcatggtgtttcacaagaggactttctacggaggaaccaagataaaaatgtgagagatgtaatatatgacattgccagtcaagcacacttgcacctaaagcatgctaggtcctttcacaaaactgttcctgtgaaagcatttcctgcttttcttcagacggaaattaaggatgcagacactcagggcgtgtgtcttgcacagccagccagcctgggaaaatgaagccaactgggagagagatttgaaggactctggttctaggcatgcgcacttctccaggtacttgagcttggaaaccttcttgcttaactagctctaggccaatcttgcttcactcgaacacgcacacacttctccttgcgctattttgaattaccagaggagaatctttgacaaacacaggtcgatgttagtgtgagccagactgggcaactacacaaaatcaaaatcaggaaaggagagccactttgctggaatctcccagaaggctggtggggtggactccggggctttgaaatctctaaagagtggtgactcacctctcctagaaattgccctggttatatcataaaagggctcaatttttacatgaggtctcaatggtctttttacttaatgtgacatcattagaaaaatcaacctttgaccagaaagaggcagttccctccttcctcacacaattcacaattttctgg

SEQ ID NO: 307996 - DNA, 14160 bp, Artificial Sequence
  derived and/or modified sequence
ggcgcggtacaggagcagcactgccggcgggggcgggtgccagggacttggaggtggaggggacgcggcggtactctggcgtcttccgacttcgactccttaccttaaaagatgctggagtcatatgtaactccaattttaatgagctatgtgaatcgctacatcaagaacttaaagccgtcggatctacagctttcactatggggtggagacgtggtactcagcaagctcgagttaaagttggatgtgctggaacaggaactgaaattaccattcacttttttaagtggacatattcatgaattgaggattcatgtaccatggacaaaactgggttcagaaccagtggtaattaccatcaatactatggaatgcattttgaaacttaaggatgggatacaggatgaccatgaaagctgtggttctaattctaccaaccgtagtactgctgagagcacaaaatcatcaatcaaaccgcggagaatgcagcaggctgctcctacagatcctgacttaccaccaggttatgtgcagagtctgattagacgagttgtaaataatgtaaacattgtgataaataatctcatactaaaatatgttgaagatgatatcgtcctttccgtcaatatcacttctgcagaatgttatacagtaggtgaattatgggatcgtgcattcatggatatttctgcaactgatttggtgctgagaaaggttatcaatttttctgactgtacagtttgtcttgataaacggaatgccagtggtaaaatagaattttaccaggatcctttattatacaaatgttccttcagaactcgtcttcattttacatatgaaaacctaaattccaagatgccatctgttattaaaattcatactttagtggaaagtttgaaactttctatcacagatcaacaactgcctatgtttattcgtataatgcaacttggaattgctctttactatggagaaataggcaattttaaagaaggcgaaatagaggaccttacttgtcataataaagatatgctaggaaacattacaggttctgaagatgaaacaagaatagatatgcaatatcctgctcagcataaaggtcaagagttatattcacagcaagatgaggagcagccacagggatgggtgtcatgggcctggtcctttgtgcctgcaattgtgagttatgacgatggcgaggaagactttgttgggaacgatcctgcatcaaccatgcatcaacaaaaagcacagactttgaaggatcctattgtttctataggattttattgcacaaaggcaacggtgactttcaaactcacagaaatgcaagttgagagtagttattacagtccacagaaagtaaaatctaaagaagtattgtgttgggaacaagaaggaactacagttgaggcccttatgatgggagaacctttctttgattgccagattgggtttgttggttgcagagccatgtgccttaaaggaattatgggtgttaaagattttgaagagaatatgaatagaagtgaaactgaagcctgtttcttcatttgtggtgacaatttgagtacgaaaggtttcacataccttacaaattcattgtttgattaccgaagcccagaaaataatggtactcgcgcagaatttatcttggattcaactcatcataaggagacatacactgagatagctggaatgcaacggtttggggctttttatatggattacctgtatacaatggagaacactagtggcaaaggttccacaaatcaacaagacttttcttcagggaaaagtgaagatttgggaacagttcaggagaagtccaccaaaagccttgttataggtcctcttgattttcgtttggatagcagtgcggtgcataggattttgaaaatgattgtgtgtgccttggaacatgaatatgaaccatatagcaggctaaaatcagatattaaggatgaaaatgaaacaatactgaatcctgaagaggtggctcttctggaggaatatattcctactcgacatacaagtgttactctcctcaaatgtacctgcacaatttccatggctgaattcaacttgctggaccatttactacctgtcattatgggagaaaagaactcaagtaacttcatgaatactacaaacttccagtctcttcggcctttgccatccattcgaatattggtggataaaattaatctggaacattcagtgccaatgtatgctgaacagttggtgcatgtggtcagcagccttactcaaccttctgataacctgcttcattattgttatgtacactgctatcttaagatatttggtttccaggcaggactgacgtctttggattgcagtggatcttactgcttacctgtaccagttattccctctttcagcactgctctttatgggaaacttctgaaactccccacatgctggaccaaaagatctcagattgctataactgaaggtatatttgaacttccaaatctcacaattcaagctacaagagcacagacacttctcttgcaagcaatatatcaaagttggtctcatcttggaaatgtcagctcttccgcagtgattgaagctttgataaatgaaatcttcctaagtataggtgtgaaatctaagaatcccctgccaactcttgagggctcaatccagaatgttgaattgaagtactgcagcacatcattggtcaaatgtgcctctgggaccatgggatcaataaaaatttgtgccaaagccccagttgatagtggaaaagagaagttgattcccttgcttcagggtccttctgacactaaagaccttcatagcaccaagtggctcaatgagagtagaaagccagagtctctcttagctccagatttgatggccttcacaatccaagttccacaatatattgactactgccacaattccggtgctgtacttctttgcagtatacaaggactagcagttaatattgacccaatcttatatacgtggctcatctatcagcctcagaaacgaacaagtagacatatgcaacagcagcctgtggtagctgttcctcttgttatgccagtttgtagaaggaaagaggatgaggtgtctattggaagtgcccccttggcaaagcagcaatcatatcaggcctctgaatatgccagcagccctgtaaaaacaaaaacggtaacagaatcccgcccattgtcagttcctgttaaagccatgttgaatatatctgaaagctgtagaagtcctgaagaaagaatgaaggaatttattggaattgtttggaatgcagtgaagcatctcacactacagcttgaagtacaatcttgttgtgtgtttattccaaatgatagcctgccttccccaagtacaattgtatctggtgacattcctggaacagtaagaagttggtaccatggacaaaccagcatgccgggaacacttgtcctctgtttgcctcaaataaagattattagtgctgggcacaagtatatggaacctctgcaggagattccatttgttatcccacgacccatccttgaagaaggtgatgcttttccttggacgatcagcttgcataatttcagcatatatacccttcttggaaaacaagtgacactttgcctagtggaacctatgggttgcacctccactctagctgtcacgtctcaaaaactgcttgctacgggacctgatacacgacattcatttgttgtctgtctccatgttgacctagagtcactagagataaaatgctctaatccccaggtccagctcttctatgaactaactgatatcatgaataaggtctggaacaagattcagaagagaggcaatctcaacctatctccaacctctccagagaccatggcagggcctgttcctacttctccagttagaagcagtataggcacagctcctccagataccagcacatgcagcccatctgctgacattgggactactactgagggagattctatacaagcaggtgaggaatcaccattctcagattctgtgaccttggaacaaactacaagtaatattggaggaaccagtggacgtgttagtttatggatgcagtgggtgcttcccaaaattactataaagctctttgctccagatcctgaaaataaaggcacagaggtttgtatggtcagtgaactagaagatctcagtgcttccatagatgtccaggatgtatataccaaagtgaaatgtaaaatagagagtttcaatattgatcactatagaagcaggccaggggaaggttggcagtcaggacattttgaaggagtatttctacaatgcaaagaaaaatctgtgccttggggaagagtgttggtctttggggcaatgtggaggtgtcttcctttcctgtactgacaagctgaacagacgcaccttgttggttcgacccatcagcaagcaggaccctttcagtaattgctctggcttctttccttctacaactacaaaacttctagatggcactcatcagcagcatggattcctctctctgacatacacaaaagctgtaacaaaaaatgtccgccacaagttaacatcaagaaatgagcgaagaagttttcataagttatctgaaggcctaatggatggttctcctcattttcttcatgaaattcttctttcagcacaagcttttgatattgttctttattttcctttacttaatgccattgcaagtatatttcaagcaaaactaccaaagacccaaaaagagaaaagaaaatctcctggtcagcccatgaggacccatacactgacatcccgcaatttacctttgatttatgtcaacacaagtgtaatcagaatttttattccaaaaacagaagaaatgcagccaactgttgaagctaatcaggcagcaaaagaagacactgtggttttgaagattggctctgttgccatggctccccaggctgacaatccccttggcagatctgtccttaggaaagatatttaccagagagccttgaacttaggaattcttcgagatcctggatcagaaatcgaagacagacaataccaaatagatctgcagtccatcaatattggtactgcacagtggcatcaactaaaaccagagaaggaaagtgtctcaggaggggtggtaacagagactgaaaggaattctcaaaatccagcccttgagtggaatatggccagcagcatacggcggcatcaagaaaggagagcaattttgacccccgttttgacagatttttctgtccgaataactggagcacctgctgtcattttcaccaaagtagtttctccagaaaatttgcatactgaggagattttagtgtgtggccattccttagaagtgaatataaccacaaacctggacttcttcctaagtgtggctcaagttcaactcttacatcagttaatagtagcaaatatgactggactggaaccatcaaacaaggctgcagagatctctaaacaagaacagaaaaaagtggatatatttgatggaggcatggctgaaacctcatctcgctacagtggtgctcaggatagtggaattggcagtgacagtgttaaaatcagaatagtgcaaatagagcagcacagtggtgccagtcagcatcgcattgcccgtccctcacgccagtcatcaattgtaaaaaatctaaattttattccctttgacatatttattactgcaagtagaatctcactaatgacctattcctgtatggccttatccaaatcgaaatcacaagaacagaagaataatgaaaaaacagacaagagttcattaaatctcccagaagttgattcagatgttgctaagcccaaccaggcatgtatttccacggtgacagcagaagatctcttaaggagcagcatttcttttccttcagggaaaaaaataggggtcctctctcttgaaagtcttcatgcatccacaaggtcatctgctagacaagcacttggtataactattgttcggcagcctggtcgaagaggaactggtgacttacagctagagccttttctgtactttattgtgtcccagccttccttgcttctgagttgtcaccacagaaagcagcgagtggaagtatccatttttgatgctgtgcttaaaggggtggcctctgattacaaatgtatagatcctgggaagactctgcctgaagcccttgattattgcactgtttggctacagacagtgcctggagaaatagacagcaaaagtggtattccaccttcctttataacactacagattaaagactttctgaatggaccagcggatgtcaatttggatatatcaaagcctttgaaagcaaacctgagtttcaccaaactggatcagataaacctttttttaaagaagataaaaaatgcacacagtttggcacatagtgaagagacttcagccatgtccaacaccatggtgaataaggatgatcttccagtctccaaatattaccgtggaaagttgtctaaacccaaaattcatggtgatggagtgcaaaagatttcagctcaagaaaacatgtggagagctgtttcctgctttcaaaaaatttctgttcaaactactcagattgtgatctccatggaaactgtaccccataccagcaaaccatgcctgttagcatctctctcaaacctcaatggaagccttagtgtcaaggcaacacaaaaagtacctggcataattcttgggtcatcatttctactcagtataaacgattttctccttaaaacaagtctcaaagaaagaagccgcattctgataggaccatgttgtgctactgccaatctggaagctaagtggtgtaaacacagcgggaatccaggcccagaacaatccataccaaaaatatccattgacttaagaggaggtctactacaggtcttctggggtcaagaacatttgaattgtttagttcttctacatgaattactcaatggataccttaatgaggagggaaattttgaagtacaagtttctgaaccagtgcctcaaatgtcatctcctgtggaaaagaatcagacatttaaaagtgaacaaagttcagatgacctacggacaggtctatttcagtatgtacaggatgctgaatctttgaaattgcctggggtctatgaagtcttattttataatgaaactgaagattgcccagggatgatgttatggagatatccagaacctagagtactcacccttgtacgaataactcctgtaccttttaacaccacagaggatccagatattagcacagcagaccttggtgatgtgctacaggttccttgtagcttggaatactgggatgaactccagaaggtttttgttgcatttagagaatttaatctgtctgaaagcaaagtttgtgaactgcagttgccggatatcaatctcgtgaatgaccagaagaaattagtatcttcagatctttggagaattgtcttgaacagcagtcaaaatggagctgatgaccaaagctctgcaagtgagtctggttctcaaagcacttgtgatccacttgtgactccaacagccctggctgcctgtaccagagttgactcctgctttaccccatggtttgtcccatccctttgcgtttctttccagtttgctcacctggaattccatctttgtcatcaccttgaccaactaggcacagctgcaccacagtacctacagccatttgtttccgacagaaatatgccatctgaactagaatacatgattgtttccttcagagaaccacacatgtatcttcgacagtggaataatggttctgtctgtcaggagatccagttcttagctcaagcagactgtaaacttctagagtgcagaaatgtcactatgcaaagtgtggtgaaacccttcagcatcttcgggcagatggcagtttccagcgatgtagtggaaaagctgcttgactgcaccgtgatagttgattctgtatttgtaaaccttggacagcatgtagtccattcactaaacactgcaatacaagcttggcaacagaacaaatgccctgaggtagaggagttggtcttcagccattttgtgatctgtaatgacacacaggagacactgcggtttggccaggtggatactgatgaaaatattctgctggcgagtctccacagtcaccagtacagctggcgctctcacaaatccccacagctgttacacatctgtattgaaggttggggcaactggcgttggtcagagcctttcagtgtggaccatgccgggacttttattagaacaattcagtacaggggtcgaactgcttctctcatcatcaaggttcagcaactcaatggagtacaaaaacagattatcatctgtggaagacagatcatctgtagttacttgtctcaaagcatagaactaaaagtcgttcagcattacattggtcaagatggacaagctgtagttcgggaacattttgactgcctcacagccaaacagaaattgccttcgtacatactagaaaacaatgaactgacggagctgtgtgtgaaggccaaaggagatgaagactggtcaagagatgtgtgcctggaatccaaagcccctgagtacagcattgtcattcaggtgccatcttcaaacagttccattatttatgtctggtgcacagttttgactttagaacccaactctcaagtgcaacaacgaatgattgtgttcagccctctttttatcatgaggagtcatcttccagaccccattatcatacatttggagaaaaggagtctgggattgagtgaaacacaaattattccaggaaaagggcaggaaaaaccactgcaaaacatagaacctgaccttgtacatcacctgacattccaagcaagagaagaatatgatccttcagattgtgcagttcccatctcaacatccctcattaagcaaatagccactaaggtacaccctggaggcacagttaatcagatccttgacgaattctatgggccagaaaagtcgcttcaacccatatggccctataataagaaggattctgacaggaatgaacagctaagtcagtgggatagcccaatgcgagtgaagctgtcaatctggaagccatatgttagaactttgttgatagaacttctgccctgggccctgcttatcaatgaatccaaatgggacctctggctatttgaaggagagaaaattgttctacaggttcctgctggcaaaattattattcctcctaattttcaggaagcttttcaaattggaatatactgggcaaatacaaacactgtgcacaagtcagtagcaattaaactggtccataacctgacatctccaaagtggaaagatggaggtaatggtgaagttgtgacactggatgaagaagcgtttgttgatactgaaataagacttggtgcttttccaggacatcagaagttatgtcagttctgcatttcctccatggtacagcaaggtatacaaattattcagattgaagacaagactacaataatcaataatacaccatatcaaatattttataaaccacagctatctgtctgcaatccccattctggaaaggagtattttcgtgttccagacagtgctacttttagcatttgcccaggtggagagcagcctgctatgaaatccagctcccttccttgctgggacttgatgcctgacatcagtcagtcagtactggatgcatccctgcttcagaaacagatcatgctgggcttttctcctgccccaggtgctgacagctcacagtgctggagcctgccagctatagttagaccagagtttcccagacagagtgtggcagtacccctcgggaatttccgggaaaatggattctgtaccagggctatagtgctgacatatcaagaacacctcggagtgacttatttaaccctctcagaagaccctagtcctcgagtaattatccacaatagatgtccagtaaaaatgcttataaaggaaaacattaaagatattccaaagtttgaggtttattgcaaaaaaattccctccgagtgctcaattcatcatgagctgtatcatcagatttccagttatccggactgcaagaccaaagacttacttccaagcctacttttgagagttgaacctctagatgaagtaacaactgagtggagtgatgccattgacatcaacagtcagggaacacaggttgtgttcctgactggctttggctatgtgtatgtggatgttgtacatcagtgtggcacagtcttcatcactgtggccccagaaggaaaagcaggacctattttaaccaataccaacagagcgccagagaagattgttacatttaaaatgttcatcactcagttaagcctggcagtgtttgatgacctcacccaccacaaagcatcagctgagcttctgagactcacactggacaacatttttctctgtgtggccccgggagctggtcccctccctggggaagagcctgtggctgcgttgtttgaactttactgtgtggagatctgctgtggggacctgcagctagacaaccagctttataacaagtccaatttccactttgctgtcttagtctgccagggagaaaaagcagaacccattcagtgttccaaaatgcagagtctcctcatatccaacaaagagttggaagaatacaaggaaaaatgttttatcaaactttgcatcaccttaaatgaaggcaagagcatcctctgtgatattaatgagttcagctttgaattaaaacctgctcggttatacgtggaagacacatttgtatactacatcaagactttgtttgacacctaccttcctaacagcaggttggctggtcactccacacacctctccgggggtaaacaggtgttgcccatgcaggtcacacagcacgccagggccttggtgaatcctgtgaagttacggaaactggtgatccagccagtaaatttgctcgtcagcatccacgcttccctcaagctgtacatagcctcagaccacactcctctctccttctcggtgtttgaaagaggacccatcttcaccactgcgaggcagcttgtgcacgccctggcaatgcactatgccgctggggccctttttagagcaggctgggtagttgggtctctggatattcttggcagccctgcaagcctggtgagaagcatcgggaacggggtcgccgacttcttcaggcttccgtatgaggggctgacccggggccctggagccttcgtgagtggcgtctccagagggaccacatcgtttgtaaagcacatctccaaaggtaccctcacatccatcaccaacctcgccacaagcctggcccggaacatggaccggctctcactggatgaggagcactacaaccggcaggaggagtggcggcggcagctccccgagagcctgggcgaggggcttcgacagggcctgtcccggctgggcatcagcctgcttggtgcaattgctggtatagttgatcagccgatgcagaacttccagaaaacatctgaggcacaggcttcagcaggacacaaggccaagggtgtcatctcgggtgtggggaaaggaatcatgggggtgttcacaaagcccatcggaggagctgctgagctggtgtcacagactggctatggtattttacatggagctggactttctcagcttcccaaacagcgccatcagccaagtgatctacatgctgaccaggctccaaacagccatgtcaaatatgtctggaaaatgcttcagtctctgggcagaccagaagtccacatggccctggacgtggttctggtgaggggctcaggccaggagcatgaagggtgcttgctgctgacatcagaagtgctcttcgtggtgagtgtcagtgaggacacacagcagcaggccttccccgtcacagaaatcgactgtgcacaggacagcaagcagaacaacttactcacagtgcagctcaagcagccaagagtggcctgtgatgtggaggtagatggagtccgagagagactgtcagagcaacagtacaacagactggtggactacatcacaaagacatcttgtcacctggcccccagctgttcttccatgcaaataccatgccctgtggtggctgcagaacctcccccctccactgttaaaacataccattacctggttgatccacattttgctcaggtcttccttagtaaatttaccatggtgaaaaataaagccctgaggaaagggtttccttgagtcccctctgaggtgtttattcctgcttgtgtgatttagtttttgggtttctttgagacagggtctcactgcattgcccttgctgacctcaaattctggggttcaagcaatcctcccacctcaacccacaagtagctacgactgcaagcacctgccaccataaagggctgcattttgccaccataaagggctgcatttttttaaaaagcctaggcagctctaacatcatctgatatggacacaaggccaacagtttccttatttacatccttacctctaaaagatacttcaaagtgacaaaaacgtgttccttccccacttagagacaatgattaacagggccctatatgttcttaccacatacagaggatgcatttatttttgctctatgacacttgcaaaaatctctactgtaattaatttgggtctattattaactctctgttccatcatagaatgtggccaggccttacaatggagagccagagttaaaacttcaagttgcatctgtttttgggctgagtcaccacctttgcctcatgctcctttgtctgcaaaggcctaggattctttctttaaatgaaatgcttaggactttgtggcttgttacatttgtcatttaactgcagtgctattctttgaaagctgctatgtgtattttctctgaagtctgcattttactaaaatttacaacagtctgatgattgattgattactgtccaggtacattttagaaaaagtgttcttcttccagtttgttttactaagcaaactttgagtaaatcctttgtcctatattgaatccagtcccaaagtgttcaggtgagtttctctagttccataaacaaaacatacatagtgggaactccctggtatgccatagagcacacaagaaccccaatattaatgctaacaattataccagtccattttgtttattctgtggaattgacttgacaaagcatgaagatattcccagtgtctgtctgataatattttgcatctaagaatgggtttgactcaagatcttgggttaccaagatgtcttaaatgttcagtaaatatctttcttacagtccagtagcttagagcatgtttgctgattgatattacatttaaacttggggctacagcttgttacctagaattttgagatactaagagaatgcaattttaaatgcccactggttttatttgttttggagagagggtctcattctgtcacccaggctagagtacagtgggaacagtcatggctcactgcagcttaagctcactgcctgggctcaagtgatcttactccagcctcccaagcagctgggactacaccaccacaggtatgcaccaccatacctggctgatttttaaaattttttctagagatgaggtctcactatgttgcccagctggtctcatactcctcagttcacgcattcctcccacctccacctcccaaactgctgggattacaggtgtgagccaccatgcccaacacccactgatctttaactctcacatgttgggcataagaagtcactatataattgttactggaaagcaagacttaacgaacaattctgactatgaaaaatgtctctttcagtttgttctgtaaatatttagaaaagtgacagctgtcaacctcagagtaactatttctaaaaatgtaaatatgtattaatccttgtatcttttatggtaattttgcatattgatatgaattatataaaattgtttaaaataaaaggtgtccttgaattactgaccacccatagatgtctactgttaccaggttttacaatgcaaattttcactaatacctgggtttaatacagctcacatcactgaatgttacacatgagtttaaatgggtaatatacaggttttgttataataaagttactgattaaatt

SEQ ID NO: 307997 - DNA, 4284 bp, Artificial Sequence
  derived and/or modified sequence
atgctggagagctacgtgacccccatcctgatgagctacgtgaacagatacatcaagaacctgaagcccagcgacctgcagctgagcctgtggggcggcgacgtggtgctgagcaagctggagctgaagctggacgtgctggagcaggagctgaagctgcccttcaccttcctgagcggccacatccacgagctgagaatccacgtgccctggaccaagctgggcagcgagcccgtggtgatcaccatcaacaccatggagtgcatcctgaagctgaaggacggcatccaggacgaccacgagagctgcggcagcaacagcaccaacagaagcaccgccgagagcaccaagagcagcatcaagcccagaagaatgcagcaggccgcccccaccgaccccgacctgccccccggctacgtgcagagcctgatcagaagagtggtgaacaacgtgaacatcgtgatcaacaacctgatcctgaagtacgtggaggacgacatcgtgctgagcgtgaacatcaccagcgccgagtgctacaccgtgggcgagctgtgggacagagccttcatggacatcagcgccaccgacctggtgctgagaaaggtgatcaacttcagcgactgcaccgtgtgcctggacaagagaaacgccagcggcaagatcgagttctaccaggaccccctgctgtacaagtgcagcttcagaaccagactgcacttcacctacgagaacctgaacagcaagatgcccagcgtgatcaagatccacaccctggtggagagcctgaagctgagcatcaccgaccagcagctgcccatgttcatcagaatcatgcagctgggcatcgccctgtactacggcgagatcggcaacttcaaggagggcgagatcgaggacctgacctgccacaacaaggacatgctgggcaacatcaccggcagcgaggacgagaccagaatcgacatgcagtaccccgcccagcacaagggccaggagctgtacagccagcaggacgaggagcagccccagggctgggtgagctgggcctggagcttcgtgcccgccatcgtgagctacgacgacggcgaggaggacttcgtgggcaacgaccccgccagcaccatgcaccagcagaaggcccagaccctgaaggaccccatcgtgagcatcggcttctactgcaccaaggccaccgtgaccttcaagctgaccgagatgcaggtggagagcagctactacagcccccagaaggtgaagagcaaggaggtgctgtgctgggagcaggagggcaccaccgtggaggccctgatgatgggcgagcccttcttcgactgccagatcggcttcgtgggctgcagagccatgtgcctgaagggcatcatgggcgtgaaggacttcgaggagaacatgaacagaagcgagaccgaggcctgcttcttcatctgcggcgacaacctgagcaccaagggcttcacctacctgaccaacagcctgttcgactacagaagccccgagaacaacggcaccagagccgagttcatcctggacagcacccaccacaaggagacctacaccgagatcgccggcatgcagagattcggcgccttctacatggactacctgtacaccatggagaacaccagcggcaagggcagcaccaaccagcaggacttcagcagcggcaagagcgaggacctgggcaccgtgcaggagaagagcaccaagagcctggtgatcggccccctggacttcagactggacagcagcgccgtgcacagaatcctgaagatgatcgtgtgcgccctggagcacgagtacgagccctacagcagactgaagagcgacatcaaggacgagaacgagaccatcctgaaccccgaggaggtggccctgctggaggagtacatccccaccagacacaccagcgtgaccctgctgaagtgcacctgcaccatcagcatggccgagttcaacctgctggaccacctgctgcccgtgatcatgggcgagaagaacagcagcaacttcatgaacaccaccaacttccagagcctgagacccctgcccagcatcagaatcctggtggacaagatcaacctggagcacagcgtgcccatgtacgccgagcagctggtgcacgtggtgagcagcctgacccagcccagcgacaacctgctgcactactgctacgtgcactgctacctgaagatcttcggcttccaggccggcctgaccagcctggactgcagcggcagctactgcctgcccgtgcccgtgatccccagcttcagcaccgccctgtacggcaagctgctgaagctgcccacctgctggaccaagagaagccagatcgccatcaccgagggcatcttcgagctgcccaacctgaccatccaggccaccagagcccagaccctgctgctgcaggccatctaccagagctggagccacctgggcaacgtgagcagcagcgccgtgatcgaggccctgatcaacgagatcttcctgagcatcggcgtgaagagcaagaaccccctgcccaccctggagggcagcatccagaacgtggagctgaagtactgcagcaccagcctggtgaagtgcgccagcggcaccatgggcagcatcaagatctgcgccaaggcccccgtggacagcggcaaggagaagctgatccccctgctgcagggccccagcgacaccaaggacctgcacagcaccaagtggctgaacgagagcagaaagcccgagagcctgctggcccccgacctgatggccttcaccatccaggtgccccagtacatcgactactgccacaacagcggcgccgtgctgctgtgcagcatccagggcctggccgtgaacatcgaccccatcctgtacacctggctgatctaccagccccagaagagaaccagcagacacatgcagcagcagcccgtggtggccgtgcccctggtgatgcccgtgtgcagaagaaaggaggacgaggtgagcatcggcagcgcccccctggccaagcagcagagctaccaggccagcgagtacgccagcagccccgtgaagaccaagaccgtgaccgagagcagacccctgagcgtgcccgtgaaggccatgctgaacatcagcgagagctgcagaagccccgaggagagaatgaaggagttcatcggcatcgtgtggaacgccgtgaagcacctgaccctgcagctggaggtgcagagctgctgcgtgttcatccccaacgacagcctgcccagccccagcaccatcgtgagcggcgacatccccggcaccgtgagaagctggtaccacggccagaccagcatgcccggcaccctggtgctgtgcctgccccagatcaagatcatcagcgccggccacaagtacatggagcccctgcaggagatccccttcgtgatccccagacccatcctggaggagggcgacgccttcccctggaccatcagcctgcacaacttcagcatctacaccctgctgggcaagcaggtgaccctgtgcctggtggagcccatgggctgcaccagcaccctggccgtgaccagccagaagctgctggccaccggccccgacaccagacacagcttcgtggtgtgcctgcacgtggacctggagagcctggagatcaagtgcagcaacccccaggtgcagctgttctacgagctgaccgacatcatgaacaaggtgtggaacaagatccagaagagaggcaacctgaacctgagccccaccagccccgagaccatggccggccccgtgcccaccagccccgtgagaagcagcatcggcaccgccccccccgacaccagcacctgcagccccagcgccgacatcggcaccaccaccgagggcgacagcatccaggccggcgaggagagccccttcagcgacagcgtgaccctggagcagaccaccagcaacatcggcggcaccagcggcagagtgagcctgtggatgcagtgggtgctgcccaagatcaccatcaagctgttcgcccccgaccccgagaacaagggcaccgaggtgtgcatggtgagcgagctggaggacctgagcgccagcatcgacgtgcaggacgtgtacaccaaggtgaagtgcaagatcgagagcttcaacatcgaccactacagaagcagacccggcgagggctggcagagcggccacttcgagggcgtgttcctgcagtgcaaggagaagagcgtgccctggggcagagtgctggtgttcggcgccatgtggagatgcctgcccttcctgtactag

SEQ ID NO: 307998 - DNA, 4284 bp, Artificial Sequence
  derived and/or modified sequence
atgctggagagctatgtgacacccatcctgatgagttacgtgaaccggtatattaaaaatctgaagcctagtgacctgcagctgtctctttggggaggggatgtcgttctgtccaagctcgaattgaaattagacgtactggaacaagaactaaagctgccatttacatttttgtccggccacattcatgagctcagaatccatgttccctggacgaagttgggctccgagcctgtcgtaatcaccatcaataccatggagtgtattctgaaattgaaggacgggattcaggacgatcatgagtcctgcggtagcaacagtaccaaccgatcaacagccgaaagcacaaagtcctcaatcaaacctcgtcgaatgcagcaggccgcccctactgatccagacctgccccccggctatgttcagagtctgatccgcagagtggtcaacaacgtcaacatcgtgatcaacaatctgattcttaagtacgtcgaggatgacatagtgttgagcgtgaacatcacgagcgccgagtgttatactgtcggcgaactctgggatagagcttttatggatatttcggctacagacctcgtgttgcgcaaagttatcaattttagtgactgtacagtttgtctggataagcgcaacgcctcgggcaagatcgaattttaccaggacccactgctttataagtgtagcttcaggacccggctgcatttcacttatgagaacctcaattccaaaatgccctcagtcatcaagatccataccttagttgaaagcctgaagctgagcataactgaccagcagctaccaatgttcattagaatcatgcagctggggatagccctctattatggagagatcggaaattttaaggagggcgagattgaggatctcacctgtcataataaggacatgttagggaatattaccgggtcagaggatgaaacacggattgatatgcaatatccagcacagcataaaggtcaggaactttactctcagcaggatgaagagcagccccagggctgggtgtcttgggcctggtcttttgtccccgccatagtgtcatatgacgacggtgaggaggacttcgtgggcaatgatcccgcatcaacaatgcaccagcagaaagcccagacgctaaaggatcctattgtgagcatcggattctactgtaccaaggccacagtgacctttaaactgacggaaatgcaagttgaaagttcttattatagcccccagaaagtcaagtcaaaagaggtgctgtgttgggagcaagagggcacaacagtagaggctttgatgatgggggaaccgttctttgactgccaaatagggtttgttggctgtcgggcaatgtgtctgaagggcattatgggggtgaaagacttcgaggaaaacatgaacagaagcgaaacagaggcctgcttctttatatgcggagataacttgtccaccaaaggtttcacctacctgacaaattccctcttcgattacaggagccctgagaacaacggaacgcgtgctgaatttattctagacagcacacaccacaaagaaacttacactgagattgcaggaatgcagcgttttggagccttttacatggactatctgtatactatggagaacaccagcggcaaaggttctaccaaccagcaagacttttcttctggtaagtccgaagacttaggtaccgtccaggagaaatctactaaatctctggtgataggaccactggactttagacttgacagttcagccgtgcatcgcatcctaaaaatgatcgtgtgcgcccttgagcatgagtatgagccctacagccgtcttaagtcggacattaaggatgagaacgaaaccattcttaatccagaggaagtggctctcctggaggagtatattcctactcggcacacctctgtgacgctgctcaaatgtacctgtacaattagcatggccgagtttaatttgctggaccaccttctgcctgtgataatgggagaaaagaactcatcgaattttatgaatacgaccaattttcagtcactccgccccctcccgagcattcgaattctcgtcgataagatcaatctcgagcatagtgtgcccatgtatgctgagcagctggtgcacgttgtctctagtcttacccagcccagcgacaacctgctgcattactgctacgttcactgttacttgaagatttttggcttccaggccggcctgacatcgctggactgctcgggatcatactgcctgcccgttcccgtgatcccaagtttctctacagccctctatggaaaacttttgaagctgcccacttgttggacaaagaggagccagatcgctattaccgaaggcattttcgaactgccgaacctcacaattcaagctacaagggcacaaacacttctcctgcaggctatttatcagtcctggagtcacttgggaaacgtgtctagcagtgccgtcatcgaggcccttatcaacgaaattttcctttcaattggtgtaaaatctaagaatcctctgccgacgctagaggggagtatacagaatgtggagttgaagtactgctctacctctctagtaaaatgcgctagtggcactatggggtccattaagatttgtgccaaggccccagtggattcaggcaaagaaaagcttatccccctgcttcaagggccaagcgataccaaggatcttcacagtaccaagtggcttaatgaatctcgcaaacccgagtcacttctggcccctgatctgatggcctttacgatccaagtgcctcagtacattgattattgtcacaactctggcgctgttctgctttgttcgatccaggggctcgccgtcaatatcgatccgatcctgtacacgtggctcatctaccagccacagaaacgtacttcaaggcatatgcagcagcagcccgttgttgcggtgcccttggtgatgccagtatgcagacgaaaagaggatgaggtcagcatcggctcagctcccctggccaagcagcagtcctatcaggcctcagagtacgcaagctctccagtgaagaccaaaacagtgactgaatccagaccgttgagtgtgcctgtgaaggcgatgctgaacatttccgagtcctgtaggtctccagaggaaagaatgaaggagttcatcgggatagtgtggaacgccgtgaagcatctcacccttcagcttgaggttcagtcctgctgcgtctttatacctaacgattcactgccaagcccatcgaccattgtcagtggagatatccccgggactgttaggagctggtaccacggccagacctctatgcctggtacacttgtgctttgtttgcctcagataaagataatatccgccgggcataaatatatggaaccacttcaggagattccgttcgtgatccctcggccaatccttgaggagggcgacgcatttccctggacaatctccttgcataactttagtatctacacactacttggcaaacaggtaacactttgcctcgttgagcccatggggtgcactagtacgctcgccgtcacgtcccagaagctcctcgccaccgggccggatactaggcacagtttcgtagtatgtctgcatgtcgacctagaaagcctggagattaaatgtagcaacccgcaggtgcaacttttttatgagctgaccgatattatgaataaggtgtggaacaagatccagaagaggggcaacctgaacttgagccccactagtccagaaacgatggctgggccggtcccaacgagtccggtacgctccagtatcggcactgctccgcccgatacctctacatgctcgccaagcgctgatataggaactactacagagggcgatagcatacaagccggcgaagaaagccctttttcggattcagtgacgctggagcagacaactagcaatattgggggtacatcaggccgggtcagcctgtggatgcagtgggtactgccaaagatcaccatcaagctcttcgcaccagacccagaaaataagggaactgaggtctgtatggtgtccgaactggaagatctctcggcttctatagatgtccaggacgtgtatacaaaagtgaagtgcaaaatcgagtcttttaatatagaccactacaggagccggccaggtgaagggtggcagtcaggacactttgagggcgtttttctgcagtgcaaagaaaaaagtgtgccctgggggagggtgctggtgttcggagccatgtggaggtgcttgccgtttctttattag

SEQ ID NO: 307999 - DNA, 4284 bp, Artificial Sequence
  derived and/or modified sequence
atgctggagagctatgtgacccccatcctgatgtcctatgtgaaccgctacatcaagaacctgaagcccagcgacctgcagctgagcctgtggggcggagatgtggtgctgagcaagctggagctgaagctggatgtgctggagcaggagctgaagctgcccttcaccttcctgagcggccacatccacgagctgcgcatccacgtgccctggaccaagctgggcagcgagcctgtggtgatcaccatcaacaccatggagtgcatcctgaagctgaaggatggcatccaggatgaccacgagagctgtggcagcaacagcaccaacagaagcacagctgagagcaccaagagcagcatcaagcccaggaggatgcagcaggccgcccccacagatcctgacctgcccccaggctacgtgcagagcctcatcagaagagtggtgaacaacgtgaacatcgtcatcaacaacctgatcctgaagtatgtggaggatgacatcgtgctgtctgtgaacatcaccagcgctgagtgctacacagtgggggagctgtgggaccgggccttcatggacatcagcgccacagacctggtgctgaggaaggtgatcaacttcagtgactgcaccgtgtgcctggacaagagaaatgccagcggcaagattgagttctaccaggaccccctgctgtacaagtgcagcttccgcacccggctgcacttcacctatgagaacctgaacagcaagatgcccagcgtcatcaagatccacaccctggtggagagcctgaagctgagcatcacagaccagcagctgcccatgttcatccgcatcatgcagctgggcatcgccctgtactacggggagatcggcaacttcaaggagggggagattgaggacctgacctgccacaacaaggacatgctgggcaacatcaccggctctgaagatgagaccagaattgacatgcagtacccagcccagcacaagggccaggagctgtacagccagcaggatgaggagcagccccagggctgggtgtcctgggcctggagctttgtgcctgccatcgtgtcctatgatgatggagaggaggactttgtgggcaatgaccctgccagcaccatgcaccagcagaaggcccagaccctgaaggaccccatcgtgtccatcggcttctactgcaccaaggccaccgtgaccttcaagctgacagagatgcaggtggagagcagctactacagcccccagaaggtgaagagcaaggaggtgctgtgctgggagcaggagggcaccaccgtggaggccctgatgatgggagagcccttctttgactgccagattggatttgtgggctgccgggccatgtgcctgaagggcatcatgggcgtgaaggactttgaggagaacatgaacagaagtgaaacagaggcctgcttcttcatctgtggggacaacctgagcaccaagggcttcacctacctgaccaacagcctgtttgactaccgcagcccagaaaataatggcaccagggctgagttcatcctggacagcacccaccacaaggagacctacacagaaattgctggcatgcagagatttggagccttctacatggactacctgtacaccatggagaacaccagcggcaagggcagcaccaaccagcaggacttcagcagcggcaagtctgaggacctgggcaccgtgcaggagaagagcaccaagagcctggtgattggccccctggacttccggctggacagcagcgctgtgcaccgcatcctgaagatgattgtgtgtgccctggagcacgagtatgagccctacagccggctgaagagtgacatcaaggatgaaaatgagaccatcctgaaccctgaggaggtggccctgctggaggagtacatccccaccaggcacacctctgtgaccctgctgaagtgcacctgcaccatctccatggccgagttcaacctgctggaccacctgctgcctgtgatcatgggagagaagaacagcagcaacttcatgaacaccaccaacttccagagcctgcggcccctgcccagcatccgcatcctggtggacaagatcaacctggagcacagcgtgcccatgtatgcagagcagctggtgcacgtggtgagcagcctgacccagcccagcgacaacctgctgcactactgctacgtgcactgctacctgaagatcttcggcttccaggccggcctgaccagcctggactgcagcggcagctactgcctgcctgtgcctgtgatccccagcttcagcacagccctgtatggcaagctgctgaagctgcccacctgctggaccaagaggagccagatcgccatcacagagggcatctttgagctgcccaacctgaccatccaggccacccgggcccagaccctgctgctgcaggccatctaccagagctggagccacctgggcaatgtgagcagcagcgctgtgattgaggccctgatcaatgagatcttcctgagcattggagtgaagagcaagaaccccctgcccaccctggagggcagcatccagaatgtggagctgaagtactgcagcaccagcctggtgaagtgtgccagcggcaccatgggcagcatcaagatctgtgccaaggcccctgtggacagcggcaaggagaagctgatccccctgctgcagggccccagcgacaccaaggacctgcacagcaccaagtggctgaatgaaagcaggaagccagagagcctgctggccccagacctgatggccttcaccatccaggtgccccagtacatcgactactgccacaacagcggggctgtgctgctgtgcagcatccagggcctggccgtgaacatcgaccccatcctgtacacctggctgatctaccagccccagaagaggaccagccgccacatgcagcagcagcctgtggtggccgtgcccctggtgatgcctgtgtgcaggaggaaagaagatgaggtgtccatcggcagcgcccccctggccaagcagcagagctaccaggcctctgaatatgccagcagccctgtgaagaccaagacagtgacagagagccggcccctgtctgtgcctgtgaaggccatgctgaacatcagcgagagctgccgcagccctgaggagaggatgaaggagttcatcggcatcgtgtggaatgctgtgaagcacctgaccctgcagctggaggtgcagagctgctgcgtgttcatccccaatgacagcctgcccagccccagcaccatcgtgtctggggacatccctggcaccgtgcgctcctggtaccacggccagacctccatgcctggcaccctggtgctgtgcctgccccagatcaagatcatctctgctggccacaagtacatggagcccctgcaggagatcccctttgtgatcccccggcccatcctggaggagggagatgccttcccctggaccatcagcctgcacaacttcagcatctacaccctgctgggcaagcaggtgaccctgtgcctggtggagcccatgggctgcaccagcaccctggccgtgaccagccagaagctgctggccactggaccagacaccaggcacagctttgtggtgtgcctgcacgtggacctggagagcctggagatcaagtgcagcaacccccaggtgcagctgttctatgagctgacagacatcatgaacaaggtgtggaacaagatccagaagaggggcaacctgaacctgagccccaccagccctgagaccatggccggccctgtgcccaccagccctgtgcgcagcagcattggaacagcccccccagacaccagcacctgcagccccagcgctgacatcggcaccaccacagaaggagacagcatccaggccggggaggagagccccttcagtgacagcgtgaccctggagcagaccaccagcaacattggaggcaccagcggccgggtgtccctgtggatgcagtgggtgctgcccaagatcaccatcaagctgtttgccccagaccctgaaaataaaggaacagaggtgtgcatggtgtctgagctggaggacctgagcgccagcattgatgtgcaggatgtgtacaccaaggtgaagtgcaagattgagagcttcaacatcgaccactaccgcagcaggcctggagagggctggcagagcggccactttgagggcgtcttcctgcagtgcaaggagaagtctgtgccctggggccgggtgctggtgtttggagccatgtggcgctgcctgcccttcctgtactag

SEQ ID NO: 308000 - DNA, 4284 bp, Artificial Sequence
  derived and/or modified sequence
atgctggagagctacgtgacccccatcctgatgagctacgtgaacagatatattaaaaatctcaaaccatcagatctgcagctgtcactctggggtggagatgttgttctctccaagctggagctcaagctcgacgtactcgagcaggaactgaaacttccctttacttttctttccgggcatatccacgaactgcgcattcacgtgccgtggacaaagcttgggagtgaacctgtggtcataacaatcaatacaatggaatgcatactcaagcttaaggacgggatccaggacgatcatgagtcctgcggcagcaacagcactaacaggagcaccgcagagagcacaaaatcctctatcaaaccccggcgtatgcagcaagcagcccctactgaccctgacttacccccgggttacgtgcaatcacttatcagaagggtcgtgaacaatgtgaatatcgtgatcaacaatctcattttgaagtatgtggaggatgatattgtactctctgtgaacatcacaagcgccgaatgttacacggttggcgaactatgggaccgggccttcatggatatctcagctaccgacctcgtgctccggaaggtaatcaacttttcggactgtaccgtttgcctggacaaaaggaacgcttctggcaagattgagttctatcaggaccctctgctgtacaagtgtagctttcggacacgccttcattttacttacgaaaacctgaattcaaaaatgccgtccgtcattaagatccacacccttgtggaatctcttaaactgtcaatcacagatcagcaacttccgatgttcatcaggatcatgcaactgggaatcgcactttattatggcgagattgggaattttaaggaaggagagatcgaggatttaacgtgccacaacaaggatatgctgggcaacatcaccggatccgaggacgagacaagaattgatatgcagtaccctgcacaacacaagggccaggaactctattcccaacaggatgaagaacaacctcagggatgggttagttgggcatggagttttgtgccggcaatagtgtcatacgacgacggggaagaggactttgtcggtaatgatcccgcctcaaccatgcaccagcagaaagcgcaaactctgaaagatcctatcgtgtctattggtttctactgcaccaaggctaccgtgactttcaaactcacagagatgcaagttgaatccagttactactccccccagaaagtgaagagtaaggaagtgttgtgttgggagcaggagggaaccacagtcgaggcacttatgatgggagagcctttcttcgattgccaaataggtttcgtcggatgtcgtgcaatgtgtcttaagggaatcatgggcgtgaaggatttcgaggaaaatatgaacaggtccgagactgaggcctgcttttttatctgtggggacaacttgtctaccaagggcttcacataccttactaatagcctcttcgattaccgctctcccgagaacaatgggacgagagcggaattcattcttgacagcactcatcacaaagaaacgtatactgaaattgctggcatgcaacgcttcggcgccttctacatggactacctctatacgatggagaacacatctggtaaaggatcaacgaatcaacaggacttttctagcgggaagtcagaggacttggggactgtgcaagaaaaatctacaaagtcactagtgatcggcccactcgacttcagactagattcttcggccgtacaccgcatcctgaaaatgatcgtttgcgctttagagcacgaatacgagccctactctagactgaaaagcgatattaaggacgagaatgagactatcctgaatcccgaggaagtcgctctgctggaggagtacattccaacaagacatacttctgttacgttacttaaatgcacttgtaccatctcgatggctgagttcaatctcctggaccatctgctgccagtaatcatgggagagaagaattcatctaacttcatgaataccacgaactttcagtcattgcggcccctgccgagcataaggattctggtcgacaaaatcaacctggaacactccgtccccatgtatgctgaacagctggtacatgtagtgtcaagcctcacgcagccttctgacaacctcctccattactgctacgtccactgctatttaaaaatttttgggtttcaggctgggctgaccagccttgactgcagtggatcctactgcttacccgtgccagtaatccccagcttttctacagccctgtatggaaagttgctgaaactgcccacctgctggactaagcgaagccagattgccattaccgagggaattttcgagctgcctaatctcaccatacaggccactcgcgcccagacgctccttctgcaggccatctatcagtcatggagccacctgggtaatgtgtctagttccgccgtgattgaggctcttatcaacgaaatttttcttagtataggggtaaagtccaagaatccgctccccacactggagggctcaatccaaaacgtggagttgaaatactgcagcacttcccttgtgaaatgcgcttctggaaccatgggcagtatcaagatctgcgccaaagcgccagtcgatagcggaaaggagaagctgataccgctgctgcagggcccaagcgatacaaaagatttgcacagtactaagtggctgaatgagagccgcaaaccggaatctttgctggcccccgacctgatggcttttactattcaggtgccccagtacatagactactgccacaacagcggtgcagtgcttctttgcagcatccaaggcctggctgtgaacattgaccctattctctacacctggctgatctatcagccacaaaaacgcacttctcggcacatgcagcagcagccagttgtcgccgtccccctggtcatgcctgtgtgccgcagaaaggaggacgaggttagcattggctcagcccctttggctaagcagcagtcctatcaagcatctgagtatgcgtcaagccctgtaaagactaaaacagtgacagaaagtcgccccctcagcgtgcctgtgaaggctatgctgaacatctctgagagctgcaggtcaccagaggagaggatgaaagagtttattgggatcgtctggaatgccgttaaacaccttaccctgcagctggaagtgcagtcttgttgtgtctttattcccaatgactccctgccttcaccaagcacaattgtcagcggcgatatacctgggaccgtccgatcctggtaccacggtcagacgtcaatgccaggtactctagtgctctgcttacctcagatcaagattatatccgcgggccacaagtatatggagccgctacaggagattcccttcgtgattccaaggcccatcttagaagagggagacgcctttccctggaccatatctctccataacttttctatatatacattgctaggcaagcaggttaccttgtgtctggttgaaccgatggggtgcactagcacactggcagtcacttcacagaagctgttagctacaggtccagatactaggcattcctttgttgtgtgcttacacgtagatctcgaaagcctggagatcaagtgctccaatcctcaagtacagttattttacgaactaaccgacatcatgaataaggtttggaacaagatacagaagcgcggaaatctgaacctaagcccaaccagtccggagacgatggccggacctgtgcccacatcacctgtacgcagttccattggcacagcaccaccggacacatctacttgctccccatccgctgatattggcactacaaccgaaggcgacagtatccaggcgggagaagagtcccccttttccgacagcgtgactctcgagcaaacgactagcaatattgggggaacatccggccgggttagtctgtggatgcaatgggtccttccaaagattactattaagctttttgcccccgaccccgaaaacaaaggcacagaggtctgcatggtaagtgagcttgaggaccttagcgcttccattgatgtgcaggacgtgtacaccaaggtgaagtgcaagattgaatcatttaacatcgaccattatcgctcaaggcctggggagggatggcaaagcggtcatttcgaaggggtttttctccaatgcaaggagaaatccgtgccgtggggtagggtgctcgtttttggtgccatgtggcgttgcttgccgttcttatactag

SEQ ID NO: 308001 - DNA, 4283 bp, Artificial Sequence
  derived and/or modified sequence
atgctagagagctatgtcacgccaattctgatgagctacgttaacaggtacataaagaatctgaagccttccgatctccagctgagcctttggggtggcgatgtagtgctgagcaagttggagctgaagcttgacgtgctagagcaagagctgaagctgccattcacctttctgagtggccacatccacgagctcaggattcatgtgccgtggaccaagttaggatccgagccagtagtaattactattaacacaatggaatgtatcctgaagctgaaagatggaatccaggacgaccacgagtcctgcggctccaattccacaaacagatctactgccgaatccaccaagtcgtctattaaaccgagacgcatgcagcaggcagccccaaccgatcctgacctgccgccaggctatgtccaatctctgattcgcagggtggtgaacaatgtcaacatcgtgataaacaatctgatccttaaatatgtcgaagacgacatcgtcctcagcgttaacatcaccagcgccgaatgctacaccgtgggagaactgtgggacagagcattcatggatatctccgctaccgatctagtgcttcgaaaagtcatcaacttctctgattgcacagtctgccttgacaagcgaaacgcatccgggaaaatcgagttctatcaggatccactgctgtataaatgtagcttcagaactaggctgcacttcacttacgaaaacctgaatagcaaaatgccgagcgtgattaaaatccacacacttgtggaaagcctgaaattgtccatcaccgatcagcagctgcccatgttcattcgcatcatgcaactcggcattgccctgtattatggagaaatcggtaacttcaaggaaggggagattgaagatctgacatgccacaataaggatatgttaggcaacatcacaggttcagaagatgagacccgcattgatatgcaataccccgctcagcataagggtcaggagctctatagtcaacaagacgaagaacagccgcaaggctgggtttcctgggcgtggagctttgtgcccgctattgtcagctatgacgacggtgaggaagattttgtcggaaacgaccccgcatctactatgcaccagcagaaagcacagaccttgaaagaccctatcgtgtccatcggcttctactgcacaaaggcaacagtgacattcaagctcacagaaatgcaggtggaatcttcatactattcacctcagaaagtgaaaagcaaggaagtgctctgctgggagcaggagggcaccactgtggaggccctgatgatgggtgagccattttttgactgccagattggtttcgtcggatgccgcgctatgtgtcttaagggtatcatgggagtgaaagattttgaggaaaacatgaatcgatccgagacagaagcttgttttttcatctgtggagataatctgtcgaccaaagggtttacatatctcactaatagcctgtttgattatagaagtcccgagaataacggtacccgagctgaatttatcctggacagcacacatcacaaagaaacctacacagagatcgctgggatgcagaggttcggcgcattttacatggattatctgtacacaatggagaataccagcggtaagggctccacaaaccagcaggatttttccagtggcaaaagtgaggacctgggcactgttcaggagaagagtaccaagtctctggtgatcggtccccttgatttccggctcgatagttctgcagtgcacaggatccttaaaatgatcgtctgcgcactcgaacacgagtacgagccgtacagtcgcctgaagagtgacatcaaggacgaaaatgagaccatcttgaatccagaagaggtcgccctgctggaagaatacatccccacccgccacaccagcgttacactgctgaaatgcacatgtaccatcagcatggccgagttcaatttattagatcacctgcttcctgtgatcatgggagagaagaattccagcaatttcatgaatacaaccaatttccagtccctacggccactcccaagtattaggattctggtcgataagatcaacctggaacacagtgtccccatgtacgcagaacaattggtgcacgtggtcagcagtcttacccagcccagcgacaatctccttcattattgctacgtgcattgctatctgaaaatctttggctttcaggccggtttgacgtccttagactgtagtggctcatactgcctccctgtccccgtcattcccagtttcagcaccgctctgtacggcaagctgctcaaactaccaacatgctggacaaagcggagccagattgccattacagagggcatctttgaactccccaatctgacgatccaggcgaccagagctcaaacccttttactacaggccatttatcagtcttggtcccacctgggcaatgtgtctagctcggctgtgatcgaagccctgataaatgaaattttcctgtcaatcggggtcaaatctaagaacccccttccgactcttgaggggagcatacagaatgtcgaactcaagtactgctccacttcattggtaaaatgcgcctcagggaccatggggtccattaagatttgtgcaaaggccccagtggattcaggcaaagaaaaactgatccccttgcttcagggaccttcggatacgaaggatcttcacagcactaagtggctgaacgagtcccgcaaacctgagagtctgttggccccagacctcatggcgttcacaattcaggtaccccagtatattgactactgtcataactcaggcgctgttctactttgctcaatacagggactggctgtgaacatcgaccctatcctttacacgtggctgatctaccagccccagaaacgcacttcacgccatatgcagcaacagccagtcgtggctgtgcccctggtaatgccagtttgccggagaaaggaagacgaggtatctatcggtagcgctcctctcgcgaagcagcagtcctatcaggctagcgaatacgcaagttctcctgttaagactaaaaccgtaaccgagagccggccactgtccgtccctgtgaaggcaatgctgaatatcagtgaatcttgcaggagtcccgaagagcgtatgaaagagtttatcggcatcgtatggaacgcggtgaaacacctgacgttgcagctcgaggtgcaaagctgttgcgtcttcatacccaatgacagcctgccaagcccctcaacgatcgtttccggcgacataccaggcacagttaggagctggtaccacggtcagactagtatgcccggtactcttgtgctgtgtctgcctcagataaaaatcataagcgcaggacacaagtacatggaacccctccaggagattccctttgtgatccccagacctatcctcgaagaaggtgacgcatttccttggacgatctccctgcataattttagcatctataccctattaggtaagcaggttactttgtgcctggtcgagccaatggggtgtacctctacactggccgtgacgtcacagaagttactcgcaacaggaccagacacgcgccactccttcgtggtgtgtcttcatgtggacttggaaagcctcgagatcaagtgctcgaatccgcaggttcagctcttctacgagttaaccgacattatgaacaaggtgtggaataagatccagaagagggggaacctaaacctgtcgccaacatccccagagactatggctggaccagtacctacctcaccagtccggagtagcattggcaccgcaccacccgatacttccacgtgttcaccttcagcagatatcgggacaacaaccgagggggattccatccaggcaggcgaggaaagtccattttccgattccgtcaccctggagcagaccacctccaatataggcggaacttcaggccgagtgtctctgtggatgcagtgggtcctccctaaaattacaattaaactctttgcaccagacccggagaataaagggaccgaggtgtgtatggtgagcgagctggaggacctcagtgcgtccattgatgtgcaggatgtctatacaaaggtcaagtgtaaaattgagtccttcaacattgatcattacaggtcaagaccgggtgagggctggcagtctgggcattttgaaggtgtgtttttacagtgcaaagaaaaaagcgtaccctggggcagggttctggtgttcggagcaatgtggcgatgtcttccgttcctttacta

SEQ ID NO: 308002 - protein, 433 aa, Artificial Sequence
  derived and/or modified sequence
MDRGEKIQLKRVFGYWWGTSFLLINIIGAGIFVSPKGVLAYSCMNVGVSLCVWAGCAILAMTSTLCSAEISISFPCSGAQYYFLKRYFGSTVAFLNLWTSLFLGSGVVAGQALLLAEYSIQPFFPSCSVPKLPKKCLALAMLWIVGILTSRGVKEVTWLQIASSVLKVSILSFISLTGVVFLIRGKKENVERFQNAFDAELPDISHLIQAIFQGYFAYSGELKKPRTTIPKCIFTALPLVTVVYLLVNISYLTVLTPREILSSDAVAITWADRAFPSLAWIMPFAISTSLFSNLLISIFKSSRPIYLASQEGQLPLLFNTLNSHSSPFTAVLLLVTLGSLAIILTSLIDLINYIFFTGSLWSILLMIGILRRRYQEPNLSIPYKSLILVVQAGEAGVQWHDLGLLQPLLPGFKRFSCLSLPSSWDYRCFCHFH

SEQ ID NO: 308003 - DNA, 1302 bp, Artificial Sequence
  derived and/or modified sequence
atggacagaggcgagaagatccagctgaagagagtgttcggctactggtggggcaccagcttcctgctgatcaacatcatcggcgccggcatcttcgtgagccccaagggcgtgctggcctacagctgcatgaacgtgggcgtgagcctgtgcgtgtgggccggctgcgccatcctggccatgaccagcaccctgtgcagcgccgagatcagcatcagcttcccctgcagcggcgcccagtactacttcctgaagagatacttcggcagcaccgtggccttcctgaacctgtggaccagcctgttcctgggcagcggcgtggtggccggccaggccctgctgctggccgagtacagcatccagcccttcttccccagctgcagcgtgcccaagctgcccaagaagtgcctggccctggccatgctgtggatcgtgggcatcctgaccagcagaggcgtgaaggaggtgacctggctgcagatcgccagcagcgtgctgaaggtgagcatcctgagcttcatcagcctgaccggcgtggtgttcctgatcagaggcaagaaggagaacgtggagagattccagaacgccttcgacgccgagctgcccgacatcagccacctgatccaggccatcttccagggctacttcgcctacagcggcgagctgaagaagcccagaaccaccatccccaagtgcatcttcaccgccctgcccctggtgaccgtggtgtacctgctggtgaacatcagctacctgaccgtgctgacccccagagagatcctgagcagcgacgccgtggccatcacctgggccgacagagccttccccagcctggcctggatcatgcccttcgccatcagcaccagcctgttcagcaacctgctgatcagcatcttcaagagcagcagacccatctacctggccagccaggagggccagctgcccctgctgttcaacaccctgaacagccacagcagccccttcaccgccgtgctgctgctggtgaccctgggcagcctggccatcatcctgaccagcctgatcgacctgatcaactacatcttcttcaccggcagcctgtggagcatcctgctgatgatcggcatcctgagaagaagataccaggagcccaacctgagcatcccctacaagagcctgatcctggtggtgcaggccggcgaggccggcgtgcagtggcacgacctgggcctgctgcagcccctgctgcccggcttcaagagattcagctgcctgagcctgcccagcagctgggactacagatgcttctgccacttccactag

SEQ ID NO: 308004 - DNA, 1302 bp, Artificial Sequence
  derived and/or modified sequence
atggatcgcggcgagaaaatccagctgaagcgcgtctttggatactggtggggtaccagtttcctgctgattaatatcatcggagcagggattttcgtcagccctaagggggttctggcttattcctgcatgaacgtgggcgtcagcctgtgcgtttgggcaggttgcgccattctggctatgacctctacgctatgcagcgccgagatcagtatcagtttcccttgctccggagcccagtactatttcctgaaaagatacttcggctctacggtggcctttttgaacctatggacctctctatttctcgggagcggcgtggttgccggccaagctctgttgctcgccgagtattccattcaacccttctttccttcctgttccgtgcctaaattgccaaaaaagtgcctggccttggctatgttgtggatcgtcggaattcttactagtcgaggtgtaaaggaggttacctggttacagatcgccagttctgtcctgaaagtgtctatactgtctttcatcagcctaacaggcgtggtgtttcttattcgggggaagaaggagaatgtggaacggttccagaacgcgttcgatgccgagctgcctgacatcagccatttgattcaggccatctttcaaggttatttcgcctattcaggggaactgaagaagccacgtaccacgattccaaagtgcattttcaccgccctcccactagtgactgtagtttatctgctggtcaacataagctatctcactgtgctgacgcccagggagatcctttctagtgatgcagtagctattacctgggcagatcgggctttcccaagtctggcttggataatgccattcgctatatcaacctctcttttttctaacttgttgatctctatcttcaagtcctccagacccatttacctggcaagccaggaagggcagttaccgctcctctttaatacactcaacagccacagcagtccgttcactgccgtcctgcttctcgtaactctgggaagcctggcaataattctcacatctctgattgacctgatcaactacatctttttcaccggaagcctctggtctatcctcttaatgatcggtattttacgtcgccgttaccaagaacccaatttgtccattccttataagtctctgatcctggtggttcaggccggggaggccggcgtacaatggcacgacctgggactgctgcaaccacttctacccggctttaagcggttttcatgcctgtccctgccctcttcttgggattatagatgtttttgccacttccattag

SEQ ID NO: 308005 - DNA, 1302 bp, Artificial Sequence
  derived and/or modified sequence
atggacagaggagagaagatccagctgaagagggtgtttggctactggtggggcaccagcttcctgctgatcaacatcattggagctggcatctttgtgagccccaagggcgtgctggcctacagctgcatgaatgtgggcgtgtccctgtgtgtgtgggccggctgtgccatcctggccatgaccagcaccctgtgcagcgctgagatcagcatctccttcccctgcagcggggcccagtactacttcctgaagcgctacttcggcagcacagtggccttcctgaacctgtggaccagcctcttcctgggcagcggcgtggtggccggccaggccctgctgctggccgagtacagcatccagcccttcttccccagctgcagcgtgcccaagctgcccaagaagtgcctggccctggccatgctgtggatcgtgggcatcctgaccagccggggcgtgaaggaggtgacctggctgcagatcgccagctctgtgctgaaggtgtccatcctgtccttcatcagcctgactggagtggtgttcctgatccggggcaagaaggaaaatgtggagcgcttccagaatgcctttgatgctgagctgcctgacatcagccacctgatccaggccatcttccagggctactttgcctacagcggggagctgaagaagcccaggaccaccatccccaagtgcatcttcaccgccctgcccctggtgacagtggtgtacctgctggtgaacatctcctacctgactgtgctgaccccccgggagatcctgagcagtgatgctgtggccatcacctgggccgaccgggccttccccagcctggcctggatcatgccctttgccatcagcaccagcctcttcagcaacctgctgatcagcatcttcaagagcagccggcccatctacctggccagccaggagggccagctgcccctgctcttcaacaccctgaacagccacagcagccccttcaccgctgtgctgctgctggtgaccctgggcagcctggccatcatcctgaccagcctgattgacctgatcaactacatcttcttcaccggcagcctgtggagcatcctgctgatgattggcatcctgcggcggcgctaccaggagcccaacctgagcatcccctacaagagcctcatcctggtggtgcaggccggggaggccggcgtgcagtggcatgacctgggcctgctgcagcccctgctgcccggcttcaagcgcttcagctgcctgagcctgcccagctcctgggactaccgctgcttctgccacttccactag

SEQ ID NO: 308006 - DNA, 1302 bp, Artificial Sequence
  derived and/or modified sequence
atggaccggggcgagaagatccagctgaagcgggtgttcggctactggtggggcacatctttcctgctgatcaatattatcggtgccggcatctttgtaagccctaaaggggtcctggcgtactcttgcatgaatgtcggggtctctctctgcgtgtgggccggctgtgccattctggcaatgacaagcaccctgtgcagcgccgaaatttcaatcagttttccgtgttccggcgctcagtactacttcctcaagcgatatttcgggtccaccgtcgccttcctaaatctttggacatccttatttctgggaagtggggtcgtcgccggccaggcactgctcctcgctgaatattcaatacagcctttctttccctcctgctcggtccctaaactgccgaaaaaatgcctggccctcgcaatgttgtggatcgtggggatcctgacatctaggggtgtgaaagaggtgacctggctccagattgcctcttccgtactgaaggttagcattctgagctttattagcctgaccggggtcgtcttcctgattcggggtaagaaggaaaatgtcgagcgcttccagaacgcttttgacgctgaactgcctgacatatctcaccttatacaggctatattccagggatatttcgcttattccggtgagttgaaaaaaccacggacaaccattcccaagtgcatattcacggcattacccttggtgaccgttgtgtatctgctggtgaacatctcctacctcactgtgctgactccacgagagattctcagcagtgacgccgtggccatcacgtgggccgatagagcttttccctcactggcatggattatgccatttgccatctcaaccagtctgttctccaacctgttgatttctattttcaaatcttcgcgacccatctatctcgccagtcaggagggtcaattgccactgctgttcaacaccctgaatagtcacagctccccgtttaccgccgtgctgttgctggtcacgttggggtctctcgccataatccttacatccctgatagatctcataaactatatttttttcacaggatccctgtggagcattctattgatgataggcatcctgagacgaagataccaggagcctaacctctcaatcccatacaaatctctgatattagtcgtccaagcaggggaagccggggtgcagtggcacgacctggggctgctgcagcctctgcttcccggctttaaaaggtttagttgtctcagccttccctcatcttgggactatcggtgtttctgccactttcactag

SEQ ID NO: 308007 - DNA, 1302 bp, Artificial Sequence
  derived and/or modified sequence
atggacaggggagaaaaaattcaactcaaacgagttttcggatattggtgggggacctctttcctactgatcaacatcatcggggctggcatctttgtgtctcccaagggtgtgctggcttacagttgtatgaacgtgggagttagcctctgtgtgtgggccggttgcgccatactcgcaatgacatctacactgtgttctgcggagatctcaatcagcttcccctgctcaggggcacagtactatttcctcaagcgatactttgggagcacggtcgcgtttctcaacttgtggacttccttgttccttggctctggggtggtagcgggtcaggccttgttgctggccgaatattcaatacaacccttcttcccctcctgtagtgtgccaaagctgcccaaaaagtgcttagccctggcaatgctgtggatcgtgggaattctgacttcacggggagtgaaggaagtgacttggcttcagattgccagctcagtgctgaaggtgtcaattttgtccttcatttcccttacaggcgttgtgtttttgattagaggcaagaaagaaaacgtcgagcgctttcagaacgccttcgacgctgaacttccagatatctcccatctcatccaggccatatttcagggctatttcgcttactcaggtgagctgaagaagccgcgtacaactattccaaagtgcattttcacagccctgcccctggtcaccgtcgtctacttgctggtcaacatatcctacctgacggttctgactccgagggagattctctcttcggacgccgtcgccataacctgggctgacagagctttcccttctctcgcttggattatgccatttgccatttcaaccagtctgttctctaatctcctcatctcaatattcaaatccagccgaccaatatatctcgcttctcaggaagggcagctccccttgttgtttaataccctgaacagtcacagctctccgtttaccgcagtacttctactggtgaccctaggatcgcttgccatcatacttacaagcttaatagaccttatcaactacatcttcttcaccggatctctgtggagtattcttctgatgatcggcattcttcgtagacgataccaggaacccaacctctccatcccttacaaaagcctcattcttgtcgtgcaagctggggaggctggcgttcagtggcacgatttaggacttctccagcctcttctgcccggatttaaaaggttcagctgtctgagtctgccatcttcatgggactatcgatgtttttgccatttccactag

SEQ ID NO: 308008 - DNA, 1618 bp, Artificial Sequence
  derived and/or modified sequence
tccatcaacatcctttgcagctacataggcaggaaaatctagaaattgtaatttatatagaattttaaaactcttcaattacaatggatagaggggagaaaatacagctcaagagagtgtttggatattggtggggcacaagttttttgcttattaatatcattggtgcaggaatttttgtgtcccccaaaggtgtgttggcatactcttgcatgaacgtgggagtctccctgtgcgtttgggctggctgtgccatactggccatgacatcaactctttgctctgcagagataagtataagcttcccatgcagtggagctcaatactattttctcaagagatactttggctccacggttgcttttttgaatctctggacatccttgtttctggggtcaggggtagttgctggccaagctctgctccttgctgagtacagcatccagcctttttttcccagctgctctgtcccaaagctgcctaagaaatgtctggcattggccatgttgtggattgtaggaattctgacttctcgtggtgtgaaagaagtgacttggcttcagatagctagctcagtgctgaaagtgtccatacttagcttcatttccctaactggagtagtgttcctgataagagggaaaaaggagaatgtagaacgatttcagaatgcttttgatgctgaacttccagatatctctcaccttatacaagccatcttccaaggatattttgcatattcaggggagctgaagaagcccagaacaacaattcccaaatgcatatttactgcgttacctctggtgactgtagtttatttactggttaacatttcctatctgactgttctgacacccagggaaattctctcttcagatgctgtagctatcacatgggctgatcgagcttttccctcattagcatggattatgccttttgctatttctacctcattatttagcaaccttctgatttctatatttaaatcatcgagaccaatatatcttgcaagccaagagggccagctgcctttgctatttaatacacttaatagtcactcttctccatttacagctgtgctactacttgtcactttgggatcccttgcaattatcttaacaagtctaattgatttgataaactatatttttttcacgggttcattatggtctatattattaatgataggaatactaaggcggagataccaggaacccaatctatctataccttataagagtctcattcttgtcgtccaggctggagaagctggagtgcagtggcatgatcttggcttgctgcaacctctgcttcctgggttcaagagattctcctgcctcagcctcccaagtagctgggattacaggtgtttttgtcatttccattagcaacaatagtcatcgacgtgggcttggttgtgataccattggtaaagtctccaaatgtgcattatgtctacgtgcttctgttagttctcagcggattactattttacatacctttaatacattttaaaataagattggcttggtttgagaagatgacttgctatttacaattactatttaatatttgcctccctgatgtgtctgaggaatagatgtcggaagtgcaaactctt

SEQ ID NO: 308009 - protein, 326 aa, Artificial Sequence
  derived and/or modified sequence
MSGLGKKHLLLMGEFFSYGTKILYQNTEALQSKFFSPLQKAMLPPNSFQGKVAFITGGGTGLGKGMTTLLSSLGAQCVIASRKMDVLKATAEQISSQTGNKVHAIQCDVRDPDMVQNTVSELIKVAGHPNIVINNAAGNFISPTERLSPNAWKTITDIVLNGTAFVTLEIGKQLIKAQKGAAFLSITTIYAETGSGFVVPSASAKAGVEAMSKSLAAEWGKYGMRFNVIQPGPIKTKGAFSRLDPTGTFEKEMIGRIPCGRLGTVEELANLAAFLCSDYASWINGAVIKFDGGEEVLISGEFNDLRKVTKEQWDTIEELIRKTKGS

SEQ ID NO: 308010 - DNA, 981 bp, Artificial Sequence
  derived and/or modified sequence
atgtctggacttggcaaaaagcatctcctgctgatgggagaatttttttcctacggcaccaaaatactttaccagaataccgaagctctgcagagtaagttcttcagcccgctccagaaagcgatgctgccccctaatagcttccagggcaaggtagcatttattaccggtggtggcacggggcttggcaagggcatgaccaccctcctgagctctctaggggcacagtgtgtgatagctagtagaaaaatggatgtgctgaaggccaccgctgaacagataagtagccaaactggcaacaaagtccacgctatccaatgcgacgtgagagatcctgatatggtgcagaatactgtttccgaattaatcaaggtggcgggccatccaaacattgtcatcaataacgcagccggaaatttcatttctcctaccgaaagactgagcccgaatgcttggaaaactatcaccgatatcgtgctgaatggcaccgcttttgtgactctagagatcggcaagcagctaattaaagcacaaaaaggcgccgcttttttgagcatcacaaccatttatgctgaaaccgggagtggatttgtggtgccctctgcctccgcgaaggccggtgtcgaagccatgtctaaatccctagcagccgaatggggcaagtacggaatgcggttcaatgttattcagccaggtcctatcaaaacaaagggggcattttccaggctggacccgactgggaccttcgagaaagaaatgattgggcggattccttgcggacggctcggcactgtagaggagctggccaaccttgcggcatttctgtgcagcgactacgcctcctggattaatggggctgtcatcaaatttgacgggggagaagaggttctgattagcggcgagtttaacgacctgaggaaagtaacgaaagagcaatgggatacaatcgaggagctgattcgcaagacaaaaggcagttag

SEQ ID NO: 308011 - DNA, 981 bp, Artificial Sequence
  derived and/or modified sequence
atgagcggcctgggcaagaagcacctgctgctgatgggagagttcttctcctatggcaccaagatcctgtaccagaacacagaggccctgcagagcaagttcttcagccccctgcagaaggccatgctgccccccaacagcttccagggcaaggtggccttcatcaccggcggcggcaccggcctgggcaagggcatgaccaccctgctgagcagcctgggcgcccagtgtgtgattgccagcaggaagatggatgtgctgaaggccacagctgagcagatcagcagccagacaggcaacaaggtgcacgccatccagtgtgatgtgcgggaccctgacatggtgcagaacacagtgtctgagctgatcaaggtggccggccaccccaacatcgtcatcaacaatgctgctggcaacttcatcagccccacagagcggctgagccccaatgcctggaagaccatcacagacatcgtgctgaatggaacagcctttgtgaccctggagatcggcaagcagctgatcaaggcccagaagggagctgccttcctgagcatcaccaccatctatgcagagactggaagtggctttgtggtgcccagcgccagcgccaaggccggcgtggaggccatgagcaagagcctggccgctgagtggggcaagtatggcatgaggttcaacgtcatccagcccggccccatcaagaccaagggggccttcagccggctggaccccaccggcacctttgagaaggagatgattggccgcatcccctgtggccgcctgggcaccgtggaggagctggccaacctggccgccttcctgtgcagcgactatgcctcctggatcaacggggccgtcatcaagtttgatggaggagaggaggtgctgatctctggagagttcaatgacctgaggaaggtgaccaaggagcagtgggacaccatcgaggagctgatcaggaagaccaagggcagctag

SEQ ID NO: 308012 - DNA, 981 bp, Artificial Sequence
  derived and/or modified sequence
atgagcggcctgggcaagaagcacctgctgctgatgggcgagttcttcagttatggcaccaaaatactctaccagaacaccgaagccttgcaatctaaatttttttccccactgcagaaagccatgctgcctcctaactctttccagggtaaggtagcctttattacaggcgggggaaccggtttggggaaaggaatgaccactctactaagttctctgggcgcccagtgtgtgatcgcctctcgtaagatggacgtgctgaaggccaccgctgagcaaatcagtagccagactgggaacaaggtccacgccattcagtgtgacgtgcgcgatcccgacatggtgcagaatacagtgagtgaactgattaaagtcgccggccatcctaacattgtgattaataacgctgccggaaattttatctccccaacagagcgactgagtcccaacgcctggaagactataacagatatcgtcttgaacggtacggcctttgtcacactggaaattggaaagcagctcataaaagcacagaagggagcagcattcctttcaatcaccactatttatgcagaaaccggctccggcttcgttgtgccatccgcatcagctaaagccggagttgaagctatgagcaaaagtctcgccgccgagtggggtaaatatgggatgcgtttcaacgtgattcagccaggaccgatcaagacaaagggcgccttttcccggctggacccaactggaacgttcgaaaaggagatgatcggtcgcataccttgtggcaggttggggacagtggaggagttagccaacctagcggcgtttctgtgcagtgactatgcaagctggataaacggggctgtcatcaaattcgacggaggggaggaagtgttaataagcggcgagttcaacgatctgaggaaagttacaaaggagcagtgggataccatcgaggagctaatcagaaagacaaagggatcttag

SEQ ID NO: 308013 - DNA, 981 bp, Artificial Sequence
  derived and/or modified sequence
atgtccgggcttggtaaaaagcacctgctgctcatgggtgagtttttttcatacggcactaaaattctgtatcaaaacactgaggctctccagtctaagtttttcagccccctccagaaagccatgttgcctccgaatagctttcagggaaaggtggcattcattacgggtggcggaacaggactgggaaaagggatgactaccttgctgtcgtccctcggagcacagtgcgtgatcgccagcagaaaaatggatgtgctcaaagccaccgcagaacaaatcagctcacagacgggcaacaaagtgcatgccatccagtgcgacgtaagagatccagatatggtgcagaacacagtctccgagctcatcaaggttgcgggacatcccaacatcgtaatcaacaacgctgcaggcaatttcatttcgcctacagaaagactttccccaaatgcgtggaagaccatcaccgacatagtgctaaatggcaccgcattcgtcacgctcgaaattggcaaacaactgatcaaagcccaaaaaggcgcagcgtttttgtccatcaccacaatttacgctgagactggttcggggttcgttgtcccatccgcttcggcgaaagccggtgtggaagcaatgtctaaaagcctggccgcagagtggggcaagtatggcatgcgtttcaatgtcattcagcccggtccaatcaaaacgaagggcgcttttagtcgactcgacccaacaggaacctttgaaaaggaaatgatcgggcgtatcccctgcggacggctcgggacagtcgaggagctggccaatttagcggcttttctctgtagcgattatgcctcatggattaatggcgctgtgattaagttcgacggcggagaagaagttttgattagtggagagtttaatgacctgaggaaagtgacaaaggagcagtgggatacaattgaagaactcatccggaagacaaagggctcatag

SEQ ID NO: 308014 - DNA, 1766 bp, Artificial Sequence
  derived and/or modified sequence
gttctggagactcaacatgaagctaccggccagggttttctttactctggggtcccggctgccctgtggcctcgctcctcggaggtctgaaaaatgagtaaagatggaagccaaagtatcacttttattgtggtttgtgagaggaagctgggcctatcagctggatctcccgaagtaggcggacttacataactctggaggagggcagaacattgtcctctgaaggcagctggctcccaaaaggaagaagaccaaggagaactgttcatacccaacgatcctgtcaaaatttaccagtcatatcaactgtctctgcacagacagattgtacctcagtctgtgttgctataaaggaatacctgaggctgggtaatttataaagaaaagggtttgtttgactcatgattctgatgcctggacaagttcaagactgggcatctgcatctggtgacggcctaaggctgcttgcacttgtggcagaaggatgaagatggtactacgacattcatgatggatctgccaccataacccaggcacctcccattagaccccacctccaacattggggatcacatttcaacatgagttttcaagggacaaacatccaaacatccttagcaggttgactaaggggacagaaagaagcctggagttgtactacctgaacttctcacagtagggagatgtcaggactggggaagaagcatctcctgctcatgggggagtttttcagttatgggacaaaaatattatatcaaaacactgaagctttgcaatctaaattcttttcacctcttcaaaaagcgatgctaccacctaatagttttcaaggaaaagtggcattcattactgggggaggtactggccttggtaaaggaatgacaactcttctgtccagcctaggtgctcagtgcgtgatagccagccggaagatggatgttttgaaagctaccgcagaacaaatttcttctcaaactggaaataaggttcatgcaattcagtgtgatgtgagggatcctgatatggttcaaaacactgtgtcagaactgatcaaagttgcaggacatcctaatattgtgataaacaatgcagcagggaattttatttctcctactgaaagactttctcctaatgcttggaaaaccataactgacatagttctaaatggcacagccttcgtgacactagaaattggaaaacaactaattaaagcacagaaaggagcagcatttctttctattactactatctatgctgagactggttcaggttttgtagtaccaagtgcttctgccaaagcaggtgtggaagccatgagcaagtctcttgcagctgaatggggtaaatatggaatgcgattcaatgtgattcaaccagggcctataaaaaccaaaggtgcctttagccgtctggacccaactggaacatttgagaaagaaatgattggcagaattccctgtggtcgcctggggactgtagaagaactcgcaaatcttgctgctttcctttgtagtgattatgcttcttggattaatggagcagtcattaaatttgacggtggagaggaagtacttatttcaggggaattcaacgacctgagaaaggtcaccaaggagcagtgggacaccatagaagaactcatcaggaagacaaaaggttcctaagaccactttggccttcatcttggttacagaaaagggaatagaaatgaaacaaattatctctcatcttttgactatttcaagtctaataaattcttaattaac

SEQ ID NO: 308015 - DNA, 981 bp, Artificial Sequence
  derived and/or modified sequence
atgagcggcctgggcaagaagcacctgctgctgatgggcgagttcttcagctacggcaccaagatcctgtaccagaacaccgaggccctgcagagcaagttcttcagccccctgcagaaggccatgctgccccccaacagcttccagggcaaggtggccttcatcaccggcggcggcaccggcctgggcaagggcatgaccaccctgctgagcagcctgggcgcccagtgcgtgatcgccagcagaaagatggacgtgctgaaggccaccgccgagcagatcagcagccagaccggcaacaaggtgcacgccatccagtgcgacgtgagagaccccgacatggtgcagaacaccgtgagcgagctgatcaaggtggccggccaccccaacatcgtgatcaacaacgccgccggcaacttcatcagccccaccgagagactgagccccaacgcctggaagaccatcaccgacatcgtgctgaacggcaccgccttcgtgaccctggagatcggcaagcagctgatcaaggcccagaagggcgccgccttcctgagcatcaccaccatctacgccgagaccggcagcggcttcgtggtgcccagcgccagcgccaaggccggcgtggaggccatgagcaagagcctggccgccgagtggggcaagtacggcatgagattcaacgtgatccagcccggccccatcaagaccaagggcgccttcagcagactggaccccaccggcaccttcgagaaggagatgatcggcagaatcccctgcggcagactgggcaccgtggaggagctggccaacctggccgccttcctgtgcagcgactacgccagctggatcaacggcgccgtgatcaagttcgacggcggcgaggaggtgctgatcagcggcgagttcaacgacctgagaaaggtgaccaaggagcagtgggacaccatcgaggagctgatcagaaagaccaagggcagctag

SEQ ID NO: 308016 - protein, 320 aa, Artificial Sequence
  derived and/or modified sequence
MYHCHSGSKPTEKGANEYAYAKWKLCSASAICFIFMIAEVVGGHIAGSLAVVTDAAHLLIDLTSFLLSLFSLWLSSKPPSKRLTFGWHRAEILGALLSILCIWVVTGVLVYLACERLLYPDYQIQATVMIIVSSCAVAANIVLTVVLHQRCLGHNHKEVQANASVRAAFVHALGDLFQSISVLISALIIYFKPEYKIADPICTFIFSILVLASTITILKDFSILLMEGVPKSLNYSGVKELILAVDGVLSVHSLHIWSLTMNQVILSAHVATAASRDSQVVRREIAKALSKSFTMHSLTIQMESPVDQDPDCLFCEDPCD

SEQ ID NO: 308017 - protein, 369 aa, Artificial Sequence
  derived and/or modified sequence
MEFLERTYLVNDKAAKMYAFTLESVELQQKPVNKDQCPRERPEELESGGMYHCHSGSKPTEKGANEYAYAKWKLCSASAICFIFMIAEVVGGHIAGSLAVVTDAAHLLIDLTSFLLSLFSLWLSSKPPSKRLTFGWHRAEILGALLSILCIWVVTGVLVYLACERLLYPDYQIQATVMIIVSSCAVAANIVLTVVLHQRCLGHNHKEVQANASVRAAFVHALGDLFQSISVLISALIIYFKPEYKIADPICTFIFSILVLASTITILKDFSILLMEGVPKSLNYSGVKELILAVDGVLSVHSLHIWSLTMNQVILSAHVATAASRDSQVVRREIAKALSKSFTMHSLTIQMESPVDQDPDCLFCEDPCD

SEQ ID NO: 308018 - DNA, 1110 bp, Artificial Sequence
  derived and/or modified sequence
atggaattcttagagaggacatatctggtgaatgataaagccgcgaaaatgtatgcctttaccctggagtctgtcgagttacagcaaaaacccgttaataaggaccagtgcccacgagagcgacctgaggagctagaatccggcgggatgtatcattgtcactcgggctcaaagcccaccgaaaaaggagctaatgagtatgcctatgcaaaatggaagctgtgctcagcgtcagcgatatgcttcatcttcatgatcgctgaggtggtgggcggtcacatagcaggatcccttgcagtggttacggacgcggctcatttgttgatcgacctgacaagctttctgttgtctctctttagcctctggctgtcctctaagccgccttctaaacgtctgacgtttggttggcaccgcgcggaaatacttggggctttgctctctatcttgtgcatatgggtggtgacaggtgtgttggtgtatctcgcctgcgaaagactcctgtatccggactaccagatccaggccaccgtgatgattatagtatcaagctgcgccgtggcagcaaacattgtgttaacagttgtgttgcatcaacgttgcttagggcataatcataaggaggtgcaggctaacgcctccgtgcgggcggccttcgtccatgcactgggcgatcttttccagagtatttcagtgttaatctcggcgctgatcatttattttaagccagagtacaagatcgcagaccccatttgtacgtttattttttcaatccttgtgctggcctccactattaccattctaaaggactttagcattcttttaatggaaggcgtaccgaagtctctgaattacagcggggtcaaggagttgatattagcggtggatggcgttctgtccgtacactcactgcatatctggtcactaaccatgaaccaagtgatcctgagtgcccacgtcgcgaccgctgcctcccgcgacagccaagtggtacgacgcgaaatcgcgaaggcactgagcaagtcatttaccatgcactcgctgacaatccagatggagagcccagtggaccaggacccagactgcttgttttgtgaagatccctgtgactag

SEQ ID NO: 308019 - DNA, 1110 bp, Artificial Sequence
  derived and/or modified sequence
atggagttcctggagaggacctacctggtgaatgacaaggccgccaagatgtatgccttcaccctggagagcgtggagctgcagcagaagcctgtgaacaaggaccagtgcccccgggagaggcctgaggagctggagagcggcggcatgtaccactgccacagcggcagcaagcccacagagaagggggccaatgaatatgcctatgccaagtggaagctgtgcagcgccagcgccatctgcttcatcttcatgattgctgaggtggtgggcggccacatcgccggcagcctggccgtggtgacagatgctgcccacctgctgattgacctgaccagcttcctgctgagcctcttcagcctgtggctgagcagcaagccacccagcaagaggctgaccttcggctggcacagagctgagatcctgggcgccctgctgagcatcctgtgcatctgggtggtgactggagtgctggtgtacctggcctgtgagcggctgctgtacccagactaccagatccaggccaccgtgatgatcatcgtgagcagctgtgctgtggccgccaacatcgtgctgactgtggtgctgcaccagcgctgcctgggccacaaccacaaggaggtgcaggccaatgcctctgtgcgggccgcctttgtgcacgccctgggggacctcttccagagcatctctgtgctgatcagcgccctgatcatctacttcaagccagagtacaagattgctgaccccatctgcaccttcatcttcagcatcctggtgctggccagcaccatcaccatcctgaaggacttcagcatcctgctgatggagggcgtgcccaagagcctgaactacagcggcgtgaaggagctgatcctggccgtggatggagtgctgtctgtgcacagcctgcacatctggagcctgaccatgaaccaggtgatcctgagcgcccacgtggccacagctgccagccgggacagccaggtggtgagaagagagatcgccaaggccctgagcaagagcttcaccatgcacagcctgaccatccagatggagagccctgtggaccaggaccctgactgcctcttctgtgaggacccctgtgactag

SEQ ID NO: 308020 - DNA, 1110 bp, Artificial Sequence
  derived and/or modified sequence
atggagttcctggagcggacctacctggtgaacgacaaggccgccaaaatgtacgcatttacgctggaaagtgtggagctgcagcagaagcctgtcaataaagaccagtgcccccgagaacgacccgaggaactggagtccgggggtatgtaccattgtcacagtggctctaaacccactgagaaaggtgccaatgaatatgcgtatgctaagtggaaactctgttcagcatctgccatctgctttatcttcatgatagctgaggttgttggtggtcatattgcaggtagcctggccgtcgttacagacgctgcccatcttctgattgacctgacctctttcctgctgtctctgttctcgttgtggctctcatccaagcctccttcgaaacggctgacctttggttggcacagagccgaaatactcggcgctttgctctccatcctctgcatatgggtggtaaccggagtccttgtctacctggcctgcgagcgattactgtacccagactatcaaattcaggccaccgtcatgatcatcgtgagcagctgcgccgtggcagcaaatatcgtgcttactgttgttctacatcagcgctgtttaggacacaaccacaaggaggttcaagccaatgcctctgtgcgggctgcatttgtgcatgccctaggtgatctattccagagcatttccgtgctaatatcggcacttatcatttactttaagcctgaatacaagattgcggaccccatatgtacttttatcttctcgatccttgtgctcgctagcacaataacaatactgaaagatttttctatcctgctgatggagggggtgcctaaaagcttgaactattctggggttaaagaactgattttagccgtcgatggcgtgctgtcagtgcactccctgcatatctggtctctcaccatgaaccaggtgatactctcagcccacgtggccactgccgcgagtcgagactctcaggtcgtgagaagggagattgctaaggccctttcaaagtcctttacaatgcattcactaaccatacagatggagtctccagtcgatcaagaccccgattgtctgttttgcgaggacccatgtgattag

SEQ ID NO: 308021 - DNA, 1110 bp, Artificial Sequence
  derived and/or modified sequence
atggagttcctggagcgcacatacttggtgaacgacaaagccgctaagatgtacgcttttactctagagagcgttgaactgcagcagaaaccagtcaacaaggatcagtgtcccagggaacggccagaagagctggagagcgggggtatgtaccattgccactctgggtctaagcctacagagaaaggcgctaatgagtacgcctacgccaagtggaaactgtgctcagcatcagccatttgttttatctttatgattgcggaagttgttggaggacatatcgccggatcgttggctgtagtgacagatgcggctcatttactcattgacctgacttcctttttgctgagcctgttttcactctggttaagtagcaaacccccttccaagcgactcacctttggctggcatagggcagagatattgggagctctgttgagcatactgtgtatctgggtcgtaactggggtgttggtatacctcgcatgtgaaagactcctctatcccgattaccagatccaggcaactgtgatgatcatcgtctctagctgcgccgtggccgctaacattgtcctcaccgtggtgcttcaccagagatgcttggggcacaaccacaaggaggtgcaggctaacgcatctgttcgtgcggctttcgtacatgcccttggagacttgtttcaatccattagcgtcctgatcagtgcccttatcatatattttaagcccgaatacaaaattgccgacccgatttgtacgtttatttttagcatccttgtgttagccagcactatcacgatcttgaaggacttcagcatcttactaatggagggtgttcccaagagcttgaattattccggcgtaaaagagctgatcttagccgtcgatggcgtgctgagcgttcactcacttcacatctggagtttaacaatgaaccaggtgattttgtctgcacacgtggctacagcagcctcccgggatagccaggtggtgaggcgggaaatcgctaaagcattgtctaaatcctttacaatgcacagtcttaccattcagatggagtctcctgtagatcaggaccccgactgcctcttttgcgaagatccatgtgactag

SEQ ID NO: 308022 - DNA, 5430 bp, Artificial Sequence
  derived and/or modified sequence
ttttaagaagcatcaagaaagcctgcctgtctaactttggaaatatcaccctcatgctgtcttcccaggatgtctctctccctaagtaagagatgttacttcctggagggaatgcagtgttgggaatctgaagacccagctttgagctgaatttgctttgtgatacctggagagaagacgtgttttcttgacaacagcacagtacctagtgagttcaacaacaacgacaacaacagccgcagctcatcctggccgtcatggagtttcttgaaagaacgtatcttgtgaatgataaagctgccaagatgtatgctttcacactagaaagaaggagctgcaaatgaacacttcatagcaatgtggaactccaacagaaaccggtgaataaagatcagtgtcccagagagagaccagaggagctggagtcaggaggcatgtaccactgccacagtggctccaagcccacagaaaagggggcgaatgagtacgcctatgccaagtggaaactctgttctgcttcagcaatatgcttcattttcatgattgcagaggtcgtgggtgggcacattgctgggagtcttgctgttgtcacagatgctgcccacctcttaattgacctgaccagtttcctgctcagtctcttctccctgtggttgtcatcgaagcctccctctaagcggctgacatttggatggcaccgagcagagatccttggtgccctgctctccatcctgtgcatctgggtggtgactggcgtgctagtgtacctggcatgtgagcgcctgctgtatcctgattaccagatccaggcgactgtgatgatcatcgtttccagctgcgcagtggcggccaacattgtactaactgtggttttgcaccagagatgccttggccacaatcacaaggaagtacaagccaatgccagcgtcagagctgcttttgtgcatgcccttggagatctatttcagagtatcagtgtgctaattagtgcacttattatctactttaagccagagtataaaatagccgacccaatctgcacattcatcttttccatcctggtcttggccagcaccatcactatcttaaaggacttctccatcttactcatggaaggtgtgccaaagagcctgaattacagtggtgtgaaagagcttattttagcagtcgacggggtgctgtctgtgcacagcctgcacatctggtctctaacaatgaatcaagtaattctctcagctcatgttgctacagcagccagccgggacagccaagtggttcggagagaaattgctaaagcccttagcaaaagctttacgatgcactcactcaccattcagatggaatctccagttgaccaggaccccgactgccttttctgtgaagacccctgtgactagctcagtcacaccgtcagtttcccaaatttgacaggccaccttcaaacatgctgctatgcagtttctgcatcatagaaaataaggaaccaaaggaagaaattcatgtcatggtgcaatgcacattttatctatttatttagttccattcaccatgaaggaagaggcactgagatccatcaatcaattggattatatactgatcagtagctgtgttcaattgcaggaatgtgtatatagattattcctgagtggagccgaagtaacagctgtttgtaactatcggcaataccaaattcatctcccttccaataatgcatcttgagaacacataggtaaatttgaactcaggaaagtcttactagaaatcagtggaagggacaaatagtcacaaaattttaccaaaacattagaaacaaaaaataaggagagccaagtcaggaataaaagtgactctgtatgctaacgccacattagaacttggttctctcaccaagctgtaatgtgatttttttttctactctgaattggaaatatgtatgaatatacagagaagtgcttacaactaatttttatttacttgtcacattttggcaataaatccctcttatttctaaattctaacttgtttatttcaaaactttatataatcactgttcaaaaggaaatattttcacctaccagagtgcttaaacactggcaccagccaaagaatgtggttgtagagacccagaagtcttcaagaacagccgacaaaaacattcgagttgaccccaccaagttgttgccacagataatttagatatttacctgcaagaaggaataaagcagatgcaaccaattcattcagtccacgagcatgatgtgagcactgctttgtgctagacattgggcttagcattgaaactataaagaggaatcagacgcagcaagtgcttctgtgttctggtagcaactcaacactatctgtggagagtaaactgaagatgtgcaggccaacattctggaaatcctatgtcaatgggtttggtttggaacctggacttctgcatttttaaaagttacccagagatgcttctaaagatgagccatagtctagaagattgtcaaccacaggagttcattgagtgggacagctagacacatacattggcagctacaatagtatcatgaattgcaatgatgtagtggggtataaaaggaaagcgatggatattgccggatgggcatggccagtgatgtttcacgtcattgaggtgacagctctgctggactttgaattacatatggaggctctccaggaagacgaagaagagaaggacattctaggcaaaaagaagactaggcacaaggcacacttatgtttgtctgttagcttttagttgaaaaagcaaaatacatgatgcaaagaaacctctccacgctgtgatttttaaaactacatactttttgcaactttatggttatgagtattgtagagaacaggagataggtcttagatgatttttatgttgttgtcagactctagcaaggtactagaaacctagcaggcattaataattgttgaggcaatgactctgaggctatatctgggccttgtcattatttatcatttatatttgtatttttttctgaaatttgagggccaagaaaacattgactttgactgaggaggtcacatctgtgccatctctgcaaatcaatcagcaccactgaaataactacttagcattctgctgagctttccctgctcagtagagacaaatatactcatcccccacctcagtgagcttgtttaggcaaccaggattagagctgctcaggttcccaacgtctcctgccacatcgggttctcaaaatggaaagaatggtttatgccaaatcacttttcctgtctgaaggaccactgaatggttttgtttttccatattttgcataggacgccctaaagactaggtgacttggcaaacacacaagtgttagtataattctttgcttctgcttctttttgaaaatcatgtttagatttgattttaagtcagaaattcactgaatgtcaggtaatcattatggagggagatttgtgtgtcaaccaaagtaattgtcccatggccccagggtatttctgttgtttccctgaaattctgcttttttagtcagctagattgaaaactctgaacagtagatgtttatatggcaaaatgcaagacaatctacaagggagattttaaggattttgagatgaaaaaacagatgctactcaggggctttatgaaccatccatcaattctgaagttctgactctcccattaccctttccctggtgtggtcagaactccaggtcactggaagttagtggaatcatgtagttgaattctttacttcaagacattgtattctctccagctatcaaaacattaatgatcttttatgtcttttttttgttattgttatactttaagttctggggtacatgtgcggaacatgtaggtttgttacataggtatacatgtgccatggtggtttgctgcactcatcaacctgtcatctacattcttttatgtctgtctttcaaagcaacactctgttcttctgagtagtgaaatcaggtcaactttaccaccagcctccatttttaatatgcttcaccatcatccagcacctacttaagatttatctagggctctgtggtgatgttaggacccataaaagaaatttatgccttccatatgtttggttacagatgggaaatgggaatgttgaaggacatgaaagaaaggatgtttacacattaagcatcagttctgaagctagattgtctgagtttgaatcttagctcttccctttattagctctgtgacctcgagctagttacttaaatgctctgatcctctatttcctgatcagtgaaacctccctattcaaatgtgtgagagtttaataaattaggacacttaaaaatgttggagcagtgcatagcatgtagtgttcagtacatgttaaatgttgttttttattatgtacaaacatgagtgggcacagaattttaaatcatctcaacttttgagaaattttgagttatcaacaccgttcccacaagacagtggcaaaattattggtgagaattaaacagctgtttctcagaggaagcaatggaggcttgctgggataaaggcatttactgagaggctgttacctagtgagagtgatgaattaattaaaatagtcgaatccctttctgactgtctctgaaagcttccgcttttatctttgaagagcagaattgtcactccaaggacatttattaataaaaagaacaactgtccagtgcaatgaaggcaaagtcataggtctcccaagtcttaccccattcctgtgaaatatcaagttcttggcttttctctgtcatgtagcctcaactttctctgaccgggtgcatttctttctctggtttctaaattgccagtggcaaatttggatcacttacttaatatctgttaaattttgtgacccaacaaagtcttttagcactgtggtgtcaaaaagaaaaacacctcccaggcatatacattttatagattcctggagaatgttgctctccagctccatccccacccaatgaaatatgatccagagagtcttgcaaagagacaagcctcattttccacaattagctctaaagtgcctccaggaaatgattttctcagctcatctctctgtattccctgttttggatcacagggcaatctgtttaaatgactaattacagaaatcattaaaggcaccaagcaaatgtcatctctgaatacacacatcccaagctttacaaatcctgcctggcttgacagtgatgaggccacttaacagtccagcgcaggcggatgttaaaaaaaataaaaaggtgaccatctgcggtttagttttttaactttctgatttcacacttaacgtctgtcattctgttactgggcacctgtttaaattctattttaaaatgttaatgtgtgttgtttaaaataaaatcaagaaagagaga

SEQ ID NO: 308023 - DNA, 2520 bp, Artificial Sequence
  derived and/or modified sequence
atggagtttcttgaaagaacgtatcttgtgaatgataaagctgccaagatgtatgctttcacactagaaagtgtggaactccaacagaaaccggtgaataaagatcagtgtcccagagagagaccagaggagctggagtcaggaggcatgtaccactgccacagtggctccaagcccacagaaaagggggcgaatgagtacgcctatgccaagtggaaactctgttctgcttcagcaatatgcttcattttcatgattgcagaggtcgtgggtgggcacattgctgggagtcttgctgttgtcacagatgctgcccacctcttaattgacctgaccagtttcctgctcagtctcttctccctgtggttgtcatcgaagcctccctctaagcggctgacatttggatggcaccgagcagagatccttggtgccctgctctccatcctgtgcatctgggtggtgactggcgtgctagtgtacctggcatgtgagcgcctgctgtatcctgattaccagatccaggcgactgtgatgatcatcgtttccagctgcgcagtggcggccaacattgtactaactgtggttttgcaccagagatgccttggccacaatcacaaggaagtacaagccaatgccagcgtcagagctgcttttgtgcatgcccttggagatctatttcagagtatcagtgtgctaattagtgcacttattatctactttaagccagagtataaaatagccgacccaatctgcacattcatcttttccatcctggtcttggccagcaccatcactatcttaaaggacttctccatcttactcatggaaggtgtgccaaagagcctgaattacagtggtgtgaaagagcttattttagcagtcgacggggtgctgtctgtgcacagcctgcacatctggtctctaacaatgaatcaagtaattctctcagctcatgttgctacagcagccagccgggacagccaagtggttcggagagaaattgctaaagcccttagcaaaagctttacgatgcactcactcaccattcagatggaatctccagttgaccaggaccccgactgccttttctgtgaagacccctgtgactagctcagtcacaccgtcagtttcccaaatttgacaggccaccttcaaacatgctgctatgcagtttctgcatcatagaaaataaggaaccaaaggaagaaattcatgtcatggtgcaatgcacattttatctatttatttagttccattcaccatgaaggaagaggcactgagatccatcaatcaattggattatatactgatcagtagctgtgttcaattgcaggaatgtgtatatagattattcctgagtggagccgaagtaacagctgtttgtaactatcggcaataccaaattcatctcccttccaataatgcatcttgagaacacataggtaaatttgaactcaggaaagtcttactagaaatcagtggaagggacaaatagtcacaaaattttaccaaaacattagaaacaaaaaataaggagagccaagtcaggaataaaagtgactctgtatgctaacgccacattagaacttggttctctcaccaagctgtaatgtgatttttttttctactctgaattggaaatatgtatgaatatacagagaagtgcttacaactaatttttatttacttgtcacattttggcaataaatccctcttatttctaaattctaacttgtttatttcaaaactttatataatcactgttcaaaaggaaatattttcacctaccagagtgcttaaacactggcaccagccaaagaatgtggttgtagagacccagaagtcttcaagaacagccgacaaaaacattcgagttgaccccaccaagttgttgccacagataatttagatatttacctgcaagaaggaataaagcagatgcaaccaattcattcagtccacgagcatgatgtgagcactgctttgtgctagacattgggcttagcattgaaactataaagaggaatcagacgcagcaagtgcttctgtgttctggtagcaactcaacactatctgtggagagtaaactgaagatgtgcaggccaacattctggaaatcctatgtcaatgggtttggtttggaacctggacttctgcatttttaaaagttacccagagatgcttctaaagatgagccatagtctagaagattgtcaaccacaggagttcattgagtgggacagctagacacatacattggcagctacaatagtatcatgaattgcaatgatgtagtggggtataaaaggaaagcgatggatattgccggatgggcatggccagtgatgtttcacgtcattgaggtgacagctctgctggactttgaattacatatggaggctctccaggaagacgaagaagagaaggacattctaggcaaaaagaagactaggcacaaggcacacttatgtttgtctgttagcttttagttgaaaaagcaaaatacatgatgcaaagaaa

SEQ ID NO: 308024 - DNA, 1110 bp, Artificial Sequence
  derived and/or modified sequence
atggagttcctggagagaacctacctggtgaacgacaaggccgccaagatgtacgccttcaccctggagagcgtggagctgcagcagaagcccgtgaacaaggaccagtgccccagagagagacccgaggagctggagagcggcggcatgtaccactgccacagcggcagcaagcccaccgagaagggcgccaacgagtacgcctacgccaagtggaagctgtgcagcgccagcgccatctgcttcatcttcatgatcgccgaggtggtgggcggccacatcgccggcagcctggccgtggtgaccgacgccgcccacctgctgatcgacctgaccagcttcctgctgagcctgttcagcctgtggctgagcagcaagccccccagcaagagactgaccttcggctggcacagagccgagatcctgggcgccctgctgagcatcctgtgcatctgggtggtgaccggcgtgctggtgtacctggcctgcgagagactgctgtaccccgactaccagatccaggccaccgtgatgatcatcgtgagcagctgcgccgtggccgccaacatcgtgctgaccgtggtgctgcaccagagatgcctgggccacaaccacaaggaggtgcaggccaacgccagcgtgagagccgccttcgtgcacgccctgggcgacctgttccagagcatcagcgtgctgatcagcgccctgatcatctacttcaagcccgagtacaagatcgccgaccccatctgcaccttcatcttcagcatcctggtgctggccagcaccatcaccatcctgaaggacttcagcatcctgctgatggagggcgtgcccaagagcctgaactacagcggcgtgaaggagctgatcctggccgtggacggcgtgctgagcgtgcacagcctgcacatctggagcctgaccatgaaccaggtgatcctgagcgcccacgtggccaccgccgccagcagagacagccaggtggtgagaagagagatcgccaaggccctgagcaagagcttcaccatgcacagcctgaccatccagatggagagccccgtggaccaggaccccgactgcctgttctgcgaggacccctgcgactag

SEQ ID NO: 308025 - protein, 1606 aa, Artificial Sequence
  derived and/or modified sequence
MAGLRGNAVAGLLWMLLLWSGGGGCQAQRAGCKSVHYDLVFLLDTSSSVGKEDFEKVRQWVANLVDTFEVGPDRTRVGVVRYSDRPTTAFELGLFGSQEEVKAAARRLAYHGGNTNTGDALRYITARSFSPHAGGRPRDRAYKQVAILLTDGRSQDLVLDAAAAAHRAGIRIFAVGVGEALKEELEEIASEPKSAHVFHVSDFNAIDKIRGKLRRRLCENVLCPSVRVEGDRFKHTNGGTKEITGFDLMDLFSVKEILGKRENGAQSSYVRMGSFPVVQSTEDVFPQGLPDEYAFVTTFRFRKTSRKEDWYIWQVIDQYSIPQVSIRLDGENKAVEYNAVGAMKDAVRVVFRGSRVNDLFDRDWHKMALSIQAQNVSLHIDCALVQTLPIEERENIDIQGKTVIGKRLYDSVPIDFDLQRIVIYCDSRHAELETCCDIPSGPCQVTVVTEPPPPPPPQRPPTPGSEQIGFLKTINCSCPAGEKGEMGVAGPMGLPGPKGDIGAIGPVGAPGPKGEKGDVGIGPFGQGEKGEKGSLGLPGPPGRDGSKGMRGEPGELGEPGLPGEVGMRGPQGPPGLPGPPGRVGAPGLQGERGEKGTRGEKGERGLDGFPGKPGDTGQQGRPGPSGVAGPQGEKGDVGPAGPPGVPGSVVQQEGLKGEQGAPGPRGHQGAPGPPGARGPIGPEGRDGPPGLQGLRGKKGDMGPPGIPGLLGLQGPPGPPGVPGPPGPGGSPGLPGEIGFPGKPGPPGPTGPPGKDGPNGPPGPPGTKGEPGERGEDGLPGKPGLRGEIGEQGLAGRPGEKGEAGLPGAPGFPGVRGEKGDQGEKGELGLPGLKGDRGEKGEAGPAGPPGLPGTTSLFTPHPRMPGEQGPKGEKGDPGLPGEPGLQGRPGELGPQGPTGPPGAKGQEGAHGAPGAAGNPGAPGHVGAPGPSGPPGSVGAPGLRGTPGKDGERGEKGAAGEEGSPGPVGPRGDPGAPGLPGPPGKGKDGEPGLRGSPGLPGPLGTKGDRGAPGIPGSPGSRGDPGIGVAGPPGPSGPPGDKGSPGSRGLPGFPGPQGPAGRDGAPGNPGERGPPGKPGLSSLLSPGDINLLAKDVCNDCPPGPPGLPGLPGFKGDKGVPGKPGREGTEGKKGEAGPPGLPGPPGIAGPQGSQGERGADGEVGQKGDQGHPGVPGFMGPPGNPGPPGADGIAGAAGPPGIQGSPGKEGPPGPQGPSGLPGIPGEEGKEGRDGKPGPPGEPGKAGEPGLPGPEGARGPPGFKGHTGDSGAPGPRGESGAMGLPGQEGLPGKDGDTGPTGPQGPQGPRGPPGKNGSPGSPGEPGPSGTPGQKGSKGENGSPGLPGFLGPRGPPGEPGEKGVPGKEGVPGKPGEPGFKGERGDPGIKGDKGPPGGKGQPGDPGIPGHKGHTGLMGPQGLPGENGPVGPPGPPGQPGFPGLRGESPSMETLRRLIQEELGKQLETRLAYLLAQMPPAYMKSSQGRPGPPGPPGKDGLPGRAGPMGEPGRPGQGGLEGPSGPIGPKGERGAKGDPGAPGVGLRGEMGPPGIPGQPGEPGYAKDGLPGIPGPQGETGPAGHPGLPGPPGPPGQCDPSQCAYFASLAARPGNVKGP

SEQ ID NO: 308026 - protein, 1319 aa, Artificial Sequence
  derived and/or modified sequence
MAGLRGNAVAGLLWMLLLWSGGGGCQAQRAGCKSVHYDLVFLLDTSSSVGKEDFEKVRQWVANLVDTFEVGPDRTRVGVVRYSDRPTTAFELGLFGSQEEVKAAARRLAYHGGNTNTGDALRYITARSFSPHAGGRPRDRAYKQVAILLTDGRSQDLVLDAAAAAHRAGIRIFAVGVGEALKEELEEIASEPKSAHVFHVSDFNAIDKIRGKLRRRLCENVLCPSVRVEGDRFKHTNGGTKEITGFDLMDLFSVKEILGKRENGAQSSYVRMGSFPVVQSTEDVFPQGLPDEYAFVTTFRFRKTSRKEDWYIWQVIDQYSIPQVSIRLDGENKAVEYNAVAGPQGEKGDVGPAGPPGVPGSVVQQEGLKGEQGAPGPRGHQGAPGPPGARGPIGPEGRDGPPGLQGLRGKKGDMGPPGIPGLLGLQGPPGPPGVPGPPGPGGSPGLPGEIGFPGKPGPPGPTGPPGKDGPNGPPGPPGTKGEPGERGEDGLPGKPGLRGEIGEQGLAGRPGEKGEAGLPGAPGFPGVRGEKGDQGEKGELGLPGLKGDRGEKGEAGPAGPPGLPGTTSLFTPHPRMPGEQGPKGEKGDPGLPGEPGLQGRPGELGPQGPTGPPGAKGQEGAHGAPGAAGNPGAPGHVGAPGPSGPPGSVGAPGLRGTPGKDGERGEKGAAGEEGSPGPVGPRGDPGAPGLPGPPGKGKDGEPGLRGSPGLPGPLGTKGDRGAPGIPGSPGSRGDPGIGVAGPPGPSGPPGDKGSPGSRGLPGFPGPQGPAGRDGAPGNPGERGPPGKPGLSSLLSPGDINLLAKDVCNDCPPGPPGLPGLPGFKGDKGVPGKPGREGTEGKKGEAGPPGLPGPPGIAGPQGSQGERGADGEVGQKGDQGHPGVPGFMGPPGNPGPPGADGIAGAAGPPGIQGSPGKEGPPGPQGPSGLPGIPGEEGKEGRDGKPGPPGEPGKAGEPGLPGPEGARGPPGFKGHTGDSGAPGPRGESGAMGLPGQEGLPGKDGDTGPTGPQGPQGPRGPPGKNGSPGSPGEPGPSGTPGQKGSKGENGSPGLPGFLGPRGPPGEPGEKGVPGKEGVPGKPGEPGFKGERGDPGIKGDKGPPGGKGQPGDPGIPGHKGHTGLMGPQGLPGENGPVGPPGPPGQPGFPGLRGESPSMETLRRLIQEELGKQLETRLAYLLAQMPPAYMKSSQGRPGPPGPPGKDGLPGRAGPMGEPGRPGQGGLEGPSGPIGPKGERGAKGDPGAPGVGLRGEMGPPGIPGQPGEPGYAKDGLPGIPGPQGETGPAGHPGLPGPPGPPGQCDPSQCAYFASLAARPGNVKGP

SEQ ID NO: 308027 - DNA, 4881 bp, Artificial Sequence
  derived and/or modified sequence
atggccggcctgagaggcaacgccgtggccggcctgctgtggatgctgctgctgtggagcggcggcggcggctgccaggcccagagagccggctgcaagagcgtgcactacgacctggtgttcctgctggacaccagcagcagcgtgggcaaggaggacttcgagaaggtgagacagtgggtggccaacctggtggacaccttcgaggtgggccccgacagaaccagagtgggcgtggtgagatacagcgacagacccaccaccgccttcgagctgggcctgttcggcagccaggaggaggtgaaggccgccgccagaagactggcctaccacggcggcaacaccaacaccggcgacgccctgagatacatcaccgccagaagcttcagcccccacgccggcggcagacccagagacagagcctacaagcaggtggccatcctgctgaccgacggcagaagccaggacctggtgctggacgccgccgccgccgcccacagagccggcatcagaatcttcgccgtgggcgtgggcgaggccctgaaggaggagctggaggagatcgccagcgagcccaagagcgcccacgtgttccacgtgagcgacttcaacgccatcgacaagatcagaggcaagctgagaagaagactgtgcgagaacgtgctgtgccccagcgtgagagtggagggcgacagattcaagcacaccaacggcggcaccaaggagatcaccggcttcgacctgatggacctgttcagcgtgaaggagatcctgggcaagagagagaacggcgcccagagcagctacgtgagaatgggcagcttccccgtggtgcagagcaccgaggacgtgttcccccagggcctgcccgacgagtacgccttcgtgaccaccttcagattcagaaagaccagcagaaaggaggactggtacatctggcaggtgatcgaccagtacagcatcccccaggtgagcatcagactggacggcgagaacaaggccgtggagtacaacgccgtgggcgccatgaaggacgccgtgagagtggtgttcagaggcagcagagtgaacgacctgttcgacagagactggcacaagatggccctgagcatccaggcccagaacgtgagcctgcacatcgactgcgccctggtgcagaccctgcccatcgaggagagagagaacatcgacatccagggcaagaccgtgatcggcaagagactgtacgacagcgtgcccatcgacttcgacctgcagagaatcgtgatctactgcgacagcagacacgccgagctggagacctgctgcgacatccccagcggcccctgccaggtgaccgtggtgaccgagccccccccccccccccccccccagagaccccccacccccggcagcgagcagatcggcttcctgaagaccatcaactgcagctgccccgccggcgagaagggcgagatgggcgtggccggccccatgggcctgcccggccccaagggcgacatcggcgccatcggccccgtgggcgcccccggccccaagggcgagaagggcgacgtgggcatcggccccttcggccagggcgagaagggcgagaagggcagcctgggcctgcccggcccccccggcagagacggcagcaagggcatgagaggcgagcccggcgagctgggcgagcccggcctgcccggcgaggtgggcatgagaggcccccagggcccccccggcctgcccggcccccccggcagagtgggcgcccccggcctgcagggcgagagaggcgagaagggcaccagaggcgagaagggcgagagaggcctggacggcttccccggcaagcccggcgacaccggccagcagggcagacccggccccagcggcgtggccggcccccagggcgagaagggcgacgtgggccccgccggcccccccggcgtgcccggcagcgtggtgcagcaggagggcctgaagggcgagcagggcgcccccggccccagaggccaccagggcgcccccggcccccccggcgccagaggccccatcggccccgagggcagagacggcccccccggcctgcagggcctgagaggcaagaagggcgacatgggcccccccggcatccccggcctgctgggcctgcagggcccccccggcccccccggcgtgcccggcccccccggccccggcggcagccccggcctgcccggcgagatcggcttccccggcaagcccggcccccccggccccaccggcccccccggcaaggacggccccaacggcccccccggcccccccggcaccaagggcgagcccggcgagagaggcgaggacggcctgcccggcaagcccggcctgagaggcgagatcggcgagcagggcctggccggcagacccggcgagaagggcgaggccggcctgcccggcgcccccggcttccccggcgtgagaggcgagaagggcgaccagggcgagaagggcgagctgggcctgcccggcctgaagggcgacagaggcgagaagggcgaggccggccccgccggcccccccggcctgcccggcaccaccagcctgttcaccccccaccccagaatgcccggcgagcagggccccaagggcgagaagggcgaccccggcctgcccggcgagcccggcctgcagggcagacccggcgagctgggcccccagggccccaccggcccccccggcgccaagggccaggagggcgcccacggcgcccccggcgccgccggcaaccccggcgcccccggccacgtgggcgcccccggccccagcggcccccccggcagcgtgggcgcccccggcctgagaggcacccccggcaaggacggcgagagaggcgagaagggcgccgccggcgaggagggcagccccggccccgtgggccccagaggcgaccccggcgcccccggcctgcccggcccccccggcaagggcaaggacggcgagcccggcctgagaggcagccccggcctgcccggccccctgggcaccaaggccgcctgcggcaaggtgagaggcagcgagaactgcgccctgggcggccagtgcgtgaagggcgacagaggcgcccccggcatccccggcagccccggcagcagaggcgaccccggcatcggcgtggccggcccccccggccccagcggcccccccggcgacaagggcagccccggcagcagaggcctgcccggcttccccggcccccagggccccgccggcagagacggcgcccccggcaaccccggcgagagaggcccccccggcaagcccggcctgagcagcctgctgagccccggcgacatcaacctgctggccaaggacgtgtgcaacgactgcccccccggcccccccggcctgcccggcctgcccggcttcaagggcgacaagggcgtgcccggcaagcccggcagagagggcaccgagggcaagaagggcgaggccggcccccccggcctgcccggcccccccggcatcgccggcccccagggcagccagggcgagagaggcgccgacggcgaggtgggccagaagggcgaccagggccaccccggcgtgcccggcttcatgggcccccccggcaaccccggcccccccggcgccgacggcatcgccggcgccgccggcccccccggcatccagggcagccccggcaaggagggcccccccggcccccagggccccagcggcctgcccggcatccccggcgaggagggcaaggagggcagagacggcaagcccggcccccccggcgagcccggcaaggccggcgagcccggcctgcccggccccgagggcgccagaggcccccccggcttcaagggccacaccggcgacagcggcgcccccggccccagaggcgagagcggcgccatgggcctgcccggccaggagggcctgcccggcaaggacggcgacaccggccccaccggcccccagggcccccagggccccagaggcccccccggcaagaacggcagccccggcagccccggcgagcccggccccagcggcacccccggccagaagggcagcaagggcgagaacggcagccccggcctgcccggcttcctgggccccagaggcccccccggcgagcccggcgagaagggcgtgcccggcaaggagggcgtgcccggcaagcccggcgagcccggcttcaagggcgagagaggcgaccccggcatcaagggcgacaagggcccccccggcggcaagggccagcccggcgaccccggcatccccggccacaagggccacaccggcctgatgggcccccagggcctgcccggcgagaacggccccgtgggcccccccggcccccccggccagcccggcttccccggcctgagaggcgagagccccagcatggagaccctgagaagactgatccaggaggagctgggcaagcagctggagaccagactggcctacctgctggcccagatgccccccgcctacatgaagagcagccagggcagacccggcccccccggcccccccggcaaggacggcctgcccggcagagccggccccatgggcgagcccggcagacccggccagggcggcctggagggccccagcggccccatcggccccaagggcgagagaggcgccaagggcgaccccggcgcccccggcgtgggcctgagaggcgagatgggcccccccggcatccccggccagcccggcgagcccggctacgccaaggacggcctgcccggcatccccggcccccagggcgagaccggccccgccggccaccccggcctgcccggcccccccggcccccccggccagtgcgaccccagccagtgcgcctacttcgccagcctggccgccagacccggcaacgtgaagggcccctag

SEQ ID NO: 308028 - DNA, 4821 bp, Artificial Sequence
  derived and/or modified sequence
atggccggcctgagaggcaacgccgtggccggcctgctgtggatgctgctgctgtggagcggcggcggcggctgccaggcccagagagccggctgcaagagcgtgcactacgacctggtgttcctgctggacaccagcagcagcgtgggcaaggaggacttcgagaaggtgagacagtgggtggccaacctggtggacaccttcgaggtgggccccgacagaaccagagtgggcgtggtgagatacagcgacagacccaccaccgccttcgagctgggcctgttcggcagccaggaggaggtgaaggccgccgccagaagactggcctaccacggcggcaacaccaacaccggcgacgccctgagatacatcaccgccagaagcttcagcccccacgccggcggcagacccagagacagagcctacaagcaggtggccatcctgctgaccgacggcagaagccaggacctggtgctggacgccgccgccgccgcccacagagccggcatcagaatcttcgccgtgggcgtgggcgaggccctgaaggaggagctggaggagatcgccagcgagcccaagagcgcccacgtgttccacgtgagcgacttcaacgccatcgacaagatcagaggcaagctgagaagaagactgtgcgagaacgtgctgtgccccagcgtgagagtggagggcgacagattcaagcacaccaacggcggcaccaaggagatcaccggcttcgacctgatggacctgttcagcgtgaaggagatcctgggcaagagagagaacggcgcccagagcagctacgtgagaatgggcagcttccccgtggtgcagagcaccgaggacgtgttcccccagggcctgcccgacgagtacgccttcgtgaccaccttcagattcagaaagaccagcagaaaggaggactggtacatctggcaggtgatcgaccagtacagcatcccccaggtgagcatcagactggacggcgagaacaaggccgtggagtacaacgccgtgggcgccatgaaggacgccgtgagagtggtgttcagaggcagcagagtgaacgacctgttcgacagagactggcacaagatggccctgagcatccaggcccagaacgtgagcctgcacatcgactgcgccctggtgcagaccctgcccatcgaggagagagagaacatcgacatccagggcaagaccgtgatcggcaagagactgtacgacagcgtgcccatcgacttcgacctgcagagaatcgtgatctactgcgacagcagacacgccgagctggagacctgctgcgacatccccagcggcccctgccaggtgaccgtggtgaccgagccccccccccccccccccccccagagaccccccacccccggcagcgagcagatcggcttcctgaagaccatcaactgcagctgccccgccggcgagaagggcgagatgggcgtggccggccccatgggcctgcccggccccaagggcgacatcggcgccatcggccccgtgggcgcccccggccccaagggcgagaagggcgacgtgggcatcggccccttcggccagggcgagaagggcgagaagggcagcctgggcctgcccggcccccccggcagagacggcagcaagggcatgagaggcgagcccggcgagctgggcgagcccggcctgcccggcgaggtgggcatgagaggcccccagggcccccccggcctgcccggcccccccggcagagtgggcgcccccggcctgcagggcgagagaggcgagaagggcaccagaggcgagaagggcgagagaggcctggacggcttccccggcaagcccggcgacaccggccagcagggcagacccggccccagcggcgtggccggcccccagggcgagaagggcgacgtgggccccgccggcccccccggcgtgcccggcagcgtggtgcagcaggagggcctgaagggcgagcagggcgcccccggccccagaggccaccagggcgcccccggcccccccggcgccagaggccccatcggccccgagggcagagacggcccccccggcctgcagggcctgagaggcaagaagggcgacatgggcccccccggcatccccggcctgctgggcctgcagggcccccccggcccccccggcgtgcccggcccccccggccccggcggcagccccggcctgcccggcgagatcggcttccccggcaagcccggcccccccggccccaccggcccccccggcaaggacggccccaacggcccccccggcccccccggcaccaagggcgagcccggcgagagaggcgaggacggcctgcccggcaagcccggcctgagaggcgagatcggcgagcagggcctggccggcagacccggcgagaagggcgaggccggcctgcccggcgcccccggcttccccggcgtgagaggcgagaagggcgaccagggcgagaagggcgagctgggcctgcccggcctgaagggcgacagaggcgagaagggcgaggccggccccgccggcccccccggcctgcccggcaccaccagcctgttcaccccccaccccagaatgcccggcgagcagggccccaagggcgagaagggcgaccccggcctgcccggcgagcccggcctgcagggcagacccggcgagctgggcccccagggccccaccggcccccccggcgccaagggccaggagggcgcccacggcgcccccggcgccgccggcaaccccggcgcccccggccacgtgggcgcccccggccccagcggcccccccggcagcgtgggcgcccccggcctgagaggcacccccggcaaggacggcgagagaggcgagaagggcgccgccggcgaggagggcagccccggccccgtgggccccagaggcgaccccggcgcccccggcctgcccggcccccccggcaagggcaaggacggcgagcccggcctgagaggcagccccggcctgcccggccccctgggcaccaagggcgacagaggcgcccccggcatccccggcagccccggcagcagaggcgaccccggcatcggcgtggccggcccccccggccccagcggcccccccggcgacaagggcagccccggcagcagaggcctgcccggcttccccggcccccagggccccgccggcagagacggcgcccccggcaaccccggcgagagaggcccccccggcaagcccggcctgagcagcctgctgagccccggcgacatcaacctgctggccaaggacgtgtgcaacgactgcccccccggcccccccggcctgcccggcctgcccggcttcaagggcgacaagggcgtgcccggcaagcccggcagagagggcaccgagggcaagaagggcgaggccggcccccccggcctgcccggcccccccggcatcgccggcccccagggcagccagggcgagagaggcgccgacggcgaggtgggccagaagggcgaccagggccaccccggcgtgcccggcttcatgggcccccccggcaaccccggcccccccggcgccgacggcatcgccggcgccgccggcccccccggcatccagggcagccccggcaaggagggcccccccggcccccagggccccagcggcctgcccggcatccccggcgaggagggcaaggagggcagagacggcaagcccggcccccccggcgagcccggcaaggccggcgagcccggcctgcccggccccgagggcgccagaggcccccccggcttcaagggccacaccggcgacagcggcgcccccggccccagaggcgagagcggcgccatgggcctgcccggccaggagggcctgcccggcaaggacggcgacaccggccccaccggcccccagggcccccagggccccagaggcccccccggcaagaacggcagccccggcagccccggcgagcccggccccagcggcacccccggccagaagggcagcaagggcgagaacggcagccccggcctgcccggcttcctgggccccagaggcccccccggcgagcccggcgagaagggcgtgcccggcaaggagggcgtgcccggcaagcccggcgagcccggcttcaagggcgagagaggcgaccccggcatcaagggcgacaagggcccccccggcggcaagggccagcccggcgaccccggcatccccggccacaagggccacaccggcctgatgggcccccagggcctgcccggcgagaacggccccgtgggcccccccggcccccccggccagcccggcttccccggcctgagaggcgagagccccagcatggagaccctgagaagactgatccaggaggagctgggcaagcagctggagaccagactggcctacctgctggcccagatgccccccgcctacatgaagagcagccagggcagacccggcccccccggcccccccggcaaggacggcctgcccggcagagccggccccatgggcgagcccggcagacccggccagggcggcctggagggccccagcggccccatcggccccaagggcgagagaggcgccaagggcgaccccggcgcccccggcgtgggcctgagaggcgagatgggcccccccggcatccccggccagcccggcgagcccggctacgccaaggacggcctgcccggcatccccggcccccagggcgagaccggccccgccggccaccccggcctgcccggcccccccggcccccccggccagtgcgaccccagccagtgcgcctacttcgccagcctggccgccagacccggcaacgtgaagggcccctag

SEQ ID NO: 308029 - DNA, 4881 bp, Artificial Sequence
  derived and/or modified sequence
atggccggtctccggggcaatgctgtggccggcctgctctggatgctgctgctgtggtccgggggaggaggttgtcaagcccaaagggcaggttgcaagagcgtgcactatgacctggtcttcctgctggatacctcgagctccgtgggaaaagaggactttgagaaggttagacagtgggtggccaacttggtcgataccttcgaggtcggtcctgatcgtacccgagtgggggtggtgaggtatagcgatcggccgacgacagccttcgagttagggctctttggctcacaggaagaagtgaaggcagccgcgcggcggttggcctaccatggaggcaatacgaacacgggggacgcacttcggtacattaccgccaggagcttctctccgcatgccgggggtcgcccccgagacagagcctacaagcaggtcgctattcttcttacagacggacggagccaagatcttgtactggatgctgcggccgctgcccaccgcgctggcattcggattttcgcggttggagtgggtgaagcccttaaggaagagctggaggaaatagcttcagagcctaaaagcgctcacgtcttccacgtttctgatttcaacgcgattgacaaaattcgcggcaagctgcgcagacgtctgtgcgagaatgttctctgcccgtcagtgcgagtcgaaggggacagatttaagcacaccaatggcgggaccaaggagatcactggcttcgaccttatggatctctttagcgtgaaggagatattgggcaaaagggagaatggcgcccagtcctcctatgttaggatggggagttttcccgtagtgcaaagtacggaggacgtcttcccgcaggggctccctgatgaatatgccttcgttacaactttccgatttagaaagacctcacgcaaagaggactggtacatctggcaggttattgaccagtattcaattccccaggtctctatcaggctcgatggggagaataaggctgtagagtacaatgctgtgggggccatgaaggatgccgttagggtggttttccgagggtctagagtgaacgatcttttcgaccgcgactggcacaaaatggctctgagtatccaggcccagaacgtaagcttgcacattgactgcgcattggtccagacactgccaatagaggaacgggaaaatatcgacatacagggaaagactgtgatcgggaaacgcctttacgattcagttccgattgatttcgatctgcagcgaattgtgatctattgcgatagcaggcatgctgaactggaaacatgttgtgatatccctagcggcccgtgtcaggtcaccgtcgtcacagagccccctccacctccccccccccagcgccccccgacccccggtagcgaacaaattggatttctaaagactatcaactgctcttgccccgccggggagaaaggagaaatgggcgttgctgggccgatgggcctgccaggacccaaaggtgacatcggggctatcggcccggtaggggctcccggaccaaagggagaaaagggcgatgtcgggatcgggccattcggccagggagagaagggggaaaagggctctctgggcctccctggaccgcccggaagggacgggtccaaagggatgcgcggcgagccaggcgaattgggagaacccggcttacccggagaagtcgggatgagaggacctcaggggccaccaggactccctggtccccctggcagagtcggtgctcccgggctgcagggagagcggggagaaaaaggcacccggggcgagaaaggggaacgggggctggatggctttcccggcaaaccgggcgataccggccaacagggacgcccaggaccctccggggtggctggccctcagggtgaaaagggcgatgtgggcccagccgggccgccaggcgtgccaggctcagtagtccagcaggaggggctcaagggggaacaaggggctcccggaccccgcggccatcagggagcacctggccccccaggtgccagaggacctatcggaccagagggtcgcgacgggccgcccggtctacagggcctgagggggaagaaaggggatatgggccctccagggatccccggactgcttggacttcagggtccacctgggcctccaggtgtgcccggcccgcccgggccgggcgggtctccagggctgccgggcgagataggcttccccggaaagccgggcccaccagggcccactgggccacccgggaaagacggcccaaacggaccaccaggtccacccggaacaaaaggagaacccggagagcggggtgaggacggccttcccggaaagcccggacttcggggagagataggcgaacaaggattagccgggcggccgggcgaaaaaggcgaagccggcttacccggcgcgcccgggtttccgggagttaggggtgagaagggtgatcaaggcgaaaaaggcgaattgggcctgccagggctgaaaggcgatcgaggcgagaaaggcgaggctggacccgctggaccccccggactgcccggcacaacatccctgtttacgccgcaccctagaatgccaggagagcagggcccaaagggcgaaaagggagatcccggactgccaggagaaccagggctgcagggtaggccaggcgagctgggcccacagggccctacagggcctccaggcgcaaaagggcaggagggagcgcacggggctcctggcgcggccggaaatccgggcgctcccggtcacgtgggggcacctgggccgagtggcccgcctggaagcgtcggggctcccgggctcagagggacccccggaaaagacggcgaacgaggtgaaaaaggagcagctggcgaagagggatctcccggcccagtcggaccccgcggcgacccgggggcgccgggactccctgggcccccaggtaagggaaaggacggagaaccaggcctcaggggaagccccggcctgcccggcccgctgggaaccaaggccgcttgcggcaaggtgcgaggatctgagaattgtgccctaggcggtcagtgcgtgaagggtgataggggagcgcccggaattccgggcagcccaggctccaggggagacccgggcatcggtgtagccgggccccctggtccctctggtcccccaggagacaaaggcagcccaggatctcgcggactccccggattcccaggtccacaaggccctgccggacgtgacggggcacccgggaatcccggcgaaagagggccccctgggaagccagggttatcatccctgctgagccctggcgatattaatctgctcgctaaggacgtgtgcaacgattgcccgcctggacccccaggcctacccggactccccggctttaaaggggataaaggtgtccccggaaagcctggccgggaagggacggaaggaaaaaagggcgaggctggcccccctggcctgcccggccccccaggcatagcaggaccccagggatctcagggtgagagaggagctgatggggaagtgggccagaaaggagatcagggacaccccggagtgccagggtttatgggcccaccagggaatcccgggcctccaggagccgacggcatcgccggcgctgcaggcccgcccggcattcagggcagtcccggcaaagagggcccacccggaccccagggcccttctgggctgcccggtatcccaggtgaggagggaaaggaggggcgcgatggcaagccagggccccccggagaacccggcaaagcaggcgagccaggactgccaggacccgagggcgctcgggggcctcctggtttcaaaggccatacaggtgattcaggcgcaccaggccccaggggcgaatctggcgctatgggtctccccgggcaagaaggactgcccggaaaggacggggacaccggaccgaccggccctcaaggccctcaagggcctaggggccccccaggcaagaacggctcgcctggcagtccaggtgaacccggaccttcgggtactcccggccagaaaggatcgaaaggggagaacgggtcccctggtctgcccggatttctcgggcctcgcgggcctcctggtgaaccgggcgagaagggggtgccagggaaggagggagtgccaggaaagcccggggagcctgggtttaaaggtgaacgaggcgacccagggatcaaaggagacaagggaccacctgggggcaaaggtcagccaggggatccagggattcctgggcacaaaggacacaccggcctgatgggaccccagggccttcctggtgagaatgggcccgttggcccccctggcccacctggtcagccaggttttcctggcctgagaggcgaaagtcctagcatggagaccctgagaaggctgattcaggaagagcttggaaaacagctcgagaccaggctggcctaccttttagcgcagatgccccctgcctacatgaagtctagccagggccgccccggccctcccgggccgccaggcaaagacggactgccaggccgagccggcccgatgggggaaccaggacgcccaggccaagggggtttggagggtccatcaggacccatcgggccgaaaggtgaacgaggcgctaagggagatccaggcgctcccggagtggggctaagaggtgaaatgggaccgcctggtattcctgggcaacccggagagcctgggtacgcaaaagacggcctgcccggcattccggggcctcagggcgaaacaggccctgctggccatccaggcctccctggtccacccgggccacccgggcagtgcgatccatcccagtgtgcatatttcgcctctctggctgcccgtccaggaaacgtgaaagggccatag

SEQ ID NO: 308030 - DNA, 4821 bp, Artificial Sequence
  derived and/or modified sequence
atggcagggttacgtggcaatgctgtggccggcctcctgtggatgctgctgttatggagcgggggtggggggtgccaagcgcagcgagcagggtgtaagagtgtccattacgatctggttttcctgctggatacatcctctagtgtggggaaagaagatttcgaaaaagtgcgtcaatgggtcgccaacctggtagacacatttgaggtgggtcctgaccgcacgcgagttggagtagttcgctacagtgacagaccaactacagcgttcgagctaggattattcggctcccaagaggaagtcaaagctgccgctaggcgactggcgtatcatggcggtaacacaaacacgggtgacgctttgagatacattacggccagaagctttagcccacacgctggcggcagacctagagatcgggcctacaaacaagtggcaattctgctgacagatggccgcagccaagatcttgtgctcgacgcagctgccgccgctcatcgggccgggattagaattttcgctgtaggcgtgggtgaggcacttaaggaggagctggaagaaatcgcctcagagcctaagagtgcgcacgttttccatgtgtcagactttaacgcaattgacaaaattcgggggaaactgcgcaggcgtttatgtgaaaatgtgttgtgcccaagtgtaagagtcgagggtgaccgatttaagcacaccaacggcggtactaaggagattaccggcttcgatttaatggacctgttctctgtcaaggagatcctgggaaagcgcgagaatggagcccaatcatcttacgtacgcatggggtccttccccgtggtgcagagcaccgaagacgtattccctcaggggctccccgatgagtacgctttcgtgacaacgttccggtttagaaaaacatccagaaaagaagattggtatatctggcaagtaatagaccaatactctatccctcaggtctccattcggctggatggggagaacaaggctgttgaatataatgctgtgggcgccatgaaggatgcggtgcgcgtggtctttaggggatcacgggtcaatgatctcttcgacagggattggcataaaatggccctgtccatccaggctcagaatgtgagtttgcacattgattgtgctctggtgcaaacattgcctattgaagagagggagaacattgacattcaggggaagactgtcatcggcaaacggttatacgattccgtccccatagattttgacctgcagcggatcgttatctattgcgacagtagacacgcggaactcgagacatgttgcgacatcccctctggcccatgccaggttactgtcgtcaccgagccccctccccccccgcccccgcagaggccaccaacaccaggttccgagcagatcggattcctaaaaactataaactgttcttgtcctgctggggagaagggcgagatgggcgtcgctgggcctatgggattaccaggaccaaaaggagacattggtgcaattggccccgtcggcgcacccggccctaaaggcgagaaaggtgatgtcggaatcggaccattcggccaaggggagaagggagagaagggctcattggggctaccaggcccacccgggagagatggctcaaaaggcatgcgcggggagccgggcgagcttggggagcccggtctgcccggtgaggtgggcatgcgggggccacagggccctcccgggctcccgggaccaccgggtcgggtgggcgctccggggcttcagggcgagcggggagaaaagggtacacggggggaaaagggcgagagaggtctcgatggttttccagggaagcctggcgacacagggcaacagggccgccccggtcccagcggtgtcgctggcccacaaggcgaaaagggggacgtcgggcctgccggtccacctggcgtccctgggagtgtcgtgcaacaagaaggcttgaagggcgagcagggagcgcctgggcctaggggccaccaaggagcccccgggccccccggagcccggggacccatcggtcccgagggccgtgacgggccccctggtctgcaaggactgcgcggcaagaaaggcgacatgggtccccctggaatcccaggactcttaggcttgcagggacccccagggccccccggggtgcctggcccacctggacccggcggaagcccaggactgcctggtgaaatcgggttccccggcaagcctgggcctccagggcctaccgggccaccgggtaaagatggccccaatggtccccctggaccccccggcactaagggcgagcctggtgagcgaggggaggatgggctgcccgggaaaccaggcttgagaggagagatcggggaacaaggactcgccggtcggcccggggagaagggcgaggcaggtttgccaggtgctcccggattccccggagtgaggggggagaagggtgatcagggtgagaagggagagctgggcctccctggtcttaagggagaccgcggtgaaaaaggcgaggccgggccagccggccctcccggcttgcccggcacaactagtttgtttacgccccatcccaggatgccaggagaacaaggccccaaaggggaaaagggcgatcctggactacctggcgaacccgggctgcagggtaggcccggcgagttgggtccacagggccctactggacctccaggtgccaaagggcaggaaggtgcccatggagctccgggggctgccggcaacccaggtgcccctggtcatgttggcgcacccggcccttcagggcctccaggctccgtaggggcacccggcctgaggggcacacctggcaaggacggtgagcgtggggagaagggggctgcaggcgaagagggcagcccaggcccagtaggaccacggggagatccaggggctcctgggctgcccggtccgcccgggaagggcaaagatggagagccaggactaagggggagccctggactgcctggacctttgggtaccaagggtgatcgtggagctccaggaattccaggctcgccaggtagcaggggcgatccagggataggtgtggcgggacctccgggtccctcaggcccccccggagacaagggctctcccggttccagagggctccccggatttcccggacctcagggtcccgctggcagagacggagccccaggaaacccaggagagaggggtccccctggtaagcctgggctgagcagtcttttatccccgggagatattaaccttctggctaaagatgtatgcaacgactgtcctcccggccccccaggcttgcctggcctcccaggatttaagggcgacaaaggagtccccggcaagccaggtagggaaggcacggaagggaagaaaggcgaagccgggccacccggactccccggccctccaggcatcgcagggcctcagggaagtcagggggaacgaggagctgacggagaggtgggacagaaaggggatcagggccatcccggggtgcccggttttatgggaccaccgggaaatcccggtcctccaggggcagacgggatcgctggggcagccgggccccccggcatccaggggtcccccggcaaggaggggcccccaggaccccagggtccaagtggcctgccggggatacccggagaggaggggaaagaaggccgcgatggcaagcccggccctcccggtgagcctggcaaagccggagaaccaggattgccaggcccagaaggcgcaagagggcctcccggcttcaagggacacaccggggattccggcgctcccggccctagaggcgagagcggtgcaatgggtttaccaggccaggaaggtttgcctggaaaggacggggatacaggcccaactgggccccagggaccccagggacctaggggtccacctggcaagaatggctcacccgggtccccaggggaacccggtccgagtggcactccaggccagaaggggagtaaaggggagaatggttcccctggtctcccaggctttctcgggccacgcgggccccctggagaacccggggaaaagggagttcccggtaaagagggtgtgccggggaagccaggcgagcccggttttaaaggtgagaggggggatccaggcatcaaaggagataaaggtcctccaggagggaagggccagcccggtgatcctggtatcccagggcacaaagggcacaccggccttatgggaccccagggcctgcctggtgaaaatggaccagtgggcccacccggcccccccggccaacccggattcccaggcctcaggggggagagtccatccatggagacgcttcgcagactgattcaggaagagttgggaaagcagctggagactagactggcctacctcctggcacagatgccccccgcttacatgaaaagctcgcagggacgtcctggacctcctggacctccaggaaaagacgggctgccaggaagggcaggccctatgggtgagcccggccgcccaggccagggcggtcttgaagggccatcaggacctattgggcctaagggcgagcgaggcgccaagggggaccctggagcccccggggtaggcctgagaggcgaaatggggccacccgggattcctgggcaacccggggagccaggctatgctaaggacgggctccccggcatcccaggtccgcagggtgagactgggcctgctgggcaccctggccttccaggcccgccaggcccgcccggtcaatgtgatccaagccagtgtgcatactttgcgagcctggccgcccggcccggcaacgtcaagggtccttag

SEQ ID NO: 308031 - DNA, 4881 bp, Artificial Sequence
  derived and/or modified sequence
atggccggcctgcggggaaatgctgtggccggcctgctgtggatgctgctgctgtggagcggcggcggcggctgccaggcccagagagctggctgcaagtctgtgcactatgacctggtgttcctgctggacaccagcagctctgtgggcaaggaggactttgagaaggtgcggcagtgggtggccaacctggtggacacctttgaggtgggccctgacaggaccagggtgggcgtggtgcgctacagcgaccggcccaccacagcctttgagctgggcctgtttggcagccaggaggaggtgaaggccgccgcccggcggctggcctaccatggaggcaacaccaacacaggagatgccctgcgctacatcacagcccggagcttcagcccccatgctgggggccggccccgggaccgggcctacaagcaggtggccatcctgctgacagatggccgcagccaggacctggtgctggatgctgctgctgctgcccaccgggccggcatccgcatctttgctgtgggcgtgggggaggccctgaaggaggagctggaggagatcgccagcgagcccaagagcgcccacgtgttccacgtgtctgacttcaatgccatcgacaagatccggggcaagctgcggcggcggctgtgtgaaaatgtgctgtgccccagcgtgcgggtggagggggaccgcttcaagcacaccaatggaggcaccaaggagatcaccggctttgacctgatggacctcttctctgtgaaggagatcctgggcaagcgggagaatggagcccagagcagctatgtgaggatgggcagcttccctgtggtgcagagcacagaagatgtgttcccccagggcctgcctgatgaatatgcctttgtgaccaccttccgcttcaggaagaccagcaggaaggaggactggtacatctggcaggtgattgaccagtacagcatcccccaggtgtccatccggctggatggagagaacaaggctgtggagtacaatgctgtgggcgccatgaaggatgctgtgcgggtggtgttccggggcagccgggtgaatgacctgtttgaccgggactggcacaagatggccctgagcatccaggcccagaatgtgtccctgcacatcgactgtgccctggtgcagaccctgcccatcgaggagcgggagaacatcgacatccagggcaagacagtcatcggcaagaggctgtatgattctgtgcccatcgactttgacctgcagagaattgtcatctactgtgacagcagacatgctgagctggagacctgctgtgacatccccagcggcccctgccaggtgacagtggtgacagagcccccacctcctcctccaccccagaggcctcccaccccaggcagcgagcagatcggcttcctgaagaccatcaactgcagctgcccagctggggagaagggggagatgggcgtggccggccccatgggcctgcccggccccaagggggacattggagccatcggccctgtgggcgcccctggccccaagggggagaagggagatgtgggcatcggccccttcggccagggcgagaagggggagaagggcagcctgggcctgcccggccccccaggaagagatggcagcaagggcatgagaggagagcctggagagctgggggagcccggcctgcccggggaggtgggcatgaggggcccccagggccccccaggcctgcccggccccccaggccgggtgggcgcccctggcctgcagggcgagcggggggagaagggcaccagaggagagaagggggagcggggcctggatggcttccctgggaagccaggggacaccggccagcagggccggcccggccccagcggcgtggccggcccccagggcgagaagggagatgtgggccctgctggccccccaggagtgcccggctctgtggtgcagcaggagggcctgaagggggagcagggcgcccctggcccccggggccaccagggcgcccctggccccccaggggcccggggccccatcggccctgagggcagagatggccccccaggcctgcagggcctgcggggcaagaagggggacatgggccccccaggcatccctggcctgctgggcctgcagggccccccaggccccccaggagtgcccggccccccaggccctgggggcagccctggcctgcccggggagatcggcttccctgggaagccaggccccccaggccccactggacctcctgggaaggatggccccaacggccccccaggccccccaggcaccaagggggagcccggggagagaggagaagatggcctgcccgggaagccaggcctgcggggggagatcggggagcagggcctggccggccggcctggagagaagggggaggccggcctgcccggggcccctggcttccctggggtgcggggggagaagggggaccagggcgagaagggggagctgggcctgcccggcctgaagggggacagaggagagaagggggaggccggccctgctggccccccaggcctgcccggcaccaccagcctcttcaccccccaccccaggatgcctggagagcagggccccaagggggagaagggggaccccggcctgcctggagagcccggcctgcagggccggcctggagagctgggcccccagggccccactggacctcctggggccaagggccaggagggcgcccatggagcccctggagctgctggcaaccctggggcccctggccacgtgggcgcccctggccccagcggccccccaggctctgtgggcgcccctggcctgcggggcaccccaggcaaggatggagagcggggggagaagggagctgctggggaggagggcagccctggccctgtgggccccaggggggaccccggggcccctggcctgcccggccccccaggcaagggcaaggatggagagcccggcctgcggggcagccctggcctgcccggccccctgggcaccaaggccgcctgtgggaaggtgcggggcagcgagaactgtgccctgggcggccagtgtgtgaagggggacagaggagcccctggcatccctggcagccctggcagcagaggagaccccggcatcggcgtggccggccccccaggccccagcggccccccaggggacaagggcagccctggcagccggggcctgcccggcttccctggcccccagggccctgctggaagagatggagcccctggcaaccctggagagcggggccccccaggcaagccaggcctgagcagcctgctgagccctggggacatcaacctgctggccaaggatgtgtgcaatgactgccccccaggccccccaggcctgcccggcctgcccggcttcaagggggacaagggcgtgcctgggaagccaggccgggagggcacagagggcaagaagggggaggccggccccccaggcctgcccggccccccaggcattgctggcccccagggcagccagggcgagagaggagcagatggagaggtgggccagaagggggaccagggccaccctggggtgcccggcttcatgggccccccaggcaaccctggccccccaggagcagatggcattgctggagctgctggccccccaggcatccagggcagccctgggaaggagggccccccaggcccccagggccccagcggcctgcccggcatccctggagaggagggcaaggagggcagagatggcaagccaggccccccaggagagcccgggaaggccggggagcccggcctgcccggccctgagggcgcccggggccccccaggcttcaagggccacactggagacagcggggcccctggccccagaggagagagcggggccatgggcctgcccggccaggagggcctgcccgggaaggatggagacaccggccccaccggcccccagggcccccagggcccccggggccccccaggcaagaatggcagccctggcagccctggagagcccggccccagcggcaccccaggccagaagggcagcaagggggagaatggcagccctggcctgcccggcttcctgggcccccggggccccccaggagagcctggagagaagggcgtgcctgggaaggagggcgtgcctgggaagccaggagagcccggcttcaagggggagcggggggaccccggcatcaagggggacaagggccccccaggcggcaagggccagcccggggaccccggcatccctggccacaagggccacacaggcctgatgggcccccagggcctgcccggggagaatggacctgtgggccccccaggccccccaggccagcccggcttccctggcctgcggggggagagccccagcatggagaccctgcggcggctcatccaggaggagctgggcaagcagctggagacccggctggcctacctgctggcccagatgcccccagcctacatgaagagcagccagggccggcccggccccccaggccccccaggcaaggatggcctgcccggccgggccggccccatgggagagcccggccggcccggccagggcggcctggagggccccagcggccccatcggccccaagggggagcggggggccaagggggaccccggggcccctggggtgggcctgcggggggagatgggccccccaggcatccctggccagcctggagagcccggctacgccaaggatggcctgcccggcatccctggcccccagggcgagactggacctgctggccaccctggcctgcccggccccccaggccccccaggccagtgtgaccccagccagtgtgcctactttgccagcctggccgcccggcctggaaatgtgaagggcccctag

SEQ ID NO: 308032 - DNA, 4821 bp, Artificial Sequence
  derived and/or modified sequence
atggccggcctgcggggaaatgctgtggccggcctgctgtggatgctgctgctgtggagcggcggcggcggctgccaggcccagagagctggctgcaagtctgtgcactatgacctggtgttcctgctggacaccagcagctctgtgggcaaggaggactttgagaaggtgcggcagtgggtggccaacctggtggacacctttgaggtgggccctgacaggaccagggtgggcgtggtgcgctacagcgaccggcccaccacagcctttgagctgggcctgtttggcagccaggaggaggtgaaggccgccgcccggcggctggcctaccatggaggcaacaccaacacaggagatgccctgcgctacatcacagcccggagcttcagcccccatgctgggggccggccccgggaccgggcctacaagcaggtggccatcctgctgacagatggccgcagccaggacctggtgctggatgctgctgctgctgcccaccgggccggcatccgcatctttgctgtgggcgtgggggaggccctgaaggaggagctggaggagatcgccagcgagcccaagagcgcccacgtgttccacgtgtctgacttcaatgccatcgacaagatccggggcaagctgcggcggcggctgtgtgaaaatgtgctgtgccccagcgtgcgggtggagggggaccgcttcaagcacaccaatggaggcaccaaggagatcaccggctttgacctgatggacctcttctctgtgaaggagatcctgggcaagcgggagaatggagcccagagcagctatgtgaggatgggcagcttccctgtggtgcagagcacagaagatgtgttcccccagggcctgcctgatgaatatgcctttgtgaccaccttccgcttcaggaagaccagcaggaaggaggactggtacatctggcaggtgattgaccagtacagcatcccccaggtgtccatccggctggatggagagaacaaggctgtggagtacaatgctgtgggcgccatgaaggatgctgtgcgggtggtgttccggggcagccgggtgaatgacctgtttgaccgggactggcacaagatggccctgagcatccaggcccagaatgtgtccctgcacatcgactgtgccctggtgcagaccctgcccatcgaggagcgggagaacatcgacatccagggcaagacagtcatcggcaagaggctgtatgattctgtgcccatcgactttgacctgcagagaattgtcatctactgtgacagcagacatgctgagctggagacctgctgtgacatccccagcggcccctgccaggtgacagtggtgacagagcccccacctcctcctccaccccagaggcctcccaccccaggcagcgagcagatcggcttcctgaagaccatcaactgcagctgcccagctggggagaagggggagatgggcgtggccggccccatgggcctgcccggccccaagggggacattggagccatcggccctgtgggcgcccctggccccaagggggagaagggagatgtgggcatcggccccttcggccagggcgagaagggggagaagggcagcctgggcctgcccggccccccaggaagagatggcagcaagggcatgagaggagagcctggagagctgggggagcccggcctgcccggggaggtgggcatgaggggcccccagggccccccaggcctgcccggccccccaggccgggtgggcgcccctggcctgcagggcgagcggggggagaagggcaccagaggagagaagggggagcggggcctggatggcttccctgggaagccaggggacaccggccagcagggccggcccggccccagcggcgtggccggcccccagggcgagaagggagatgtgggccctgctggccccccaggagtgcccggctctgtggtgcagcaggagggcctgaagggggagcagggcgcccctggcccccggggccaccagggcgcccctggccccccaggggcccggggccccatcggccctgagggcagagatggccccccaggcctgcagggcctgcggggcaagaagggggacatgggccccccaggcatccctggcctgctgggcctgcagggccccccaggccccccaggagtgcccggccccccaggccctgggggcagccctggcctgcccggggagatcggcttccctgggaagccaggccccccaggccccactggacctcctgggaaggatggccccaacggccccccaggccccccaggcaccaagggggagcccggggagagaggagaagatggcctgcccgggaagccaggcctgcggggggagatcggggagcagggcctggccggccggcctggagagaagggggaggccggcctgcccggggcccctggcttccctggggtgcggggggagaagggggaccagggcgagaagggggagctgggcctgcccggcctgaagggggacagaggagagaagggggaggccggccctgctggccccccaggcctgcccggcaccaccagcctcttcaccccccaccccaggatgcctggagagcagggccccaagggggagaagggggaccccggcctgcctggagagcccggcctgcagggccggcctggagagctgggcccccagggccccactggacctcctggggccaagggccaggagggcgcccatggagcccctggagctgctggcaaccctggggcccctggccacgtgggcgcccctggccccagcggccccccaggctctgtgggcgcccctggcctgcggggcaccccaggcaaggatggagagcggggggagaagggagctgctggggaggagggcagccctggccctgtgggccccaggggggaccccggggcccctggcctgcccggccccccaggcaagggcaaggatggagagcccggcctgcggggcagccctggcctgcccggccccctgggcaccaagggggacagaggagcccctggcatccctggcagccctggcagcagaggagaccccggcatcggcgtggccggccccccaggccccagcggccccccaggggacaagggcagccctggcagccggggcctgcccggcttccctggcccccagggccctgctggaagagatggagcccctggcaaccctggagagcggggccccccaggcaagccaggcctgagcagcctgctgagccctggggacatcaacctgctggccaaggatgtgtgcaatgactgccccccaggccccccaggcctgcccggcctgcccggcttcaagggggacaagggcgtgcctgggaagccaggccgggagggcacagagggcaagaagggggaggccggccccccaggcctgcccggccccccaggcattgctggcccccagggcagccagggcgagagaggagcagatggagaggtgggccagaagggggaccagggccaccctggggtgcccggcttcatgggccccccaggcaaccctggccccccaggagcagatggcattgctggagctgctggccccccaggcatccagggcagccctgggaaggagggccccccaggcccccagggccccagcggcctgcccggcatccctggagaggagggcaaggagggcagagatggcaagccaggccccccaggagagcccgggaaggccggggagcccggcctgcccggccctgagggcgcccggggccccccaggcttcaagggccacactggagacagcggggcccctggccccagaggagagagcggggccatgggcctgcccggccaggagggcctgcccgggaaggatggagacaccggccccaccggcccccagggcccccagggcccccggggccccccaggcaagaatggcagccctggcagccctggagagcccggccccagcggcaccccaggccagaagggcagcaagggggagaatggcagccctggcctgcccggcttcctgggcccccggggccccccaggagagcctggagagaagggcgtgcctgggaaggagggcgtgcctgggaagccaggagagcccggcttcaagggggagcggggggaccccggcatcaagggggacaagggccccccaggcggcaagggccagcccggggaccccggcatccctggccacaagggccacacaggcctgatgggcccccagggcctgcccggggagaatggacctgtgggccccccaggccccccaggccagcccggcttccctggcctgcggggggagagccccagcatggagaccctgcggcggctcatccaggaggagctgggcaagcagctggagacccggctggcctacctgctggcccagatgcccccagcctacatgaagagcagccagggccggcccggccccccaggccccccaggcaaggatggcctgcccggccgggccggccccatgggagagcccggccggcccggccagggcggcctggagggccccagcggccccatcggccccaagggggagcggggggccaagggggaccccggggcccctggggtgggcctgcggggggagatgggccccccaggcatccctggccagcctggagagcccggctacgccaaggatggcctgcccggcatccctggcccccagggcgagactggacctgctggccaccctggcctgcccggccccccaggccccccaggccagtgtgaccccagccagtgtgcctactttgccagcctggccgcccggcctggaaatgtgaagggcccctag

SEQ ID NO: 308033 - DNA, 4881 bp, Artificial Sequence
  derived and/or modified sequence
atggccggcctgcggggcaacgccgtggccggcctgctgtggatgctactgctctggagcgggggaggcggctgccaggctcagcgtgcgggatgtaagtccgtgcattatgatctggtatttttgttggacacctctagctccgtgggtaaggaagacttcgaaaaggtgcgccagtgggtcgccaatttagtggatacgtttgaggtcgggcccgatcgaactagggtcggagttgtgcgatacagcgataggccaaccaccgcctttgagctaggcctgtttgggagtcaggaggaggtcaaggccgcagccaggcggctggcctatcacggcgggaatacaaatacaggagacgccttgagatacattactgcgaggagtttcagccctcacgccggaggcaggcctagggaccgggcctataagcaggtcgccattctgctcaccgatgggcggagtcaggatctggtcctcgatgctgctgctgccgctcacagagccggaattcggattttcgccgttggggtgggagaagccctgaaagaagagttagaggaaattgccagcgagcccaagtctgcccatgtcttccatgtcagcgactttaacgccatagataagatcagaggtaaattgagacgcaggttgtgcgaaaatgtcctgtgtccgtctgtcagagtcgagggagataggttcaaacacacgaacggagggaccaaggagattacaggttttgacctgatggacctcttcagcgtcaaggagattctgggaaaaagggagaatggagcacagagttcctatgtgaggatgggaagcttccctgtcgtgcagagcacagaggacgttttcccccaaggtctacccgatgagtacgcattcgttaccacgtttcgttttaggaagacttctagaaaggaggactggtacatttggcaggtaatagaccagtattcaattccacaggtctccatccgcctggacggcgaaaataaagctgtggagtacaacgcggtgggcgcgatgaaagatgccgttagggtagtgttccgtggctcacgcgtgaacgacctcttcgaccgcgactggcacaaaatggcactatccattcaggcgcagaacgtaagtctccacatcgactgtgctctggtgcagacactacccatagaggaacgagaaaatattgacatccagggaaagacagttattggcaaaagactttatgactctgtgcctatcgacttcgatctgcagagaatcgtgatttactgcgactctcgccatgccgaacttgaaacctgctgcgatatcccatccggcccctgtcaggtgacagttgtgactgagcctccaccaccgcccccacctcagagaccaccaacgcctggttctgaacagatcgggttcttgaaaacaataaattgctcttgccctgccggtgaaaagggcgagatgggggtggctggacctatgggtttacctgggccaaagggagatatcggagctatcggacctgtcggcgctcccggtccaaagggggaaaaaggggatgtgggtatcgggccattcggacagggagaaaaaggcgaaaaaggctcattgggacttcccggaccccccggcagagatggctcaaaaggaatgagaggggagccaggcgagttgggcgagcccggcctacccggagaagttgggatgcggggtccgcaggggccacctggcttgcccggcccgcctggacgcgtaggggcccccggactacagggtgaaaggggggagaaaggcacccgaggagagaagggggagcgcgggctggatgggtttcctggtaaaccaggagacactggacaacagggccgtccaggccccagtggcgtagcgggaccacagggcgaaaagggcgacgtgggcccagctggacctcctggagtcccagggtccgtcgtacagcaggagggactcaagggtgagcaaggggcaccaggcccaaggggccatcagggtgcaccggggcccccgggcgccaggggccctatagggcccgagggtagagatggtccgcccggactgcaaggcctcagagggaagaaaggggatatgggacccccgggaattccaggcttacttggtctgcagggcccccccgggcctcccggcgtgccaggaccacccgggcccggcgggagcccaggccttccgggagagattggctttccagggaagccaggtccgcccgggcccacgggccccccaggcaaagatgggccgaatggcccgcccggtccccccgggaccaaaggcgaaccaggggagcgtggagaggacggactgcctggtaaacccggcctcagaggcgagatcggagaacagggactagctggcaggcccggagagaaaggagaggccggcctcccgggcgcccccggcttcccaggagtgcgaggtgaaaagggggatcagggagagaaaggtgaactcggcctccctggtttgaaaggagacagaggagaaaaaggcgaagctggccccgcagggcctccgggcctgcctgggaccacgtctctctttaccccccatccaagaatgcctggcgagcaagggcccaagggagagaagggggatcccgggctcccaggcgagcctggactccagggccgtccaggagagctggggccccaggggccgaccggacctcccggggcaaagggccaggaaggagcccacggtgcaccaggcgccgctgggaacccaggggctcccggccacgtgggagcccccggaccctctggcccgcctggttccgtaggggctcccggactacgtggcactcctggaaaagacggggagcgaggagaaaagggagctgctggggaggaaggatctcctggccccgttgggcctagaggtgaccccggggcgcccgggctgcccgggccccccggcaaaggtaaagacggagaacccggactgagagggtcaccggggctccccggacctcttggcacaaaggctgcctgcggcaaagtacggggctcagaaaattgcgcactcgggggccagtgtgttaaaggcgatcgcggagcgccagggattccgggaagtcctgggtcccgaggtgacccagggattggagtggccggacctccaggtccctccggaccacccggtgacaaaggttcaccaggctctcggggactgccagggttccctgggcctcagggacccgcgggacgggatggggcccctggaaatcctggagaacggggccccccaggaaagcctgggctgtcaagtctcttatctcctggcgatatcaacttgctggccaaagatgtctgcaatgattgtcccccaggaccccccgggttacccggcttacccggttttaaaggtgacaagggtgttccgggtaaacctggaagagagggcactgagggtaagaaaggcgaagcaggccctcctggcctgcccgggcctcccggcattgccggcccacagggatcacagggcgagagaggcgctgacggggaagttgggcagaagggcgaccaagggcacccgggtgtgcccgggtttatggggcccccgggtaatccaggccctccgggagcagacggaatagctggcgccgctggccccccagggattcaaggatcccctggcaaggaaggccctcccggacctcagggacctagcggcttgccagggatcccaggagaggaaggtaaagagggcagggacggcaagcctggaccgcccggggagcccgggaaggccggggagcccgggttacccggacctgagggtgcaaggggccctccggggttcaaaggacacacgggcgatagcggcgcccccggccctaggggggaatcgggggcaatgggactgcctgggcaggagggccttcccggaaaagacggtgatactggccctacaggccctcagggacctcaggggcctcgggggccccccggtaagaatggtagcccagggtcgccaggggaacccggaccttcagggacacccggccaaaaagggtctaagggagagaatggatcccctggactgcccgggttcctggggccaagagggccgcccggtgaacccggggaaaagggagtgcccggaaaggagggggtcccaggcaaacccggggaacctggatttaagggtgaaagaggagatcccggtatcaaaggggataaagggcctcctgggggaaagggtcagcccggtgaccccggaattcccgggcacaaggggcacaccggcttaatgggcccccaaggacttcctggcgagaacggaccagtgggaccgcctggccctccgggccagccagggtttcccggactgcgcggtgaaagtccatctatggaaacactgcgcaggctgatccaagaggagcttgggaaacagctggagacgcggttagcctatctactggcgcagatgccacccgcctatatgaaatcttcacaaggaaggccaggccccccaggtccccccggaaaggacggactgccaggacgggccggcccaatgggcgagcccggacgcccaggacagggcggcttggagggtccgtctggtcctattggacccaagggggagaggggagcaaagggagatcctggggctccaggagtggggctacgcggagaaatgggcccccccggaattcccgggcagcctggcgagccaggctatgctaaagacgggctgccaggaatccccggtccacagggtgaaactggaccagcgggtcaccctggactacctggccctcccggcccccccggacaatgtgatccttcgcagtgcgcctactttgcttctttagctgctcgtcccgggaacgtcaaaggcccttag

SEQ ID NO: 308034 - DNA, 4821 bp, Artificial Sequence
  derived and/or modified sequence
atggccggcctgcggggcaacgccgtggccggcctgctgtggatgctgcttctctggagcggaggaggaggatgccaagcccaaagagctgggtgcaaatctgttcattatgacctcgtctttctgttagatacttcctcttcagtcggaaaggaagatttcgagaaggttcgtcagtgggttgctaacctcgtggacacctttgaagttgggccagataggacaagggtgggcgtggtgaggtactccgaccggcccaccactgccttcgaactggggctgtttgggagccaggaggaggttaaggctgcagcccgacggctggcctaccatggcggaaatactaacacaggagacgccctgagatacattaccgccaggtctttctctcctcacgccggcgggagaccgcgcgaccgggcttacaaacaggtggctattctactcaccgatggacgcagccaggatcttgttctcgatgcggctgctgctgcccacagggcaggaattcgaatctttgcggtgggagtgggggaggcactcaaggaggaacttgaggagattgcttccgagccaaaaagcgcacatgtgtttcacgtctcagattttaacgccattgacaagataaggggcaaactcaggcgcagactgtgtgaaaatgttctatgtccaagcgtgcgagtcgaaggagacagattcaagcacaccaatggaggcaccaaggaaatcacaggcttcgatttgatggatctctttagtgtcaaggaaatcctgggaaaacgggaaaacggcgcccagtcgtcatatgtgcgcatgggcagttttcccgttgtgcagtctaccgaagacgtcttcccccagggacttccagacgagtacgccttcgttactacctttcggttcaggaagactagccgcaaggaagattggtatatatggcaggtcattgatcagtattctattccacaggtctcaattaggctagatggcgaaaacaaagctgtggaatataatgccgtcggtgccatgaaagatgccgtgcgagtggttttccggggctcccgggtgaacgatctgttcgatagagattggcacaaaatggccctatccatccaggctcagaatgtatcacttcacatcgactgtgcactcgtgcagaccctgcccatagaggaacgggaaaatatagatatccaaggtaagacggtcattggtaagcgtctgtacgattccgtgcctattgatttcgatctccagaggatcgtgatttactgcgacagccgccatgcagagctggagacgtgttgtgacatcccttcgggcccttgtcaggtaacagtcgtcactgaacctcctccaccaccccccccccaacggccccctacacctggatcagaacagattggattcctaaagaccataaactgttcctgccctgccggggagaaaggcgaaatgggcgtagcagggcctatggggttgccaggacctaaaggcgatataggggcaatcggacccgttggagcaccaggacccaagggagagaaaggcgacgtagggataggaccctttgggcagggggaaaaaggggagaagggctctctgggactgccggggccgcccggcagggatggatcaaaggggatgaggggagagcctggcgaactcggggagccaggcctccccggggaggtgggaatgcgtggaccgcagggaccccctggcttgccgggcccgccaggtcgcgtcggagccccagggctgcagggagagcgaggcgaaaaagggacaaggggggaaaagggcgagaggggcctcgatggctttcccgggaaaccaggagacacagggcagcaggggagaccaggacccagtggtgttgcaggcccccagggtgagaagggcgatgtcggtccagcaggcccaccaggcgtcccgggatccgtcgtacagcaggagggcctgaagggcgaacagggcgcccctggacctaggggtcatcagggggcgccgggaccgcctggggcccggggccctatcggtcctgagggcagggatggccccccgggactgcagggcctccgaggaaagaagggagatatgggaccacccgggataccggggcttctgggactgcaggggccccctggccctccaggggtgcccggtccccctggtccaggaggttcaccaggtctccccggcgagatcggcttcccaggcaaacccggcccccccggtccaacaggcccgcctgggaaggacggccccaacggccctcccgggccaccaggaactaagggggaacctggagaacgcggggaagacggtttgcctggcaagcctgggttacgtggcgagataggtgaacagggcctggcagggcgacccggggagaaaggagaggccgggttgccaggggctcctggcttcccaggagtcaggggtgagaaaggagaccaaggcgaaaagggagagcttggtctacctgggctcaaaggagatcgcggggagaagggtgaagctggacctgccggtcccccgggactgccaggtacaactagcctgttcacgccccaccctaggatgcccggagagcagggccccaaaggtgagaaaggtgatccaggactgcctggtgagcctggactgcagggccgtcctggcgaattaggaccacaaggacccactggaccaccgggagctaaagggcaggagggagcccacggggcacctggggctgccgggaatccaggcgcacctggccacgtaggcgctccaggcccatccgggccacctggctctgtaggcgctcctgggttacgcggcactcccgggaaagatggggagcggggagagaagggggcagcgggtgaggaaggttcccctggacctgtgggaccccgcggtgatccaggtgcccccggcttgccaggacctcccggaaagggaaaggacggggaaccaggcctgcgagggtctcctggacttcccggcccactcgggaccaaaggcgatagaggcgcgccgggtataccaggatcaccgggttcaagaggagaccccgggattggagtagcgggcccccccggaccctccggaccacctggggataaaggatcccctggaagtcgaggcctgccaggctttcccggtccacagggccctgcaggccgcgatggcgcaccgggtaatccgggcgagaggggccctcccggcaaacctggtctctcctccctcctgtcccccggcgatatcaacttgctggccaaggacgtctgcaatgactgtcctcctggcccgcctggactgccaggtctgcctggtttcaagggagacaaaggagttcctgggaaaccggggcgagaagggactgagggcaagaagggcgaggccggtcctcccggtttgcctggcccgccgggcatcgcaggacctcagggctcacagggggagcggggtgccgacggagaggtgggccagaagggagatcagggccacccaggtgtccctgggttcatgggcccacccggtaatcctggccccccaggcgccgacgggatagccggagccgccgggccacccgggatccagggtagccccggtaaggaaggccctcctggtccacaggggccaagtgggctgcccgggatccccggggaagaaggcaaggaagggcgggatgggaaaccgggacctccaggtgaacccggtaaggctggcgaaccaggcctgcctgggcccgagggagccagggggccacctggattcaaaggccacaccggcgatagcggcgcaccaggaccacggggagaatctggagccatgggtctccccggtcaagaggggctgcccggaaaagacggagacactggaccaaccggcccacagggaccacagggacctcgcggccctcccggaaagaatggcagtcccggttccccaggagaaccggggccctctggaactcctggtcagaagggttcaaagggagaaaacggctcgccaggccttcccggtttcctgggaccacggggccctcccggagaaccaggggagaagggcgttcctgggaaagagggcgtaccaggaaaaccgggcgaaccggggtttaagggcgagcgtggcgatccaggaattaagggtgacaaagggcccccgggtggcaagggacagcctggcgaccctggtatccctggccacaaaggccatacggggctgatgggcccgcagggacttccaggggagaacgggcctgtaggtccgcctggccctcctggccagccgggatttccaggactgaggggggaatccccctctatggagactttaaggcgattaatccaggaggagttgggtaaacagctggaaacaaggctggcctacctgctcgcccagatgccccctgcctatatgaagagctcgcagggcaggcccggcccccctggaccccctggtaaagacggtctgcccggcagggcagggcccatgggagaaccaggcaggcctggacagggagggttagaagggccctctggacctatcgggcccaaaggcgagagaggcgctaagggcgaccccggagctcccggcgtgggactgcgaggagagatgggcccccctggcatccctggacagcccggtgagccagggtatgctaaagacggactgcctgggattccaggaccccagggagagaccgggccggctggacatccaggcctaccgggccctcccgggcctccaggacagtgtgacccctctcagtgcgcatacttcgcctccctcgctgcaagacctggcaatgttaaggggccctag

SEQ ID NO: 308035 - DNA, 6346 bp, Artificial Sequence
  derived and/or modified sequence
ggggctggccgaggctgcggcgtttctccccaaggaagtgtcttctccgctttccctgttcttctgtttctcacacactttctatctcattctgtaactttcaagcctttccttctaactgtatgtatttagttacttgttttcaagctggttccctctctggccccctggcctggggaaagcctccacacttactgcgggtcttgtttagagtctgagtttgtgagattatttgggggagagtgggcgagtggctgacaggtgacccccaggaggaggattcctggggctggtgtcttctcccagctgctgcttccagtgggcctgggcccaggactggacctccgctggcacccctgagtgcctccctgccaggccatgctgctgtagaccctaacagcgtctcttcctggccaagagaagcctgtccccaagaacaggagagccatggccggcctccgagggaacgctgtggctggcctcctctggatgctgctgctgtggagtgggggcggcggctgccaggctcagcgggcaggttgcaaaagtgtccactacgatctggtcttcctcctggacacctcctccagcgtgggcaaggaggactttgagaaggtccggcagtgggtggccaacctggtggacaccttcgaggtgggccccgaccgcacccgtgtgggggtcgtgcgctacagcgaccggcccaccacggccttcgagttgggactctttggctcgcaggaggaggtcaaggcggctgcccggcgtctcgcctaccacgggggcaacaccaacacgggagacgcgctccgctacatcacggcccgcagcttctccccacacgccggcggccgccccagggaccgcgcctacaagcaggtggccatcctgctcaccgacggccgcagccaggacctggtgctggacgccgcggcggcagcccaccgcgctggcatccgcatctttgccgtgggcgtgggcgaggcactcaaggaggagctggaggagatcgcctcagagcccaagtccgcccacgtcttccacgtgtccgacttcaatgccatcgacaagatccggggcaagctgcggcgccgtctttgtgaaaatgtgctctgtcctagcgttcgtgtagaaggagatcgctttaagcacaccaatggaggaaccaaggaaatcacaggttttgacctgatggatttgttcagtgtgaaggaaatcttggggaagagagagaatggagctcagagttcctatgtacggatgggatccttccctgtggtgcaaagtactgaggatgtgttcccccaaggtttacctgatgagtacgcctttgtcacaaccttccggttcaggaaaacctctcggaaggaagactggtatatctggcaggtcatcgaccagtacagcatcccacaggtctccatccggctggatggtgaaaacaaggcagtcgagtacaacgctgtgggtgccatgaaagatgctgtcagggtggtcttccgaggttctcgggtcaatgacctctttgaccgggactggcacaagatggccctgagcatccaggcccagaacgtctccctgcacattgactgtgcgctggtgcagacactacccatcgaggaacgggagaacattgacatccagggcaagactgtgattggcaagcgcctctacgacagtgtgcccattgactttgacctacagcggattgtgatctattgtgactcgagacacgcagaattggagacttgttgtgatatcccctcgggtccgtgccaggtgaccgtggtgacagagcctccacctccacccccaccccagcggcctcccaccccaggcagtgaacagattgggtttttgaagaccatcaactgctcctgcccagctggagagaagggtgaaatgggagttgctggccccatggggctccctggtccaaagggagacataggagccattgggccggttggcgctcctggacctaagggagagaaaggtgatgtgggcataggaccttttggccaaggggaaaagggtgaaaagggttccctgggcctgcccggcccccctgggagagacggcagcaaaggcatgagaggggagccaggagagctgggagagccggggctgccgggtgaggtcggcatgcgggggccccaaggaccacctggactccccggacctcctggacgtgtcggagctcctggtctccaaggagaacgaggtgaaaagggaactcgaggagaaaagggagagcgaggcctggatggattccctgggaagcctggggacacaggacagcagggcaggcccggcccttctggtgtggcaggaccccagggagaaaagggtgacgtgggacctgcggggccacctggtgtaccaggctcagtggtgcagcaagagggcttgaaaggggaacagggagctccaggacccagaggtcaccaaggcgcccccggtcctccaggagctcggggtccaataggcccagaaggcagggatggacctcctggtttgcaaggtctccgagggaagaaaggtgacatgggaccacctggaatccctggattgctggggctgcagggccctccaggaccccctggtgtcccaggcccccctggaccgggaggttctccgggtttgcctggagagatcggcttcccgggaaagcctggacctcctgggcccacgggaccccctggaaaggacgggccaaatggaccaccaggtccgccaggaaccaagggagaaccaggagaaagaggggaagatggtctgcctggaaaaccaggccttcggggagaaattggggagcagggcctggcaggccgacctggagagaagggagaagcaggcctcccaggggctccaggcttcccaggtgtgagaggagagaaaggagaccagggagaaaaaggtgaactgggacttccaggactgaaaggtgaccgaggtgaaaagggtgaagctggtcctgcaggccctcccgggttacctggaactacatccctgttcacaccacatccacggatgcccggagaacaagggcccaaaggagagaagggcgatccaggcctgcctggggaaccgggactgcagggccgtcctggagaattggggcctcagggacccactggaccaccgggtgccaagggacaggaaggtgcacatggggctcctggagcagctggaaaccccggtgctcccggacatgtcggtgcccccggtcccagtggccctccaggaagtgtgggtgctcccggcctcagaggcaccccagggaaagatggggagcgtggtgagaagggtgcagcgggggaagaaggcagcccagggccagttggtcccaggggagatcctggtgctcctgggctccctgggccacccggaaaagggaaggatggagagccgggactccgtggatcacctggactccctggacccctaggaaccaaggctgcttgcggaaaagtcagagggtcagaaaactgtgcactgggagggcaatgtgttaagggggatcgaggagctcctgggatccctggttctcctggcagccgtggtgacccaggcattggggttgctggccctcctggcccttccggaccaccaggagacaaaggatccccgggatcacgaggcttacctggattccctggcccccagggcccagccggccgggacggtgcaccaggaaatccaggagaaagagggcctcctggcaagccgggcctctcttcactactgtctccaggggacataaatctcttggctaaggatgtgtgcaatgactgccctcctggccccccaggcctccctggtctaccaggttttaaaggggacaaaggtgtcccaggaaagccagggagagaaggcacagaagggaaaaagggagaggctgggcctccaggcctaccagggcccccaggaatagctggaccacagggaagtcaaggagaacgtggtgcagatggtgaggttgggcagaaaggtgatcagggtcatcctggagttccaggtttcatggggcccccagggaaccctgggccaccaggggcagatggaattgcaggagctgctggaccaccaggaatccaagggtcacctgggaaagaaggccctcctggcccccaaggcccatctggattacccggaatcccaggagaagaaggcaaagagggcagagatggaaagccgggtccccctggagagccgggcaaagcaggagagccaggtctaccaggaccagagggtgcccgaggcccacctggcttcaagggacacacaggcgattctggtgcacccggtccccggggagagtctggtgccatggggcttcctggtcaggaagggttaccaggaaaagatggtgacactggacccactgggccacagggtccccaaggaccaaggggcccaccgggcaagaatggatcaccgggatctccaggagagcctggcccttcaggaacccctggccagaaaggaagcaaaggggaaaatggcagcccaggacttcctggcttcctgggtccccgtgggcctccgggagaaccaggagagaaaggagtcccaggcaaggagggggtccctgggaagcctggagagcctggattcaaaggagaaaggggagatcctgggatcaaaggtgacaaaggacctcctggtggaaaaggccagcctggggaccctggaatcccaggccacaaaggccacacaggcctgatgggtccccaaggactacctggggagaatggaccagttggacccccagggcctccaggccagccgggatttccaggactgaggggggagtctccatccatggaaaccctgcgtcggcttattcaagaagagctggggaagcagcttgaaaccagactcgcctacctcctggcccagatgcccccggcgtacatgaagtcatctcaaggcagacctgggcccccagggccccctggaaaagatgggcttccaggccgggccggccccatgggggagccaggtcgtcctgggcaggggggtctggaaggaccctctggacccataggtcccaaaggtgagcgaggagccaaaggtgacccaggtgcacctggagttggcctccgaggcgagatgggaccccctggaatcccaggtcaacccggggaacctggctatgctaaagatggacttcctgggatccctggccctcaaggggagacaggaccagctggacatcctggcctcccaggacctcccggtcccccaggccaatgtgacccttcccagtgtgcctacttcgccagccttgctgcccggccgggtaatgtgaagggtccctaaaggactctggaaagccagaagactgcagtggatttctgaaacttgaactcagagcccagtgggaagccagaggtcttgaaagacttcagccatgtgttccttttttttttctttcttttatcgtttgctttttgttttattttcttgagagacctcaaaattattaaatccaacagacgctgccggtcggtcagattattattaatattattgttgttgttaattattattattatttcatatgctgatgctttgtgagttcttttccactcctttaaagttgggaaaacttgattcgtggggcaggagattgtttcttcattcttctgacagcccccatctgacgcgtaactgcccattttaaggaaactcttggtgctacaaaaccctgaccagacacttggcaaatttacctctttcttcaaaagaaaaactttaagaaaatgagccaatgggcttcattctcagtcatgcccggagatcacccaggagaaataatacaaacaccaccactgtccagagagagtaaagaagcagaaagagaaagaatttgcaaccatgaggaatgttcccacctcccgacgggacgtgcatttggaaaacacagaatcagccctcagggtgcactccagccacctcagtgctctaagctcacagaagtgaaataatgtctgtgggttggcaatggctttgtgggatcatatgtcttggccaaagatgggaaaacctatgttgaagaggcagcccttgagtgttaatttgtcttctaaactgtgtaaggccccttcaagttcctcttgttggtttcaattatattaattataaaacaagtggatgtggtgaccatccacttgtgtttccctaatgatgggcagttggccagggcactgaccagagctgggaaatttgtatctccaaggcggctctgtctctgaaataaatggcatcaagtgcatgtgtgtatgcgacatgccctgcctgaacaggtgctcaataaatccaagtttccttctcttga

SEQ ID NO: 308036 - DNA, 6285 bp, Artificial Sequence
  derived and/or modified sequence
ggggctggccgaggctgcggcgtttctccccaaggaagtgtcttctccgctttccctgttcttctgtttctcacacactttctatctcattctgtaactttcaagcctttccttctaactgtatgtatttagttacttgttttcaagctggttccctctctggccccctggcctggggaaagcctccacacttactgcgggtcttgtttagagtctgagtttgtgagattatttgggggagagtgggcgagtggctgacaggtgacccccaggaggaggattcctggggctggtgtcttctcccagctgctgcttccagtgggcctgggcccaggactggacctccgctggcacccctgagtgcctccctgccaggccatgctgctgtagaccctaacagcgtctcttcctggccaagagaagcctgtccccaagaacaggagagccatggccggcctccgagggaacgctgtggctggcctcctctggatgctgctgctgtggagtgggggcggcggctgccaggctcagcgggcaggttgcaaaagtgtccactacgatctggtcttcctcctggacacctcctccagcgtgggcaaggaggactttgagaaggtccggcagtgggtggccaacctggtggacaccttcgaggtgggccccgaccgcacccgtgtgggggtcgtgcgctacagcgaccggcccaccacggccttcgagttgggactctttggctcgcaggaggaggtcaaggcggctgcccggcgtctcgcctaccacgggggcaacaccaacacgggagacgcgctccgctacatcacggcccgcagcttctccccacacgccggcggccgccccagggaccgcgcctacaagcaggtggccatcctgctcaccgacggccgcagccaggacctggtgctggacgccgcggcggcagcccaccgcgctggcatccgcatctttgccgtgggcgtgggcgaggcactcaaggaggagctggaggagatcgcctcagagcccaagtccgcccacgtcttccacgtgtccgacttcaatgccatcgacaagatccggggcaagctgcggcgccgtctttgtgaaaatgtgctctgtcctagcgttcgtgtagaaggagatcgctttaagcacaccaatggaggaaccaaggaaatcacaggttttgacctgatggatttgttcagtgtgaaggaaatcttggggaagagagagaatggagctcagagttcctatgtacggatgggatccttccctgtggtgcaaagtactgaggatgtgttcccccaaggtttacctgatgagtacgcctttgtcacaaccttccggttcaggaaaacctctcggaaggaagactggtatatctggcaggtcatcgaccagtacagcatcccacaggtctccatccggctggatggtgaaaacaaggcagtcgagtacaacgctgtgggtgccatgaaagatgctgtcagggtggtcttccgaggttctcgggtcaatgacctctttgaccgggactggcacaagatggccctgagcatccaggcccagaacgtctccctgcacattgactgtgcgctggtgcagacactacccatcgaggaacgggagaacattgacatccagggcaagactgtgattggcaagcgcctctacgacagtgtgcccattgactttgacctacagcggattgtgatctattgtgactcgagacacgcagaattggagacttgttgtgatatcccctcgggtccgtgccaggtgaccgtggtgacagagcctccacctccacccccaccccagcggcctcccaccccaggcagtgaacagattgggtttttgaagaccatcaactgctcctgcccagctggagagaagggtgaaatgggagttgctggccccatggggctccctggtccaaagggagacataggagccattgggccggttggcgctcctggacctaagggagagaaaggtgatgtgggcataggaccttttggccaaggggaaaagggtgaaaagggttccctgggcctgcccggcccccctgggagagacggcagcaaaggcatgagaggggagccaggagagctgggagagccggggctgccgggtgaggtcggcatgcgggggccccaaggaccacctggactccccggacctcctggacgtgtcggagctcctggtctccaaggagaacgaggtgaaaagggaactcgaggagaaaagggagagcgaggcctggatggattccctgggaagcctggggacacaggacagcagggcaggcccggcccttctggtgtggcaggaccccagggagaaaagggtgacgtgggacctgcggggccacctggtgtaccaggctcagtggtgcagcaagagggcttgaaaggggaacagggagctccaggacccagaggtcaccaaggcgcccccggtcctccaggagctcggggtccaataggcccagaaggcagggatggacctcctggtttgcaaggtctccgagggaagaaaggtgacatgggaccacctggaatccctggattgctggggctgcagggccctccaggaccccctggtgtcccaggcccccctggaccgggaggttctccgggtttgcctggagagatcggcttcccgggaaagcctggacctcctgggcccacgggaccccctggaaaggacgggccaaatggaccaccaggtccgccaggaaccaagggagaaccaggagaaagaggggaagatggtctgcctggaaaaccaggccttcggggagaaattggggagcagggcctggcaggccgacctggagagaagggagaagcaggcctcccaggggctccaggcttcccaggtgtgagaggagagaaaggagaccagggagaaaaaggtgaactgggacttccaggactgaaaggtgaccgaggtgaaaagggtgaagctggtcctgcaggccctcccgggttacctggaactacatccctgttcacaccacatccacggatgcccggagaacaagggcccaaaggagagaagggcgatccaggcctgcctggggaaccgggactgcagggccgtcctggagaattggggcctcagggacccactggaccaccgggtgccaagggacaggaaggtgcacatggggctcctggagcagctggaaaccccggtgctcccggacatgtcggtgcccccggtcccagtggccctccaggaagtgtgggtgctcccggcctcagaggcaccccagggaaagatggggagcgtggtgagaagggtgcagcgggggaagaaggcagcccagggccagttggtcccaggggagatcctggtgctcctgggctccctgggccacccggaaaagggaaggatggagagccgggactccgtggatcacctggactccctggacccctaggaaccaagggggatcgaggagctcctgggatccctggttctcctggcagccgtggtgacccaggcattggggttgctggccctcctggcccttccggaccaccaggagacaaaggatccccgggatcacgaggcttacctggattccctggcccccagggcccagccggccgggacggtgcaccaggaaatccaggagaaagagggcctcctggcaagccgggcctctcttcactactgtctccaggggacataaatctcttggctaaggatgtgtgcaatgactgccctcctggccccccaggcctccctggtctaccaggttttaaaggggacaaaggtgtcccaggaaagccagggagagaaggcacagaagggaaaaagggagaggctgggcctccaggcctaccagggcccccaggaatagctggaccacagggaagtcaaggagaacgtggtgcagatggtgaggttgggcagaaaggtgatcagggtcatcctggagttccaggtttcatggggcccccagggaaccctgggccaccaggggcagatggaattgcaggagctgctggaccaccaggaatccaagggtcacctgggaaagaaggccctcctggcccccaaggcccatctggattacccggaatcccaggagaagaaggcaaagagggcagagatggaaagccgggtccccctggagagccgggcaaagcaggagagccaggtctaccaggaccagagggtgcccgaggcccacctggcttcaagggacacacaggcgattctggtgcacccggtccccggggagagtctggtgccatggggcttcctggtcaggaagggttaccaggaaaagatggtgacactggacccactgggccacagggtccccaaggaccaaggggcccaccgggcaagaatggatcaccgggatctccaggagagcctggcccttcaggaacccctggccagaaaggaagcaaaggggaaaatggcagcccaggacttcctggcttcctgggtccccgtgggcctccgggagaaccaggagagaaaggagtcccaggcaaggagggggtccctgggaagcctggagagcctggattcaaaggagaaaggggagatcctgggatcaaaggtgacaaaggacctcctggtggaaaaggccagcctggggaccctggaatcccaggccacaaaggccacacaggcctgatgggtccccaaggactacctggggagaatggaccagttggacccccagggcctccaggccagccgggatttccaggactgaggggggagtctccatccatggaaaccctgcgtcggcttattcaagaagagctggggaagcagcttgaaaccagactcgcctacctcctggcccagatgcccccggcgtacatgaagtcatctcaaggcagacctgggcccccagggccccctggaaaagatgggcttccaggccgggccggccccatgggggagccaggtcgtcctgggcaggggggtctggaaggaccctctggacccataggtcccaaaggtgagcgaggagccaaaggtgacccaggtgcacctggagttggcctccgaggcgagatgggaccccctggaatcccaggtcaacccggggaacctggctatgctaaagatggacttcctgggatccctggccctcaaggggagacaggaccagctggacatcctggcctcccaggacctcccggtcccccaggccaatgtgacccttcccagtgtgcctacttcgccagccttgctgcccggccgggtaatgtgaagggtccctaaaggactctggaaagccagaagactgcagtggatttctgaaacttgaactcagagcccagtgggaagccagaggtcttgaaagacttcagccatgtgttccttttttttttctttcttttatcgtttgctttttgttttattttcttgagagacctcaaaattattaaatccaacagacgctgccggtcggtcagattattattaatattattgttgttgttaattattattattatttcatatgctgatgctttgtgagttcttttccactcctttaaagttgggaaaacttgattcgtggggcaggagattgtttcttcattcttctgacagcccccatctgacgcgtaactgcccattttaaggaaactcttggtgctacaaaaccctgaccagacacttggcaaatttacctctttcttcaaaagaaaaactttaagaaaatgagccaatgggcttcattctcagtcatgcccggagatcacccaggagaaataatacaaacaccaccactgtccagagagagtaaagaagcagaaagagaaagaatttgcaaccatgaggaatgttcccacctcccgacgggacgtgcatttggaaaacacagaatcagccctcagggtgcactccagccacctcagtgctctaagctcacagaagtgaaataatgtctgtgggttggcaatggctttgtgggatcatatgtcttggccaaagatgggaaaacctatgttgaagaggcagcccttgagtgttaatttgtcttctaaactgtgtaaggccccttcaagttcctcttgttggtttcaattatattaattataaaacaagtggatgtggtgaccatccacttgtgtttccctaatgatgggcagttggccagggcactgaccagagctgggaaatttgtatctccaaggcggctctgtctctgaaataaatggcatcaagtgcatgtgtgtatgcgacatgccctgcctgaacaggtgctcaataaatccaagtttccttctcttg

SEQ ID NO: 308037 - DNA, 4881 bp, Artificial Sequence
  derived and/or modified sequence
atggccggactcagaggcaatgccgttgcaggcttactgtggatgctcttattgtggtccggcggaggaggttgccaggctcaaagggcgggatgcaagtcagtgcattatgaccttgtgttcctgttggacacatcttccagcgttggaaaagaagattttgagaaagtgcggcagtgggtggcaaacttggtggacacattcgaggtcggtcctgatagaacccgagtgggagttgtcagatactctgaccggcctaccaccgcattcgaacttggactgttcggatcacaggaggaagtgaaagctgccgcacggagactggcttaccacggcggtaacaccaatactggggacgcactacgctatattaccgctagaagtttctcaccccacgccggtggccgtcctcgggatagggcatataagcaggtcgctattttgctgaccgacggccgaagccaggaccttgtcttggacgccgctgctgcagcccaccgggcaggtatcaggattttcgccgtgggtgtgggagaagccctcaaggaagaattggaggaaatcgcctcagaaccaaagagcgctcatgtctttcacgtttcagatttcaacgcaatagataagattcggggaaagttacgcaggcggttgtgcgaaaacgtgctttgtcctagtgttcgggtggagggcgaccggtttaaacacacaaatggcggaacaaaggagatcacagggttcgacctgatggacctattctcagtcaaagaaatcctggggaagagggaaaacggcgcacagtcgagctacgtgcggatgggatccttcccagtggtccagtccactgaagacgtcttcccccagggattacccgatgaatatgcatttgtaaccactttcaggtttagaaagacctctcgaaaagaggactggtatatctggcaggttatcgatcagtattcgatcccgcaggtgtctatccgtttagacggagaaaacaaggccgtcgaatataatgcagttggtgccatgaaggatgctgtaagggttgtgtttagagggagtagagtgaatgatctcttcgatcgcgattggcataaaatggcacttagcattcaggcccagaacgtgtcattacatattgactgcgctctggtacagactctgccgatagaagaaagagagaatatagacatacagggtaagacagtaattggaaaacgcttgtacgactccgtgcccatagattttgatctgcagaggatcgtcatttactgcgactccaggcacgccgaattggaaacatgttgcgatatccccagtggtccatgccaggtgaccgtggtcacagagccccctcctcccccaccaccacagcgacctcctacccctggctctgaacagataggcttcctgaaaacgatcaattgtagttgtcccgcaggtgagaagggcgagatgggcgtggccggaccgatggggctacctggccctaagggcgacattggcgcaattggccctgtgggagctcctggtccgaagggggaaaaaggagacgtggggattggcccttttggccagggagagaaaggagagaagggctctttgggcctgcctggccctccaggacgcgatggctctaaaggtatgcgcggagagcccggagaacttggagagcctgggctcccgggagaagtcggaatgcgcggacctcagggccctcctggtttgcctggccctcccggacgggtcggtgcacctggcctccaaggagagagaggagaaaaaggcactagaggagagaaaggcgagaggggactggacggctttcctggcaaaccaggggacacaggccagcagggacgacctggaccttcaggcgtggccggaccacagggagagaagggcgacgtaggaccagcgggtccgccaggagtaccagggtccgtggtgcagcaggaaggcctaaaaggcgagcaaggggcaccaggacctcggggtcatcagggtgctcctggtccccctggggcacggggacccataggtccggagggtagggatggtccccctggcctccagggactccgagggaagaagggggacatgggtcctccagggatccctggtttacttggactgcagggaccccctggccctcctggggtaccaggtccgccagggcctggaggaagtcctggacttcccggtgaaattggttttcccggtaaacctggcccacccggaccaaccggaccccctgggaaggatggtcctaacggcccacccggaccacccggaaccaaaggggaaccaggagagcgtggagaggatgggctgcctgggaagcccggactgcggggtgaaatcggcgaacaaggcctggccggacgaccaggagaaaagggcgaggctggcctgccaggagcccctgggttccctggggtacgaggtgaaaaaggggaccagggtgagaagggagaactgggcctcccgggactcaaaggcgaccggggagaaaaaggcgaggcagggccagcgggtccccctggcctgcctggcacaaccagcctgttcacaccccaccctcggatgcctggcgaacagggtcctaagggagaaaagggggaccctggtctgccgggtgaaccgggacttcaaggtcgacctggagaactcggccctcaggggccaactggtccgccaggggcaaaggggcaggagggcgctcacggagcaccgggagctgccggtaatcctggggctccagggcatgtaggcgcacctggaccctcaggcccaccagggagtgtcggggctcccggattacgaggcacaccaggtaaagacggggaacggggagaaaaaggagcagcgggagaggagggcagcccaggcccagtgggtccgagaggggaccccggtgcaccaggccttccaggaccccctggcaaaggaaaagacggtgaaccaggattaagaggctcacctggacttcccggacccctggggactaaagccgcttgtggcaaggttcggggatccgagaactgcgccttggggggacagtgcgtcaagggcgaccgtggcgcacccggaattccgggttctccagggagcagaggagacccaggcataggcgtggcaggacctcccggaccatcaggaccccctggagacaaaggctcccccggatccagaggcctgccaggctttccaggacctcaaggacctgctggaagggatggcgctcctggtaacccaggagagcgcggacccccagggaagcctgggctatccagcttactgtcccccggtgacataaatctcttggccaaagatgtctgcaacgattgccctccaggccctcctggattgccaggcctgcctggcttcaaaggggacaagggagtgccagggaaaccgggaagggagggaaccgagggaaagaagggcgaggctggtcctcccggactacctggaccacccggtatcgccggaccccagggctctcagggagaacgcggagctgatggagaagtcgggcagaaaggagaccagggacatcccggtgtcccaggatttatgggccctccaggaaatccaggacctcctggcgcagacgggattgccggagcagccggtcctccgggaatccagggcagccctgggaaagaggggccaccaggccctcagggtccatcaggcctgcccggtatccccggtgaagagggtaaagaaggcagagatggtaagccaggcccacccggagagccaggcaaggctggagagcctggactccccggaccagaaggggctcggggtcctccaggattcaaaggtcacactggagattccggggctcctgggccaaggggcgagtccggcgcaatgggactccctggtcaggaagggcttccaggcaaggatggcgatacaggcccaaccggaccacaaggtccccaaggccctagaggtccgcctggaaagaatggctctcccggaagccccggagaacccggaccatcaggtacccctggacagaaggggtctaagggcgaaaacggatcaccaggcctgccaggattcctcggaccccgaggaccacccggagaaccgggagagaaaggcgttccaggcaaggagggagtgccgggaaaacccggagagccgggattcaagggcgagcggggagaccccggaattaagggggataaagggcctccaggaggaaagggtcagccgggtgacccaggtatcccgggacacaaaggtcacaccgggctgatgggccctcaaggactcccaggggaaaacggcccagttggaccccctgggcctcccggtcagcctgggttccctgggctgcgaggggagagtcctagtatggagaccctgaggagacttatacaagaggagctgggcaaacaacttgaaacacggctcgcctacctgctggctcagatgccgccagcctacatgaagagctcacaaggaagaccaggcccaccgggtccccctggcaaagacgggttgcctggtagggcgggaccaatgggagaacctggcagacccggtcagggcggactggaagggccaagtgggccaatcgggcctaaaggagagcgtggcgcaaaaggagatcccggagcccctggtgtgggactacgcggagagatggggccaccaggtattcctggccagcccggagagccaggatatgccaaggatggcctgcccggaattcccggacctcagggtgagacaggccctgccggtcacccaggactccccggtccaccaggccctcctggacagtgtgatccatctcagtgcgcctactttgcctctttggctgctaggcccggaaatgtgaaaggcccttag

SEQ ID NO: 308038 - DNA, 4821 bp, Artificial Sequence
  derived and/or modified sequence
atggctggcctccgcggaaatgctgtggctggactgctgtggatgctgcttctatggagtggcggaggcggatgtcaggcccaacgggcagggtgcaagagcgtccattatgaccttgtttttctgcttgatacctccagctccgtgggcaaagaagacttcgaaaaggtcaggcaatgggtggcaaacttggtggacactttcgaagtcggacccgaccggacccgagtgggtgtggtccgatatagcgatcgccctaccacagcatttgaactggggctctttgggtctcaggaggaagtgaaggcagcagcaagacggctggcataccacgggggaaacacaaatacaggtgatgccttgcgctacatcaccgcgaggagctttagtccacatgccggagggagaccgagggatcgcgcttacaagcaggttgccatcctgctgacagacgggcgaagtcaggacctggtattggacgccgctgccgcagcccaccgcgctggtatcagaatcttcgccgttggcgtgggggaggccctcaaggaagagctcgaggagatcgcttcggagcccaaaagcgcgcacgtgttccatgtcagtgactttaatgccatcgataaaatccgcggaaaactcaggcgcagattgtgcgagaacgtcctctgtccttcagtcagggtggaaggggaccgtttcaagcatacaaatggcggaactaaagagatcacagggttcgatctgatggatctcttttcagtaaaagagattcttggcaaacgagagaacggtgctcagtctagctatgtacgtatgggcagctttcctgtggtacagtccacagaggatgtctttccccaaggccttcccgacgaatatgcgtttgtgactacctttagatttagaaaaacgagccgaaaggaggactggtacatctggcaggtcatcgaccagtactctatcccacaagtatccattcgtctcgacggcgagaataaggcagttgagtataacgcggttggagctatgaaagacgcggtgcgagtagtcttcaggggctccagagtgaatgatctgttcgatcgggactggcataagatggcactgagcattcaggcgcagaatgtgtcacttcatatcgactgcgcccttgttcagaccctgcctatcgaggagcgcgaaaacatcgatattcaagggaagaccgtgataggcaagcgactttatgatagtgtgcctattgattttgacctacagcgcatcgtgatctactgcgatagtaggcatgctgaattagagacgtgttgtgatatacctagtggcccatgccaggttactgtggtgacagagccacccccaccaccccctcctcagaggcctcctactcctgggtccgagcagattgggtttcttaagactattaattgtagctgcccggcaggcgagaagggcgagatgggggtcgctggaccgatgggcctgcccggtcccaagggagatatcggcgcaatcggccctgtaggagctccgggtcctaaaggagagaagggggatgtcggaatcgggccttttggacagggcgagaagggggaaaagggttctttgggcctccccggtcctccgggacgcgatggtagtaaggggatgagaggagagccaggcgaactgggggaacctggcctgcctggcgaggtgggtatgcgcggtcctcagggaccaccgggtctgcctggtcccccaggtagagtcggcgcacccggtctccagggtgaacgcggtgagaaagggaccaggggagaaaaaggcgaaagagggctggacggttttcctggtaagccaggcgatacaggtcagcaaggacgaccgggtccatctggtgtcgccggaccccagggggaaaagggtgatgtgggacctgcaggaccccctggagtgccaggtagtgttgtacagcaggagggactgaagggagagcagggggctcctggccctcgaggtcaccagggggctcctggacctcccggagcccgtggtcctatcggccctgaaggtagggatggcccaccgggtcttcaaggattacggggaaaaaaaggtgatatgggacctcccggaattcctggcctgcttggactgcagggtcctccagggccacctggtgtacccggaccccctgggccaggcggatcgccaggattgccaggagaaatcggatttcccggaaagcccggtcccccaggccctaccggtcctccaggaaaggacggccctaacggtcccccaggacctcccggaaccaaaggcgaacctggagagaggggtgaagatgggcttccgggaaaacccggactgaggggcgaaattggtgagcagggactggccggtcgaccgggagaaaaaggggaggcgggattgccaggtgcacctggctttccaggggttagaggggaaaaaggagaccaaggggagaaaggagagctggggctgcccggactgaaaggtgacaggggcgaaaaaggtgaagctggcccagccggacctccaggcctgcctggcaccactagtctgtttaccccacacccacggatgcctggcgagcagggacccaagggagagaagggagatcccggactgcccggagaaccgggactccagggtcggcctggggagctcggacctcaagggcctacgggtcctccaggagcgaaaggtcaggagggggctcacggcgcacccggagccgctggcaacccaggggcaccaggtcatgtcggggctccagggccttcaggaccacccggttccgtgggcgctccaggcctccgcggtacaccgggaaaggatggcgagagaggggaaaagggcgcagccggtgaggaggggtccccgggacccgtagggccacgcggagaccctggtgcacctggactacctgggcctcccggtaaaggaaaggacggcgaacctggcttgagaggttccccaggcctgcccggaccgctcggcactaagggtgatcgcggagccccaggtatccccggaagtccaggatcaagaggagaccctggaataggagtcgccggaccaccaggccctagcggaccaccaggtgacaagggaagccccggaagtaggggtctgcctggttttcccggacctcaggggcctgcaggacgagatggggctccagggaaccctggggagagagggcctcctggtaaacctggcctgtccagcttgctgtctcccggtgatattaatctgctggccaaagatgtgtgtaatgactgtcctcccggacccccaggactacccggacttcctggctttaaaggggacaagggagtgcctggtaagcctggtagggaaggcaccgaggggaaaaaaggagaggcaggtcccccagggcttcccggacctccaggcattgctggccctcaggggtctcagggggaaagaggggctgacggcgaagtgggacagaaaggcgaccagggacatcctggtgttccagggttcatgggtccaccagggaacccgggacctcccggtgctgatggtatagcaggcgcagcgggacccccaggtatccaaggttcccccggaaaggagggtcctccaggtccgcagggccctagcggactgcctgggattccaggggaggagggaaaggagggtcgcgacggtaaacctgggcctcctggagagccgggaaaggccggtgaacctgggctcccagggccagaaggagcacgcggaccacccggtttcaaaggccacaccggagactctggcgctcccggacctagaggcgagtccggtgccatgggactgcctgggcaggagggtttgcccggaaaggacggcgacacgggaccaaccggtcctcaagggcctcagggccctcgcggtcccccaggaaagaatgggtcacctggctccccaggcgaacctggcccttcgggcacacccggacaaaagggctcgaagggagagaacgggtctcctgggctcccaggtttcctgggcccacgcggaccaccaggcgaaccaggggagaaaggggttcctggcaaggaaggtgttcctgggaagcctggagaacctggctttaagggggaaagaggagatccgggaatcaagggagataaaggccctcctggcggaaagggccaacctggggacccgggaatcccaggccataagggccatacaggcttgatgggtcctcaaggcctgcccggagagaatggacccgtaggaccgccaggtcctcctggccagcccggattccccggtctcaggggcgagagcccaagtatggaaactttacgcaggctgattcaggaagaactcggcaagcagctggaaactcgtctagcgtacctcctggcccagatgccaccagcatatatgaaatcttcgcagggacgacccggtccgccagggcctccaggtaaagacggactgcccggaagagcagggcctatgggagagcccggacgtccaggccagggtggccttgagggaccatcgggccctatcgggccaaagggtgagcgtggggcaaagggagaccctggtgcaccgggagtgggactgcgtggcgagatgggtcctcccggaatacctgggcagcctggtgaacccggttacgcaaaagacggacttcccggtattccgggaccgcagggagagacagggccagcaggtcaccccggtctgccaggtccccctgggccacccggacagtgcgacccatcacagtgcgcctactttgcctcgctggcagcacgaccaggaaacgtcaagggcccatag

SEQ ID NO: 308039 - DNA, 504 bp, Artificial Sequence
  derived and/or modified sequence
atggagcaggagcacatcccccactggatccagaccagcgccttcagcggcggcctgggccgctcctggtgcaagatccgctgcatggcccgggccggcctgcctgtgcacatggtgaatggagaccctgacaccggccggcccctgctgacagcccctggggccaagcagcccccccggggctggaggcggcaggccggcagcagctgcagccgggcccggggcgtgtggaggggggccctggccagccggcagggcgcccagaggggcagcaagggccctggggtgagccaccagagctatggagtggagggcctgggcagctctgtgtgccctgtgacctggcacctgcgggccctgccccggcagctgtgtgatgccagccaccagacagcctgcatcaagagcggcgtgtgcagcagcctgaagtggaggaggcctgaggccctggaccggcgcagccacatcctggagggctctgtgctgggccaccgctgcccctag

SEQ ID NO: 308040 - DNA, 3960 bp, Artificial Sequence
  derived and/or modified sequence
atggccggcctgagaggcaacgccgtggccggcctgctgtggatgctgctgctgtggagcggcggcggcggctgccaggcccagagagccggctgcaagagcgtgcactacgacctggtgttcctgctggacaccagcagcagcgtgggcaaggaggacttcgagaaggtgagacagtgggtggccaacctggtggacaccttcgaggtgggccccgacagaaccagagtgggcgtggtgagatacagcgacagacccaccaccgccttcgagctgggcctgttcggcagccaggaggaggtgaaggccgccgccagaagactggcctaccacggcggcaacaccaacaccggcgacgccctgagatacatcaccgccagaagcttcagcccccacgccggcggcagacccagagacagagcctacaagcaggtggccatcctgctgaccgacggcagaagccaggacctggtgctggacgccgccgccgccgcccacagagccggcatcagaatcttcgccgtgggcgtgggcgaggccctgaaggaggagctggaggagatcgccagcgagcccaagagcgcccacgtgttccacgtgagcgacttcaacgccatcgacaagatcagaggcaagctgagaagaagactgtgcgagaacgtgctgtgccccagcgtgagagtggagggcgacagattcaagcacaccaacggcggcaccaaggagatcaccggcttcgacctgatggacctgttcagcgtgaaggagatcctgggcaagagagagaacggcgcccagagcagctacgtgagaatgggcagcttccccgtggtgcagagcaccgaggacgtgttcccccagggcctgcccgacgagtacgccttcgtgaccaccttcagattcagaaagaccagcagaaaggaggactggtacatctggcaggtgatcgaccagtacagcatcccccaggtgagcatcagactggacggcgagaacaaggccgtggagtacaacgccgtggccggcccccagggcgagaagggcgacgtgggccccgccggcccccccggcgtgcccggcagcgtggtgcagcaggagggcctgaagggcgagcagggcgcccccggccccagaggccaccagggcgcccccggcccccccggcgccagaggccccatcggccccgagggcagagacggcccccccggcctgcagggcctgagaggcaagaagggcgacatgggcccccccggcatccccggcctgctgggcctgcagggcccccccggcccccccggcgtgcccggcccccccggccccggcggcagccccggcctgcccggcgagatcggcttccccggcaagcccggcccccccggccccaccggcccccccggcaaggacggccccaacggcccccccggcccccccggcaccaagggcgagcccggcgagagaggcgaggacggcctgcccggcaagcccggcctgagaggcgagatcggcgagcagggcctggccggcagacccggcgagaagggcgaggccggcctgcccggcgcccccggcttccccggcgtgagaggcgagaagggcgaccagggcgagaagggcgagctgggcctgcccggcctgaagggcgacagaggcgagaagggcgaggccggccccgccggcccccccggcctgcccggcaccaccagcctgttcaccccccaccccagaatgcccggcgagcagggccccaagggcgagaagggcgaccccggcctgcccggcgagcccggcctgcagggcagacccggcgagctgggcccccagggccccaccggcccccccggcgccaagggccaggagggcgcccacggcgcccccggcgccgccggcaaccccggcgcccccggccacgtgggcgcccccggccccagcggcccccccggcagcgtgggcgcccccggcctgagaggcacccccggcaaggacggcgagagaggcgagaagggcgccgccggcgaggagggcagccccggccccgtgggccccagaggcgaccccggcgcccccggcctgcccggcccccccggcaagggcaaggacggcgagcccggcctgagaggcagccccggcctgcccggccccctgggcaccaagggcgacagaggcgcccccggcatccccggcagccccggcagcagaggcgaccccggcatcggcgtggccggcccccccggccccagcggcccccccggcgacaagggcagccccggcagcagaggcctgcccggcttccccggcccccagggccccgccggcagagacggcgcccccggcaaccccggcgagagaggcccccccggcaagcccggcctgagcagcctgctgagccccggcgacatcaacctgctggccaaggacgtgtgcaacgactgcccccccggcccccccggcctgcccggcctgcccggcttcaagggcgacaagggcgtgcccggcaagcccggcagagagggcaccgagggcaagaagggcgaggccggcccccccggcctgcccggcccccccggcatcgccggcccccagggcagccagggcgagagaggcgccgacggcgaggtgggccagaagggcgaccagggccaccccggcgtgcccggcttcatgggcccccccggcaaccccggcccccccggcgccgacggcatcgccggcgccgccggcccccccggcatccagggcagccccggcaaggagggcccccccggcccccagggccccagcggcctgcccggcatccccggcgaggagggcaaggagggcagagacggcaagcccggcccccccggcgagcccggcaaggccggcgagcccggcctgcccggccccgagggcgccagaggcccccccggcttcaagggccacaccggcgacagcggcgcccccggccccagaggcgagagcggcgccatgggcctgcccggccaggagggcctgcccggcaaggacggcgacaccggccccaccggcccccagggcccccagggccccagaggcccccccggcaagaacggcagccccggcagccccggcgagcccggccccagcggcacccccggccagaagggcagcaagggcgagaacggcagccccggcctgcccggcttcctgggccccagaggcccccccggcgagcccggcgagaagggcgtgcccggcaaggagggcgtgcccggcaagcccggcgagcccggcttcaagggcgagagaggcgaccccggcatcaagggcgacaagggcccccccggcggcaagggccagcccggcgaccccggcatccccggccacaagggccacaccggcctgatgggcccccagggcctgcccggcgagaacggccccgtgggcccccccggcccccccggccagcccggcttccccggcctgagaggcgagagccccagcatggagaccctgagaagactgatccaggaggagctgggcaagcagctggagaccagactggcctacctgctggcccagatgccccccgcctacatgaagagcagccagggcagacccggcccccccggcccccccggcaaggacggcctgcccggcagagccggccccatgggcgagcccggcagacccggccagggcggcctggagggccccagcggccccatcggccccaagggcgagagaggcgccaagggcgaccccggcgcccccggcgtgggcctgagaggcgagatgggcccccccggcatccccggccagcccggcgagcccggctacgccaaggacggcctgcccggcatccccggcccccagggcgagaccggccccgccggccaccccggcctgcccggcccccccggcccccccggccagtgcgaccccagccagtgcgcctacttcgccagcctggccgccagacccggcaacgtgaagggcccctag

SEQ ID NO: 308041 - DNA, 3960 bp, Artificial Sequence
  derived and/or modified sequence
atggctggcctgaggggcaacgccgtggccgggctgctgtggatgctgcttctctggagcggcggcgggggttgccaggctcaaagggccggctgcaaatccgttcactatgacctagtgtttctactggacacgtcctcatcagtgggcaaggaggatttcgaaaaggtcaggcaatgggttgcgaaccttgtcgacaccttcgaggtgggccccgaccgtacccgagtgggcgtagtaaggtacagcgatcgccctacaacggccttcgaattaggcttgttcggcagccaggaggaggtaaaagcggcggcccgccggctagcctaccacggagggaacacaaatacaggagacgctctgaggtacataacggcgcgtagcttctctccccacgcaggtggccggccacgcgatagggcatacaagcaagtcgcaatcctgctgacagacgggcgtagccaggacttggtcctcgatgctgcagctgcagctcaccgcgctggcatccgaatctttgcagtgggcgtgggagaagccctgaaagaggaacttgaagaaattgccagcgagcctaagtccgcccacgtgtttcacgtcagcgattttaatgcgattgacaagatcagaggcaaacttcggagaaggctctgcgagaatgtgctgtgccccagcgtgcgggtggaaggagatagatttaagcacacaaacggagggaccaaggagatcacaggattcgatctgatggacctgttttccgtcaaggagatcctgggtaaacgagagaatggcgctcaatctagttatgtaagaatgggcagttttccagtcgtacaaagtacggaagacgtgtttccgcaaggactacctgatgagtacgcctttgtgacaacctttcgattcagaaagacatcccggaaagaggactggtacatctggcaagttatcgaccaatattctattcctcaagtgagcatccgcctggatggggagaacaaggctgtggaatataacgctgttgctggcccacagggcgagaagggtgacgttggccctgctggccccccgggtgtaccgggcagcgtggtacagcaagagggacttaagggcgagcagggggccccaggccccagaggtcatcagggagccccaggtccgccaggcgctcgagggccaatcggccccgagggaagggatggacctcccggcttacaagggctgcgcggtaaaaagggggacatgggacctcccgggatccccggcctcttaggcctgcaggggccccccgggcccccaggagttcctgggccacccggccctggaggatccccaggccttcctggcgaaattgggttccccggaaaaccaggccctcccggcccaaccgggccacccggcaaggatgggcccaacggccccccaggccccccaggcaccaagggggagcccggcgagcgtggtgaggacgggttgccagggaagcccggcctccggggtgagatcggcgaacagggcctggccggccgaccaggcgagaagggtgaagccggactgccgggcgccccgggcttcccaggcgtgcgcggcgaaaagggcgaccaaggcgagaagggcgaactaggcctccctggattaaagggtgaccggggtgagaagggagaagcaggccccgccggccctccagggctccctgggactacctctctcttcactccacatcctcgaatgccaggagagcaaggtcccaaaggcgagaaaggcgaccctggacttcccggagaacctgggctccaggggcgaccaggagagcttggaccacaaggccccaccggccctcccggcgctaaagggcaagaaggtgcccatggcgcccccggcgccgccggtaatcccggagccccgggacacgttggcgcacccggtcccagcgggccacccggatccgtaggcgccccggggctgaggggtacacctggaaaggatggggaaaggggggagaagggagctgccggggaggaagggagtcctgggccagttggccctagaggcgaccccggggcccctggcctgccaggtccccctgggaaaggtaaggacggtgaacccggcctgcggggaagtcctggtctacctgggccactggggaccaaaggggaccgcggagccccaggtatcccaggctcacctggctctcgtggggacccgggcatcggagttgcagggccccccggaccgtcaggccccccaggagacaagggcagcccgggttcgagggggttgcctgggtttccaggccctcaggggcccgctggccgggatggagcacccgggaaccccggggaaaggggcccgccagggaaaccaggcctgagttctttgttgtccccgggtgatatcaacttactggctaaggatgtttgtaatgactgccccccagggccgccaggcctgcccgggctgccagggttcaaaggagataaaggcgtccccggtaaacccggcagggaggggaccgaggggaaaaagggcgaagccgggccacccggcctgcctgggcctccagggattgcaggaccacagggatctcagggggagcgaggggcggatggggaagttggacagaagggggatcaaggccacccgggagtgccaggcttcatgggcccccctggaaaccccggtccgcccggcgcggacggcattgccggcgcggccggaccccctggtatccagggaagcccagggaaagagggcccccccggcccccagggaccttccggactgccaggaatacccggagaggagggaaaggaaggcagggacgggaagcccggccctcccggcgagccgggcaaagctggagaacctggtctgccggggcccgagggggccaggggccccccaggctttaaaggacatactggagattctggcgctccaggtcccagaggcgaaagtggggctatgggcctcccggggcaggagggtttgcccggaaaggacggcgataccggccctactggcccgcagggcccacagggacctcgcggaccccccggaaagaacgggtccccaggctcccctggagagccaggcccaagcggcacaccaggccagaaagggagcaagggtgagaatggcagtcccggattgccaggctttctgggcccacgcggccccccaggagaacccggcgagaagggggtgcccgggaaagagggagttcctggcaagcctggcgagcccgggtttaagggcgaaaggggagatccaggaatcaagggagacaaaggcccccctggaggcaagggccagcctggggaccctggtattccaggccacaaagggcacaccggactaatgggtcctcagggtcttcctggtgagaatggccctgtgggaccacctgggcctccaggccagccaggtttccccggactgagaggtgaaagtcctagcatggaaacacttcgtcgtttaattcaagaagaactcggcaaacagctggaaactcgactggcgtatttgctggctcagatgcctccagcctacatgaaaagctcacagggccggccaggaccgccaggaccaccgggaaaagacggtctccccgggagagctggccccatgggagaacccggccgccccggccaaggcgggcttgagggcccttcgggccccatcgggccaaagggcgaacggggggcaaagggcgaccctggagccccgggcgtcggcctgcgcggggaaatgggtccgccaggaatccccggccagcccggtgagcctggatatgcaaaagacgggttaccaggcattcctggaccacagggggaaaccggcccggctggtcacccagggcttcctggacctcctgggccccctggccagtgcgatccatcccagtgcgcctacttcgcaagccttgctgcgcggccgggtaacgtgaaggggccatag

SEQ ID NO: 308042 - DNA, 3960 bp, Artificial Sequence
  derived and/or modified sequence
atggccggcctgcggggaaatgctgtggccggcctgctgtggatgctgctgctgtggagcggcggcggcggctgccaggcccagagagctggctgcaagtctgtgcactatgacctggtgttcctgctggacaccagcagctctgtgggcaaggaggactttgagaaggtgcggcagtgggtggccaacctggtggacacctttgaggtgggccctgacaggaccagggtgggcgtggtgcgctacagcgaccggcccaccacagcctttgagctgggcctgtttggcagccaggaggaggtgaaggccgccgcccggcggctggcctaccatggaggcaacaccaacacaggagatgccctgcgctacatcacagcccggagcttcagcccccatgctgggggccggccccgggaccgggcctacaagcaggtggccatcctgctgacagatggccgcagccaggacctggtgctggatgctgctgctgctgcccaccgggccggcatccgcatctttgctgtgggcgtgggggaggccctgaaggaggagctggaggagatcgccagcgagcccaagagcgcccacgtgttccacgtgtctgacttcaatgccatcgacaagatccggggcaagctgcggcggcggctgtgtgaaaatgtgctgtgccccagcgtgcgggtggagggggaccgcttcaagcacaccaatggaggcaccaaggagatcaccggctttgacctgatggacctcttctctgtgaaggagatcctgggcaagcgggagaatggagcccagagcagctatgtgaggatgggcagcttccctgtggtgcagagcacagaagatgtgttcccccagggcctgcctgatgaatatgcctttgtgaccaccttccgcttcaggaagaccagcaggaaggaggactggtacatctggcaggtgattgaccagtacagcatcccccaggtgtccatccggctggatggagagaacaaggctgtggagtacaatgctgtggccggcccccagggcgagaagggagatgtgggccctgctggccccccaggagtgcccggctctgtggtgcagcaggagggcctgaagggggagcagggcgcccctggcccccggggccaccagggcgcccctggccccccaggggcccggggccccatcggccctgagggcagagatggccccccaggcctgcagggcctgcggggcaagaagggggacatgggccccccaggcatccctggcctgctgggcctgcagggccccccaggccccccaggagtgcccggccccccaggccctgggggcagccctggcctgcctggagagatcggcttccctgggaagccaggccccccaggccccaccggccccccaggcaaggatggccccaatggacctcctggccccccaggcaccaagggggagcctggagagcggggggaggatggcctgcccgggaagccaggcctgcggggggagattggagagcagggcctggccggccggcctggagagaagggggaggccggcctgcccggggcccctggcttccctggggtgcggggggagaagggggaccagggcgagaagggggagctgggcctgcccggcctgaagggggacagaggagagaagggggaggccggccctgctggccccccaggcctgcccggcaccaccagcctcttcaccccccaccccaggatgcctggagagcagggccccaagggggagaagggggaccccggcctgcccggggagcccggcctgcagggccggcctggagagctgggcccccagggccccaccggccccccaggggccaagggccaggagggcgcccacggggcccctggagctgctggcaaccctggggcccctggccacgtgggcgcccctggccccagcggccccccaggctctgtgggcgcccctggcctgcggggcacccctgggaaggatggagagcggggggagaagggagctgctggggaggagggcagccctggccctgtgggccccaggggggaccccggggcccctggcctgcccggccccccaggcaagggcaaggatggagagcccggcctgcggggcagccctggcctgcccggccccctgggcaccaagggggacagaggagcccctggcatccctggcagccctggcagcagaggagaccccggcattggagtggccggccccccaggccccagcggccccccaggggacaagggcagccctggcagccggggcctgcccggcttccctggcccccagggccctgctggaagagatggagcccctggcaaccctggagagcggggccccccaggcaagccaggcctgagcagcctgctgagccctggggacatcaacctgctggccaaggatgtgtgcaatgactgccccccaggccccccaggcctgcccggcctgcccggcttcaagggggacaagggcgtgcctgggaagccaggccgggagggcacagagggcaagaagggggaggccggccccccaggcctgcccggccccccaggcattgctggcccccagggcagccagggcgagagaggagcagatggagaggtgggccagaagggggaccagggccaccctggggtgcccggcttcatgggccccccaggcaaccctggccccccaggagcagatggcattgctggagctgctggccccccaggcatccagggcagccctgggaaggagggccccccaggcccccagggccccagcggcctgcccggcatccctggagaggagggcaaggagggcagagatggcaagccaggccccccaggagagcccgggaaggccggggagcccggcctgcccggccctgagggcgcccggggccccccaggcttcaagggccacactggagacagcggggcccctggccccagaggagagagcggggccatgggcctgcccggccaggagggcctgcccgggaaggatggagacaccggccccaccggcccccagggcccccagggcccccggggccccccaggcaagaatggcagccctggcagccctggagagcccggccccagcggcaccccaggccagaagggcagcaaaggagaaaatggcagccctggcctgcccggcttcctgggcccccggggccccccaggagagcccggggagaagggcgtgcctgggaaggagggcgtgcctgggaagccaggagagcccggcttcaagggggagcggggggaccccggcatcaagggggacaagggccccccaggcggcaagggccagcccggggaccccggcatccctggccacaagggccacacaggcctgatgggcccccagggcctgcctggagaaaatggacctgtgggccccccaggccccccaggccagcccggcttccctggcctgcggggggagagccccagcatggagaccctgcggcggctcatccaggaggagctgggcaagcagctggagacccggctggcctacctgctggcccagatgcccccagcctacatgaagagcagccagggccggcccggccccccaggccccccaggcaaggatggcctgcccggccgggccggccccatgggagagcccggccggcccggccagggcggcctggagggccccagcggccccatcggccccaagggggagcggggggccaagggggaccccggggcccctggggtgggcctgcggggggagatgggccccccaggcatccctggccagcccggggagcccggctacgccaaggatggcctgcccggcatccctggcccccagggcgagaccggccctgctggccaccctggcctgcccggccccccaggccccccaggccagtgtgaccccagccagtgtgcctactttgccagcctggccgcccggcctggaaatgtgaagggcccctag

SEQ ID NO: 308043 - DNA, 3960 bp, Artificial Sequence
  derived and/or modified sequence
atggccggcctgcggggcaacgccgtggccggcctgctgtggatgttattgctgtggtcagggggcgggggctgtcaagcccagcgcgccggctgcaagtcagtacattacgacctcgtgttcctgctggacacatcatctagtgttgggaaggaagattttgaaaaagtgcggcagtgggtggccaatctggtcgacacttttgaggttggaccagaccgtaccagggtgggagttgttagatatagtgacagacctacaactgcattcgaactgggtctctttgggtcgcaagaagaggtaaaagcggcggcgcgacgtctagcatatcacggcggcaatacaaacaccggagatgcccttagatacatcactgctcgttcattttcaccacacgccggaggacggcctagagaccgggcatacaaacaagtcgcgatcctgctgactgatggccgcagtcaggacttggtgctggatgctgccgcagctgcccacagggctggaattagaatttttgccgtcggcgtgggggaagctttgaaggaggagctggaagaaattgctagcgagcctaagtcagcccacgtcttccacgtcagcgattttaacgccatcgacaaaatccgcggtaaactgcggcgtagattgtgtgagaacgtgctgtgtccgtctgtgagagtggagggtgatagattcaaacacacaaatggcggaaccaaggagattaccgggtttgaccttatggacctcttctccgttaaggaaatcttgggtaaacgcgagaatggagcacagagcagctacgtgcggatggggtcattccctgtcgtccagtctactgaagacgtcttcccccaggggctcccggacgaatacgcctttgtaacaacgttccgcttcagaaagaccagccgcaaggaagattggtatatctggcaggtgatcgaccagtactccattcctcaggtctccatcagattggacggagaaaataaggcggttgagtacaatgctgtagcaggacctcagggggagaagggcgatgtgggccctgccggccctcccggcgtgccagggtcggtggtgcaacaggaaggcctgaaaggggaacagggagctccaggacccagagggcatcagggtgcccctggaccacccggagcccgagggcccatcggccctgaagggagggacggacctccagggctgcagggacttagaggtaagaagggagacatgggccccccgggtatccctgggctgctaggcctccagggccccccaggaccccctggagtgccgggcccccccgggcctggaggcagtcctggcctgcctggggagataggatttcccggtaagcctggtccccccggacctacggggcccccaggaaaagatggccctaatgggccgcccggaccccccgggacaaaaggtgagcccggggaaaggggcgaggacggcttgccgggcaaacccggactgcggggcgagataggggaacagggcctggctgggcggccgggcgagaagggggaggctgggctgcccggcgccccgggattccctggcgtgaggggagagaagggagatcagggggaaaaaggagagctgggacttccgggtctgaaaggtgatagaggcgaaaaaggagaggccggacccgctggaccccccggcctgcctggcaccacgtcccttttcacgcctcacccacggatgcccggtgaacagggacccaaaggggagaagggtgatcctggcttacccggagaacctggtctgcaaggacgccctggagagctggggccgcaggggcctactggacctcctggagccaagggccaggagggagcccacggagccccaggcgccgcaggaaatcccggagctcctggccacgtgggggcaccagggccctccggcccgccgggatcagtgggcgcaccaggcctgaggggcactccgggtaaggacggagagcggggggagaaaggagccgccggcgaggagggatcgcccggccctgttgggcctcgcggagacccgggcgctcccggactgcccggaccacctgggaagggcaaggacggagagcccggactgcgaggtagccccgggcttcctggacccctcgggactaaaggggaccgcggcgcccctgggatcccaggctcacccggatctaggggcgacccaggcatcggggtggctgggccgccaggtcccagtggcccaccgggtgacaaaggctcccctggatcccggggccttccaggtttcccaggccctcaggggcccgctgggcgggacggagccccggggaatcccggcgagcggggcccccctggtaaacctggcctgagttcacttctaagcccaggagatatcaatctgctggccaaggacgtgtgtaatgactgccccccaggacccccaggtctgccaggcctgcctggcttcaaaggggacaaaggagtccccgggaagcctggtcgggaaggtactgagggaaagaaaggcgaggccgggccaccagggctgcccggccctccagggatcgccggccctcagggcagccagggcgagcgcggcgccgacggagaggtaggacagaaaggagatcagggccatccaggagtgcctggcttcatgggccctccgggcaatcccggaccccccggggctgacggcattgcaggggcggccgggccccctggaatccagggtagcccagggaaggagggccctccggggcctcaaggcccaagcgggctgccaggaatccctggtgaggaggggaaggaaggacgggacgggaagcctggcccccccggggaacctggtaaggccggcgaacccggactgcccggccctgaaggcgccagagggcctcccggatttaaaggacatactggggacagtggtgcccctggtcctaggggtgaatctggcgctatgggccttcctggccaggagggtctgcccggaaaagatggcgatacaggcccaacaggcccacaaggaccccaggggcccagagggcctcccgggaaaaacggatccccaggaagcccaggtgagccaggtccttccggcacccccgggcagaagggctcgaaaggcgagaatggcagtcccggcctcccagggtttctcgggccacgagggccacccggggagcccggggagaagggagtacccgggaaggaaggcgtgcccgggaagcctggcgagccagggttcaaaggagagagaggagacccagggatcaaaggtgacaagggcccgccaggaggtaaagggcagcctggagacccaggcatccccggacacaagggacacacaggcctgatgggaccccagggcctgcccggcgagaatggcccagttggaccaccgggcccccctggacagccaggatttcccgggctcaggggtgagtcaccctctatggagaccctgcgccggttgatccaggaggaacttggcaaacagttggagactagactagcctacctcctggcacagatgccccccgcttacatgaagtcatcacagggtaggccaggtcctccgggaccaccagggaaagatggcctaccgggccgggccggcccaatgggtgagccaggtcgtccaggccaggggggtctggaaggccccagcggtcccatcgggcctaagggggagagaggcgccaagggggacccaggcgcacctggcgtcggactgaggggagagatgggcccacctggcatcccaggtcaaccgggagagcctggctacgcaaaagatgggctgcccggtatacctggaccccagggggaaacaggtccggcgggtcaccctgggctccccgggcctccaggcccccctggccaatgtgatccttctcagtgcgcatactttgccagcttggccgcacgacccggtaatgtgaaggggccctag

SEQ ID NO: 308044 - DNA, 5424 bp, Artificial Sequence
  derived and/or modified sequence
ggggctggccgaggctgcggcgtttctccccaaggaagtgtcttctccgctttccctgttcttctgtttctcacacactttctatctcattctgtaactttcaagcctttccttctaactgtatgtatttagttacttgttttcaagctggttccctctctggccccctggcctggggaaagcctccacacttactgcgggtcttgtttagagtctgagtttgtgagattatttgggggagagtgggcgagtggctgacaggtgacccccaggaggaggattcctggggctggtgtcttctcccagctgctgcttccagtgggcctgggcccaggactggacctccgctggcacccctgagtgcctccctgccaggccatgctgctgtagaccctaacagcgtctcttcctggccaagagaagcctgtccccaagaacaggagagccatggccggcctccgagggaacgctgtggctggcctcctctggatgctgctgctgtggagtgggggcggcggctgccaggctcagcgggcaggttgcaaaagtgtccactacgatctggtcttcctcctggacacctcctccagcgtgggcaaggaggactttgagaaggtccggcagtgggtggccaacctggtggacaccttcgaggtgggccccgaccgcacccgtgtgggggtcgtgcgctacagcgaccggcccaccacggccttcgagttgggactctttggctcgcaggaggaggtcaaggcggctgcccggcgtctcgcctaccacgggggcaacaccaacacgggagacgcgctccgctacatcacggcccgcagcttctccccacacgccggcggccgccccagggaccgcgcctacaagcaggtggccatcctgctcaccgacggccgcagccaggacctggtgctggacgccgcggcggcagcccaccgcgctggcatccgcatctttgccgtgggcgtgggcgaggcactcaaggaggagctggaggagatcgcctcagagcccaagtccgcccacgtcttccacgtgtccgacttcaatgccatcgacaagatccggggcaagctgcggcgccgtctttgtgaaaatgtgctctgtcctagcgttcgtgtagaaggagatcgctttaagcacaccaatggaggaaccaaggaaatcacaggttttgacctgatggatttgttcagtgtgaaggaaatcttggggaagagagagaatggagctcagagttcctatgtacggatgggatccttccctgtggtgcaaagtactgaggatgtgttcccccaaggtttacctgatgagtacgcctttgtcacaaccttccggttcaggaaaacctctcggaaggaagactggtatatctggcaggtcatcgaccagtacagcatcccacaggtctccatccggctggatggtgaaaacaaggcagtcgagtacaacgctgtggcaggaccccagggagaaaagggtgacgtgggacctgcggggccacctggtgtaccaggctcagtggtgcagcaagagggcttgaaaggggaacagggagctccaggacccagaggtcaccaaggcgcccccggtcctccaggagctcggggtccaataggcccagaaggcagggatggacctcctggtttgcaaggtctccgagggaagaaaggtgacatgggaccacctggaatccctggattgctggggctgcagggccctccaggaccccctggtgtcccaggcccccctggaccgggaggttctccgggtttgcctggagagatcggcttcccgggaaagcctggacctcctgggcccacgggaccccctggaaaggacgggccaaatggaccaccaggtccgccaggaaccaagggagaaccaggagaaagaggggaagatggtctgcctggaaaaccaggccttcggggagaaattggggagcagggcctggcaggccgacctggagagaagggagaagcaggcctcccaggggctccaggcttcccaggtgtgagaggagagaaaggagaccagggagaaaaaggtgaactgggacttccaggactgaaaggtgaccgaggtgaaaagggtgaagctggtcctgcaggccctcccgggttacctggaactacatccctgttcacaccacatccacggatgcccggagaacaagggcccaaaggagagaagggcgatccaggcctgcctggggaaccgggactgcagggccgtcctggagaattggggcctcagggacccactggaccaccgggtgccaagggacaggaaggtgcacatggggctcctggagcagctggaaaccccggtgctcccggacatgtcggtgcccccggtcccagtggccctccaggaagtgtgggtgctcccggcctcagaggcaccccagggaaagatggggagcgtggtgagaagggtgcagcgggggaagaaggcagcccagggccagttggtcccaggggagatcctggtgctcctgggctccctgggccacccggaaaagggaaggatggagagccgggactccgtggatcacctggactccctggacccctaggaaccaagggggatcgaggagctcctgggatccctggttctcctggcagccgtggtgacccaggcattggggttgctggccctcctggcccttccggaccaccaggagacaaaggatccccgggatcacgaggcttacctggattccctggcccccagggcccagccggccgggacggtgcaccaggaaatccaggagaaagagggcctcctggcaagccgggcctctcttcactactgtctccaggggacataaatctcttggctaaggatgtgtgcaatgactgccctcctggccccccaggcctccctggtctaccaggttttaaaggggacaaaggtgtcccaggaaagccagggagagaaggcacagaagggaaaaagggagaggctgggcctccaggcctaccagggcccccaggaatagctggaccacagggaagtcaaggagaacgtggtgcagatggtgaggttgggcagaaaggtgatcagggtcatcctggagttccaggtttcatggggcccccagggaaccctgggccaccaggggcagatggaattgcaggagctgctggaccaccaggaatccaagggtcacctgggaaagaaggccctcctggcccccaaggcccatctggattacccggaatcccaggagaagaaggcaaagagggcagagatggaaagccgggtccccctggagagccgggcaaagcaggagagccaggtctaccaggaccagagggtgcccgaggcccacctggcttcaagggacacacaggcgattctggtgcacccggtccccggggagagtctggtgccatggggcttcctggtcaggaagggttaccaggaaaagatggtgacactggacccactgggccacagggtccccaaggaccaaggggcccaccgggcaagaatggatcaccgggatctccaggagagcctggcccttcaggaacccctggccagaaaggaagcaaaggggaaaatggcagcccaggacttcctggcttcctgggtccccgtgggcctccgggagaaccaggagagaaaggagtcccaggcaaggagggggtccctgggaagcctggagagcctggattcaaaggagaaaggggagatcctgggatcaaaggtgacaaaggacctcctggtggaaaaggccagcctggggaccctggaatcccaggccacaaaggccacacaggcctgatgggtccccaaggactacctggggagaatggaccagttggacccccagggcctccaggccagccgggatttccaggactgaggggggagtctccatccatggaaaccctgcgtcggcttattcaagaagagctggggaagcagcttgaaaccagactcgcctacctcctggcccagatgcccccggcgtacatgaagtcatctcaaggcagacctgggcccccagggccccctggaaaagatgggcttccaggccgggccggccccatgggggagccaggtcgtcctgggcaggggggtctggaaggaccctctggacccataggtcccaaaggtgagcgaggagccaaaggtgacccaggtgcacctggagttggcctccgaggcgagatgggaccccctggaatcccaggtcaacccggggaacctggctatgctaaagatggacttcctgggatccctggccctcaaggggagacaggaccagctggacatcctggcctcccaggacctcccggtcccccaggccaatgtgacccttcccagtgtgcctacttcgccagccttgctgcccggccgggtaatgtgaagggtccctaaaggactctggaaagccagaagactgcagtggatttctgaaacttgaactcagagcccagtgggaagccagaggtcttgaaagacttcagccatgtgttccttttttttttctttcttttatcgtttgctttttgttttattttcttgagagacctcaaaattattaaatccaacagacgctgccggtcggtcagattattattaatattattgttgttgttaattattattattatttcatatgctgatgctttgtgagttcttttccactcctttaaagttgggaaaacttgattcgtggggcaggagattgtttcttcattcttctgacagcccccatctgacgcgtaactgcccattttaaggaaactcttggtgctacaaaaccctgaccagacacttggcaaatttacctctttcttcaaaagaaaaactttaagaaaatgagccaatgggcttcattctcagtcatgcccggagatcacccaggagaaataatacaaacaccaccactgtccagagagagtaaagaagcagaaagagaaagaatttgcaaccatgaggaatgttcccacctcccgacgggacgtgcatttggaaaacacagaatcagccctcagggtgcactccagccacctcagtgctctaagctcacagaagtgaaataatgtctgtgggttggcaatggctttgtgggatcatatgtcttggccaaagatgggaaaacctatgttgaagaggcagcccttgagtgttaatttgtcttctaaactgtgtaaggccccttcaagttcctcttgttggtttcaattatattaattataaaacaagtggatgtggtgaccatccacttgtgtttccctaatgatgggcagttggccagggcactgaccagagctgggaaatttgtatctccaaggcggctctgtctctgaaataaatggcatcaagtgcatgtgtgtatgcgacatgccctgcctgaacaggtgctcaataaatccaagtttccttctcttg

SEQ ID NO: 308045 - DNA, 3960 bp, Artificial Sequence
  derived and/or modified sequence
atggctggcttgaggggaaacgctgttgccggtcttctgtggatgttactgctgtggtctggcggaggcggttgccaggctcagcgagctggatgtaaatctgttcactatgatctggtttttcttttagacacatccagctcagtgggaaaggaggatttcgagaaggtccgacagtgggtagccaacctggttgacacctttgaagtgggtcctgaccgcacaagggtcggggtcgtgcgctactctgacaggcccaccactgccttcgagttgggtctgttcggttctcaggaggaggtcaaagccgcagcgagacggctggcctatcatggaggaaataccaacacaggagacgcactgagatatatcactgcgcgaagcttctccccacatgctgggggacgcccacgggacagggcatataaacaggtggctatcctccttaccgatggcagaagtcaagatctggttttggacgcggcagctgcagcccatcgagctggtattaggattttcgcggtgggggttggggaagccctgaaagaggaattggaagaaatcgcctccgaacccaaaagcgcccatgtgtttcatgtgtccgatttcaacgcaatcgataagataaggggtaaactgagaagaaggctctgcgaaaacgtgctgtgcccatccgttcgtgtggagggagacagattcaaacacacaaatgggggaaccaaggagatcacaggctttgacctgatggacctgttctctgttaaagaaattctgggaaagcgggagaacggcgctcagagcagctatgtacggatgggtagcttccctgtcgtgcagtccactgaagacgttttcccccagggcctgccggacgaatacgcgttcgtaacgacgttcaggtttaggaagacgagtcgcaaggaggactggtacatctggcaggtcattgatcagtatagcatcccccaggtgtccatccggctcgacggggagaataaggccgtggagtataacgccgtagctggcccacagggagaaaagggcgatgtgggtcccgcaggtcctccaggggtgcctggttccgtagtgcagcaggaaggtttgaagggggagcagggagcgccagggcctagagggcatcagggtgccccaggtcctccaggggcacgtgggcctatcggaccagaaggacgggatggccctcctggattgcaaggtttgcgcggtaagaaaggcgacatgggccctcccggaatccccggactcctggggctgcagggcccacctggtccacctggggtgccaggcccaccgggaccaggtggttctccgggtttgcccggagagatcggatttcccggaaaacctggcccaccaggtccaaccgggccaccaggtaaggacggtccaaatgggccaccaggaccgccaggcaccaagggcgaacctggcgagaggggcgaggatggactgcccggaaagcccggattgcgcggagaaattggagagcaaggtctggcaggcaggcctggagagaagggtgaggctggattgccaggagctcctgggttcccaggcgttaggggggagaaaggagatcagggggaaaagggggagctgggcctgccgggactgaaaggcgaccgcggagaaaagggagaggctggcccagccggaccaccaggcctgccgggaactacgagcctttttacgccacacccacggatgcctggggagcagggaccaaaaggagagaagggggatcccggactgcccggagaacccggactgcagggacgtcccggagaactagggccacaggggccaactggtcccccaggcgctaaggggcaggaaggagcacacggagccccaggtgcagctgggaaccctggtgctcccggacacgttggggcacctggcccatccggcccacccggatctgttggcgctccagggttgcgcggtactcccggtaaggatggggagaggggcgagaagggcgctgctggtgaagaaggctcacccggacccgtgggtcccaggggggaccccggtgcaccaggtctacctggcccacccggaaaaggtaaagatggcgagcctgggctccgaggttcacccggtctgcctggtcccctaggcacgaaaggagacagaggagcaccaggaatcccaggcagtcccggtagtcgaggtgaccctggaattggggttgctgggcctccaggtccatccggaccacccggagataaggggagtcccggatctcgcggactgcccggtttccccggaccccagggtccagcaggaagggatggagcaccaggcaaccccggagagcgagggcctccaggaaaacccggactttcatcactgctgagccccggtgatattaacctcctggctaaggacgtgtgtaacgattgcccccctgggccacctgggctgcccggtctccctggatttaagggtgacaagggggtgcccggaaagccgggaagagaaggcacagagggcaaaaaaggcgaagccggtccaccaggtctgcccggtccccctggcatcgccggaccacaaggcagccaaggcgagaggggcgctgacggggaggtcgggcaaaagggggaccaaggacaccccggagtgcccggattcatgggccctccagggaatccaggaccccctggcgcagacgggattgctggtgccgctgggcctcccggaatacaggggtctcccggaaaagagggtcctcctggtcctcagggcccttctgggctccccggaattcctggcgaagagggaaaagaagggagggatggcaagcctgggcctcctggcgagcccggtaaggccggtgaacccggactcccagggcctgagggagcgaggggtcccccaggattcaagggacacacaggtgacagcggtgctcctgggccaagaggagagtctggagctatgggactccccggacaggaaggccttccaggaaaggacggggacacgggccctactggaccacagggacctcaagggccacggggaccacccggtaaaaatggtagccccggtagtccaggggagcccggaccctctgggactcccggtcaaaagggaagtaagggcgaaaatggtagcccgggactgcctggctttctaggcccacggggtcctcccggagagccaggggaaaagggggtgcctggaaaggaaggggtccccggaaaacccggagagccaggctttaaaggtgaacgaggagaccccggaatcaaaggtgataaaggccctccaggtggaaaggggcagccaggagacccaggtatccctgggcacaagggccacacgggcctgatgggcccacaaggcttgcctggtgagaatggtcccgttgggccacctggaccgccagggcagcccggatttcctggactccggggtgaaagcccctccatggaaacgcttcgacggctgattcaagaggagctgggtaaacagttagaaacaagattggcgtacctgctggcccagatgccaccagcttatatgaaatcaagtcaagggcgaccaggtcctccaggccctccgggaaaggatgggttacccggacgcgcaggccctatgggagagccagggagacctggccagggtggcttagaaggcccaagtggccctatcggtcctaagggggagagaggcgctaagggcgatccaggcgctccaggcgtgggactgagaggggagatgggccctcctggaattcccggacagccaggtgagcctggatatgccaaagacgggctcccagggattcctgggcctcaaggcgaaacggggcctgctgggcatccagggttaccaggacccccaggccctccgggacagtgcgatccctcccagtgtgcttactttgctagtcttgcagcgcgaccgggtaacgtgaaggggccatag

SEQ ID NO: 308046 - DNA, 1842 bp, Artificial Sequence
  derived and/or modified sequence
cccttgcgggcgagcctggcggggttgcgttcctgtccgctagcaggtcaatggccagcaaggaggggggtccgagccggcggcggcggcggcagtggtggcagcgggagacaaatggaaacctccacagggcacagactccatcaagatggagaacgggcagagcacagccgccaagctggggctgcctcccctgacgcccgagcagcaggaggcccttcagaaggccaagaagtacgccatggagcagagcatcaagagtgtgctggtgaagcagaccatcgcgcaccagcagcagcagctcaccaacctgcagatggcagcagtgacaatgggctttggagatcctctctcacctttgcaatcgatggcggctcagcggcagcgggcgctggccatcatgtgccgcgtctacgtgggctctatctactatgagctgggggaggacaccatccgccaggcctttgccccctttggccccatcaagagcatcgacatgtcctgggactccgtcaccatgaagcacaagggctttgccttcgtggagtatgaggtccccgaagctgcacagctggccttggagcagatgaactcggtgatgctggggggcaggaacatcaaggtgggcagacccagcaacatagggcaggcccagcccatcatagaccagttggctgaggaggcacgggccttcaaccgcatctacgtggcctctgtgcaccaggacctctcagacgatgacatcaagagcgtgtttgaggcctttggcaagatcaagtcctgcacactggcccgggaccccacaactggcaagcacaagggctacggcttcattgagtacgagaaggcccagtcgtcccaagatgctgtgtcttccatgaacctctttgacctgggtggccagtacttgcgggtgggcaaggctgtcacaccgcccatgcccctactcacaccagccacgcctggaggcctcccacctgccgctgctgtggcagctgctgcagccactgccaagatcacagctcaggaagcagtggccggagcagcggtgctgggtaccctgggcacacctggactggtgtccccagcactgaccctggcccagcccctgggcactttgccccaggctgtcatggctgcccaggcacctggagtcatcacaggtgtgaccccagcccgtcctcctatcccggtcaccatcccctcggtgggagtggtgaaccccatcctggccagccctccaacgctgggtctcctggagcccaagaaggagaaggaagaagaggagctgtttcccgagtcagagcggccagagatgctgagcgagcaggagcacatgagcatctcgggcagtagcgcccgacacatggtgatgcagaagctgctccgcaagcaggagtctacagtgatggttctgcgcaacatggtggaccccaaggacatcgatgatgacctggaaggggaggtgacagaggagtgtggcaagttcggggccgtgaaccgcgtcatcatctaccaagagaaacaaggcgaggaggaggatgcagaaatcattgtcaagatctttgtggagttttccatagcctctgagactcataaggccatccaggccctcaatggccgctggtttgctggccgcaaggtggtggctgaagtgtacgaccaggagcgttttgataacagtgacctctctgcgtgacagtggtccctctccccggacttgcacttgttccttgtttcctctgggttttatagtgatacagtggtgtccccggggccaggcgcgctctgcccagcccagcctacagtgcggataaaggtgcggatgctgctggccctgaa

SEQ ID NO: 308047 - DNA, 1804 bp, Artificial Sequence
  derived and/or modified sequence
gcgcggcgtgtggcccttgcgggcgagcctggcggggttgcgttcctgtccgctagcaggtcaatggccagcaaggaggggggtccgagccggcggcggcggcggcagtggtggcagcgggagacaaatggaaacctccacagggcacagactccatcaagatggagaacgggcagagcacagccgccaagctggggctgcctcccctgacgcccgagcagcaggaggcccttcagaaggccaagaagtacgccatggagcagagcatcaagagtgtgctggtgaagcagaccatcgcgcaccagcagcagcagctcaccaacctgcagatggcggctcagcggcagcgggcgctggccatcatgtgccgcgtctacgtgggctctatctactatgagctgggggaggacaccatccgccaggcctttgccccctttggccccatcaagagcatcgacatgtcctgggactccgtcaccatgaagcacaagggctttgccttcgtggagtatgaggtccccgaagctgcacagctggccttggagcagatgaactcggtgatgctggggggcaggaacatcaaggtgggcagacccagcaacatagggcaggcccagcccatcatagaccagttggctgaggaggcacgggccttcaaccgcatctacgtggcctctgtgcaccaggacctctcagacgatgacatcaagagcgtgtttgaggcctttggcaagatcaagtcctgcacactggcccgggaccccacaactggcaagcacaagggctacggcttcattgagtacgagaaggcccagtcgtcccaagatgctgtgtcttccatgaacctctttgacctgggtggccagtacttgcgggtgggcaaggctgtcacaccgcccatgcccctactcacaccagccacgcctggaggcctcccacctgccgctgctgtggcagctgctgcagccactgccaagatcacagctcaggaagcagtggccggagcagcggtgctgggtaccctgggcacacctggactggtgtccccagcactgaccctggcccagcccctgggcactttgccccaggctgtcatggctgcccaggcacctggagtcatcacaggtgtgaccccagcccgtcctcctatcccggtcaccatcccctcggtgggagtggtgaaccccatcctggccagccctccaacgctgggtctcctggagcccaagaaggagaaggaagaagaggagctgtttcccgagtcagagcggccagagatgctgagcgagcaggagcacatgagcatctcgggcagtagcgcccgacacatggtgatgcagaagctgctccgcaagcaggagtctacagtgatggttctgcgcaacatggtggaccccaaggacatcgatgatgacctggaaggggaggtgacagaggagtgtggcaagttcggggccgtgaaccgcgtcatcatctaccaagagaaacaaggcgaggaggaggatgcagaaatcattgtcaagatctttgtggagttttccatagcctctgagactcataaggccatccaggccctcaatggccgctggtttgctggccgcaaggtggtggctgaagtgtacgaccaggagcgttttgataacagtgacctctctgcgtgacagtggtccctctccccggacttgcacttgttccttgtttcctctgggttttatagtgatacagtggtgtccccggggccaggcgcgctctgcccagcccagcctacagtgcggataaaggtgcggatgctgctggccctgaa

SEQ ID NO: 308048 - protein, 837 aa, Artificial Sequence
  derived and/or modified sequence
MASKRKSTTPCMVRTSQVVEQDVPEEVDRAKEKGIGTPQPDVAKDSWAAELENSSKENEVIEVKSMGESQSKKLQGGYECKYCPYSTQNLNEFTEHVDMQHPNVILNPLYVCAECNFTTKKYDSLSDHNSKFHPGEANFKLKLIKRNNQTVLEQSIETTNHVVSITTSGPGTGDSDSGISVSKTPIMKPGKPKADAKKVPKKPEEITPENHVEGTARLVTDTAEILSRLGGVELLQDTLGHVMPSVQLPPNINLVPKVPVPLNTTKYNSALDTNATMINSFNKFPYPTQAELSWLTAASKHPEEHIRIWFATQRLKHGISWSPEEVEEARKKMFNGTIQSVPPTITVLPAQLAPTKVTQPILQTALPCQILGQTSLVLTQVTSGSTTVSCSPITLAVAGVTNHGQKRPLVTPQAAPEPKRPHIAQVPEPPPKVANPPLTPASDRKKTKEQIAHLKASFLQSQFPDDAEVYRLIEVTGLARSEIKKWFSDHRYRCQRGIVHITSESLAKDQLAIAASRHGRTYHAYPDFAPQKFKEKTQGQVKILEDSFLKSSFPTQAELDRLRVETKLSRREIDSWFSERRKLRDSMEQAVLDSMGSGKKGQDVGAPNGALSRLDQLSGAQLTSSLPSPSPAIAKSQEQVHLLRSTFARTQWPTPQEYDQLAAKTGLVRTEIVRWFKENRCLLKTGTVKWMEQYQHQPMADDHGYDAVARKATKPMAESPKNGGDVVPQYYKDPKKLCEEDLEKLVTRVKVGSEPAKDCLPAKPSEATSDRSEGSSRDGQGSDENEESSVVDYVEVTVGEEDAISDRSDSWSQAAAEGVSELAESDSDCVPAEAGQA

SEQ ID NO: 308049 - protein, 166 aa, Artificial Sequence
  derived and/or modified sequence
MASKRKSTTPCMVRTSQVVEQDVPEEVDRAKEKGIGTPQPDVAKDSWAAELENSSKENEVIEVKSMGESQSKKLQGGYECKYCPYSTQNLNEFTEHVDMQHPNVILNPLYVCAECNFTTKKYDSLSDHNSKFHPGEANFKLKLIKRNNQTVLEQSIETTNHVVSIT

SEQ ID NO: 308050 - DNA, 4373 bp, Artificial Sequence
  derived and/or modified sequence
ttttggcgtagattccccactgatcgaggcattttttttccctttttttttcctttttttttttcttttaaaaattttggccatcgttctccgtacgggggctttttctgtctgtctgtctggctggcaggctggctttccccctctttcccacggagcccgagccgggcgcccggtggggagtggggagtgggtggggggagccagcagagttccattttggaacgcccgtgccgcgtctccgcgttcccagcccgggtccccgcgttcacagccccagcgcaggtctggatgtaccgactgcttttggaataaaaagattcccaggatgtgagcaacacgggaccgatatgatgcttcctggtgtgtttagtggttggtgccattccaattttctgtgctgaaatcattctgaaaactcaaacagtagacttcagcacacaaggaaagccaaagccatttgagggggaataaagccaaaagcctttcaccttattcgttccaagaatctcaccgccccctccttatccccctccaaaaataagccattgcacacagacaggcagcatggctagcaaacgaaaatctacaactccatgcatggttcggacatcacaagtagtagaacaagatgtgcccgaggaagtagacagggccaaagagaaaggaatcggcacaccacagcctgacgtggccaaggacagttgggcagcagaacttgaaaactcttccaaagaaaacgaagtgatagaggtgaaatctatgggggaaagccagtccaaaaaactccaaggtggttatgagtgcaaatactgcccctactccacgcaaaacctgaacgagttcacggagcatgtcgacatgcagcatcccaacgtgattctcaaccccctctacgtgtgtgcagaatgtaacttcacaaccaaaaagtacgactccctatccgaccacaactccaagttccatcccggggaggccaacttcaagctgaagttaattaaacgcaataatcaaactgtcttggaacagtccatcgaaaccaccaaccatgtcgtgtccatcaccaccagtggccctggaactggtgacagtgattctgggatctcggtgagtaaaacccccatcatgaagcctggaaaaccaaaagcggatgccaagaaggtgcccaagaagcccgaggagatcacccccgagaaccacgtggaagggaccgcccgcctggtgacagacacagctgagatcctctcgagactcggcggggtggagctcctccaagacacattaggacacgtcatgccttctgtacagctgccaccaaatatcaaccttgtgcccaaggtccctgtcccactaaatactaccaaatacaactctgccctggatacaaatgccacgatgatcaactctttcaacaagtttccttacccgacccaggctgagttgtcctggctgacagctgcctccaaacacccagaggagcacatcagaatctggtttgccacccagcgcttaaagcatggcatcagctggtccccagaagaggtggaggaggcccggaagaagatgttcaacggcaccatccagtcagtacccccgaccatcactgtgctgcccgcccagttggcccccacaaaggtgacgcagcccatcctccagacggctctaccgtgccagatcctcggccagactagcctggtgctgactcaggtgaccagcgggtcaacaaccgtctcttgctcccccatcacacttgccgtggcaggagtcaccaaccatggccagaagagacccttggtgactccccaagctgcccccgaacccaagcgtccacacatcgctcaggtgccagagcccccacccaaggtggccaaccccccgctcacaccagccagtgaccgcaagaagacaaaggagcagatagcacatctcaaggccagctttctccagagccagttccctgacgatgccgaggtttaccggctcatcgaggtgactggccttgccaggagcgagatcaagaagtggttcagtgaccaccgatatcggtgtcaaaggggcatcgtccacatcaccagcgaatcccttgccaaagaccagttggccatcgcggcctcccgacacggtcgcacgtatcatgcgtacccagactttgccccccagaagttcaaagagaaaacacagggtcaggttaaaatcttggaagacagctttttgaaaagttcttttcctacccaagcagaactggatcggctaagggtggagaccaagctgagcaggagagagatcgactcctggttctcggagaggcggaagcttcgagacagcatggaacaagctgtcttggattccatggggtctggcaaaaaaggccaagatgtgggagcccccaatggtgctctgtctcgactcgaccagctctccggtgcccagttaacaagttctctgcccagcccttcgccagcaattgcaaaaagtcaagaacaggttcatctcctgaggagcacgtttgcaagaacccagtggcctactccccaggagtacgaccagttagcggccaagactggcctggtccgaactgagattgtgcgttggttcaaggagaacagatgcttgctgaaaacgggaaccgtgaagtggatggagcagtaccagcaccagcccatggcagatgatcacggctacgatgccgtagcaaggaaagcaacaaaacccatggccgagagcccaaagaacgggggtgatgtggttccacaatattacaaggaccccaaaaagctctgcgaagaggacttggagaagttggtgaccagggtaaaagtaggcagcgagccagcaaaagactgtttgccagcaaagccctcagaggccacctcagaccggtcagagggcagcagccgggacggccagggtagcgacgagaacgaggagtcgagcgttgtggattacgtggaggtgacggtcggggaggaggatgcgatctcagatagatcagatagctggagtcaggctgcggcagaaggtgtgtcggaactggctgaatcagactccgactgcgtccctgcagaggctggccaggcctagacagggaagtctgttagaactgctgtgctgatcaacgggacgctccgtctttgaagaaagaagagatggtctctccccagccatgggccacccttgccagtgactccaagtggaactacttagctcgcgtgtgcctggagggtgcgggaagtccagcgactctcagacgcacctcccagaggaccggtgggaattgttcatagtgccaaagtcctactactgcgttttcaatgggtccttgtacatagtttgctcctctgccctagccctcacctcttgctatactggaaccgatttgtacaatgtgggaattttgttacctttttaatcaagggcaacttccttttccagcactaccattgtaaggtttttttcaggagggagggctaaccaccttgcttttctcttttctctttttcttttttttatttttgttttattaatttggggaaaggggtgttagcattagtgccatgatatctactggattttaagtagggagactttatttttaaaggtaggttgaaatttgggagatttctcggcaggaagggctgaaatccaggcccctgtctcaacttggagagaggtgacagacggcagatcttccaaatcaaattcctttccagttcttcccctggctgcctttttgggggtccctgccttagccccacacaaggctttctgaactgccaagaggggatctggcttctcaactgctcggcctcttgggccaggctgtgcccagccagccctgggagaactgggtagcaggtggctgacttctttaagcacctttctaaataccagcagaagaggctcccgcctctgttagcatgatcagtactattgtgacattaaaacaacaacaataagatcttcctatctggagggtacagaggtgaatggctttggttttcatttctcttcttcactgccttttctcggtgtggtatttgacaagattttagctcaaagcctcaccatgaattgattttttttgtttgtgtgtgtgtttgttttgggacaattttagatacctgagtgcactttttcagttagtcctaacttttaaaagaaggaaaaccaagagacatatctggtgtacgtgttgcagtatgaactctggttgcaatccctccccgtcccacactgccccccatttgagtacaccgcacaagtcaaacgctaggaagtttgaataaaaccaatttttctaacttgttgctcatttgttgtaactcaataaagcaaagactaaacatttttataacctttaaaaaaaaaaaaaa

SEQ ID NO: 308051 - DNA, 2514 bp, Artificial Sequence
  derived and/or modified sequence
atggccagcaagagaaagagcaccaccccctgcatggtgagaaccagccaggtggtggagcaggacgtgcccgaggaggtggacagagccaaggagaagggcatcggcaccccccagcccgacgtggccaaggacagctgggccgccgagctggagaacagcagcaaggagaacgaggtgatcgaggtgaagagcatgggcgagagccagagcaagaagctgcagggcggctacgagtgcaagtactgcccctacagcacccagaacctgaacgagttcaccgagcacgtggacatgcagcaccccaacgtgatcctgaaccccctgtacgtgtgcgccgagtgcaacttcaccaccaagaagtacgacagcctgagcgaccacaacagcaagttccaccccggcgaggccaacttcaagctgaagctgatcaagagaaacaaccagaccgtgctggagcagagcatcgagaccaccaaccacgtggtgagcatcaccaccagcggccccggcaccggcgacagcgacagcggcatcagcgtgagcaagacccccatcatgaagcccggcaagcccaaggccgacgccaagaaggtgcccaagaagcccgaggagatcacccccgagaaccacgtggagggcaccgccagactggtgaccgacaccgccgagatcctgagcagactgggcggcgtggagctgctgcaggacaccctgggccacgtgatgcccagcgtgcagctgccccccaacatcaacctggtgcccaaggtgcccgtgcccctgaacaccaccaagtacaacagcgccctggacaccaacgccaccatgatcaacagcttcaacaagttcccctaccccacccaggccgagctgagctggctgaccgccgccagcaagcaccccgaggagcacatcagaatctggttcgccacccagagactgaagcacggcatcagctggagccccgaggaggtggaggaggccagaaagaagatgttcaacggcaccatccagagcgtgccccccaccatcaccgtgctgcccgcccagctggcccccaccaaggtgacccagcccatcctgcagaccgccctgccctgccagatcctgggccagaccagcctggtgctgacccaggtgaccagcggcagcaccaccgtgagctgcagccccatcaccctggccgtggccggcgtgaccaaccacggccagaagagacccctggtgaccccccaggccgcccccgagcccaagagaccccacatcgcccaggtgcccgagcccccccccaaggtggccaacccccccctgacccccgccagcgacagaaagaagaccaaggagcagatcgcccacctgaaggccagcttcctgcagagccagttccccgacgacgccgaggtgtacagactgatcgaggtgaccggcctggccagaagcgagatcaagaagtggttcagcgaccacagatacagatgccagagaggcatcgtgcacatcaccagcgagagcctggccaaggaccagctggccatcgccgccagcagacacggcagaacctaccacgcctaccccgacttcgccccccagaagttcaaggagaagacccagggccaggtgaagatcctggaggacagcttcctgaagagcagcttccccacccaggccgagctggacagactgagagtggagaccaagctgagcagaagagagatcgacagctggttcagcgagagaagaaagctgagagacagcatggagcaggccgtgctggacagcatgggcagcggcaagaagggccaggacgtgggcgcccccaacggcgccctgagcagactggaccagctgagcggcgcccagctgaccagcagcctgcccagccccagccccgccatcgccaagagccaggagcaggtgcacctgctgagaagcaccttcgccagaacccagtggcccaccccccaggagtacgaccagctggccgccaagaccggcctggtgagaaccgagatcgtgagatggttcaaggagaacagatgcctgctgaagaccggcaccgtgaagtggatggagcagtaccagcaccagcccatggccgacgaccacggctacgacgccgtggccagaaaggccaccaagcccatggccgagagccccaagaacggcggcgacgtggtgccccagtactacaaggaccccaagaagctgtgcgaggaggacctggagaagctggtgaccagagtgaaggtgggcagcgagcccgccaaggactgcctgcccgccaagcccagcgaggccaccagcgacagaagcgagggcagcagcagagacggccagggcagcgacgagaacgaggagagcagcgtggtggactacgtggaggtgaccgtgggcgaggaggacgccatcagcgacagaagcgacagctggagccaggccgccgccgagggcgtgagcgagctggccgagagcgacagcgactgcgtgcccgccgaggccggccaggcctag

SEQ ID NO: 308052 - DNA, 501 bp, Artificial Sequence
  derived and/or modified sequence
atggccagcaagagaaagagcaccaccccctgcatggtgagaaccagccaggtggtggagcaggacgtgcccgaggaggtggacagagccaaggagaagggcatcggcaccccccagcccgacgtggccaaggacagctgggccgccgagctggagaacagcagcaaggagaacgaggtgatcgaggtgaagagcatgggcgagagccagagcaagaagctgcagggcggctacgagtgcaagtactgcccctacagcacccagaacctgaacgagttcaccgagcacgtggacatgcagcaccccaacgtgatcctgaaccccctgtacgtgtgcgccgagtgcaacttcaccaccaagaagtacgacagcctgagcgaccacaacagcaagttccaccccggcgaggccaacttcaagctgaagctgatcaagagaaacaaccagaccgtgctggagcagagcatcgagaccaccaaccacgtggtgagcatcacctag

SEQ ID NO: 308053 - DNA, 2514 bp, Artificial Sequence
  derived and/or modified sequence
atggctagcaagcggaagtccactactccttgtatggtgagaacctcacaggtggtggaacaggatgtcccggaagaagtggatcgcgcgaaggagaagggcataggcacaccacagcccgacgtcgccaaggacagctgggcagccgaattagaaaactcttcgaaagaaaatgaagtgatcgaggtgaaaagtatgggtgagtcccagagcaagaagctgcagggcggctacgaatgcaagtactgcccatattctacgcagaatctgaatgagtttaccgagcacgtagacatgcagcaccccaacgtcatcctgaatcctctgtatgtctgtgccgaatgcaacttcaccacaaaaaagtatgatagcctgagcgaccacaactcgaagttccaccccggtgaggccaacttcaagctgaagctgattaaacgcaacaaccaaactgttctcgagcagtctattgaaactactaaccacgtggtctcaattactacaagcggacccggtacaggagactccgactcaggtatatctgtgagcaagacgccgataatgaagccgggcaagccaaaggctgacgctaaaaaagttccaaagaaacccgaagagatcacacccgagaaccacgtcgaggggactgcaagactcgtgaccgacacagcagagattctgtcccgcttggggggcgtggagctacttcaggacactctcggtcacgttatgccgtcagtccagttgcctcccaatatcaatctggttcctaaagttcccgtcccattaaacaccaccaagtacaatagtgcgctggatactaatgccactatgatcaactcgtttaacaagtttccgtatccgactcaagccgagctttcctggctcacagccgccagcaagcaccctgaggaacacataaggatctggtttgctactcagaggttgaagcacggcatttcttggagccccgaggaggtcgaggaagccagaaaaaaaatgttcaatggtacaatccagagcgtgcccccaacaattactgtgctccctgcccagctggcacctacgaaggtcactcaaccgatcctgcagacagctttgccctgccagatcctgggtcagacatcgcttgtcctcacccaggttacctcaggctccacgaccgtgtcctgctctccaattacacttgccgtagccggggtgacgaatcatggacagaagaggccattggtgacacctcaagccgcccctgagccaaaacgacctcacattgcccaggttcctgagcctccacccaaggtcgcaaaccctcctctgacaccagctagcgataggaagaaaaccaaggagcagatcgcacatctgaaagcgtcatttttgcagagccagtttcccgacgacgccgaggtttaccgcttaatcgaggtcactggcctcgcaaggagtgagatcaaaaagtggttcagcgatcacagatatcgctgtcaacgggggatcgtgcacatcacatcagaaagcttagctaaggatcagctggcaatcgctgcaagcagacacgggcgtacataccatgcctacccagattttgcacctcagaaattcaaggaaaaaactcaggggcaggtgaagatattggaggattctttcctgaagtcttctttccctacgcaggcagagctggaccgtctgagagtggagaccaaactctctaggagagaaatcgattcctggttctcagagcggagaaagttgcgtgattcaatggaacaagcagtcttggactccatgggttccggcaagaaagggcaagacgtcggggctccaaatggcgctctgtccaggctggaccagttatcaggggcacagctgacatctagtcttccatccccaagccccgctattgctaaatcgcaagagcaggtgcatctgctgcggtcaacattcgcccgaacccagtggccaactcctcaggagtatgaccagttggctgcgaaaactggactggtgcgcaccgagatcgtccgctggttcaaggagaataggtgtctcctgaaaaccggcactgtcaagtggatggagcagtaccaacatcagcctatggcagacgatcatggttatgacgccgttgccaggaaagccacaaagccaatggccgagtcacccaaaaacggtggggacgtggtgccccaatactacaaagaccccaagaagctttgcgaggaggaccttgaaaaattggtgacaagggtgaaggtaggctctgagccagctaaagactgcctgccggccaaaccctctgaggctactagtgacaggtcagagggctcttcacgggacggccagggaagcgacgagaacgaggagagcagcgtagtcgactatgtcgaagtcacagtgggtgaggaagacgcaatcagtgatcgtagcgactcctggagtcaggctgccgccgaaggcgtgtctgaactcgccgagtcagacagcgattgcgtaccagccgaggctggtcaggcttag

SEQ ID NO: 308054 - DNA, 501 bp, Artificial Sequence
  derived and/or modified sequence
atggcatccaagcggaaatcaaccaccccctgtatggtccgcacatcacaggtcgttgagcaagatgtgcctgaggaagtcgaccgcgccaaggagaagggcatcggaaccccccaaccagacgttgccaaagactcgtgggcagctgagctcgagaattcctccaaggaaaacgaggtgatagaggtcaaaagtatgggggagtcccagagtaagaaactgcagggaggctatgaatgtaaatattgcccttactcgacgcagaacctgaatgaattcacagagcatgtggatatgcaacatcccaatgtgattctcaatcccctttacgtttgcgctgagtgtaattttactacaaaaaagtacgattcactgtcggaccataactccaagttccaccctggcgaagcaaattttaagctgaagctcattaagagaaacaaccagacagtcctggagcagtctatcgaaaccaccaatcacgtggtctctataacctag

SEQ ID NO: 308055 - DNA, 2514 bp, Artificial Sequence
  derived and/or modified sequence
atggccagcaagaggaagagcaccaccccctgcatggtgaggaccagccaggtggtggagcaggatgtgcctgaggaggtggaccgggccaaggagaagggcatcggcaccccccagccagatgtggccaaggacagctgggccgctgagctggagaacagcagcaaagaaaatgaggtgattgaggtgaagtccatgggagagagccagagcaagaagctgcagggcggctatgagtgcaagtactgcccctacagcacccagaacctgaatgagttcacagagcacgtggacatgcagcaccccaacgtcatcctgaaccccctgtatgtgtgtgccgagtgcaacttcaccaccaagaagtatgacagcctgagtgaccacaacagcaagttccaccctggagaggccaacttcaagctgaagctgatcaagaggaacaaccagacagtgctggagcagagcattgagaccaccaaccacgtggtgtccatcaccaccagcggccctggcaccggggacagcgacagcggcatctctgtgtccaagacccccatcatgaagccaggcaagcccaaggcagatgccaagaaggtgcccaagaagccagaggagatcaccccagaaaatcatgtggagggcacagcccggctggtgacagacacagctgagatcctgagccggctgggcggcgtggagctgctgcaggacaccctgggccacgtgatgcccagcgtgcagctgccccccaacatcaacctggtgcccaaggtgcctgtgcccctgaacaccaccaagtacaacagcgccctggacaccaatgccaccatgatcaacagcttcaacaagttcccctaccccacccaggccgagctgtcctggctgacagctgccagcaagcaccctgaggagcacatccgcatctggtttgccacccagaggctgaagcacggcatctcctggagccctgaggaggtggaggaggccaggaagaagatgtttaatggcaccatccagagcgtgccccccaccatcaccgtgctgcctgcccagctggcccccaccaaggtgacccagcccatcctgcagacagccctgccctgccagatcctgggccagaccagcctggtgctgacccaggtgaccagcggcagcaccaccgtgtcctgcagccccatcaccctggccgtggccggcgtgaccaaccacggccagaagaggcccctggtgaccccccaggccgcccctgagcccaagaggccccacatcgcccaggtgcctgagcccccacccaaggtggccaacccccccctgaccccagccagtgacaggaagaagaccaaggagcagatcgcccacctgaaggccagcttcctgcagagccagttcccagatgatgctgaggtgtaccgcctgattgaggtgacaggcctggcccggtctgagatcaagaagtggttcagtgaccaccgctaccgctgccagaggggcatcgtgcacatcaccagcgagagcctggccaaggaccagctggccatcgccgccagccgccacggccgcacctaccacgcctacccagactttgccccccagaagttcaaggagaagacccagggccaggtgaagatcctggaggacagcttcctgaagagcagcttccccacccaggccgagctggaccggctgcgggtggagaccaagctgagccggcgggagattgacagctggttcagcgagaggaggaagctgcgggacagcatggagcaggccgtgctggacagcatgggcagcggcaagaagggccaggatgtgggcgcccccaacggggccctgagccggctggaccagctgagcggggcccagctgaccagcagcctgcccagccccagccctgccatcgccaagagccaggagcaggtgcacctgctgcggagcacctttgcccggacccagtggcccaccccccaggagtatgaccagctggccgccaagacaggcctggtgaggacagagatcgtgcgctggttcaaggagaaccgctgcctgctgaagacaggaacagtgaagtggatggagcagtaccagcaccagcccatggctgatgaccacggctatgatgctgtggccaggaaggccaccaagcccatggccgagagccccaagaatggaggagatgtggtgccccagtactacaaggaccccaagaagctgtgtgaggaggacctggagaagctggtgaccagggtgaaggtgggcagcgagcccgccaaggactgcctgcctgccaagcccagcgaggccaccagtgacagaagtgagggcagcagcagagatggccagggcagtgatgaaaatgaggagagctctgtggtggactatgtggaggtgacagtgggggaggaggatgccatcagtgacagaagtgacagctggagccaggccgctgctgagggcgtgtctgagctggccgagagtgacagcgactgtgtgcctgctgaggccggccaggcctag

SEQ ID NO: 308056 - DNA, 501 bp, Artificial Sequence
  derived and/or modified sequence
atggccagcaagaggaagagcaccaccccctgcatggtgaggaccagccaggtggtggagcaggatgtgcctgaggaggtggaccgggccaaggagaagggcatcggcaccccccagccagatgtggccaaggacagctgggccgctgagctggagaacagcagcaaagaaaatgaggtgattgaggtgaagtccatgggagagagccagagcaagaagctgcagggcggctatgagtgcaagtactgcccctacagcacccagaacctgaatgagttcacagagcacgtggacatgcagcaccccaacgtcatcctgaaccccctgtatgtgtgtgccgagtgcaacttcaccaccaagaagtatgacagcctgagtgaccacaacagcaagttccaccctggagaggccaacttcaagctgaagctgatcaagaggaacaaccagacagtgctggagcagagcattgagaccaccaaccacgtggtgtccatcacctag

SEQ ID NO: 308057 - DNA, 2514 bp, Artificial Sequence
  derived and/or modified sequence
atggccagcaagcggaagagcaccaccccctgcatggtgcggacctctcaggtcgtagagcaggacgtacctgaagaagtggatcgcgcgaaggaaaagggaatcggaacaccacagccagacgtagcaaaggattcgtgggcagcagaacttgagaacagctccaaagagaatgaggtcatagaagtgaagagcatgggtgagtctcagagcaaaaagctgcaaggcggatacgagtgcaaatattgcccatatagcactcaaaatttgaatgaattcactgaacacgtagatatgcagcacccaaatgtcatcttaaacccactgtacgtgtgtgctgaatgcaactttacaactaagaaatatgacagtctatccgaccataatagtaaatttcacccaggggaggccaattttaaactcaagttgatcaagaggaacaatcaaaccgtgctcgaacagagcattgaaaccacgaaccacgtggtctccattactacatctggccccggtactggagatagcgacagtgggatatctgtgagcaaaactccgataatgaaaccgggaaaaccaaaagccgatgcaaagaaggtgcccaaaaaacctgaggagattaccccagaaaatcacgtagaggggacggcccgcctagtgactgacaccgctgagatacttagccggcttggcggtgttgagctgctccaggacacactaggccatgtgatgccaagcgtccagttgccacccaacatcaatcttgtgccaaaggttcctgtgcctctgaacacaaccaaatacaattctgccctggatacaaatgccacgatgatcaactcctttaataagttcccttaccctacccaagcggagctatcctggctcaccgcagccagcaagcatcctgaagagcatataagaatctggttcgccacacaaagactgaagcatggcatctcttggagcccggaggaagtagaagaggccagaaaaaaaatgttcaacgggacgatccaaagcgtgcctccgactattaccgtgctgccagctcagctggcccccaccaaagtaacacagccaatccttcagacagcacttccctgtcagatactcggccagacatcactggtcttaacacaggtgaccagtggctctaccacggtcagttgctcacccatcacccttgccgtcgcaggcgttaccaaccacgggcagaagcgcccgctggtgacgccacaggccgcacccgaaccaaaacgcccgcatattgcacaggtcccagagcccccccctaaggtggcaaacccccctctcacccccgcaagcgaccgaaagaaaacgaaagaacagatcgcccacctgaaagcttccttcttgcaatctcaattcccggatgatgccgaagtatatcgcctgatcgaagtcaccggactcgcacgttctgaaattaagaagtggttctcagaccacaggtataggtgccaacgaggcatcgtccatatcacctctgaatctcttgctaaggatcaactcgccattgcggcctctcgccacggccgaacataccacgcgtaccccgacttcgctcctcagaagttcaaagaaaagacccagggacaagtcaaaatcctggaagacagtttcctgaagagctcctttcctacacaagccgagctcgaccgcctgagagtggagactaagctgtcgcgtagagagatcgacagctggtttagtgagaggcggaagctccgggactccatggagcaggccgtgttggattcaatgggatccgggaagaagggacaagatgtgggagctccaaatggtgctctcagtcgcctggaccaactgagtggggcccagctgacatccagcctcccttccccgtctcctgcaatcgcaaagtcacaggaacaagttcatcttctgcggagtacctttgcaaggacacagtggcccacaccacaggagtatgaccaactggcggctaaaacaggactcgtccgtacggaaatcgtgaggtggtttaaggaaaaccggtgtctgctgaaaactgggaccgtgaagtggatggagcagtatcaacatcagccaatggccgacgaccacggttacgacgcggtggcccgaaaggccaccaaacctatggccgagtcccccaagaatggtggtgatgtcgttccccagtactataaggatcctaagaaactttgcgaagaagaccttgaaaaactagtcacccgggttaaggtgggatccgagccagccaaagattgcttacccgcaaagccctcagaggccacctctgacaggtccgaagggtcttcgcgggatgggcaaggctctgacgaaaacgaggaaagctctgtggtcgattatgtcgaggtcacagtcggtgaggaggatgccatctcagacaggagtgactcatggtctcaggcagcagctgagggtgtgagtgagctggccgaatcagacagtgactgtgtgcctgccgaggctggacaggcttag

SEQ ID NO: 308058 - DNA, 501 bp, Artificial Sequence
  derived and/or modified sequence
atggccagcaagcggaagagcaccaccccctgcatggtgcggacctcccaggtggtggagcaagacgtgcctgaggaggtggatcgtgcaaaggagaaggggatcggcaccccccagcccgacgttgccaaagatagctgggcagctgagctcgaaaactcatccaaggaaaatgaggtgatcgaggtgaagagcatgggggaatcacagtcgaaaaaacttcaaggcggctacgaatgcaaatactgcccatacagtacccagaacttgaatgaattcactgagcacgttgacatgcaacaccccaatgtgattcttaatccattgtatgtctgcgccgaatgtaattttaccaccaagaagtatgatagcctgtctgatcacaattccaagttccatcccggggaagcaaattttaaactgaaactgatcaagaggaacaatcaaacagtcttagagcagtccatagaaacaaccaatcatgttgtgagtatcacttag

SEQ ID NO: 308059 - DNA, 2514 bp, Artificial Sequence
  derived and/or modified sequence
atggccagcaagagaaaatccaccacgccctgcatggtcaggaccagccaagtggttgaacaggatgtcccagaagaagtggatcgtgcaaaagaaaaaggcatcggcacaccacagccagacgtagctaaagattcttgggcggctgaattggagaattccagcaaagagaacgaagtgatcgaagtcaaaagtatgggggagtcacagagcaagaaacttcagggtggctacgaatgcaagtattgtccttactctacacagaatctaaacgaattcaccgaacatgttgacatgcagcacccaaatgtgattctgaaccctctgtatgtctgcgccgaatgcaattttaccaccaagaaatatgatagcctaagcgatcacaactcaaaatttcaccccggtgaagccaacttcaagcttaagctcatcaaaaggaataatcaaacagtgctggagcagagtattgaaaccactaatcacgtggtgtcgataactacgagcggtcccggtactggcgactcggattcagggatctcagtatctaagactccgatcatgaaaccaggaaagcctaaagcagacgccaaaaaagtgcccaaaaagccggaggagattactcctgagaaccatgttgaaggaaccgcccgtctcgtcacggacaccgcagagatcctttcaaggttggggggtgtggagttactccaagatactttaggtcacgtcatgccgtcagtacaactacctccaaatatcaatctggtccccaaagtaccagtacccctgaataccactaaatacaacagcgctttagataccaacgcaaccatgatcaatagctttaataaatttccatacccgactcaggctgagctgtcctggttgaccgccgctagtaagcacccggaggaacacattcgtatatggttcgctacccagagattaaaacacgggattagctggtctcccgaggaggtcgaggaggccaggaagaagatgtttaacggcacaatacagagcgtaccgccaactattaccgtactcccagcacagttagccccaaccaaggtaacccagcctatccttcagactgctctgccctgccagatcttaggacagacctccctcgtgttgactcaggtgacatccggctccactacagtgtcatgctcccctattactcttgctgtggccggagtgaccaatcacggccaaaagaggcccctggtgactccacaggcggctcctgagcctaaacggccacatatcgcccaagtgccagaacccccaccaaaagtcgctaatccacccttgacccctgcatctgatcggaaaaagactaaggaacagattgcgcaccttaaggcttcattcctgcaatcccagtttcctgatgacgccgaggtgtatagactgatcgaggtcacggggctcgcaagaagcgaaataaaaaaatggttctcggatcacagatatcgctgccagcgcggaatcgtgcatatcacaagtgaatctcttgctaaggaccaattggctattgctgcatcccgccacggtcggacataccacgcttacccggattttgccccacaaaaattcaaagaaaagactcaaggccaggtgaaaatcctggaggactcgttccttaagagctcttttcctacgcaggccgaactggaccgtctccgcgttgagacgaaattgagccggagagagatcgactcttggttttccgaacgccgtaagctgagggactcaatggagcaagccgttctggattcaatgggttctggcaagaagggtcaggacgtgggcgctcctaatggtgctttaagcagactcgaccaattgagcggggctcagttgacttcctcgctaccaagtccttctccagccattgccaagtcacaggaacaggtgcacctgttgcgatccaccttcgcacggacacagtggcccacccctcaggaatacgatcagctggcagctaagactgggctggtgcgaactgaaatcgtgcgctggttcaaagaaaacagatgcctacttaaaactgggacagttaagtggatggagcaatatcagcatcaacccatggccgatgatcacggttatgacgctgtggccagaaaggccaccaaacccatggcggagtctccaaagaatgggggtgatgtggtgccgcaatactacaaagacccaaaaaagctgtgtgaagaggacctggaaaaactagtgaccagggtgaaggttggtagtgagcccgctaaagactgcctccccgcaaagccctcggaggctacgagcgaccggtcagaaggatcctcccgtgacggacagggatcagacgaaaatgaggagagctcagtggtagactatgtcgaggtgacagtgggcgaggaagacgccatatccgatcggagcgattcctggtctcaggcagccgctgagggtgtgtcagagctggccgaatccgattcagattgcgtgccggcagaagccggacaagcttag

SEQ ID NO: 308060 - DNA, 501 bp, Artificial Sequence
  derived and/or modified sequence
atggcctccaagagaaagtccacgacaccatgtatggtgcgaacgagtcaggtggtggaacaagacgtaccggaagaggtcgaccgcgctaaggagaagggaattggcactcctcagcccgatgtggccaaggattcttgggccgctgaattagaaaacagcagcaaggaaaatgaagtgatcgaagtcaagagcatgggagaatcacagagcaagaagctccagggcggatatgaatgcaagtactgtccatattctacccaaaatctcaacgaattcaccgaacacgtggacatgcagcatccaaatgtgattctgaaccctttatacgtatgcgccgaatgtaattttactacaaaaaagtatgattcactctccgaccataactccaaattccaccccggagaggcgaacttcaaactgaagctgatcaagagaaacaaccaaactgttctggagcagtcaattgagacaaccaatcatgtcgtctcaattacgtag

SEQ ID NO: 308061 - DNA, 4622 bp, Artificial Sequence
  derived and/or modified sequence
ccccctcctcttctcgcagaaattccaccgagtccgttactgggctcagacttttaagttaatttactgcccccctaccttggccagtaaccagcgcctttagggctagcctcccccccagctcctgcctgaaaaatgacatttcgccggtgtctccggagggggctgaatttcactttgtaactttctgcggaacccgagcccgggtggcagctcgggtggtggtatcgtatgcaaatacgcatgctgacgttacagatcatgtgggttttggcgtagattccccactgatcgaggcattttttttccctttttttttcctttttttttttcttttaaaaattttggccatcgttctccgtacgggggctttttctgtctgtctgtctggctggcaggctggctttccccctctttcccacggagcccgagccgggcgcccggtggggagtggggagtgggtggggggagccagcagagttccattttggaacgcccgtgccgcgtctccgcgttcccagcccgggtccccgcgttcacagccccagcgcaggtctggatgtaccgactgcttttggaataaaaagattcccaggatgtgagcaacacgggaccgatatgatgcttcctggtgtgtttagtggttggtgccattccaattttctgtgctgaaatcattctgaaaactcaaacagtagacttcagcacacaaggaaagccaaagccatttgagggggaataaagccaaaagcctttcaccttattcgttccaagaatctcaccgccccctccttatccccctccaaaaataagccattgcacacagacaggcagcatggctagcaaacgaaaatctacaactccatgcatggttcggacatcacaagtagtagaacaagatgtgcccgaggaagtagacagggccaaagagaaaggaatcggcacaccacagcctgacgtggccaaggacagttgggcagcagaacttgaaaactcttccaaagaaaacgaagtgatagaggtgaaatctatgggggaaagccagtccaaaaaactccaaggtggttatgagtgcaaatactgcccctactccacgcaaaacctgaacgagttcacggagcatgtcgacatgcagcatcccaacgtgattctcaaccccctctacgtgtgtgcagaatgtaacttcacaaccaaaaagtacgactccctatccgaccacaactccaagttccatcccggggaggccaacttcaagctgaagttaattaaacgcaataatcaaactgtcttggaacagtccatcgaaaccaccaaccatgtcgtgtccatcaccaccagtggccctggaactggtgacagtgattctgggatctcggtgagtaaaacccccatcatgaagcctggaaaaccaaaagcggatgccaagaaggtgcccaagaagcccgaggagatcacccccgagaaccacgtggaagggaccgcccgcctggtgacagacacagctgagatcctctcgagactcggcggggtggagctcctccaagacacattaggacacgtcatgccttctgtacagctgccaccaaatatcaaccttgtgcccaaggtccctgtcccactaaatactaccaaatacaactctgccctggatacaaatgccacgatgatcaactctttcaacaagtttccttacccgacccaggctgagttgtcctggctgacagctgcctccaaacacccagaggagcacatcagaatctggtttgccacccagcgcttaaagcatggcatcagctggtccccagaagaggtggaggaggcccggaagaagatgttcaacggcaccatccagtcagtacccccgaccatcactgtgctgcccgcccagttggcccccacaaaggtgacgcagcccatcctccagacggctctaccgtgccagatcctcggccagactagcctggtgctgactcaggtgaccagcgggtcaacaaccgtctcttgctcccccatcacacttgccgtggcaggagtcaccaaccatggccagaagagacccttggtgactccccaagctgcccccgaacccaagcgtccacacatcgctcaggtgccagagcccccacccaaggtggccaaccccccgctcacaccagccagtgaccgcaagaagacaaaggagcagatagcacatctcaaggccagctttctccagagccagttccctgacgatgccgaggtttaccggctcatcgaggtgactggccttgccaggagcgagatcaagaagtggttcagtgaccaccgatatcggtgtcaaaggggcatcgtccacatcaccagcgaatcccttgccaaagaccagttggccatcgcggcctcccgacacggtcgcacgtatcatgcgtacccagactttgccccccagaagttcaaagagaaaacacagggtcaggttaaaatcttggaagacagctttttgaaaagttcttttcctacccaagcagaactggatcggctaagggtggagaccaagctgagcaggagagagatcgactcctggttctcggagaggcggaagcttcgagacagcatggaacaagctgtcttggattccatggggtctggcaaaaaaggccaagatgtgggagcccccaatggtgctctgtctcgactcgaccagctctccggtgcccagttaacaagttctctgcccagcccttcgccagcaattgcaaaaagtcaagaacaggttcatctcctgaggagcacgtttgcaagaacccagtggcctactccccaggagtacgaccagttagcggccaagactggcctggtccgaactgagattgtgcgttggttcaaggagaacagatgcttgctgaaaacgggaaccgtgaagtggatggagcagtaccagcaccagcccatggcagatgatcacggctacgatgccgtagcaaggaaagcaacaaaacccatggccgagagcccaaagaacgggggtgatgtggttccacaatattacaaggaccccaaaaagctctgcgaagaggacttggagaagttggtgaccagggtaaaagtaggcagcgagccagcaaaagactgtttgccagcaaagccctcagaggccacctcagaccggtcagagggcagcagccgggacggccagggtagcgacgagaacgaggagtcgagcgttgtggattacgtggaggtgacggtcggggaggaggatgcgatctcagatagatcagatagctggagtcaggctgcggcagaaggtgtgtcggaactggctgaatcagactccgactgcgtccctgcagaggctggccaggcctagacagggaagtctgttagaactgctgtgctgatcaacgggacgctccgtctttgaagaaagaagagatggtctctccccagccatgggccacccttgccagtgactccaagtggaactacttagctcgcgtgtgcctggagggtgcgggaagtccagcgactctcagacgcacctcccagaggaccggtgggaattgttcatagtgccaaagtcctactactgcgttttcaatgggtccttgtacatagtttgctcctctgccctagccctcacctcttgctatactggaaccgatttgtacaatgtgggaattttgttacctttttaatcaagggcaacttccttttccagcactaccattgtaaggtttttttcaggagggagggctaaccaccttgcttttctcttttctctttttcttttttttatttttgttttattaatttggggaaaggggtgttagcattagtgccatgatatctactggattttaagtagggagactttatttttaaaggtaggttgaaatttgggagatttctcggcaggaagggctgaaatccaggcccctgtctcaacttggagagaggtgacagacggcagatcttccaaatcaaattcctttccagttcttcccctggctgcctttttgggggtccctgccttagccccacacaaggctttctgaactgccaagaggggatctggcttctcaactgctcggcctcttgggccaggctgtgcccagccagccctgggagaactgggtagcaggtggctgacttctttaagcacctttctaaataccagcagaagaggctcccgcctctgttagcatgatcagtactattgtgacattaaaacaacaacaataagatcttcctatctggagggtacagaggtgaatggctttggttttcatttctcttcttcactgccttttctcggtgtggtatttgacaagattttagctcaaagcctcaccatgaattgattttttttgtttgtgtgtgtgtttgttttgggacaattttagatacctgagtgcactttttcagttagtcctaacttttaaaagaaggaaaaccaagagacatatctggtgtacgtgttgcagtatgaactctggttgcaatccctccccgtcccacactgccccccatttgagtacaccgcacaagtcaaacgctaggaagtttgaataaaaccaatttttctaacttgttgctcatttgttgtaactcaataaagcaaagactaaacatttttataa

SEQ ID NO: 308062 - DNA, 873 bp, Artificial Sequence
  derived and/or modified sequence
cccagtcccccattgactccatcctgctagaaaagagatggacacccaattgctctgccctgcttttgatactgagtttctgtcccctgtaggtctggatgtaccgactgcttttggaataaaaagattcccaggatgtgagcaacacgggaccgatatgatgcttcctggtgtgtttagtggttggtgccattccaattttctgtgctgaaatcattctgaaaactcaaacagtagacttcagcacacaaggaaagccaaagccatttgagggggaataaagccaaaagcctttcaccttattcgttccaagaatctcaccgccccctccttatccccctccaaaaataagccattgcacacagacaggcagcatggctagcaaacgaaaatctacaactccatgcatggttcggacatcacaagtagtagaacaagatgtgcccgaggaagtagacagggccaaagagaaaggaatcggcacaccacagcctgacgtggccaaggacagttgggcagcagaacttgaaaactcttccaaagaaaacgaagtgatagaggtgaaatctatgggggaaagccagtccaaaaaactccaaggtggttatgagtgcaaatactgcccctactccacgcaaaacctgaacgagttcacggagcatgtcgacatgcagcatcccaacgtgattctcaaccccctctacgtgtgtgcagaatgtaacttcacaaccaaaaagtacgactccctatccgaccacaactccaagttccatcccggggaggccaacttcaagctgaagttaattaaacgcaataatcaaactgtcttggaacagtccatcgaaaccaccaaccatgtcgtgtccatcacca

SEQ ID NO: 308063 - DNA, 5247 bp, Artificial Sequence
  derived and/or modified sequence
acagatgaggaccagtaaacacaatagaaagtttatttaatgtggagtatgctgctgctgttccgctttgcgtcctcgctacaaacgcctggtggacaacatattccctgaagatccaaaagatggccttgtgaaaactgatatggagaaattgacattttatgcagtatctgctccagagaaactggatcgaattggttcttacctggcagaaaggttgagcagggatgttgtcagacatcgttctgggtatgttttgattgctatggaggcactggaccaacttctcatggcttgccattctcaaagcattaagccatttgtagaaagctttcttcatatggtggcaaagctgctggaatcgggggaaccaaagcttcaagttcttggaacaaattcttttgtcaaatttgcaaatattgaagaagacacaccatcctatcacagacgttatgacttttttgtgtctcgattcagtgccatgtgccattcctgtcatagtgatccagaaatacgaacagagatacgaattgctggaattagaggtattcaaggtgtggttcgcaaaacagtcaacgatgaacttcgggccaccatttgggaacctcagcatatggataagattgttccatccctcctgtttaacatgcaaaagatagaagaagttgacagtcgcataggccctccttcttctccttctgcaactgacaaagaagagaatcctgctgtgctggctgaaaactgtttcagagaactgctgggtcgagcaacttttgggaatatgaataatgctgttagaccagtttttgcgcatttagatcatcacaaactgtgggatcccaatgaatttgcagttcactgctttaaaattataatgtattccattcaggctcagtattctcaccatgtgatccaggagattctaggacaccttgatgctcgtaaaaaagatgctccccgggttcgagcaggtattattcaggttctgttagaggctgttgccattgctgctaaaggttccataggtccgacagtgctggaagtcttcaatacccttttgaaacatctgcgtctcagcgttgaattcgaagcaaatgatttacaggggggatctgtaggcagtgtcaacttaaatacaagttccaaagacaatgatgagaagattgtgcagaatgctatcatccaaacaataggattttttggaagtaacctaccagattatcagaggtcagaaatcatgatgttcattatggggaaagtacctgtctttggaacatctacccatactttggatatcagtcaactaggggatttgggaaccaggagaattcagataatgttgctgagatctttgcttatggtgacctctggatataaagcgaagacgattgttactgcactgccagggtctttcctggatcctttgttatcaccatctctcatggaggactacgaactgagacagttggtcttggaagtaatgcataatctcatggatcgtcatgacaatagggcaaagcttcgagggatcagaataataccggatgtagctgacctaaagataaaaagagaaaaaatttgcagacaagacacaagtttcatgaaaaagaatgggcaacagctgtatcggcacatatatttgggttgtaaagaggaagacaacgttcagaaaaactatgaactactttatacttctcttgctcttataactattgaactggctaatgaagaagtagttattgatctcattcgactggccattgctttacaggacagtgcaattatcaatgaggataatttgccaatgttccatcgttgtggaatcatggcactggttgcagcatacctcaactttgtaagtcagatgatagctgtccctgcattttgccagcatgttagcaaggttattgaaattcgaactatggaagccccttattttctaccagagcatatcttcagagataagtgcatgcttccaaaatctttagagaagcatgaaaaagatttgtactttctgaccaacaagattgcagagtcgctaggtggaagtggatatagtgttgagagattgtcagttccgtatgtaccacaagtaacagatgaagatcgactttctagaagaaaaagcattgtggacaccgtatccattcaggtggatattttatccaacaatgttccttctgatgatgtggttagtaacactgaagaaatcacttttgaagcattgaagaaagcaattgataccagtggaatggaagaacaggaaaaggaaaagaggcgtcttgtgatagagaaatttcagaaagcaccttttgaagaaatagcagcacagtgtgaatccaaagcaaatttgcttcatgatagacttgcccaaatattggaactcaccatacgtcctcctcccagtccatcaggaacactgaccattacttctgggcatgcccaataccaatctgtcccagtctatgagatgaagtttccagatctgtgtgtgtactgatcggcgcatgaagacctcaggatatgatttgtaaagcctaaaaattaaggccaagctgagctttcagggtttacttaatgtgtattaacatacttcttgaaaataatgatggaacatatctttaaccaaatgtttggcataccatattagaagttttggagctatatataatttcgagtactttcaaagatagatttatgccatgttaatttgctttgaggttcctgttgcctttttaagttgaacatgttttggtttcactttattccactgttaagtagtatgttttaaacttttcacaaatgtaatgttttttaaaaagtaagccttcagaggattgaaactgtataaattgtttatctcttaaacatctacacagccgcttagatgtagaatttttgttgttgttttctgcaaaggcagatacatttaaatatattcctagtcctgggactgcaaaactgttcggtggctttttgtccccatgctttagataagctgggataggcaccttgctattcagttactataataatatgtgataggcattcctcatcttcttcacaataataggacatctgttgaatagcattcctcgaatataaccctaaaaacgccatactttaaattgtctggttcttgtaatattgtgtttcctgccaagagtttgaccattctgcttgagaagtgtagagcttactcttggagtaccaaactgtgcaatatttttacatcataagatgtattagtttacaggctgtgctttgaaattatagtagtattttgctgtggctccattaattaaatgagatatatatttagtgcagaaaaaagacatttaaaacagctattagttcacctgtgaagagtctgtacattttgatttctattaagagcacatttatttacatttgtatattattttaaatcctcatagtcaaaaaattctccagatggacttttaatttgtaagatttgaactgtgacttgtatacatctgtttagaatcaattatatttgaaaagctgcctgtgttttaacagtcaagtgtgctaaagtttgtcaatttaagctgcttttgatttcagctaccaagatcacaggtgcactctacacataacactgacagacccataacattacatacatcttagtgaattctatcacatggtaaaatgaacagctttctttgtaactcataaaattctcttaggacatttttataaagtcacctgtttatagttctatcttttcagattccatttctttttacataaaacagcatacatatcaaaaactgtagcctagaatacagtttaatttttggcttttgtttttgtttaaaaaattgcagtgaagaatgggatgtttgtgtttatggctatttgggcacctttagtagaaacagacaaaagtaaggaaacgataataggacaagcatacttgaaaatttctgaatacttaaacaaaagcgcaacatcttgaaaaccagtctagtcattgaaacctatgaaatgacactgaaagatcctgggctgcttcttaaataagtagatcagcaagacttgtttcagagtgacagtggagtcgttaccgctggaggactaaagggccctgtggcagctgtcactggaactttgcctcttgatcaggaaaaatgcttcaccagtccgtaaagccaagttgtatttttttaattgcccttttttccttctgtatttttaaagaaggatgttaatttttgactatatattttaaaaaaatctaagcagggggacatgcaaaaacaatcatcatccacttggatgtcattttatagattaacactgtgtgcttttgtatggaaaaaatatatataatttaatagtataaaaaataaaatatatattcatttgcacttacgtgaaacacaaactttgctctacaaaatttcgtgtttcttagtgattttaaaatgcatgtattgcatgtaaaggaaaaccattacaattaatgtttatcacacctttatcttggtctttgttgatttgggttttgttggggtttttgttactgtttttaaattacagtaggcttctatatatcctggatttctgaactggtcttgttgacaaggattcccaagaaatggatcttttcactggctgactctcccatatctgcaagagattctgcaggaactgggtgtgcacacggtgttgtagccagttcaggtactgaatatttaggatttggtgaagttcactgtattgctatatttttgtagataaataaaactcaataaattgttaatcattctctttttgctgtatagaattgcttatatcactctttctttcatgacattggttaacatttaaatgttcctcctgtacttgtgttgtctgtgaccgcttatagagttttattgttattggtgtttacctgaatacctatgcgtacacacacacatatttccttaatacttctgaactcattatcttttagaataataatactactacactttaccagcaattaacttctccctacccaaaatgtttttcttcctgtctgaaaatggaactaatttgtcttattcgtgcttatatctgtattaaatgcaataaagttagtttttgaaatgtaaaaattcactgtgcaattcatatgtcagcaataaaacatagattatttgtatataagttcatttttatagctattgttacatttaattaaatttattcaatatttgcttaaattaaaaa

SEQ ID NO: 308064 - DNA, 3960 bp, Artificial Sequence
  derived and/or modified sequence
gtaaaagttcgcgcctctgcggcgggcggccgtgcgtctctgccctgcgggcgcgggctggtggctggcaggtcgtgtcctgggacttcgggcgggtccggctcacgccgccaggacgctcagccgagcggggattcgggtggtgtctggccctggtggcgcgcggagtcctccctgggaggggccgccagtcacttcccagcgcggaagctggccgcttgaagatgccattgaagatgaggaagaagaatgtccatcagaggaaacagacatcatctccaaaggagactttccattggaggaaagcttttccacagaatttgggcctgaaaatctgagctgcgaagaagtggaatacttttgtaacaaaggtgatgatgaaggaatccaggagacagcagaatcagatggggacacacagtcagagaaaccggggcaacctggagttgagacagacgactgggatggaccaggagagctggaggtgtttcagaaagatggggaacgaaaaattcagagtcgacagcaacttccagtgggaacaacctgggggccgtttcctgggaagatggacttgaataataattctttgaagacaaaggctcaggtcccaatggtgctgactgctggtcccaagtggttgctggatgtgacttggcaaggagtggaagacaacaaaaacaactgcattgtgtacagcaaagggggtcagctttggtgtacaactacgaaggccatctctgagggtgaagagctaattgcctttgtggtggattttgactcaaggctacaagctgccagtcagatgactctcacagaagggatgtaccctgcacgcctgctggactcaattcagctgcttcctcagcaagctgccatggcttctattttgcccacagctattgtcaataaggatatattcccttgcaagtcctgtggcatctggtatcggagtgagcggaatctgcaggcccatttgatgtactactgcagtgggaggcaaagagaagctgctccggtgtcagaggaaaatgaagacagtgcccatcagatttccagcctgtgccccttcccacagtgcaccaagagcttttcaaatgctcgagctctagaaatgcacctgaattcacacagtggagtgaaaatggaagaattcctgccccctggtgctagtctaaaatgcaccgtctgtagctacactgctgattccgtgatcaactttcaccaacacctgttctcccatctcactcaagctgccttccgatgtaatcactgccatttcggcttccagactcagagggagttattgcagcaccaggagctccatgtccctagcggcaaacttcccagagaaagtgacatggaacactctccaagtgcaactgaagacagcttacagccagccacagacttattgaccagaagcgaacttccccagagccaaaaggccatgcagactaaagatgcgagctctgacacagagctggacaagtgtgagaaaaagactcagctctttctcacgaaccagagaccagagatacagcctacaacaaataaacaaagcttttcttacacaaaaataaagtctgagccctctagcccaagacttgcctcatctccagttcagcctaatattgggccttctttccctgtgggccctttcctatctcagttttctttcccccaagatatcaccatggtccctcaagcttcagagatcttagctaagatgtctgaactggtgcatcggcgactgaggcatggcagtagtagctaccctcccgtcatttacagccctttgatgcccaagggggctacttgttttgagtgtaacataacattcaataatttggataattatctagtgcacaaaaagcattattgcagcagccgatggcagcagatggctaagtccccagagttccctagtgtgtcagaaaagatgcctgaagctttgagtcccaacactggccaaacctccataaaccttctcaacccagctgctcattctgctgatcctgagaatccacttcttcaaacatcttgcatcaattcttccactgtcttagatttaattgggccaaatgggaagggccatgacaaggacttttccactcaaactaagaagctctccacctccagtaacaatgatgacaaaattaatggaaaacctgttgatgtgaaaaatcccagtgtccccttagtggatggggaaagtgacccaaataagactacctgtgaagcttgcaacattaccttcagccggcacgaaacatacatggtccacaaacagtattactgtgctacacgccacgaccctccactgaagaggtctgcttccaacaaagtgcctgccatgcagagaaccatgcgcacacgcaagcgcagaaagatgtatgagatgtgcctacctgagcaggaacaaaggcctccactggttcagcagagatttcttgacgtagccaacctcaataatccttgtacctccactcaagaacccacagaagggctaggagagtgctaccacccaagatgtgatatctttccaggaattgtctctaaacacttggaaacttctctgacgatcaacaagtgtgttccagtttccaaatgtgatactactcattccagtgtttcctgcctagagatggacgtgcccatagatctcagcaaaaagtgtttatctcagtctgagcggacgaccacgtctcccaaaaggctgctggactatcacgagtgcactgtgtgcaagatcagtttcaataaggtagaaaactatctggcccacaagcagaatttctgcccggttactgcacatcagcgtaatgacctgggtcaactggacggcaaagtgtttccgaatccagaaagcgaacgaaacagccctgatgtcagctacgaaagaagcataataaaatgtgagaaaaatgggaatttgaagcagccttcccccaatggaaacttattttcatcccacctagcaaccctgcaaggcttgaaggtctttagtgaagctgctcagctcattgctacaaaagaagaaaacagacatttgtttcttccacaatgcctttaccctggagcaataaagaaagcaaaaggagccgaccagctttctccatattatggaatcaagccaagtgattatatttctggttctcttgtcatccataacactgacatcgagcaaagcagaaatgcagaaaatgaatctcctaaaggccaggcttcctcaaatgggtgtgctgcgctgaagaaagattctctgccattgttgcccaaaaatcgaggaatggtaatagtgaatggtggactgaaacaagatgagagacctgctgccaacccacagcaagagaacatttcccagaatcctcagcacgaagacgaccacaaatctccctcgtggatctctgagaacccattagctgccaatgagaatgtctcaccaggaattccctcagcagaggaacagttgtctagtatagcaaaaggtgtgaatggttccagccaggctccaaccagtgggaaatattgccggctatgtgatatccagttcaacaacctttcaaactttataactcacaagaagttttattgctcatcacatgcagcagaacatgtcaaatgaactaactaaacatcagtcacctttggtatcagtgtttagtatgttgttctaaccagtccagaaaaaaaaataagctgtttgaattacatctgggcaatcaggagataattcattatggctgagttgaagacttaaggtgtaatttcattacagtccattagtaaagtgtattattggtgccattttcaaaaaaattaatttattttaccagcagtattcatagctgtggttatgttattttttatttaaaaactttatattaaagtcatttgtaatgttattgtatagttattgtgtagcacatatggtttgcactgtatagtagcttttaa

SEQ ID NO: 308065 - protein, 882 aa, Artificial Sequence [sequence omitted]

SEQ ID NO: 308066 - protein, 1019 aa, Artificial Sequence
  derived and/or modified sequence
MDLNNNSLKTKAQVPMVLTAGPKWLLDVTWQGVEDNKNNCIVYSKGGQLWCTTTKAISEGEELIAFVVDFDSRLQAASQMTLTEGMYPARLLDSIQLLPQQAAMASILPTAIVNKDIFPCKSCGIWYRSERNLQAHLMYYCSGRQREAAPVSEENEDSAHQISSLCPFPQCTKSFSNARALEMHLNSHSGVKMEEFLPPGASLKCTVCSYTADSVINFHQHLFSHLTQAAFRCNHCHFGFQTQRELLQHQELHVPSGKLPRESDMEHSPSATEDSLQPATDLLTRSELPQSQKAMQTKDASSDTELDKCEKKTQLFLTNQRPEIQPTTNKQSFSYTKIKSEPSSPRLASSPVQPNIGPSFPVGPFLSQFSFPQDITMVPQASEILAKMSELVHRRLRHGSSSYPPVIYSPLMPKGATCFECNITFNNLDNYLVHKKHYCSSRWQQMAKSPEFPSVSEKMPEALSPNTGQTSINLLNPAAHSADPENPLLQTSCINSSTVLDLIGPNGKGHDKDFSTQTKKLSTSSNNDDKINGKPVDVKNPSVPLVDGESDPNKTTCEACNITFSRHETYMVHKQYYCATRHDPPLKRSASNKVPAMQRTMRTRKRRKMYEMCLPEQEQRPPLVQQRFLDVANLNNPCTSTQEPTEGLGECYHPRCDIFPGIVSKHLETSLTINKCVPVSKCDTTHSSVSCLEMDVPIDLSKKCLSQSERTTTSPKRLLDYHECTVCKISFNKVENYLAHKQNFCPVTAHQRNDLGQLDGKVFPNPESERNSPDVSYERSIIKCEKNGNLKQPSPNGNLFSSHLATLQGLKVFSEAAQLIATKEENRHLFLPQCLYPGAIKKAKGADQLSPYYGIKPSDYISGSLVIHNTDIEQSRNAENESPKGQASSNGCAALKKDSLPLLPKNRGMVIVNGGLKQDERPAANPQQENISQNPQHEDDHKSPSWISENPLAANENVSPGIPSAEEQLSSIAKGVNGSSQAPTSGKYCRLCDIQFNNLSNFITHKKFYCSSHAAEHVK

SEQ ID NO: 308067 - DNA, 3060 bp, Artificial Sequence
  derived and/or modified sequence
atggacctgaacaacaacagcctgaagaccaaggcccaggtgcccatggtgctgaccgccggccccaagtggctgctggacgtgacctggcagggcgtggaggacaacaagaacaactgcatcgtgtacagcaagggcggccagctgtggtgcaccaccaccaaggccatcagcgagggcgaggagctgatcgccttcgtggtggacttcgacagcagactgcaggccgccagccagatgaccctgaccgagggcatgtaccccgccagactgctggacagcatccagctgctgccccagcaggccgccatggccagcatcctgcccaccgccatcgtgaacaaggacatcttcccctgcaagagctgcggcatctggtacagaagcgagagaaacctgcaggcccacctgatgtactactgcagcggcagacagagagaggccgcccccgtgagcgaggagaacgaggacagcgcccaccagatcagcagcctgtgccccttcccccagtgcaccaagagcttcagcaacgccagagccctggagatgcacctgaacagccacagcggcgtgaagatggaggagttcctgccccccggcgccagcctgaagtgcaccgtgtgcagctacaccgccgacagcgtgatcaacttccaccagcacctgttcagccacctgacccaggccgccttcagatgcaaccactgccacttcggcttccagacccagagagagctgctgcagcaccaggagctgcacgtgcccagcggcaagctgcccagagagagcgacatggagcacagccccagcgccaccgaggacagcctgcagcccgccaccgacctgctgaccagaagcgagctgccccagagccagaaggccatgcagaccaaggacgccagcagcgacaccgagctggacaagtgcgagaagaagacccagctgttcctgaccaaccagagacccgagatccagcccaccaccaacaagcagagcttcagctacaccaagatcaagagcgagcccagcagccccagactggccagcagccccgtgcagcccaacatcggccccagcttccccgtgggccccttcctgagccagttcagcttcccccaggacatcaccatggtgccccaggccagcgagatcctggccaagatgagcgagctggtgcacagaagactgagacacggcagcagcagctacccccccgtgatctacagccccctgatgcccaagggcgccacctgcttcgagtgcaacatcaccttcaacaacctggacaactacctggtgcacaagaagcactactgcagcagcagatggcagcagatggccaagagccccgagttccccagcgtgagcgagaagatgcccgaggccctgagccccaacaccggccagaccagcatcaacctgctgaaccccgccgcccacagcgccgaccccgagaaccccctgctgcagaccagctgcatcaacagcagcaccgtgctggacctgatcggccccaacggcaagggccacgacaaggacttcagcacccagaccaagaagctgagcaccagcagcaacaacgacgacaagatcaacggcaagcccgtggacgtgaagaaccccagcgtgcccctggtggacggcgagagcgaccccaacaagaccacctgcgaggcctgcaacatcaccttcagcagacacgagacctacatggtgcacaagcagtactactgcgccaccagacacgacccccccctgaagagaagcgccagcaacaaggtgcccgccatgcagagaaccatgagaaccagaaagagaagaaagatgtacgagatgtgcctgcccgagcaggagcagagaccccccctggtgcagcagagattcctggacgtggccaacctgaacaacccctgcaccagcacccaggagcccaccgagggcctgggcgagtgctaccaccccagatgcgacatcttccccggcatcgtgagcaagcacctggagaccagcctgaccatcaacaagtgcgtgcccgtgagcaagtgcgacaccacccacagcagcgtgagctgcctggagatggacgtgcccatcgacctgagcaagaagtgcctgagccagagcgagagaaccaccaccagccccaagagactgctggactaccacgagtgcaccgtgtgcaagatcagcttcaacaaggtggagaactacctggcccacaagcagaacttctgccccgtgaccgcccaccagagaaacgacctgggccagctggacggcaaggtgttccccaaccccgagagcgagagaaacagccccgacgtgagctacgagagaagcatcatcaagtgcgagaagaacggcaacctgaagcagcccagccccaacggcaacctgttcagcagccacctggccaccctgcagggcctgaaggtgttcagcgaggccgcccagctgatcgccaccaaggaggagaacagacacctgttcctgccccagtgcctgtaccccggcgccatcaagaaggccaagggcgccgaccagctgagcccctactacggcatcaagcccagcgactacatcagcggcagcctggtgatccacaacaccgacatcgagcagagcagaaacgccgagaacgagagccccaagggccaggccagcagcaacggctgcgccgccctgaagaaggacagcctgcccctgctgcccaagaacagaggcatggtgatcgtgaacggcggcctgaagcaggacgagagacccgccgccaacccccagcaggagaacatcagccagaacccccagcacgaggacgaccacaagagccccagctggatcagcgagaaccccctggccgccaacgagaacgtgagccccggcatccccagcgccgaggagcagctgagcagcatcgccaagggcgtgaacggcagcagccaggcccccaccagcggcaagtactgcagactgtgcgacatccagttcaacaacctgagcaacttcatcacccacaagaagttctactgcagcagccacgccgccgagcacgtgaagtag

SEQ ID NO: 308068 - DNA, 3060 bp, Artificial Sequence
  derived and/or modified sequence
atggacctgaacaataactctctgaaaacaaaggcccaggtcccaatggtactcacggcaggcccaaaatggctcttggatgtaacttggcagggtgtggaggacaataagaacaactgtatcgtgtatagtaaaggcggccagctgtggtgcacgacaaccaaggccattagcgaaggagaagagctgattgcgtttgtggttgacttcgatagccgcctgcaggccgcatctcagatgactttgaccgaggggatgtacccagctcggctgttagactctattcagttactccctcagcaagcggccatggccagcatccttccaactgccattgtgaacaaggatatcttcccttgtaaatcatgtggcatctggtaccgctcggaacgcaacctgcaggcacaccttatgtattactgctcaggaagacagcgagaagctgcgcccgtttcggaagagaatgaggactcggcacaccagatcagctcactctgtccgttccctcagtgcaccaaatccttttccaacgcccgggctctggagatgcatctgaatagccacagtggcgtgaaaatggaggagtttctccccccgggtgcctccttgaaatgcaccgtgtgctcctatacagctgattcagtcatcaactttcaccaacacttgttttctcacttaactcaagctgcattccgctgcaatcattgtcattttggctttcagactcaacgggagctgctgcagcatcaggagcttcacgtgccgtctgggaagctgccccgggaatcagatatggaacactcgccaagtgcaactgaggatagtctgcagccagccactgaccttctcacaaggagcgaactgccacagagccaaaaagctatgcagaccaaggacgcttcgtcagacacagaactggataaatgtgagaaaaagacccagctgtttctgaccaaccagaggccggagatccagccgacaactaataagcagtctttttcttatacaaagatcaagtccgagccttcttcaccccggctcgcatcctcgcccgttcaaccaaatattggccctagtttccccgtcgggcccttcctctctcagtttagctttcctcaggatattacgatggtgcctcaggcaagtgagatcctggccaagatgtcggagctggttcatcggcggttgagacatggaagctcaagctaccccccagtgatttattctccactgatgcccaaaggcgccacctgttttgaatgtaacattacctttaataacctggacaattacctggtgcacaaaaagcactattgttccagccgatggcagcagatggcaaaatcacccgagttcccaagtgtgtccgagaaaatgcccgaagccctgtcaccaaacacgggtcagacaagcattaacctcctcaaccctgcagcccactcagccgatccagagaatccgctcctacagacgagctgtattaattcctctactgtccttgaccttataggcccgaacggtaaaggacacgacaaagatttcagcacccaaacaaagaaactcagtacttcctccaacaatgatgataaaatcaacggtaaacctgtggacgtgaagaatccttctgttccactcgttgacggcgagtctgaccccaacaaaactacttgcgaagcttgtaatataacattctcccgccacgaaacttatatggtgcataagcagtactactgtgctacaaggcatgacccccctttaaagaggtcagcttcaaataaggtccccgcgatgcagcgcaccatgcggaccaggaagaggcgtaagatgtacgagatgtgtctgcccgagcaggagcagaggccacctctagtccagcagcgattccttgacgtggccaacctcaacaatccatgtacctctacccaggaaccaactgaagggctcggggagtgttatcatcctcgttgcgacatttttcctggaatcgtttccaaacacctggaaacttccctcaccataaacaagtgcgtgcctgtaagcaagtgtgacaccacccactcttctgtgagctgtctggagatggacgtgccaattgacctcagcaagaagtgtttgagccagtctgagcggaccactacctccccaaagaggctcctggattaccacgaatgtacagtttgcaagatatcatttaacaaggttgagaactacctggcacacaagcaaaatttctgccccgtgaccgcacaccagcggaacgacctagggcagctagatgggaaggtgttcccaaatcctgagtcggagagaaactcaccagatgtgagctacgaacgttccatcattaagtgcgaaaagaatggaaacctcaagcaacccagccctaacgggaatctgttctcctcccacttggccacattacaggggctcaaagttttctcagaagcagcccagttaattgcaaccaaggaagaaaacagacacttgtttttgcctcagtgcctctatcctggtgcaattaagaaggcaaaaggggcagatcaactctcgccctattatggcatcaaaccatctgactacatctcaggttctcttgtgatccacaatacagatattgagcagtcgagaaatgctgagaatgagagtccgaagggacaggccagcagtaatgggtgtgctgcgctgaagaaggactccctgccactgctcccaaagaaccgcggcatggtgattgttaatggcgggctaaagcaggatgaaagacccgcggcgaatcctcagcaggagaatatcagtcagaaccctcagcatgaagacgaccacaagagcccttcttggatttctgagaaccctctggctgccaacgagaatgtttccccaggcatcccctcggcggaagaacagttgagctcaatcgcaaaaggagtcaacggatcgagtcaggcacctacttctgggaagtactgcaggctgtgcgacatccagttcaacaacctgtcaaacttcatcactcacaaaaagttctattgctctagtcatgcggcagaacatgtgaagtag

SEQ ID NO: 308069 - DNA, 3060 bp, Artificial Sequence
  derived and/or modified sequence
atggacctcaataataactctctaaagacaaaggcacaggtccccatggttctgacagcgggcccaaagtggctgctggatgtgacttggcagggcgtggaagacaataagaataattgtattgtttattcaaagggcggccagttgtggtgtaccaccacgaaagccatctcagaaggcgaggaactgatcgcttttgtggtggactttgattcccgactacaggcagcatcacagatgaccctgaccgagggaatgtaccccgcaaggctgttggattctatccagttacttccgcagcaggcagcaatggccagtatccttcccaccgccattgtaaacaaagacatttttccatgtaagtcttgtggcatttggtacaggtctgagcggaatctgcaggctcatcttatgtactactgttcagggagacagcgcgaggccgcacccgttagtgaagaaaacgaggattccgcacatcagattagctccctgtgccccttccctcagtgcacaaagtctttcagcaatgctcgggcactcgaaatgcacttgaattcacattcaggagtgaaaatggaggaattcttgccacccggagcaagtctcaagtgtaccgtctgcagctatacggccgactccgtcattaactttcaccaacatctgttcagccacttgactcaggccgcttttcgatgtaaccattgtcattttggctttcagacccagcgcgagctgttacagcaccaggaactgcacgtgccttcaggtaaactgccgcgggaatctgacatggagcattcaccctcagcaacggaggacagtctgcagcccgcaactgacctgcttacacgctctgagctgcctcagtcgcagaaggccatgcagactaaagatgccagctccgacacagagctggataagtgtgaaaagaaaactcagctgtttttaactaaccaacgcccggagattcaacctacaacaaataagcagagcttttcatatacaaagataaagtccgagccctcctcaccaagattggcaagctcccccgttcaacccaatataggtccaagtttcccagtgggaccctttctgtcacaattttcgttccctcaggatatcactatggtgccgcaggcgtcagaaattttggcaaagatgtccgaactcgtccacagacggctgaggcacgggtcatcgtcatacccacccgtgatctactctccactgatgcccaagggtgctacctgttttgaatgcaacatcacattcaataaccttgataactacttggtgcataaaaagcattattgtagttcccggtggcaacagatggccaagtcgccagaattcccttccgtcagcgaaaagatgccggaggctctgagtcccaacaccggacagacgtccatcaatctgttaaatcctgctgcacacagcgctgaccctgaaaatcctctattgcaaacctcttgcatcaacagcagcaccgtcctggacctgatcggccccaatgggaaaggacatgataaagacttctccacccagacaaagaaattaagtacatcttctaacaatgatgataagataaacggaaagcctgtcgatgttaagaaccctagtgttcctctagtcgacggagagagcgacccaaataaaaccacttgcgaagcctgcaacatcaccttctcccgccatgagacgtacatggtccacaagcaatattactgcgctacccgacacgacccacccctgaaaagatccgcatcaaataaggtcccagcaatgcagagaactatgaggacccggaagcggcggaaaatgtacgagatgtgtcttcccgagcaggaacagcggccaccgctggttcagcagaggtttttggatgtggctaatctgaataatccctgcacaagtactcaggaacccacagagggcctgggcgagtgttatcacccccgttgcgacatcttccctggcattgtctccaagcacctcgagacctcgctgaccatcaacaaatgtgttccggtttcaaagtgcgataccacccactccagcgtgtcctgccttgaaatggacgtcccaattgacctctctaaaaagtgtttatcgcagagcgagagaactaccactagccccaagaggctgcttgactaccacgagtgtactgtttgcaaaatctcatttaataaagtagaaaactatctggcccataaacagaacttctgtccagtcaccgcacaccagagaaatgatctcggtcagcttgacggtaaggttttcccaaacccagagagtgagaggaattccccagacgtgtcctacgagagatcaattattaagtgcgagaaaaacgggaacctaaaacagccctcgcccaatggcaacctatttagttcgcatttggccactctgcaggggcttaaagtgttttccgaagccgcacagttgatagccacgaaagaggagaatagacatttgttcctgccacagtgcctataccccggcgcgatcaaaaaagccaagggcgctgatcagttgagcccttattatggcataaagcctagcgactatatttctggctccctggtgatacataacacagatatcgaacagtccaggaatgctgagaacgaatctccaaagggtcaagcttcaagcaacggctgcgccgccctgaaaaaagattctttaccccttctccctaaaaatcgagggatggtgatcgttaatggcggcctcaaacaggatgagaggcctgcagcaaacccgcagcaagagaatatctcgcaaaacccacagcatgaggacgatcacaagtctccatcctggataagcgaaaatcccttagcagccaacgagaacgtctcgcctgggattccctccgcggaggaacagctgtcctcaatagccaaaggggtcaacggatcgagccaagcccctacttctggcaaatattgccggctctgcgacattcagttcaacaatttatccaattttattacacacaagaagttctattgttccagtcatgcggcggaacatgttaagtag

SEQ ID NO: 308070 - DNA, 3060 bp, Artificial Sequence
  derived and/or modified sequence
atggacctgaacaacaacagcctgaagaccaaggcccaggtgcccatggtgctgacagctggccccaagtggctgctggatgtgacctggcagggcgtggaggacaacaagaacaactgcatcgtgtacagcaaaggaggccagctgtggtgcaccaccaccaaggccatcagcgagggggaggagctgattgcctttgtggtggactttgacagccggctgcaggccgccagccagatgaccctgacagagggcatgtacccagcccggctgctggacagcatccagctgctgccccagcaggccgccatggccagcatcctgcccacagccatcgtgaacaaggacatcttcccctgcaagagctgtggcatctggtacagaagtgaaagaaacctgcaggcccacctgatgtactactgcagcggccggcagcgggaggccgcccctgtgtctgaggagaatgaagacagcgcccaccagatcagcagcctgtgccccttcccccagtgcaccaagagcttcagcaatgcccgggccctggagatgcacctgaacagccacagcggcgtgaagatggaggagttcctgcccccaggggccagcctgaagtgcaccgtgtgcagctacacagctgacagcgtcatcaacttccaccagcacctgttcagccacctgacccaggccgccttccgctgcaaccactgccacttcggcttccagacccagcgggagctgctgcagcaccaggagctgcacgtgcccagcggcaagctgccccgggagagtgacatggagcacagccccagcgccacagaggacagcctgcagcctgccacagacctgctgaccaggtctgagctgccccagagccagaaggccatgcagaccaaggatgccagcagtgacacagagctggacaagtgtgagaagaagacccagctgttcctgaccaaccagaggcctgagatccagcccaccaccaacaagcagagcttctcctacaccaagatcaagtctgagcccagcagcccccggctggccagcagccctgtgcagcccaacatcggccccagcttccctgtgggccccttcctgagccagttctccttcccccaggacatcaccatggtgccccaggccagcgagatcctggccaagatgtctgagctggtgcaccggcggctgcggcacggcagcagcagctacccacctgtgatctacagccccctgatgcccaagggggccacctgctttgagtgcaacatcaccttcaacaacctggacaactacctggtgcacaagaagcactactgcagcagccgctggcagcagatggccaagagccctgagttccccagcgtgtctgagaagatgcctgaggccctgagccccaacacaggccagaccagcatcaacctgctgaacccagctgcccacagcgctgaccctgagaaccccctgctgcagaccagctgcatcaacagcagcacagtgctggacctgattggccccaacgggaagggccatgacaaggacttcagcacccagaccaagaagctgagcaccagcagcaacaatgatgacaagatcaacgggaagcctgtggatgtgaagaaccccagcgtgcccctggtggatggagagagtgaccccaacaagaccacctgtgaggcctgcaacatcaccttcagcagacatgagacctacatggtgcacaagcagtactactgtgccaccaggcatgacccccccctgaagaggtctgccagcaacaaggtgcctgccatgcagaggaccatgaggaccaggaagaggaggaagatgtatgagatgtgcctgcctgagcaggagcagaggcctcccctggtgcagcagcgcttcctggatgtggccaacctgaacaacccctgcaccagcacccaggagcccacagagggcctgggggagtgctaccacccccgctgtgacatcttccctggcatcgtgtccaagcacctggagaccagcctgaccatcaacaagtgtgtgcctgtgtccaaatgtgacaccacccacagctctgtgtcctgcctggagatggatgtgcccatcgacctgagcaagaagtgcctgagccagagcgagaggaccaccaccagccccaagaggctgctggactaccatgaatgtactgtgtgcaagatctccttcaacaaggtggagaactacctggcccacaagcagaacttctgccctgtgacagcccaccagagaaatgacctgggccagctggatggcaaggtgttccccaaccctgagagcgagaggaacagcccagatgtgtcctatgaaagaagcatcatcaagtgtgagaagaatggaaacctgaagcagcccagccccaacggcaacctcttcagcagccacctggccaccctgcagggcctgaaggtgttcagcgaggccgcccagctgattgccaccaaggaggagaacagacacctgttcctgccccagtgcctgtacccaggggccatcaagaaggccaagggagctgaccagctgagcccctactacggcatcaagcccagcgactacatcagcggcagcctggtgatccacaacacagacatcgagcagagcagaaatgcagaaaatgaaagccccaagggccaggccagcagcaatggctgtgccgccctgaagaaggacagcctgcccctgctgcccaagaacagaggcatggtgattgtgaatggaggcctgaagcaggatgagaggcctgctgccaacccccagcaggagaacatcagccagaacccccagcatgaagatgaccacaagagccccagctggatcagcgagaaccccctggccgccaatgaaaatgtgtccccaggcatccccagcgctgaggagcagctgagcagcatcgccaagggcgtgaatggcagcagccaggcccccaccagcggcaagtactgccgcctgtgtgacatccagttcaacaacctgagcaacttcatcacccacaagaagttctactgcagcagccacgccgctgagcacgtgaagtag

SEQ ID NO: 308071 - DNA, 3060 bp, Artificial Sequence
  derived and/or modified sequence
atggacctgaacaacaacagcctgaagaccaaggcccaggtgcccatggttctgacagcggggccgaagtggctgctagacgttacctggcagggcgtggaagataacaagaataactgcatcgtgtactccaaaggcggtcagctttggtgcacaaccacgaaagctatatcagagggtgaggagctcatagcatttgtggttgacttcgactcccgacttcaggcagcttcccagatgacactgacagaggggatgtatccagcccgcctgctcgattctattcagctactccctcagcaggccgctatggcctctattcttcccaccgccatcgttaataaagacattttcccatgtaaatcttgtggaatctggtaccgatcagagcgcaatctccaggcgcacttgatgtattactgttctgggaggcagcgggaggctgctccggtttcagaggaaaacgaggattccgcccatcagattagctccttgtgcccctttccacagtgcaccaagagctttagtaatgcacgggccctggaaatgcacctgaattcacatagtggagtgaaaatggaggagttcctgcctccgggcgcctcactgaagtgcacagtctgcagttatacagctgattccgtgatcaattttcatcaacatctgttcagtcacttgacccaagcagcctttcggtgcaaccactgccattttggcttccaaactcaacgggaacttctgcaacatcaagagcttcatgtgccgagtgggaagcttcctcgcgagtcagatatggagcatagtccaagcgccacggaagacagcctccagccagcgactgacctgttgactcggagcgaactgccacaaagtcagaaagcgatgcaaaccaaagatgccagctcagatacggaactggacaagtgcgagaagaagacccaactattcttaaccaaccagcgccccgagatccagccgacaactaacaagcagtctttctcttacaccaaaatcaagtccgaaccatcttccccgaggctggcatcttctcccgtgcagccaaacattggcccgagctttcccgtcgggcctttcttaagtcaattctccttcccccaggacatcactatggtgccccaggcaagcgaaattctcgccaagatgtctgaattggtgcataggcgtctgcggcacggtagtagctcgtacccccccgtcatctatagcccactgatgcccaagggggcaacctgttttgagtgtaatatcactttcaataatctggacaactatctggtccacaagaagcactactgcagctcacggtggcaacagatggcaaagagccctgaatttcccagtgtcagcgagaagatgcctgaagctttgagcccgaacaccggccagacctcaattaatttgctgaatcccgcggcacattctgccgaccctgagaatcctctcctgcagacgtcctgcattaactcatctaccgttttagatctgattgggccgaacggaaaaggccacgataaagacttttcaacccagacgaaaaaattatccacatcgtcgaacaacgacgacaaaattaacggcaagccagtcgacgttaagaatcctagtgtgccgttggtagacggtgaaagcgatccaaacaagacgacctgcgaggcgtgtaacattacattcagcaggcacgagacgtatatggtgcataaacagtactattgcgcaaccaggcacgaccccccactgaaaaggtccgcgtctaataaggtccctgctatgcagcggaccatgcggacgcggaagaggaggaagatgtacgagatgtgcctcccagaacaggagcagcgacccccgcttgtgcagcagcggtttctcgatgttgccaatctaaacaacccctgtacatccacccaggagcctaccgagggacttggggagtgttaccacccgcgctgcgacatattccctggtattgtgtctaagcacctcgagacgagcctgaccattaataaatgtgtcccggtgtctaagtgcgatacaacacattccagcgtgtcttgtttagagatggacgtcccaatcgacttaagcaagaagtgtttgtcccagagtgagcgaacaaccacaagtccgaagaggctgctagactatcacgaatgtactgtctgcaaaataagctttaacaaggtggaaaactacttggcacataagcagaatttctgcccggttaccgcccatcagaggaacgacctgggccagctggatggcaaggtttttcccaatcctgaatccgagcgaaactctcccgatgtttcatacgagagatcaatcattaagtgtgaaaagaacggcaatcttaaacagccttctcctaacggaaatttatttagctcacatctggcgacgttacagggcttgaaagtgttcagcgaggctgcacagctgatcgccactaaggaagagaacagacacctgtttcttccacaatgcttgtacccaggcgctataaaaaaggcaaaaggcgctgatcagctgtccccatactacggtataaagcccagcgattatatctctggatcgcttgtcatccataatacagacattgagcagagccggaacgctgagaacgagagccccaaaggtcaggcttcaagcaacggctgtgccgccctgaagaaggactctctgcctctattacctaaaaaccgcggtatggtgatcgtcaacggaggcctgaaacaggacgaaaggcccgcagctaacccccagcaggagaacataagccagaatccacagcatgaggacgatcataaatcccctagctggatcagtgagaaccctctggccgctaacgagaacgtcagccccggtattccctccgccgaggagcagttgagttctatcgcaaagggtgtgaatggctcatctcaggcaccaacctccggaaaatactgcaggctgtgcgacatccagtttaataatttgtccaacttcatcacacataaaaaattctattgctcatcacatgcagcggagcatgttaagtag

SEQ ID NO: 308072 - DNA, 3060 bp, Artificial Sequence
  derived and/or modified sequence
atggacctgaacaacaacagcctgaagaccaaggcccaggtgcccatggttcttacagctgggcccaaatggctcttggacgtaacctggcagggggtcgaagacaacaagaacaattgtattgtatactccaaaggaggacagttatggtgcactaccacaaaagcaatttccgagggagaggagctaattgcatttgtggtggacttcgacagccggctgcaagccgcctcccaaatgaccctgaccgagggcatgtacccagctagactgctggatagcatacagctgttaccccagcaggcagccatggctagcatactgcctacagcgatcgtcaataaggacatctttccctgcaaatcttgtggcatatggtaccgatctgaaaggaatcttcaagctcaccttatgtactactgcagtggaaggcagcgggaggccgcacccgtcagtgaagagaacgaggatagcgcgcaccagatctcaagtttgtgtccattcccccaatgcaccaagagcttttccaacgcgcgggccttggagatgcatttgaactcccactcaggcgtgaagatggaagagtttctgccccccggcgcctctctcaagtgtacagtgtgttcctacaccgcagattccgtgatcaacttccatcagcacttgttttcacacctgacccaggcagcttttcggtgcaatcattgccatttcggttttcagactcagcgggaactcctccagcatcaggaactgcacgtgccttctggaaagctgccgagggaaagcgatatggagcattcaccctccgccacagaagattctctccagccagccacagacctgctgaccaggagtgaattacctcagtcgcaaaaggctatgcaaaccaaagatgcctcctctgacaccgagctggacaagtgtgagaagaagacacaactatttttgactaatcagcgaccagagattcagcctacaaccaacaaacagtctttcagctacacaaaaattaagagcgaaccgtctagcccccgacttgcttccagccctgtgcagcccaacattggcccttcatttccagtcggcccattcctctctcagtttagcttcccacaggacatcactatggtgcctcaggctagcgagatactggccaagatgtctgagctagtccataggcgcctgagacacggatcgagctcctaccctcccgtcatatattcccccctgatgccaaagggagctacatgcttcgaatgcaacattacctttaataatctggacaattacctggtgcacaagaagcattactgttcctctcgctggcagcagatggctaaaagtcccgaatttccctcggtgagcgaaaaaatgcctgaagctctcagccccaatactggccagacgtcaatcaatttgctgaatcctgcagcacattcagccgaccccgagaatcctctccttcagacttcatgtataaacagttctactgtcttagatcttatcggtcctaacggaaagggccacgacaaggatttttccacgcagacgaagaaactgtcaacctccagcaataatgacgataaaatcaatggcaaaccggtggacgtgaagaacccgagcgttcctctcgtagacggagagtctgatcctaataaaacaacttgcgaggcctgtaacattacttttagtcggcatgaaacatacatggtccacaagcagtactattgtgctactaggcatgaccctcccctcaagaggtcagcgtccaataaggtgcccgccatgcagagaactatgcgcacccgcaaaagaagaaaaatgtatgagatgtgcctgccagagcaggagcaaagaccaccattagtacagcagcgctttctcgacgtggccaatctcaataacccatgtacgagcacacaggagcccacagaaggactcggagagtgttatcacccacgatgcgatatcttcccaggcattgtcagcaagcacctggagacctccctgactatcaacaagtgcgttccagtgtctaaatgtgacaccacccacagctctgttagttgccttgaaatggatgtaccaattgatctcagcaaaaagtgtctgtcacaatcagagcggacgaccacctcccctaagcgactccttgattaccatgagtgtacagtttgcaagatatcattcaataaggtggagaattatttggctcacaaacagaacttctgcccggtcactgctcaccagagaaacgaccttggtcagctcgacgggaaagtgttccctaaccctgagtcagagaggaacagccctgacgtatcatacgagaggtctataattaaatgcgagaagaatggaaatctgaagcagccgtcccctaatggcaatctgttctccagtcacctcgcgaccctgcaaggactaaaagtgttcagtgaggccgcccagctcatcgcaaccaaggaggagaaccgacatctgttcttgccccaatgcctgtacccaggcgcaattaaaaaagcaaagggagcagaccagctgtctccttactacggcatcaagccttccgattacatctcaggatccctggtgattcataacaccgacatcgagcagagccgcaacgccgagaacgagagtcccaaaggccaggctagctccaatggatgtgcggctctcaagaaggacagccttccccttttaccaaagaacaggggtatggtaatcgtcaatggaggtttgaagcaggatgagcgtccagccgcaaatcctcagcaggaaaatatctcccagaacccacagcacgaagacgaccataaatcccccagctggataagcgaaaaccctctagccgccaacgagaatgtttcccccggcatcccctccgcagaggaacaactctcttcgatcgccaaaggagtgaacggttcctcacaggcccccacctctggcaaatactgtcgcctgtgcgacattcagttcaacaatctctcgaatttcattacccacaagaagttctactgctcttcccatgccgcggaacatgtgaagtag

SEQ ID NO: 308073 - DNA, 3060 bp, Artificial Sequence
  derived and/or modified sequence
atggacctgaacaataactctctgaagactaaggcccaagtccctatggtacttaccgccggtccaaaatggctgcttgatgttacttggcaaggagtcgaggacaataagaataattgcatagtctattccaagggtggacagttatggtgtactacaaccaaggctatttctgagggcgaggagttgatcgccttcgttgtagacttcgactctcggctgcaggctgcttcacagatgaccctgaccgaaggcatgtacccggcacgtctgttggatagtatccagttactgccacagcaagcggctatggcgtccatactgcctaccgcaatcgtgaataaagacatctttccgtgtaagtcctgtggcatttggtacagatctgagcggaacctgcaggctcacctgatgtactactgctctggacgccaaagggaggcagcacccgtatcagaggagaatgaagatagcgcccatcagatcagctctctgtgcccattcccgcagtgtacgaagagtttctccaacgcaagagctctcgagatgcacctgaacagtcacagtggggtgaagatggaggagttcttgccacctggcgcttcactcaagtgtacggtctgctcctacactgcagattccgtgatcaatttccaccagcacctcttcagccatctcacgcaggcagccttccgatgtaatcactgccacttcggcttccagactcaacgcgaattgttgcaacaccaagaactccacgtgccctccggaaaactacccagggagagcgatatggagcattctcccagcgccaccgaagattctctgcagcccgcaaccgatttgttgacacgctctgaacttcctcagtctcaaaaggccatgcagacaaaagatgcctcttccgacaccgaactggataaatgcgagaaaaaaacacagctgtttttgaccaaccagagaccagagatacaacccaccacaaataaacagtccttctcttacacaaaaattaaatcagagccttccagcccccgacttgcatcctctccagtccagcctaacattggaccttctttcccagttgggccatttctgagtcaattcagctttccccaggatatcacaatggtacctcaggccagcgagatcctcgctaagatgtctgagctggtacaccggaggttgagacatggtagttcctcttatccacctgttatctattcacctctgatgccaaaaggcgctacctgcttcgaatgtaacatcacattcaataatctggacaattatttggttcataaaaaacactactgtagctctagatggcagcaaatggcgaaatcgcccgagtttcctagtgttagtgaaaagatgcccgaggccctgagccccaacactgggcagacctcaattaacctgctgaaccctgctgcacactccgctgacccagagaaccctctgttacagacatcgtgtataaactcgagtacagtgctggacctcataggcccaaacggcaagggacatgacaaggatttctcaacccagaccaagaaactgtccacatcttctaataatgacgacaaaattaacgggaagccagtggacgttaaaaatccttcagtccctctcgttgatggcgagagcgaccccaataaaactacctgtgaagcctgtaacataacattttcacggcacgaaacctacatggtacacaagcagtactattgtgcgactaggcacgaccctccgctcaagcgtagtgctagcaacaaggtgcccgcaatgcagcgcaccatgcgaacaagaaaaaggagaaaaatgtacgaaatgtgtctgccagaacaggagcaaagaccccctctggtccaacagcggttcctagatgtcgctaacttgaacaatccatgtaccagcacccaggagcctaccgagggtctgggtgaatgctaccaccccaggtgtgatatattcccagggatcgtgtcgaaacatctcgagacctcacttacgatcaataagtgcgtacccgtgagcaagtgtgatacaacacattcttccgtaagttgcctggaaatggacgtgccaatcgatttgtcgaagaagtgcctgagtcaatccgaaaggaccacgacatctcctaagagactgttggactaccatgagtgtactgtgtgcaaaatctcctttaacaaggtagagaactacctggcccacaagcagaacttctgtccagtaacagctcaccagaggaatgacctgggccagctcgatggaaaagtgttccccaatcccgagtctgaaaggaacagtcctgacgtctcttatgagcgatccatcatcaagtgtgagaagaacggaaacctgaaacagcctagtcccaatgggaatctgttctcttcccacctggcgacactgcagggactgaaggtgttctccgaggctgcgcagcttattgctacaaaggaagagaatagacacttgtttttgccacagtgtctgtatccaggggcaatcaagaaggccaagggcgctgaccaactgtcgccctactacggtataaagccatcagattacataagcggttctctggtgatccacaacaccgacatcgaacagtcacgcaacgctgagaacgaatcccctaagggacaggcgagctccaatgggtgcgccgcactgaaaaaggactcactgcccctgctgccaaagaatcgcggaatggtcatagtgaatgggggtctcaagcaagacgagcgaccagctgcaaatccccagcaggagaacatttcgcaaaacccacagcacgaagatgaccacaagagcccatcctggataagcgaaaatccacttgctgcaaacgaaaatgtgtccccaggcataccctctgccgaagaacagctgtcgagcattgcgaagggggtgaatggatcaagtcaggctcccacctctgggaagtattgtagattgtgtgatatccaattcaataacctgtctaactttatcacgcataagaaattctattgttcatctcatgccgctgagcacgtgaagtag

SEQ ID NO: 308074 - DNA, 3060 bp, Artificial Sequence
  derived and/or modified sequence
atggatcttaacaataacagcctgaagaccaaagcccaggtgcccatggtgctgaccgccggtcctaagtggcttcttgatgtgacgtggcagggggtagaggataataagaacaattgcatagtgtatagtaaaggcggacagctgtggtgtacaactaccaaagcaatctccgaaggcgaagagctgatcgccttcgtcgtggacttcgattctagactccaggccgcttcccaaatgactttgacggagggtatgtatcctgcacggctgcttgactctattcagttactcccccagcaggccgctatggccagcatcctgccaacagctatcgttaacaaggatatattcccctgcaaatcatgcggtatctggtatcgcagcgagagaaaccttcaggctcatcttatgtactattgctcgggtaggcaacgggaagccgctccggtgagcgaggaaaacgaggattcagcccaccagatttcgtctttatgccccttcccccagtgtacaaagtcatttagcaacgcacgggcactggagatgcaccttaactctcattccggtgttaagatggaagagtttcttccccctggggcaagcttgaaatgtacagtgtgtagctacacagcagacagcgttataaattttcatcagcatctcttctcccatctgactcaagcagctttccgctgtaatcactgccacttcggattccagactcagcgtgaactccttcagcaccaggagttgcacgtgccaagtggcaagttaccacgcgaaagcgacatggaacacagccccagcgccaccgaggactcgctacagccagctaccgatctgttgacacggtctgaacttccccagagccagaaggctatgcagactaaggacgcatccagtgacacagagctggacaagtgtgagaagaagacacagctgttccttacaaaccaaaggccggagatccaaccaacaaccaacaagcaaagcttttcctacacaaagattaagtcagagcctagttcaccaaggttagcctcctcacctgttcagcctaatataggcccatctttccctgtggggccattcctttcgcaattctcttttccccaggacattacaatggtgccccaggcctccgagatcctggctaaaatgtctgaactcgtgcatagacgcctccgccacgggagttcttcttacccacccgtgatttactctccacttatgccaaagggggctacctgtttcgaatgtaacatcacctttaataaccttgataactacctcgtgcataaaaagcactactgtagctcccgttggcagcagatggctaaaagcccagagttcccatcagtgagtgaaaagatgcctgaagccttgtctcccaatacagggcaaacaagcattaaccttcttaaccctgccgcacactcggctgatccagagaaccccctcctgcagactagttgtatcaattcttcaaccgtgttagacctcatagggcctaatggcaagggacacgacaaagatttttctactcagacaaagaaattgtccactagcagtaataatgatgataagatcaatggtaagcccgtggacgtcaagaacccctcagtccccttggtcgatggcgagagtgacccaaacaagaccacatgcgaggcttgcaacattaccttctcacggcacgaaacatacatggtgcacaaacagtattactgtgcaactcggcatgaccctcctcttaaacggtccgccagcaataaggtcccagccatgcagcggacaatgagaacacggaagaggaggaaaatgtacgagatgtgcctcccagagcaggagcagagacccccactggtgcagcaacgctttctggatgtagctaatctgaacaacccatgtacaagtacccaggaaccgacagagggactgggggaatgctaccacccgcgatgtgacatttttcccggaatcgtgtcaaaacatctcgaaactagtcttactatcaacaaatgtgtgccagtgtctaagtgcgacacaacccattcaagtgtctcatgtctcgagatggatgtcccaatcgatctgagcaaaaaatgcctgtcccaaagcgagcgtactacgacatcacctaaacggctgctggactatcacgaatgcacagtatgcaagatcagcttcaacaaggtcgaaaattatctagcccacaagcaaaacttctgtcctgtaacagcccatcagagaaatgatcttggccagcttgatggcaaagtgttcccaaaccccgaatctgagcgcaattctccagatgtctcttacgaacgctccattatcaagtgcgaaaaaaacgggaatctgaagcagccgtctcctaacggcaatctgttttcctcccaccttgctactctacagggcttgaaggtgttttccgaggctgcccaacttattgccacaaaagaggagaatcgtcacttgtttctgccccagtgtctgtatcctggcgcaattaaaaaagctaaaggcgctgaccaactctcaccgtattacggcatcaaaccttccgattacatttcaggctcactggtgattcataatacagacatcgagcagagcagaaatgccgagaacgaatctccgaagggacaagcctcttccaacggttgcgccgctctcaaaaaagactccctgcccctgctgcctaaaaatagggggatggtgattgtgaacggtggtctgaagcaggatgagcgcccagccgcaaacccacagcaggagaatatatcacagaaccctcagcatgaggacgaccacaagagcccgtcatggatctccgagaaccccctggccgctaacgaaaacgtcagccctgggataccatcggctgaggaacagctgtccagcatcgctaagggcgtgaacggaagctcccaggcaccgacatccggtaagtactgtcggctgtgcgacattcagttcaacaatttaagtaacttcattacacacaagaaattctattgttccagtcacgctgctgagcacgtgaaatag

SEQ ID NO: 308075 - DNA, 3300 bp, Artificial Sequence
  derived and/or modified sequence
agattcttagaagacccttcagagtctgaagtaaagaaagttttgaacctgttttttcattctactgtagggcttctgaaaacaaggagagctggaggtgtttcagaaagatggggaacgaaaaattcagagtcgacagcaacttccagtgggaacaacctgggggccgtttcctgggaagatggacttgaataataattctttgaagacaaaggctcaggtcccaatggtgctgactgctggtcccaagtggttgctggatgtgacttggcaaggagtggaagacaacaaaaacaactgcattgtgtacagcaaagggggtcagctttggtgtacaactacgaaggccatctctgagggtgaagagctaattgcctttgtggtggattttgactcaaggctacaagctgccagtcagatgactctcacagaagggatgtaccctgcacgcctgctggactcaattcagctgcttcctcagcaagctgccatggcttctattttgcccacagctattgtcaataaggatatattcccttgcaagtcctgtggcatctggtatcggagtgagcggaatctgcaggcccatttgatgtactactgcagtgggaggcaaagagaagctgctccggtgtcagaggaaaatgaagacagtgcccatcagatttccagcctgtgccccttcccacagtgcaccaagagcttttcaaatgctcgagctctagaaatgcacctgaattcacacagtggagtgaaaatggaagaattcctgccccctggtgctagtctaaaatgcaccgtctgtagctacactgctgattccgtgatcaactttcaccaacacctgttctcccatctcactcaagctgccttccgatgtaatcactgccatttcggcttccagactcagagggagttattgcagcaccaggagctccatgtccctagcggcaaacttcccagagaaagtgacatggaacactctccaagtgcaactgaagacagcttacagccagccacagacttattgaccagaagcgaacttccccagagccaaaaggccatgcagactaaagatgcgagctctgacacagagctggacaagtgtgagaaaaagactcagctctttctcacgaaccagagaccagagatacagcctacaacaaataaacaaagcttttcttacacaaaaataaagtctgagccctctagcccaagacttgcctcatctccagttcagcctaatattgggccttctttccctgtgggccctttcctatctcagttttctttcccccaagatatcaccatggtccctcaagcttcagagatcttagctaagatgtctgaactggtgcatcggcgactgaggcatggcagtagtagctaccctcccgtcatttacagccctttgatgcccaagggggctacttgttttgagtgtaacataacattcaataatttggataattatctagtgcacaaaaagcattattgcagcagccgatggcagcagatggctaagtccccagagttccctagtgtgtcagaaaagatgcctgaagctttgagtcccaacactggccaaacctccataaaccttctcaacccagctgctcattctgctgatcctgagaatccacttcttcaaacatcttgcatcaattcttccactgtcttagatttaattgggccaaatgggaagggccatgacaaggacttttccactcaaactaagaagctctccacctccagtaacaatgatgacaaaattaatggaaaacctgttgatgtgaaaaatcccagtgtccccttagtggatggggaaagtgacccaaataagactacctgtgaagcttgcaacattaccttcagccggcacgaaacatacatggtccacaaacagtattactgtgctacacgccacgaccctccactgaagaggtctgcttccaacaaagtgcctgccatgcagagaaccatgcgcacacgcaagcgcagaaagatgtatgagatgtgcctacctgagcaggaacaaaggcctccactggttcagcagagatttcttgacgtagccaacctcaataatccttgtacctccactcaagaacccacagaagggctaggagagtgctaccacccaagatgtgatatctttccaggaattgtctctaaacacttggaaacttctctgacgatcaacaagtgtgttccagtttccaaatgtgatactactcattccagtgtttcctgcctagagatggacgtgcccatagatctcagcaaaaagtgtttatctcagtctgagcggacgaccacgtctcccaaaaggctgctggactatcacgagtgcactgtgtgcaagatcagtttcaataaggtagaaaactatctggcccacaagcagaatttctgcccggttactgcacatcagcgtaatgacctgggtcaactggacggcaaagtgtttccgaatccagaaagcgaacgaaacagccctgatgtcagctacgaaagaagcataataaaatgtgagaaaaatgggaatttgaagcagccttcccccaatggaaacttattttcatcccacctagcaaccctgcaaggcttgaaggtctttagtgaagctgctcagctcattgctacaaaagaagaaaacagacatttgtttcttccacaatgcctttaccctggagcaataaagaaagcaaaaggagccgaccagctttctccatattatggaatcaagccaagtgattatatttctggttctcttgtcatccataacactgacatcgagcaaagcagaaatgcagaaaatgaatctcctaaaggccaggcttcctcaaatgggtgtgctgcgctgaagaaagattctctgccattgttgcccaaaaatcgaggaatggtaatagtgaatggtggactgaaacaagatgagagacctgctgccaacccacagcaagagaacatttcccagaatcctcagcacgaagacgaccacaaatctccctcgtggatctctgagaacccattagctgccaatgagaatgtctcaccaggaattccctcagcagaggaacagttgtctagtatagcaaaaggtgtgaatggttccagccaggctccaaccagtgggaaatattgccggctatgtgatatccagttcaacaacctttcaaactttataactcacaagaagttttattgctcatcacatgcagcagaacatgtcaaatgaactaactaaacatcagtcacctttggtatcagtgtttagtatgttgttctaaccagtcc

SEQ ID NO: 308076 - DNA, 606 bp, Artificial Sequence
  derived and/or modified sequence
atgttcctggtggtggcagtgaatagtctgaccctctatcagccatctttccggccactgcttggcgacgcttgctgtctctgcgtggctgccgctgcgggtgccctctgccgggatctcggccctcaccacacgcacacgcgtggacctaacgacggctcatgtggactgtctagatggcgccataggcagcatggagattcaccggaggacttttttctggctagaggagcccacctcgcctcaacgaggggacgaaacgagcactctcctaaaggtagtttacagaagtgcctgttgtctattcgagtacagactacccggctttcacacctgcgtgctggcgttactttgcgctgcgtgctgctctgtgtctctgaaagccccgtcggcctgcggtcagtggcatgctcgggggacctgctgggcgacccacttaccggattcctggctttcctggtttcctgtctcaccccgtcaggcactccagggaatacctctttgacaaaacttagccccacctctagttcacagggactagcactcggacctctcagtcctagttcctgtgacgctgcctcaccaagcatcagtcttggtttatag

SEQ ID NO: 308077 - DNA, 2649 bp, Artificial Sequence
  derived and/or modified sequence
atgtactactgcagcggcagacagagagaggccgcccccgtgagcgaggagaacgaggacagcgcccaccagatcagcagcctgtgccccttcccccagtgcaccaagagcttcagcaacgccagagccctggagatgcacctgaacagccacagcggcgtgaagatggaggagttcctgccccccggcgccagcctgaagtgcaccgtgtgcagctacaccgccgacagcgtgatcaacttccaccagcacctgttcagccacctgacccaggccgccttcagatgcaaccactgccacttcggcttccagacccagagagagctgctgcagcaccaggagctgcacgtgcccagcggcaagctgcccagagagagcgacatggagcacagccccagcgccaccgaggacagcctgcagcccgccaccgacctgctgaccagaagcgagctgccccagagccagaaggccatgcagaccaaggacgccagcagcgacaccgagctggacaagtgcgagaagaagacccagctgttcctgaccaaccagagacccgagatccagcccaccaccaacaagcagagcttcagctacaccaagatcaagagcgagcccagcagccccagactggccagcagccccgtgcagcccaacatcggccccagcttccccgtgggccccttcctgagccagttcagcttcccccaggacatcaccatggtgccccaggccagcgagatcctggccaagatgagcgagctggtgcacagaagactgagacacggcagcagcagctacccccccgtgatctacagccccctgatgcccaagggcgccacctgcttcgagtgcaacatcaccttcaacaacctggacaactacctggtgcacaagaagcactactgcagcagcagatggcagcagatggccaagagccccgagttccccagcgtgagcgagaagatgcccgaggccctgagccccaacaccggccagaccagcatcaacctgctgaaccccgccgcccacagcgccgaccccgagaaccccctgctgcagaccagctgcatcaacagcagcaccgtgctggacctgatcggccccaacggcaagggccacgacaaggacttcagcacccagaccaagaagctgagcaccagcagcaacaacgacgacaagatcaacggcaagcccgtggacgtgaagaaccccagcgtgcccctggtggacggcgagagcgaccccaacaagaccacctgcgaggcctgcaacatcaccttcagcagacacgagacctacatggtgcacaagcagtactactgcgccaccagacacgacccccccctgaagagaagcgccagcaacaaggtgcccgccatgcagagaaccatgagaaccagaaagagaagaaagatgtacgagatgtgcctgcccgagcaggagcagagaccccccctggtgcagcagagattcctggacgtggccaacctgaacaacccctgcaccagcacccaggagcccaccgagggcctgggcgagtgctaccaccccagatgcgacatcttccccggcatcgtgagcaagcacctggagaccagcctgaccatcaacaagtgcgtgcccgtgagcaagtgcgacaccacccacagcagcgtgagctgcctggagatggacgtgcccatcgacctgagcaagaagtgcctgagccagagcgagagaaccaccaccagccccaagagactgctggactaccacgagtgcaccgtgtgcaagatcagcttcaacaaggtggagaactacctggcccacaagcagaacttctgccccgtgaccgcccaccagagaaacgacctgggccagctggacggcaaggtgttccccaaccccgagagcgagagaaacagccccgacgtgagctacgagagaagcatcatcaagtgcgagaagaacggcaacctgaagcagcccagccccaacggcaacctgttcagcagccacctggccaccctgcagggcctgaaggtgttcagcgaggccgcccagctgatcgccaccaaggaggagaacagacacctgttcctgccccagtgcctgtaccccggcgccatcaagaaggccaagggcgccgaccagctgagcccctactacggcatcaagcccagcgactacatcagcggcagcctggtgatccacaacaccgacatcgagcagagcagaaacgccgagaacgagagccccaagggccaggccagcagcaacggctgcgccgccctgaagaaggacagcctgcccctgctgcccaagaacagaggcatggtgatcgtgaacggcggcctgaagcaggacgagagacccgccgccaacccccagcaggagaacatcagccagaacccccagcacgaggacgaccacaagagccccagctggatcagcgagaaccccctggccgccaacgagaacgtgagccccggcatccccagcgccgaggagcagctgagcagcatcgccaagggcgtgaacggcagcagccaggcccccaccagcggcaagtactgcagactgtgcgacatccagttcaacaacctgagcaacttcatcacccacaagaagttctactgcagcagccacgccgccgagcacgtgaagtag

SEQ ID NO: 308078 - DNA, 2649 bp, Artificial Sequence
  derived and/or modified sequence
atgtactactgcagtggtcgccaacgcgaggctgccccagtttccgaggagaacgaagattccgcccaccagatctcttcattgtgccctttcccacagtgcactaaatcttttagtaacgctagggctttagagatgcacctgaattcacatagtggcgtgaaaatggaggagttcctgccccccggtgcttctctgaaatgcacggtgtgctcatatactgccgattctgtgataaacttccatcagcatctgttcagtcatctgacgcaagcggcatttcgttgcaatcactgtcactttggttttcagacacagcgtgaacttctgcagcaccaggagttgcatgtgccctccggtaagctgcccagggaatccgatatggagcatagcccgagtgctactgaagattccttgcagcctgccaccgacctgctgaccagaagcgagcttcctcagtctcagaaggccatgcaaaccaaggatgcatccagcgatacagagcttgataagtgcgagaagaagacacagttatttctcaccaaccagcgaccggaaattcagcctacaaccaacaaacagtctttcagctacacaaaaattaagtccgaaccctctagtcctcgactagcaagtagcccagttcaaccaaatatcgggccatcttttcccgttgggcctttcctgtctcaattctccttcccccaggacattaccatggtaccacaggcgagtgaaatcttggccaagatgtctgaactagtgcaccggcggctcagacacggaagctctagctacccaccggttatttactcaccactgatgccgaaaggggcaacctgcttcgagtgtaacattacattcaataacttagataattacctggtgcacaagaagcactactgttctagccgctggcaacaaatggccaagtcccctgaatttccttcggtgagtgagaagatgcctgaggcactgtccccgaacacaggccagacctccatcaatctgctgaacccagccgcccactctgctgacccagaaaatccacttctgcagacctcttgcataaattcgagcaccgttctggacctgattgggcccaatggcaagggccacgataaggacttttccacacagaccaagaagctgagcaccagctcaaacaacgacgacaaaattaatggcaaaccggtggatgtgaagaatccttccgttcctctggtggacggtgaatccgaccccaataaaactacgtgtgaggcgtgtaacatcaccttctcacgccacgagacatacatggtccacaaacaatattactgtgccaccaggcacgatcctcctttgaaacgttcagctagtaacaaggtgccggcaatgcaacggacaatgcgaacccgaaagaggcggaagatgtatgaaatgtgtttgccagagcaggaacagcgacctcctctggttcagcagaggttcctcgacgtcgcgaatctgaacaacccgtgtaccagtacccaagagccgaccgagggcctcggagaatgctatcatccgagatgtgacattttccctggaattgtttcgaaacatcttgagactagcctgacaattaacaaatgcgtccccgtgtcaaaatgtgatacgacacactccagtgtctcctgcctcgaaatggatgtgccaattgacttgtcaaaaaagtgcttaagtcaatcggaacggacaaccacatcccctaagcgcctcctcgactatcatgagtgcaccgtatgcaaaatttcattcaacaaagtggagaattacttggcccataaacagaacttttgccctgtcacagctcatcagcggaacgatctcggacagctggatggcaaggtattccctaacccagaatcagagcgcaactcccccgacgtgagttacgagagatctataatcaaatgtgaaaaaaacgggaacttaaagcagccctccccaaacggcaaccttttctcctcgcacctagcaacgcttcagggtttaaaggtcttttcagaggctgcacagctgatcgctactaaggaggaaaataggcatctgtttctgccccagtgtctgtatccgggtgcgatcaaaaaggcgaaaggcgccgaccaactgtcaccttactacgggataaaaccatcagactacatctccggatccctggtgatccacaatactgatattgaacaatctcgcaatgccgagaacgagagccctaaggggcaggccagcagcaatgggtgcgccgcactcaagaaagattccctgccccttctgcccaaaaaccgtggaatggtgatcgtcaatggcggacttaagcaggatgagcgaccagcagccaacccacagcaagagaacatctcccagaatccacaacatgaggacgatcacaagtctccctcttggataagcgaaaaccccctagctgctaatgaaaacgtgagccccggaataccttcggcagaggaacaactctctagtatcgcaaaaggtgtgaacggttcctctcaggctcccacctctggtaaatactgtaggctgtgcgatattcagtttaacaacctgtccaactttataacacacaagaaattctattgcagttcccacgccgccgagcatgtgaaatag

SEQ ID NO: 308079 - DNA, 2649 bp, Artificial Sequence
  derived and/or modified sequence
atgtactactgcagcggccggcagcgggaggccgcccctgtgtctgaagaaaatgaagattctgcccaccagatcagcagcctgtgccccttcccccagtgcaccaagagcttcagcaatgcccgggccctggagatgcacctgaacagccacagcggcgtgaagatggaggagttcctgcccccaggggccagcctgaagtgcaccgtgtgcagctacacagctgacagcgtcatcaacttccaccagcacctgttcagccacctgacccaggccgccttccgctgcaaccactgccacttcggcttccagacccagcgggagctgctgcagcaccaggagctgcacgtgcccagcggcaagctgccccgggagagtgacatggagcacagccccagcgccacagaggacagcctgcagcctgccacagacctgctgaccaggtctgagctgccccagagccagaaggccatgcagaccaaggatgccagcagtgacacagagctggacaagtgtgagaagaagacccagctgttcctgaccaaccagaggcctgagatccagcccaccaccaacaagcagagcttctcctacaccaagatcaagtctgagcccagcagcccccggctggccagcagccctgtgcagcccaacatcggccccagcttccctgtgggccccttcctgagccagttctccttcccccaggacatcaccatggtgccccaggccagcgagatcctggccaagatgtctgagctggtgcaccggcggctgcggcacggcagcagcagctacccacctgtgatctacagccccctgatgcccaagggggccacctgctttgagtgcaacatcaccttcaacaacctggacaactacctggtgcacaagaagcactactgcagcagccgctggcagcagatggccaagagccctgagttccccagcgtgtctgagaagatgcctgaggccctgagccccaacacaggccagaccagcatcaacctgctgaacccagctgcccacagcgctgaccctgagaaccccctgctgcagaccagctgcatcaacagcagcacagtgctggacctgattggccccaatggaaaaggacatgacaaggacttcagcacccagaccaagaagctgagcaccagcagcaacaatgatgacaagatcaatggcaagcctgtggatgtgaagaaccccagcgtgcccctggtggatggagagagtgaccccaacaagaccacctgtgaggcctgcaacatcaccttcagcagacatgagacctacatggtgcacaagcagtactactgtgccaccaggcatgacccccccctgaagaggtctgccagcaacaaggtgcctgccatgcagaggaccatgaggaccaggaagaggaggaagatgtatgagatgtgcctgcctgagcaggagcagaggcctcccctggtgcagcagcgcttcctggatgtggccaacctgaacaacccctgcaccagcacccaggagcccacagagggcctgggggagtgctaccacccccgctgtgacatcttccctggcatcgtgtccaagcacctggagaccagcctgaccatcaacaagtgtgtgcctgtgtccaaatgtgacaccacccacagctctgtgtcctgcctggagatggatgtgcccatcgacctgagcaagaagtgcctgagccagagcgagaggaccaccaccagccccaagaggctgctggactaccacgagtgcaccgtgtgcaagatctccttcaacaaggtggagaactacctggcccacaagcagaacttctgccctgtgacagcccaccagagaaatgacctgggccagctggatggcaaggtgttccccaaccctgagagcgagaggaacagcccagatgtgtcctatgaaagaagcatcatcaagtgtgagaagaatggaaacctgaagcagcccagccccaatggaaacctcttcagcagccacctggccaccctgcagggcctgaaggtgttttctgaggccgcccagctgattgccaccaaggaggagaacagacacctgttcctgccccagtgcctgtacccaggggccatcaagaaggccaagggagctgaccagctgagcccctactacggcatcaagcccagcgactacatcagcggcagcctggtgatccacaacacagacatcgagcagagcagaaatgcagaaaatgaaagccccaagggccaggccagcagcaatggctgtgccgccctgaagaaggacagcctgcccctgctgcccaagaacagaggcatggtgattgtgaatggaggcctgaagcaggatgagaggcctgctgccaacccccagcaggagaacatcagccagaacccccagcatgaagatgaccacaagagccccagctggatcagcgagaaccccctggccgccaatgaaaatgtgtccccaggcatccccagcgctgaggagcagctgagcagcatcgccaagggcgtgaatggcagcagccaggcccccaccagcggcaagtactgccgcctgtgtgacatccagttcaacaacctgagcaacttcatcacccacaagaagttctactgcagcagccatgctgctgagcacgtgaagtag

SEQ ID NO: 308080 - DNA, 2649 bp, Artificial Sequence
  derived and/or modified sequence
atgtactactgcagcggccggcagcgggaggccgcccccgtgagcgaagaaaacgaggatagcgctcaccagataagcagcctgtgcccattcccgcaatgcactaaaagcttttccaacgcccgtgccctggagatgcatctgaattcccactcgggggtgaagatggaggagttcctcccgccaggggctagcttgaaatgtacagtgtgttcatatacagcagactcggtgatcaatttccaccagcatcttttttctcacttgacccaagccgcttttaggtgtaatcactgccatttcggctttcagacccaaagagagttacttcaacatcaggaactgcatgtgccttctggaaagttaccaagggagtccgatatggagcattccccctcagcgaccgaagacagtctgcagcctgctacagaccttttaacccggtcggagctgccacagagccagaaagcaatgcagacgaaggacgcgagttccgacacggaattagacaagtgtgagaagaaaacacaacttttcctgaccaatcagcggcccgaaatccagccaacgacgaacaagcagtccttcagctataccaagattaagtccgagccaagttccccccgactcgccagttctcctgtgcaacccaacatcgggccgtcattccccgtaggcccgttccttagtcagttctcatttccccaggatattaccatggttccacaagccagcgaaatacttgccaaaatgtcagagctggttcatcgtagactgcggcacggtagctccagctatccacccgttatatattcgcccttgatgcctaagggcgcaacatgttttgaatgtaatatcacgttcaacaatctggataactacctagtgcataaaaagcattattgttcgtcaaggtggcagcagatggcaaagtctccggaatttccctccgtgagcgagaagatgcccgaggcactgtcccccaataccggccagacatctatcaacctgctgaacccggccgctcacagtgccgaccctgagaatccactactccaaacttcttgtatcaattcatcaactgtgctggatcttataggtcctaatggcaagggccacgacaaagatttctctacacaaaccaaaaagctctcaaccagctccaataacgatgataaaatcaacggaaagccggtggatgttaagaacccctcagtcccattggtcgacggtgaaagtgaccccaataagactacttgcgaggcatgtaacatcaccttcagtagacacgagacttacatggtgcacaaacagtactattgtgctacaagacatgacccccctctcaagagaagtgcctctaataaagtcccggccatgcagcggaccatgcgcacccggaaaaggaggaagatgtacgagatgtgcctgcctgaacaagaacagaggcccccgttggtgcagcaacgcttcttagacgtagcaaacctgaacaatccttgtaccagtactcaggagcctaccgagggcttgggcgaatgttaccatccccgctgcgacatcttccccgggatcgtgtccaaacatctagagacttcactcacaataaacaagtgcgtgcccgtcagcaagtgcgataccacccattcctctgtgagttgtctcgaaatggacgtgccgattgatctctccaaaaagtgcctctctcagtccgagaggaccacaacaagtccaaagcggttgcttgactatcacgaatgcaccgtgtgtaaaattagtttcaataaggtggaaaattaccttgcgcataagcaaaatttttgccctgtaacggctcatcagaggaacgacctgggacagctggacggcaaggtgttccccaatcctgaaagcgagcgaaacagcccagacgttagttacgaacggagcattattaagtgcgagaaaaatgggaaccttaagcaacccagccctaacggtaatctctttagttcacaccttgcaactcttcagggcctgaaagtcttttctgaggccgctcaactcattgctacaaaagaggaaaaccgccaccttttcctgccccagtgtctgtaccctggtgccattaagaaggctaagggcgcggaccagctgtcaccctattacggcattaagccttctgactatatttctgggtctctcgtgatccataacaccgacatcgagcagtccaggaacgccgaaaatgagtcccccaaaggccaagcatcctctaacggctgcgctgcactgaaaaaagatagcctgccactgctacccaagaaccgcggaatggtcattgtgaacggggggctcaaacaggacgaaaggccagccgccaatccacagcaggagaacataagtcaaaacccacagcacgaagatgatcataagtcccccagctggataagcgaaaatcctcttgccgctaatgaaaacgtttccccgggaataccctccgccgaggaacagcttagctcaattgctaagggagttaatggttccagccaggccccaaccagtggtaagtattgccgtttgtgcgacattcagtttaacaacctgagtaattttattactcacaagaagttctactgcagctctcatgcagccgagcacgtgaagtag

SEQ ID NO: 308081 - DNA, 2649 bp, Artificial Sequence
  derived and/or modified sequence
atgtactactgtagcggtaggcagagggaggcggctccagtttccgaagaaaacgaagattctgctcaccaaattagctccctgtgtcccttccctcagtgtacaaaaagtttcagcaacgctagggccttagagatgcacctgaacagtcactctggagtaaagatggaggagttcttaccaccaggcgcaagtttgaaatgtaccgtgtgttcttacactgccgactctgtgattaattttcaccagcacttatttagccatttgacccaggctgcctttaggtgtaatcactgtcacttcggcttccaaactcaacgggagctacttcaacaccaggagcttcacgtgccgagcggtaaactgcctagagagagtgacatggagcacagtccttcagccaccgaagacagcctgcagcctgcaaccgacctgctgaccagatcagagcttccacagtctcagaaggccatgcagacgaaggatgcatcatctgacacagagctggataagtgtgagaaaaagacccagctgttcctgactaaccagcggccagagatccagcccacgaccaataagcagtccttctcctacacaaaaataaaaagtgagccctccagccctagacttgcttcttctcctgttcagcctaacattggcccatcatttcccgtcggcccttttctttctcagttcagttttcctcaggatattacaatggtgccccaggccagtgaaatcctcgccaaaatgagtgagctagtgcaccgccgactacgacatggctcgtcttcctatccaccagttatatacagtcccttaatgcctaagggtgctacctgttttgagtgcaatattacatttaacaatctggataactatctggtgcacaaaaagcactattgttcaagtcggtggcagcagatggcgaagagtccagaatttccatccgtaagcgaaaagatgccagaagctctgagcccgaacacaggtcagacctcgattaatctgctgaatcctgctgcccactcagctgaccccgagaatccactgttacaaacgtcttgcataaactccagtaccgtgctggatctgattggacccaacggaaagggccacgataaggatttcagcacccagactaaaaaattatcaacaagttcaaataacgatgataaaatcaacggaaagcccgtggatgtcaaaaacccaagcgtgccactagtcgatggcgagtctgatcctaataagaccacctgtgaggcctgcaatatcaccttctcacggcatgaaacatacatggttcacaaacaatattattgcgcaacaaggcatgatccgccactgaaacggtcggccagcaataaggttccagcgatgcagagaactatgcggacccggaaacgcaggaagatgtatgagatgtgcctgcctgaacaagaacagcgccctccactggtacaacagagattcctggacgtcgccaatctcaataacccatgtacctctacccaggaaccgaccgagggtcttggggaatgttatcatccacgatgcgatatttttccaggtatcgtgtccaagcatttggaaacatccctgactatcaataaatgtgtgcccgtgtctaaatgtgatacaacacattcttcagtctcttgcttggagatggatgtgccaattgacctgagtaagaagtgtctcagccagtcagagcgcacaaccacgagcccaaagaggctgctggactaccatgaatgtactgtgtgtaagatctcattcaacaaagttgagaactatctcgcccacaaacagaatttttgccccgtcactgcccaccagaggaacgacttaggccagctggatgggaaagtgttccccaatcccgaatcagagcgcaactctcctgacgtgagttatgagcgatccatcattaagtgcgaaaagaacggcaaccttaagcaaccgtctcctaacgggaacctcttcagttctcatctggccactctgcagggtctcaaggtattctctgaggccgctcagctcatcgccactaaagaagaaaaccgccatctctttctgccgcagtgtttgtatccaggtgccatcaagaaggccaaaggcgcagatcagctgtcaccttattacggaatcaagccttccgactatatttccggatctctggtgatccacaatactgatatagagcagagcagaaatgccgagaatgagtccccaaaaggccaagcatccagtaacgggtgcgccgcattaaagaaagattcgctccctctgctgcctaagaaccgcggtatggtgatagtgaacgggggactcaagcaggacgagagacccgcagctaacccccagcaagaaaacataagtcaaaatcctcagcatgaggacgaccacaaatcaccgtcttggatatctgaaaatccactggccgctaatgagaacgtgtccccaggtattccctctgccgaggaacaactcagctccatagcaaagggcgtgaacggatcaagccaggcgccaacatccgggaagtattgcaggctgtgcgacattcagtttaataatctctccaactttatcacacacaaaaaattctactgctccagccatgctgctgaacatgtcaagtag

SEQ ID NO: 308082 - DNA, 3268 bp, Artificial Sequence
  derived and/or modified sequence
agggggtcagctttggtgtacaactacgaaggccatctctgagggtgaagagctaattgcctttgtggtggattttgactcaaggctacaagctgccagtcagatgactctcacagaagggatgtaccctgcacgcctgctggactcaattcagctgcttcctcagcaagctgccatggcttctattttgcccacagctattgtcaataaatgacacttcatatgacacaaaatcagtcgtctggagtcccaagatctgtgttctagccatatctgatttttatctagctctatgaaaacacatgagtagcagacacatcttaagaggagaatagattctgaagttagtagaaatatcagattccacatgtctaacgtgaacatgtgccactgtttgcctggcttagtcccattgtacatttttatctggcatccctctggatggtgactcctttcctctacgaaagtcctgagtttgcacaatacaagaggatatattcccttgcaagtcctgtggcatctggtatcggagtgagcggaatctgcaggcccatttgatgtactactgcagtgggaggcaaagagaagctgctccggtgtcagaggaaaatgaagacagtgcccatcagatttccagcctgtgccccttcccacagtgcaccaagagcttttcaaatgctcgagctctagaaatgcacctgaattcacacagtggagtgaaaatggaagaattcctgccccctggtgctagtctaaaatgcaccgtctgtagctacactgctgattccgtgatcaactttcaccaacacctgttctcccatctcactcaagctgccttccgatgtaatcactgccatttcggcttccagactcagagggagttattgcagcaccaggagctccatgtccctagcggcaaacttcccagagaaagtgacatggaacactctccaagtgcaactgaagacagcttacagccagccacagacttattgaccagaagcgaacttccccagagccaaaaggccatgcagactaaagatgcgagctctgacacagagctggacaagtgtgagaaaaagactcagctctttctcacgaaccagagaccagagatacagcctacaacaaataaacaaagcttttcttacacaaaaataaagtctgagccctctagcccaagacttgcctcatctccagttcagcctaatattgggccttctttccctgtgggccctttcctatctcagttttctttcccccaagatatcaccatggtccctcaagcttcagagatcttagctaagatgtctgaactggtgcatcggcgactgaggcatggcagtagtagctaccctcccgtcatttacagccctttgatgcccaagggggctacttgttttgagtgtaacataacattcaataatttggataattatctagtgcacaaaaagcattattgcagcagccgatggcagcagatggctaagtccccagagttccctagtgtgtcagaaaagatgcctgaagctttgagtcccaacactggccaaacctccataaaccttctcaacccagctgctcattctgctgatcctgagaatccacttcttcaaacatcttgcatcaattcttccactgtcttagatttaattgggccaaatgggaagggccatgacaaggacttttccactcaaactaagaagctctccacctccagtaacaatgatgacaaaattaatggaaaacctgttgatgtgaaaaatcccagtgtccccttagtggatggggaaagtgacccaaataagactacctgtgaagcttgcaacattaccttcagccggcacgaaacatacatggtccacaaacagtattactgtgctacacgccacgaccctccactgaagaggtctgcttccaacaaagtgcctgccatgcagagaaccatgcgcacacgcaagcgcagaaagatgtatgagatgtgcctacctgagcaggaacaaaggcctccactggttcagcagagatttcttgacgtagccaacctcaataatccttgtacctccactcaagaacccacagaagggctaggagagtgctaccacccaagatgtgatatctttccaggaattgtctctaaacacttggaaacttctctgacgatcaacaagtgtgttccagtttccaaatgtgatactactcattccagtgtttcctgcctagagatggacgtgcccatagatctcagcaaaaagtgtttatctcagtctgagcggacgaccacgtctcccaaaaggctgctggactatcacgagtgcactgtgtgcaagatcagtttcaataaggtagaaaactatctggcccacaagcagaatttctgcccggttactgcacatcagcgtaatgacctgggtcaactggacggcaaagtgtttccgaatccagaaagcgaacgaaacagccctgatgtcagctacgaaagaagcataataaaatgtgagaaaaatgggaatttgaagcagccttcccccaatggaaacttattttcatcccacctagcaaccctgcaaggcttgaaggtctttagtgaagctgctcagctcattgctacaaaagaagaaaacagacatttgtttcttccacaatgcctttaccctggagcaataaagaaagcaaaaggagccgaccagctttctccatattatggaatcaagccaagtgattatatttctggttctcttgtcatccataacactgacatcgagcaaagcagaaatgcagaaaatgaatctcctaaaggccaggcttcctcaaatgggtgtgctgcgctgaagaaagattctctgccattgttgcccaaaaatcgaggaatggtaatagtgaatggtggactgaaacaagatgagagacctgctgccaacccacagcaagagaacatttcccagaatcctcagcacgaagacgaccacaaatctccctcgtggatctctgagaacccattagctgccaatgagaatgtctcaccaggaattccctcagcagaggaacagttgtctagtatagcaaaaggtgtgaatggttccagccaggctccaaccagtgggaaatattgccggctatgtgatatccagttcaacaacctttcaaactttataactcacaagaagttttattgctcatcacatgcagcagaacatgtcaaatgaactaactaaacatcagtcacctttggtatcagtgtttagtatgttgttctaaccagtccaga

SEQ ID NO: 308083 - protein, 89 aa, Artificial Sequence
  derived and/or modified sequence
MQEQEIGFISKYNEGLCVNTDPVSILTSILDMSLHRQMGSDRDLQSSASSVSLPSVKKAPKKRRISIGSLFRRKKDNKRKSRELNGGVD

SEQ ID NO: 308084 - protein, 113 aa, Artificial Sequence
  derived and/or modified sequence
MQEQEIGFISKYNEGLCVNTDPVSILTSILDMSLHRQMGSDRDLQSSASSVSLPSVKKAPKKRRISIGSLFRRKKDNKRKSRELNGGVDGIASIESIHSEMCTDKNSIFSTNT

SEQ ID NO: 308085 - protein, 156 aa, Artificial Sequence
  derived and/or modified sequence
MQEQEIGFISKYNEGLCVNTDPVSILTSILDMSLHRQMGSDRDLQSSASSVSLPSVKKAPKKRRISIGSLFRRKKDNKRKSRELNGGVDGIASIESIHSEMCTDKNSIFSTNTSSDNGLTSISKQIGDFIECPLCLLRHSKDRFPDIMTCHHRSCV

SEQ ID NO: 308086 - protein, 15 aa, Artificial Sequence
  derived and/or modified sequence
MQEQEIGFISKYNEG

SEQ ID NO: 308087 - DNA, 270 bp, Artificial Sequence
  derived and/or modified sequence
atgcaggagcaggagatcggcttcatcagcaagtacaacgagggcctgtgcgtgaacaccgaccccgtgagcatcctgaccagcatcctggacatgagcctgcacagacagatgggcagcgacagagacctgcagagcagcgccagcagcgtgagcctgcccagcgtgaagaaggcccccaagaagagaagaatcagcatcggcagcctgttcagaagaaagaaggacaacaagagaaagagcagagagctgaacggcggcgtggactag

SEQ ID NO: 308088 - DNA, 498 bp, Artificial Sequence
  derived and/or modified sequence
atgcaggagcaggagatcggcttcatcagcaagtacaacgagggcctgtgcgtgaacaccgaccccgtgagcatcctgaccagcatcctggacatgagcctgcacagacagatgggcagcgacagagacctgcagagcagcgccagcagcgtgagcctgcccagcgtgaagaaggcccccaagaagagaagaatcagcatcggcagcctgttcagaagaaagaaggacaacaagagaaagagcagagagctgaacggcggcgtggacggcatcgccagcatcgagagcatccacagcgagatgtgcaccgacaagaacagcatcttcagcaccaacaccagcagcgacaacggcctgaccagcatcagcaagcagatcggcgacttcatcgagtgccccctgtgcctgctgagacacagcaaggacagattccccgacatcatgacctgccaccacagaagctgcgtggactgcctgagacagtacctgagaatctag

SEQ ID NO: 308089 - DNA, 342 bp, Artificial Sequence
  derived and/or modified sequence
atgcaggagcaggagatcggcttcatcagcaagtacaacgagggcctgtgcgtgaacaccgaccccgtgagcatcctgaccagcatcctggacatgagcctgcacagacagatgggcagcgacagagacctgcagagcagcgccagcagcgtgagcctgcccagcgtgaagaaggcccccaagaagagaagaatcagcatcggcagcctgttcagaagaaagaaggacaacaagagaaagagcagagagctgaacggcggcgtggacggcatcgccagcatcgagagcatccacagcgagatgtgcaccgacaagaacagcatcttcagcaccaacacctag

SEQ ID NO: 308090 - DNA, 471 bp, Artificial Sequence
  derived and/or modified sequence
atgcaggagcaggagatcggcttcatcagcaagtacaacgagggcctgtgcgtgaacaccgaccccgtgagcatcctgaccagcatcctggacatgagcctgcacagacagatgggcagcgacagagacctgcagagcagcgccagcagcgtgagcctgcccagcgtgaagaaggcccccaagaagagaagaatcagcatcggcagcctgttcagaagaaagaaggacaacaagagaaagagcagagagctgaacggcggcgtggacggcatcgccagcatcgagagcatccacagcgagatgtgcaccgacaagaacagcatcttcagcaccaacaccagcagcgacaacggcctgaccagcatcagcaagcagatcggcgacttcatcgagtgccccctgtgcctgctgagacacagcaaggacagattccccgacatcatgacctgccaccacagaagctgcgtgtag

SEQ ID NO: 308091 - DNA, 270 bp, Artificial Sequence
  derived and/or modified sequence
atgcaggagcaggagatcggattcatcagtaaatataacgagggactgtgtgtgaatacagatccagtatcaatcctgacaagcattctggatatgtctttacataggcagatgggaagcgatagggacctgcagtcatcggctagcagcgtttccttgcccagtgtgaagaaggctccaaaaaaaaggagaattagcatcgggtcactgtttagacgcaagaaggataacaagaggaaatccagggagttgaacggtggagttgactag

SEQ ID NO: 308092 - DNA, 498 bp, Artificial Sequence
  derived and/or modified sequence
atgcaggaacaggagatagggttcatttctaagtacaacgaaggactctgcgtaaacacagatccagtgtcgatcctcacatccatactcgatatgagtctgcaccggcagatgggatctgacagggatctgcaatccagcgcatcctcggtgagtttgccttccgtcaagaaagccccgaagaaacgcagaatcagcattggcagtttatttcgtaggaagaaggacaataagcggaaatctagggaactgaatggcggtgttgatggcatcgcctcaattgagagtatccattcagaaatgtgcacggacaaaaattcaatttttagtacgaacacttcctctgacaacggcctcacaagcattagcaagcagataggagattttatcgagtgcccactttgtctcctgaggcattctaaggatcgcttcccagatatcatgacatgccatcaccgctcttgtgtcgattgcctcagacagtatctccgcatctag

SEQ ID NO: 308093 - DNA, 342 bp, Artificial Sequence
  derived and/or modified sequence
atgcaggaacaagagatcggcttcattagtaaatataatgagggcctctgtgtcaacacagaccccgtgagtatattgacgtcaatccttgatatgtcactccaccgccagatgggctcagacagggacctccagagctcagctagttctgtgtctttgcccagtgttaagaaggcccccaaaaaacgacgaatctctattggaagcctgttccgccggaagaaggataataagcggaagagccgggaactaaacgggggggtggatggaatcgcatccatcgagagcatacacagtgagatgtgtaccgataaaaattctatcttcagcactaatacctag

SEQ ID NO: 308094 - DNA, 471 bp, Artificial Sequence
  derived and/or modified sequence
atgcaggaacaggagattggcttcatttccaagtacaatgaaggtctgtgcgtaaatactgacccagttagcattctgacctccattcttgatatgtctctgcaccgacagatgggtagcgatagagatttgcagtcttctgcatcatctgttagtttgccatctgtgaagaaagccccgaaaaagcgaagaatctccattggatctctcttcagacgtaagaaggacaacaagcggaaaagcagagagctgaatgggggcgttgatgggattgcctccatcgaatccatacattcagaaatgtgcaccgataagaattccattttttccactaacactagttccgataatggccttacaagcatttccaaacaaataggggatttcattgaatgccccttgtgtctcttacggcacagtaaggaccgtttcccggacattatgacctgccaccacaggagttgcgtatag

SEQ ID NO: 308095 - DNA, 270 bp, Artificial Sequence
  derived and/or modified sequence
atgcaggagcaggagatcggcttcatcagcaagtacaatgaaggcctgtgtgtgaacacagatcctgtgtccatcctgaccagcatcctggacatgagcctgcaccggcagatgggcagtgaccgggacctgcagagcagcgccagctctgtgtccctgcccagcgtgaagaaggcccccaagaagaggcgcatcagcatcggcagcctcttccggaggaagaaggacaacaagaggaagagccgggagctgaatggaggagtggactag

SEQ ID NO: 308096 - DNA, 498 bp, Artificial Sequence
  derived and/or modified sequence
atgcaggagcaggagatcggcttcatcagcaagtacaatgaaggcctgtgtgtgaacacagatcctgtgtccatcctgaccagcatcctggacatgagcctgcaccggcagatgggcagtgaccgggacctgcagagcagcgccagctctgtgtccctgcccagcgtgaagaaggcccccaagaagaggcgcatcagcatcggcagcctcttccggaggaagaaggacaacaagaggaagagccgggagctgaatggaggagtggatggcatcgccagcattgagagcatccacagcgagatgtgcacagacaagaacagcatcttcagcaccaacaccagcagtgacaatggcctgaccagcatcagcaagcagatcggggacttcattgaatgtcccctgtgcctgctgcggcacagcaaggaccgcttcccagacatcatgacctgccaccacaggagctgtgtggactgcctgcggcagtacctgcgcatctag

SEQ ID NO: 308097 - DNA, 342 bp, Artificial Sequence
  derived and/or modified sequence
atgcaggagcaggagatcggcttcatcagcaagtacaatgaaggcctgtgtgtgaacacagatcctgtgtccatcctgaccagcatcctggacatgagcctgcaccggcagatgggcagtgaccgggacctgcagagcagcgccagctctgtgtccctgcccagcgtgaagaaggcccccaagaagaggcgcatcagcatcggcagcctcttccggaggaagaaggacaacaagaggaagagccgggagctgaatggaggagtggatggcatcgccagcattgagagcatccacagcgagatgtgcacagacaagaacagcatcttcagcaccaacacctag

SEQ ID NO: 308098 - DNA, 471 bp, Artificial Sequence
  derived and/or modified sequence
atgcaggagcaggagatcggcttcatcagcaagtacaatgaaggcctgtgtgtgaacacagatcctgtgtccatcctgaccagcatcctggacatgagcctgcaccggcagatgggcagtgaccgggacctgcagagcagcgccagctctgtgtccctgcccagcgtgaagaaggcccccaagaagaggcgcatcagcatcggcagcctcttccggaggaagaaggacaacaagaggaagagccgggagctgaatggaggagtggatggcatcgccagcattgagagcatccacagcgagatgtgcacagacaagaacagcatcttcagcaccaacaccagcagtgacaatggcctgaccagcatcagcaagcagatcggggacttcattgaatgtcccctgtgcctgctgcggcacagcaaggaccgcttcccagacatcatgacctgccaccacaggagctgtgtgtag

SEQ ID NO: 308099 - DNA, 270 bp, Artificial Sequence
  derived and/or modified sequence
atgcaggagcaggagatcggcttcatcagcaagtacaacgagggcttgtgcgtgaatacggatccggtttctatcttgactagcatcttagatatgagtctccacaggcagatgggttcagacagggatctacaatccagcgcctcctcagtatccctgccctccgtgaagaaagcacctaaaaagcgtcgaatttctatcgggtctctcttcagacgcaaaaaagacaataagaggaagtctcgcgaactgaatggtggagtggactag

SEQ ID NO: 308100 - DNA, 498 bp, Artificial Sequence
  derived and/or modified sequence
atgcaggagcaggagatcggcttcatcagcaagtacaacgagggcctgtgtgtgaataccgatcccgtatccatcctcacgagcatcctcgatatgtctctgcacaggcagatggggagcgaccgggatctacagagcagtgcatccagcgtcagccttcctagtgtcaaaaaagctcccaagaagcgaaggattagcattggatctctgttccgcaggaagaaggacaataaacggaaatctcgcgaactcaacggcggtgttgacggtatagcatccatcgagtctatccactcagagatgtgtactgacaaaaacagtattttcagtactaacaccagctctgataacgggctgacttctatcagcaagcagatcggcgactttatcgagtgcccactgtgcctcctgcggcacagtaaggaccggttccctgacatcatgacttgccaccacagatcttgtgtcgattgtctccggcagtatttgcgaatttag

SEQ ID NO: 308101 - DNA, 342 bp, Artificial Sequence
  derived and/or modified sequence
atgcaggagcaggagatcggcttcatcagcaagtacaacgagggcctgtgcgtgaatactgacccggtttcaattcttacgtctattctggatatgagtctgcacaggcagatgggcagtgatcgggacttgcagtcttccgcatctagtgtgagcttacccagcgtgaaaaaggcaccaaagaaacggcgcataagcattggcagtctctttcgtcggaagaaggataacaaacgtaaaagcagagagctaaatggaggagtggacgggatcgcttcaattgagagcattcatagcgaaatgtgcaccgacaagaactcaatcttctctacgaacacgtag

SEQ ID NO: 308102 - DNA, 471 bp, Artificial Sequence
  derived and/or modified sequence
atgcaggagcaggagatcggcttcatcagcaagtacaacgagggcctgtgtgtgaatactgatccggtttctatcctcactagcatcctagacatgtcccttcatcgacaaatgggatcagatagagacctccagtctagcgcgtcctccgtttctctgccaagtgtgaaaaaagcgcctaagaagcgtcgcatcagtataggaagtctgtttaggcgcaagaaagataacaaaaggaagagccgcgagctgaatggcggcgttgacgggatcgcatcaatcgagtcgatccacagtgaaatgtgcaccgacaagaattctatattctctaccaacacttctagcgataacggccttacctccatcagcaagcagattggggatttcattgagtgccctctttgtttactgcggcatagcaaggaccgcttcccagatataatgacatgccatcaccgctcatgtgtctag

SEQ ID NO: 308103 - DNA, 270 bp, Artificial Sequence
  derived and/or modified sequence
atgcaggagcaggaaattgggtttatctctaaatacaacgaaggtctatgcgtgaatactgaccctgtgtccatccttacctccattctggacatgtcactgcacaggcagatgggatctgacagggacctgcagagcagtgcctcttctgtgtcacttccctctgtaaaaaaggctcctaaaaagcggcgaatttccatcggctcccttttcagacgcaagaaggacaataaacggaaatcccgcgaactcaatggaggagtcgattag

SEQ ID NO: 308104 - DNA, 498 bp, Artificial Sequence
  derived and/or modified sequence
atgcaggagcaagagataggattcatatccaagtataacgaaggcctttgcgtgaacacagatcccgtgtcaattctcaccagtattttggacatgagcctgcaccgacagatgggaagcgacagggacttacagagctcagccagcagtgtctccctaccttccgttaaaaaggcccctaaaaaaagacgcattagcattggcagccttttcagaagaaagaaagacaacaagcgaaagagtcgcgagttgaatggtggcgtcgatgggatagccagtatcgagagcatacacagtgagatgtgcaccgacaagaattctatcttctctactaacacctcttcagataacggtttgacctccattagcaaacagataggcgatttcatagaatgtccattgtgtctcctccgccactccaaggatcgctttccagatatcatgacatgccaccatcgctcatgtgtggattgtcttcgacagtatttacggatttag

SEQ ID NO: 308105 - DNA, 342 bp, Artificial Sequence
  derived and/or modified sequence
atgcaagagcaggaaatcggttttatcagtaagtataacgaaggcctgtgtgtcaatacggatcccgtgagtatcctcacctctattctggacatgtccctgcaccggcagatggggtccgatagagatctgcagagctctgccagcagtgtgtcattgcctagcgtaaaaaaagcgccaaagaagcggaggatatccatcggcagccttttccgaagaaagaaagacaacaagagaaaatctagagaactcaacggcggtgtggacggcatcgccagcatcgagtctatccacagcgagatgtgtaccgacaagaactccatcttctccactaacacctag

SEQ ID NO: 308106 - DNA, 471 bp, Artificial Sequence
  derived and/or modified sequence
atgcaggaacaggagataggctttatctccaagtacaatgagggcctgtgcgtgaataccgaccccgtgagcatcctcactagtatcctggacatgagcctccatcgccagatgggctctgacagggatctccagtccagcgctagttctgtctctctgcccagtgtgaagaaggcaccaaagaagcggcgaatcagtatcgggtctctgtttcggagaaagaaagacaataagcgtaaatctagggagttaaatgggggagtggacggcatagcaagcattgaatccatccacagtgagatgtgcacggataagaattcaattttttccaccaacaccagttctgataacggcctcacatccatctctaagcaaattggggattttatcgagtgtcccttatgtctacttaggcattcgaaagatcgtttccctgatataatgacatgtcaccaccggagttgcgtgtag

SEQ ID NO: 308107 - DNA, 432 bp, Artificial Sequence
  derived and/or modified sequence
gacacattctcccctcaagccccagtgggagcacggcccagctggattttggacttctggcctccagaactaacatccatgatagcagtcttctgtaaatcgaacttttcaagaattctctgaaggaaccaagtaggatattcttacatcatgacttaatgtgaatgcaagaacaagaaataggttttatctctaaatataatgaagggctgtgtgtaaacactgaccctgtctcaattctaacaagcattttagacatgagtttacatcggcaaatgggttcagatcgagatcttcagtcctctgcttcatctgtgagcttgccttcagtcaaaaaggcacccaaaaaaagaagaatttcaataggctccctgtttcggaggaaaaaagataacaaacgtaaatcaagggagctaaatggcggggtggatg

SEQ ID NO: 308108 - DNA, 817 bp, Artificial Sequence
  derived and/or modified sequence
gcctgtctactgccgagggcatttgagtgtgggacccatgccctgcatttcttcgctaccccacagcttctgctcatgaatccagctcaaatgtcagaagaattgacgttagtttgagagaccaaactaagttacagcctctttggtttctgttactctggctggtcttgaactcctggactcaagtgatccaaccacctctgcttctcaaagtgctaggactacagaacatccatgatagcagtcttctgtaaatcgaacttttcaagaattctctgaaggaaccaagtaggatattcttacatcatgacttaatgtgaatgcaagaacaagaaataggttttatctctaaatataatgaagggctgtgtgtaaacactgaccctgtctcaattctaacaagcattttagacatgagtttacatcggcaaatgggttcagatcgagatcttcagtcctctgcttcatctgtgagcttgccttcagtcaaaaaggcacccaaaaaaagaagaatttcaataggctccctgtttcggaggaaaaaagataacaaacgtaaatcaagggagctaaatggcggggtggatggaattgcaagtattgaaagtatacattctgaaatgtgtactgataagaactccattttctctacaaatacctcttctgacaatggattaacttccatcagcaaacaaattggagacttcatagagtgccctttgtgccttttgcggcattctaaagacagatttcctgatataatgacttgtcatcacagatcttgtgtggattgcttacgacaatatttaaggataga

SEQ ID NO: 308109 - DNA, 612 bp, Artificial Sequence
  derived and/or modified sequence
ctcttctctcattggcactgcctgtctactgccgagggcatttgagtgtgggacccatgccctgcatttcttcgctaccccacagcttctgctcatgaatccagctcaaatgtcagaagaattgacgttagtttgagagaccaaactaagttacagcctctttggtttctgttactctgaacatccatgatagcagtcttctgtaaatcgaacttttcaagaattctctgaaggaaccaagtaggatattcttacatcatgacttaatgtgaatgcaagaacaagaaataggttttatctctaaatataatgaagggctgtgtgtaaacactgaccctgtctcaattctaacaagcattttagacatgagtttacatcggcaaatgggttcagatcgagatcttcagtcctctgcttcatctgtgagcttgccttcagtcaaaaaggcacccaaaaaaagaagaatttcaataggctccctgtttcggaggaaaaaagataacaaacgtaaatcaagggagctaaatggcggggtggatggaattgcaagtattgaaagtatacattctgaaatgtgtactgataagaactccattttctctacaaatacct

SEQ ID NO: 308110 - DNA, 792 bp, Artificial Sequence
  derived and/or modified sequence
atgacgggccgaggcggcgctcccctcgagctgtctcctgcccctaaagcgggggagacccaagggcggttgccgcggggaggcggcgggggcggaacgcattcctgacgggtgaaatcggctctaacgggaccgatttccgggcctcgctgcaaatttggagccgggacatcgccccgcaagccgtgctgcctggggccttagggaggggagctgtgttcggaggaagaacatccatgatagcagtcttctgtaaatcgaacttttcaagaattctctgaaggaaccaagtaggatattcttacatcatgacttaatgtgaatgcaagaacaagaaataggttttatctctaaatataatgaagggctgtgtgtaaacactgaccctgtctcaattctaacaagcattttagacatgagtttacatcggcaaatgggttcagatcgagatcttcagtcctctgcttcatctgtgagcttgccttcagtcaaaaaggcacccaaaaaaagaagaatttcaataggctccctgtttcggaggaaaaaagataacaaacgtaaatcaagggagctaaatggcggggtggatggaattgcaagtattgaaagtatacattctgaaatgtgtactgataagaactccattttctctacaaatacctcttctgacaatggattaacttccatcagcaaacaaattggagacttcatagagtgccctttgtgccttttgcggcattctaaagacagatttcctgatataatgacttgtcatcacagatcttgtgtgga

SEQ ID NO: 308111 - protein, 158 aa, Artificial Sequence
  derived and/or modified sequence
MLLFALLLAMELPLVAASATMRAQWTYSLRCHDCAVINDFNCPNIRVCPYHIRRCMTISIRINSRELLVYKNCTNNCTFVYAAEQPPEAPGKIFKTNSFYWVCCCNSMVCNAGGPTNLERDMLPDEVTEEELPEGTVRLGVSKLLLSFASIIVSNILP

SEQ ID NO: 308112 - DNA, 477 bp, Artificial Sequence
  derived and/or modified sequence
atgctgctatttgccctccttctcgcaatggagctgcctctggtggccgctagcgccacaatgcgagcccagtggacatatagccttagatgtcacgattgtgctgtcatcaatgactttaactgccctaacatccgtgtgtgcccgtaccacattaggaggtgtatgactatttctattcggatcaattcccgagaacttctggtgtataaaaattgcactaacaactgcacctttgtgtacgcagcagaacaacccccagaggcccctgggaagattttcaaaaccaacagtttctattgggtgtgctgctgcaacagtatggtctgtaacgccggcggcccaacaaacctcgaacgagacatgctgcctgatgaggtgaccgaggaggaattgcctgagggcaccgtgagactgggcgtttccaagctgcttctctccttcgcaagcattattgtgagcaacatcctgccatag

SEQ ID NO: 308113 - DNA, 477 bp, Artificial Sequence
  derived and/or modified sequence
atgctgctgtttgccctgctgctggccatggagctgcccctggtggccgccagcgccaccatgagggcccagtggacctacagcctgcgctgccacgactgtgctgtgatcaatgacttcaactgccccaacatccgggtgtgcccctaccacatccgccgctgcatgaccatcagcatccgcatcaacagccgggagctgctggtgtacaagaactgcaccaacaactgcacctttgtgtatgctgctgagcagcccccagaggcccctgggaagatcttcaagaccaacagcttctactgggtgtgctgctgcaacagcatggtgtgcaatgctgggggccccaccaacctggagcgggacatgctgcctgatgaggtgacagaggaggagctgcctgagggcaccgtgcggctgggcgtgtccaagctgctgctgagctttgccagcatcatcgtgagcaacatcctgccctag

SEQ ID NO: 308114 - DNA, 477 bp, Artificial Sequence
  derived and/or modified sequence
atgctgctgttcgccctgctgctggccatggagctgcccctggtggctgcctctgcgactatgagagcacagtggacttactccctgagatgtcatgattgcgcggtgattaacgattttaattgtcctaatatccgcgtctgtccttaccatattaggagatgcatgactatttctatacggatcaattcccgtgaactcctggtctataagaattgtacaaataattgcaccttcgtgtacgctgcagagcagcctcctgaagcacccggtaagatctttaaaaccaattcgttttattgggtgtgttgctgtaactccatggtctgcaacgctggaggccccacaaatctggaacgggatatgctgcccgatgaggttacagaagaggagctgccagaaggaacggtaaggctgggcgtgtccaaactgctcctctctttcgccagtattatagttagcaacatcctcccctag

SEQ ID NO: 308115 - DNA, 477 bp, Artificial Sequence
  derived and/or modified sequence
atgctgcttttcgcactgctgctggcgatggagttgcctctggtggccgcttccgccactatgcgcgcacagtggacttactcacttcgctgccacgactgtgctgtgatcaatgactttaattgccccaacatccgggtgtgcccatatcacattcgcagatgcatgaccatctccatccggatcaactctagggaactgttggtgtataagaactgtacaaacaactgtacctttgtgtatgcagctgagcagcctccagaggcccctggtaaaattttcaagaccaattctttttactgggtctgttgttgcaactccatggtatgcaacgcaggcggacctaccaacctggaacgcgacatgctgcctgacgaagtcaccgaagaggaactaccggagggcacggtgagactcggagtttcaaaactgctgctgagcttcgcttcaattattgtgtcaaacatcttaccctag

SEQ ID NO: 308116 - DNA, 477 bp, Artificial Sequence
  derived and/or modified sequence
atgctgctgttcgccctgctgctggccatggagctgcccctggtggccgccagcgccaccatgagagcccagtggacctacagcctgagatgccacgactgcgccgtgatcaacgacttcaactgccccaacatcagagtgtgcccctaccacatcagaagatgcatgaccatcagcatcagaatcaacagcagagagctgctggtgtacaagaactgcaccaacaactgcaccttcgtgtacgccgccgagcagccccccgaggcccccggcaagatcttcaagaccaacagcttctactgggtgtgctgctgcaacagcatggtgtgcaacgccggcggccccaccaacctggagagagacatgctgcccgacgaggtgaccgaggaggagctgcccgagggcaccgtgagactgggcgtgagcaagctgctgctgagcttcgccagcatcatcgtgagcaacatcctgccctag

SEQ ID NO: 308117 - DNA, 723 bp, Artificial Sequence
  derived and/or modified sequence
gtcggcgcgggaggctcagatggctggaggcggcgggcacgcacactgcggggctccgaggggcacaggtccaggctcctgcgtgaagtgatgctcctctttgccttactcctagccatggagctcccattggtggcagccagtgccaccatgcgcgctcagtggacttacagtttgagatgccatgactgtgcggtcataaatgacttcaactgtcccaacattagagtatgtccgtatcatattaggcgctgtatgacaatctccattcgcataaattctcgtgaactacttgtttataagaactgtacaaacaactgcacatttgtatatgcagctgaacagcctcctgaagccccaggaaaaatcttcaaaactaatagcttctactgggtttgttgttgtaatagcatggtttgcaatgcaggaggacctactaatcttgaaagggacatgttacccgatgaagtaactgaggaggagcttccagaaggaactgtgaggctgggggtatcaaaactgttgctgagttttgcctctatcatagtcagcaatatattgccatgaggaccccaccttggagggtctgaccatcttcacctgttccgcagagaaatgttgctctccattattcccttctaagccagagacccttatccactgctcctctaggtggcccatttatggtttgttgtaagagaaaaattaaaaaaatattgttta

SEQ ID NO: 308118 - protein, 86 aa, Artificial Sequence
  derived and/or modified sequence
MGRKDAATIKLPVDQYRKQIGKQDYKKTKPILRATKLKAEAKKTAIGIKEVGLVLAAILALLLAFYAFFYLRLTTDVDPDLDQDED

SEQ ID NO: 308119 - protein, 75 aa, Artificial Sequence
  derived and/or modified sequence
MGRKDAATIKLPVDQYRKQIGKQDYKKTKPILRATKLKAEAKKTAIGIKEVGLVLAAILALLLAFYAFFYLRLTT

SEQ ID NO: 308120 - DNA, 1596 bp, Artificial Sequence
  derived and/or modified sequence
gtcccgcccctgcccctgagtgacagaaccgtggacagcaacatttcccacaggacacgaagtttgtcggcccttgccttggcagagctgagtaagaaaaatcaccaagaatattatttttggtatttggaattgaatttgccaggaatgcaagcactgctacctaactaaagaccttggctttggaaacatcttaccccttggcagctctccagagtttagacttggcagcatcaaagacacaacgcaagcaatatgaaacagaaaaacaagttggttggatagctgtcctccatgcagtcattcatgatccaggctgtcatcatcttcatcactcatgttcagagttaccctagaggtcatctccatttcatccagataaatgagtatgcaaggaacgtttttataggcattttggagatcaaagatgggtagaaaagatgctgctactataaaacttcctgttgatcagtacagaaaacaaattggtaaacaggattataaaaaaactaaacctattttacgagcaaccaaattaaaagcagaagcaaagaaaacagcaataggcataaaggaagttggccttgtacttgcagctatattggcactactactggctttctatgctttcttttatctcagactcaccacggatgttgaccctgatctggaccaagatgaagattagctaagcaacaatcaatgcatgaaagagaaataactttacgaaagcaccttttgggaccaaaactttcaatactgaaactgtaacatctttaattctttctgctaatattttcagtttgcagacatatgatttttgatagttgcataggatgtcaggaaaagaaccttacctagcaatgcagtatagtatgtgctactggatacttttatatatctttctgctttgacagccaccctatacatggtacatttagatgaaatgggaaccagatcctaaatttttcaaatgtcattgccaatttatgtgtataattccatcacttcctgatgagtaagtctatttttgttctatatacatcataagttagtatatattcttatttacagaaacatgctcaaatcacattcagaaagaacaaaaagtcatgggaaattttttattttacaacaaagccctgctttctttctggacgtattttacatcattagagagactatctgcacatacatctaccataatctttttccttctttgccaactgttcagtgcacatgtgctgcatcagaaatggcacctggatgacagaagctcaaagagtcacatatgtctctaaaatagagttcttttcctcttgggctgtctgaactggtgtaaatagaagctcagttgatcttggttttaattaacttattactctattaatataaccttggaattctattctaattatgttgttctggctgcttgtagtatcagttcgcccctcttgttagggagatatgtaacaatctgtcatttaattgagcagtctttttcacataacagtaatagcaaaaatcctacctactcagaatcatcttcttaggttgtctcctaaatctgaacaatacagttgttttataaaatta

SEQ ID NO: 308121 - DNA, 805 bp, Artificial Sequence
  derived and/or modified sequence
cgaggggattggggagaccctgcccgggaagctcggggtccgggaatgaaagcgggcgcacctctttagcgagccctaaagcgtttgggagacgatcgttccgtccctgggagcggcacttggtggggctgggcggagggaggctctgcaagagaaacccggagtccgggaaacccagtagtttctggaggctgctcacattccttggcttatggcctccttcttccaacgtcaaagccagcaacattgcagcaatctgacttattttgttgtcatgtctcctgaccacatctggaagggttatctacttttgaagacacatccagataattcaggacaatctgtccattttgaggttcttcattgaatcatgtctgcaaagtcccttctgcaatctaagtaagaaaaatcaccaagaatattatttttggtatttggaattgaatttgccaggaatgcaagcactgctacctaactaaagaccttggctttggaaacatcttaccccttggcagctctccagagtttagacttggcagcatcaaagacacaacgcaagcaggcattttggagatcaaagatgggtagaaaagatgctgctactataaaacttcctgttgatcagtacagaaaacaaattggtaaacaggattataaaaaaactaaacctattttacgagcaaccaaattaaaagcagaagcaaagaaaacagcaataggcataaaggaagttggccttgtacttgcagctatattggcactactactggctttctatgctttcttttatctcagactcaccacg

SEQ ID NO: 308122 - DNA, 3563 bp, Artificial Sequence
  derived and/or modified sequence
ctcttttccgcctcaccctttgggagtaggggtgtgcggctggcttgtcccgcccctgcccctgagtgacagaaccgtggacagcaacatttcccacaggacacgaagtttgtcggcccttgccttggcagagctgagtaagaaaaatcaccaagaatattatttttggtatttggaattgaatttgccaggaatgcaagcactgctacctaactaaagaccttggctttggaaacatcttaccccttggcagctctccagagtttagacttggcagcatcaaagacacaacgcaaggcattttggagatcaaagatgggtagaaaagatgctgctactataaaacttcctgttgatcagtacagaaaacaaattggtaaacaggattataaaaaaactaaacctattttacgagcaaccaaattaaaagcagaagcaaagaaaacagcaataggcataaaggaagttggccttgtacttgcagctatattggcactactactggctttctatgctttcttttatctcagactcaccacggatgttgaccctgatctggaccaagatgaagattagctaagcaacaatcaatgcatgaaagagaaataactttacgaaagcaccttttgggaccaaaactttcaatactgaaactgtaacatctttaattctttctgctaatattttcagtttgcagacatatgatttttgatagttgcataggatgtcaggaaaagaaccttacctagcaatgcagtatagtatgtgctactggatacttttatatatctttctgctttgacagccaccctatacatggtacatttagatgaaatgggaaccagatcctaaatttttcaaatgtcattgccaatttatgtgtataattccatcacttcctgatgagtaagtctatttttgttctatatacatcataagttagtatatattcttatttacagaaacatgctcaaatcacattcagaaagaacaaaaagtcatgggaaattttttattttacaacaaagccctgctttctttctggacgtattttacatcattagagagactatctgcacatacatctaccataatctttttccttctttgccaactgttcagtgcacatgtgctgcatcagaaatggcacctggatgacagaagctcaaagagtcacatatgtctctaaaatagagttcttttcctcttgggctgtctgaactggtgtaaatagaagctcagttgatcttggttttaattaacttattactctattaatataaccttggaattctattctaattatgttgttctggctgcttgtagtatcagttcgcccctcttgttagggagatatgtaacaatctgtcatttaattgagcagtctttttcacataacagtaatagcaaaaatcctacctactcagaatcatcttcttaggttgtctcctaaatctgaacaatacagttgttttataaaattacattttgtctcttgagatttaatcaattagaactctttagggagaaaataaataatagaagaaaatatatgcctcatatttcatatgtaattatctgttgatataatttttcaatgtattttgtatttgtgggagcataatgacctgtacattcaatatttttactggtaattcaatttttaaatatgtttttacaatgcttgaacacataaaccttagaaaactggaaaatacgtgtccacagaaagagttattagctactaccttatgtaaagatgcatagaaaatgaaattgttggaaacatgtgcacaaagtgttttatattatatacattgtatttatgaagaataaataaaatattaagattgttttcctgctagccaagagaagaaatccttgggaaatatctaaggagtatatggggctttataagcactgtttctaaaagatattctctggtacttttgcaaaaagtcgactgtgactgtgtagcattatgttctgtagaatttttttcaagtagcataatttatttcattggtgtgaaaacagccaaaggttccaatatcctcacaaatcatttatgccaaacatctgagggcaaaatttagccggtgttatttactagattcttccctttgaactcacagactcaagagacagaccaagagttcttatatactcaccacagcggaccaatccaagtggcatttttaggaaaggttgcagcatttaatgccatgtggtatgtctgttcgtcaagtgggtggcaagggaatatccaagctggcattttggatatgatgggccttttactttcctgagtgacatgccacatgtcaagaaatactgctccccacccccccactcccatcacatttacgtgaacaattttcatttagttatttcccgttccatatggtgttaaaacagtcgtattaaataaagattatttctagttttcagtggtaatttaaatgagaggatatgtaataattgcttattagatacttatccaaatgaaatataacagagtttacagtacttaaaatggctggttatggtcttggaaatgtttgaaaattcattatcctgaaaaaaactttaccattctgttttacccttgaggtattttttggggaaaaatgtttttgataactattaatctaaatatagtataattataggcaaatttcactgcctagttttattgatatcctgagtctacagctagtccattcgtatgactgattgatttatgatagctccagagaaccataaatttcaaaggctaaactctctgattttagtaaatagtaggtaaagtgacacaatatatgtttacacaacactgttttcatgaaatgcaaactttgcaaaactcacattaactgggaagcagccaaccctctgtagagaaatcccagattgggagtctggtttgaatctttgaagacagaaaggtgatatccggcctgctgttttaaagggaccacacttttgaatacctactggtgtttggcagaaatctgagactggcaccagacacaaattttagacatgggtatcttccctccagtaattcactgctcagagtaatttagaagacaaaaacagaaaaaattgtaatgattttttaagtgttagaatatgtttgttaacatactctgcaaaataaatttcaactaatgcaatagacttaaaatatagcctatggaatactgtgattgaagtttgaaggcttgctggttcttattttgcatgcaagtttagacagggtaaagaatgtataaatttatttgagatgagatacagtattgtaaaaatataacctcatctagaattgcttttaaaacaagcaaaagcctattttagtacaaatgtagggtgggtagttgttttaaggtagcaaaatacttcaagattttctatctttttaatttttcatgaagacagaagaaatactttcaccccaaccaatgactgtaagatcttgagagtatgttcttactcatttctgtaattgcagtagtgtagtcatctgcatataaatttaataaatgcatgttaaaatttaa

SEQ ID NO: 308123 - DNA, 555 bp, Artificial Sequence
  derived and/or modified sequence
gtgctgaccgattactcgcggtcgcttacttgtcagtgcagctctctgggttctgccgttcccttttggggccccctttcccatgtaagaaaaatcaccaagaatattatttttggtatttggaattgaatttgccaggaatgcaagcactgctacctaactaaagaccttggctttggaaacatcttaccccttggcagctctccagagtttagacttggcagcatcaaagacacaacgcaagcaggcattttggagatcaaagatgggtagaaaagatgctgctactataaaacttcctgttgatcagtacagaaaacaaattggtaaacaggattataaaaaaactaaacctattttacgagcaaccaaattaaaagcagaagcaaagaaaacagcaataggcataaaggaagttggccttgtacttgcagctatattggcactactactggctttctatgctttcttttatctcagactcaccacggatgttgaccctgatctggaccaagatgaagattagctaagcaacaatcaatgcatgaaagagaa

SEQ ID NO: 308124 - DNA, 1829 bp, Artificial Sequence
  derived and/or modified sequence
gtgcggctggcttgtcccgcccctgcccctgagtgacagaaccgtggacagcaacatttcccacaggacacgaagtttgtcggcccttgccttggcagagctgagcaatatgaaacagaaaaacaagttggttggatagctgtcctccatgcagtcattcatgatccaggctgtcatcatcttcatcactcatgttcagagttaccctagaggtcatctccatttcatccagataaatgagtatgcaaggaacgtttttataggcattttggagatcaaagatgggtagaaaagatgctgctactataaaacttcctgttgatcagtacagaaaacaaattggtaaacaggattataaaaaaactaaacctattttacgagcaaccaaattaaaagcagaagcaaagaaaacagcaataggcataaaggaagttggccttgtacttgcagctatattggcactactactggctttctatgctttcttttatctcagactcaccacggatgttgaccctgatctggaccaagatgaagattagctaagcaacaatcaatgcatgaaagagaaataactttacgaaagcaccttttgggaccaaaactttcaatactgaaactgtaacatctttaattctttctgctaatattttcagtttgcagacatatgatttttgatagttgcataggatgtcaggaaaagaaccttacctagcaatgcagtatagtatgtgctactggatacttttatatatctttctgctttgacagccaccctatacatggtacatttagatgaaatgggaaccagatcctaaatttttcaaatgtcattgccaatttatgtgtataattccatcacttcctgatgagtaagtctatttttgttctatatacatcataagttagtatatattcttatttacagaaacatgctcaaatcacattcagaaagaacaaaaagtcatgggaaattttttattttacaacaaagccctgctttctttctggacgtattttacatcattagagagactatctgcacatacatctaccataatctttttccttctttgccaactgttcagtgcacatgtgctgcatcagaaatggcacctggatgacagaagctcaaagagtcacatatgtctctaaaatagagttcttttcctcttgggctgtctgaactggtgtaaatagaagctcagttgatcttggttttaattaacttattactctattaatataaccttggaattctattctaattatgttgttctggctgcttgtagtatcagttcgcccctcttgttagggagatatgtaacaatctgtcatttaattgagcagtctttttcacataacagtaatagcaaaaatcctacctactcagaatcatcttcttaggttgtctcctaaatctgaacaatacagttgttttataaaattacattttgtctcttgagatttaatcaattagaactctttagggagaaaataaataatagaagaaaatatatgcctcatatttcatatgtaattatctgttgatataatttttcaatgtattttgtatttgtgggagcataatgacctgtacattcaatatttttactggtaattcaatttttaaatatgtttttacaatgcttgaacacataaaccttagaaaactggaaaatacgtgtccacagaaagagttattagctactaccttatgtaaagatgcatagaaaatgaaattgttggaaacatgtgcacaaagtgttttatattatatacattgtatttatgaagaataaataaaatattaagattgttttcctgct

SEQ ID NO: 308125 - DNA, 1808 bp, Artificial Sequence
  derived and/or modified sequence
actccggcaattctggcctctccagcctcttgcctttcttctgaggggagccttttatcctgctgtaagaaaaatcaccaagaatattatttttggtatttggaattgaatttgccaggaatgcaagcactgctacctaactaaagaccttggctttggaaacatcttaccccttggcagctctccagagtttagacttggcagcatcaaagacacaacgcaagcaggcattttggagatcaaagatgggtagaaaagatgctgctactataaaacttcctgttgatcagtacagaaaacaaattggtaaacaggattataaaaaaactaaacctattttacgagcaaccaaattaaaagcagaagcaaagaaaacagcaataggcataaaggaagttggccttgtacttgcagctatattggcactactactggctttctatgctttcttttatctcagactcaccacggatgttgaccctgatctggaccaagatgaagattagctaagcaacaatcaatgcatgaaagagaaataactttacgaaagcaccttttgggaccaaaactttcaatactgaaactgtaacatctttaattctttctgctaatattttcagtttgcagacatatgatttttgatagttgcataggatgtcaggaaaagaaccttacctagcaatgcagtatagtatgtgctactggatacttttatatatctttctgctttgacagccaccctatacatggtacatttagatgaaatgggaaccagatcctaaatttttcaaatgtcattgccaatttatgtgtataattccatcacttcctgatgagtaagtctatttttgttctatatacatcataagttagtatatattcttatttacagaaacatgctcaaatcacattcagaaagaacaaaaagtcatgggaaattttttattttacaacaaagccctgctttctttctggacgtattttacatcattagagagactatctgcacatacatctaccataatctttttccttctttgccaactgttcagtgcacatgtgctgcatcagaaatggcacctggatgacagaagctcaaagagtcacatatgtctctaaaatagagttcttttcctcttgggctgtctgaactggtgtaaatagaagctcagttgatcttggttttaattaacttattactctattaatataaccttggaattctattctaattatgttgttctggctgcttgtagtatcagttcgcccctcttgttagggagatatgtaacaatctgtcatttaattgagcagtctttttcacataacagtaatagcaaaaatcctacctactcagaatcatcttcttaggttgtctcctaaatctgaacaatacagttgttttataaaattacattttgtctcttgagatttaatcaattagaactctttagggagaaaataaataatagaagaaaatatatgcctcatatttcatatgtaattatctgttgatataatttttcaatgtattttgtatttgtgggagcataatgacctgtacattcaatatttttactggtaattcaatttttaaatatgtttttacaatgcttgaacacataaaccttagaaaactggaaaatacgtgtccacagaaagagttattagctactaccttatgtaaagatgcatagaaaatgaaattgttggaaacatgtgcacaaagtgttttatattatatacattgtatttatgaagaataaataaaatattaagattgttttcctgctagccaagagaagaaa

SEQ ID NO: 308126 - DNA, 774 bp, Artificial Sequence
  derived and/or modified sequence
ggtgtgcggctggcttgtcccgcccctgcccctgagtgacagaaccgtggacagcaacatttcccacaggacacgaagtttgtcggcccttgccttggcagagctgaggcattttggagatcaaagatgggtagaaaagatgctgctactataaaacttcctgttgatcagtacagaaaacaaattggtaaacaggattataaaaaaactaaacctattttacgagcaaccaaattaaaagcagaagcaaagaaaacagcaataggcataaaggaagttggccttgtacttgcagctatattggcactactactggctttctatgctttcttttatctcagactcaccacggatgttgaccctgatctggaccaagatgaagattagctaagcaacaatcaatgcatgaaagagaaataactttacgaaagcaccttttgggaccaaaactttcaatactgaaactgtaacatctttaattctttctgctaatattttcagtttgcagacatatgatttttgatagttgcataggatgtcaggaaaagaaccttacctagcaatgcagtatagtatgtgctactggatacttttatatatctttctgctttgacagccaccctatacatggtacatttagatgaaatgggaaccagatcctaaatttttcaaatgtcattgccaatttatgtgtataattccatcacttcctgatgagtaagtctatttttgttctatatacatcataagttagtatatattcttatttacaga

SEQ ID NO: 308127 - DNA, 3672 bp, Artificial Sequence
  derived and/or modified sequence
cctcttttccgcctcaccctttgggagtaggggtgtgcggctggcttgtcccgcccctgcccctgagtgacagaaccgtggacagcaacatttcccacaggacacgaagtttgtcggcccttgccttggcagagctgagtaagaaaaatcaccaagaatattatttttggtatttggaattgaatttgccaggaatgcaagcactgctacctaactaaagaccttggctttggaaacatcttaccccttggcagctctccagagtttagacttggcagcatcaaagacacaacgcaagcaggcattttggagatcaaagatgggtagaaaagatgctgctactataaaacttcctgttgatcagtacagaaaacaaattggtaaacaggattataaaaaaactaaacctattttacgagcaaccaaattaaaagcagaagcaaagaaaacagcaataggcataaaggaagttggccttgtacttgcagctatattggcactactactggctttctatgctttcttttatctcagactcaccacggatgttgaccctgatctggaccaagatgaagattagctaagcaacaatcaatgcatgaaagagaaataactttacgaaagcaccttttgggaccaaaactttcaatactgaaactgtaacatctttaattctttctgctaatattttcagtttgcagacatatgatttttgatagttgcataggatgtcaggaaaagaaccttacctagcaatgcagtatagtatgtgctactggatacttttatatatctttctgctttgacagccaccctatacatggtacatttagatgaaatgggaaccagatcctaaatttttcaaatgtcattgccaatttatgtgtataattccatcacttcctgatgagtaagtctatttttgttctatatacatcataagttagtatatattcttatttacagaaacatgctcaaatcacattcagaaagaacaaaaagtcatgggaaattttttattttacaacaaagccctgctttctttctggacgtattttacatcattagagagactatctgcacatacatctaccataatctttttccttctttgccaactgttcagtgcacatgtgctgcatcagaaatggcacctggatgacagaagctcaaagagtcacatatgtctctaaaatagagttcttttcctcttgggctgtctgaactggtgtaaatagaagctcagttgatcttggttttaattaacttattactctattaatataaccttggaattctattctaattatgttgttctggctgcttgtagtatcagttcgcccctcttgttagggagatatgtaacaatctgtcatttaattgagcagtctttttcacataacagtaatagcaaaaatcctacctactcagaatcatcttcttaggttgtctcctaaatctgaacaatacagttgttttataaaattacattttgtctcttgagatttaatcaattagaactctttagggagaaaataaataatagaagaaaatatatgcctcatatttcatatgtaattatctgttgatataatttttcaatgtattttgtatttgtgggagcataatgacctgtacattcaatatttttactggtaattcaatttttaaatatgtttttacaatgcttgaacacataaaccttagaaaactggaaaatacgtgtccacagaaagagttattagctactaccttatgtaaagatgcatagaaaatgaaattgttggaaacatgtgcacaaagtgttttatattatatacattgtatttatgaagaataaataaaatattaagattgttttcctgctagccaagagaagaaatccttgggaaatatctaaggagtatatggggctttataagcactgtttctaaaagatattctctggtacttttgcaaaaagtcgactgtgactgtgtagcattatgttctgtagaatttttttcaagtagcataatttatttcattggtgtgaaaacagccaaaggttccaatatcctcacaaatcatttatgccaaacatctgagggcaaaatttagccggtgttatttactagattcttccctttgaactcacagactcaagagacagaccaagagttcttatatactcaccacagcggaccaatccaagtggcatttttaggaaaggttgcagcatttaatgccatgtggtatgtctgttcgtcaagtgggtggcaagggaatatccaagctggcattttggatatgatgggccttttactttcctgagtgacatgccacatgtcaagaaatactgctccccacccccccactcccatcacatttacgtgaacaattttcatttagttatttcccgttccatatggtgttaaaacagtcgtattaaataaagattatttctagttttcagtggtaatttaaatgagaggatatgtaataattgcttattagatacttatccaaatgaaatataacagagtttacagtacttaaaatggctggttatggtcttggaaatgtttgaaaattcattatcctgaaaaaaactttaccattctgttttacccttgaggtattttttggggaaaaatgtttttgataactattaatctaaatatagtataattataggcaaatttcactgcctagttttattgatatcctgagtctacagctagtccattcgtatgactgattgatttatgatagctccagagaaccataaatttcaaaggctaaactctctgattttagtaaatagtaggtaaagtgacacaatatatgtttacacaacactgttttcatgaaatgcaaactttgcaaaactcacattaactgggaagcagccaaccctctgtagagaaatcccagattgggagtctggtttgaatctttgaagacagaaaggtgatatccggcctgctgttttaaagggaccacacttttgaatacctactggtgtttggcagaaatctgagactggcaccagacacaaattttagacatgggtatcttccctccagtaattcactgctcagagtaatttagaagacaaaaacagaaaaaattgtaatgattttttaagtgttagaatatgtttgttaacatactctgcaaaataaatttcaactaatgcaatagacttaaaatatagcctatggaatactgtgattgaagtttgaaggcttgctggttcttattttgcatgcaagtttagacagggtaaagaatgtataaatttatttgagatgagatacagtattgtaaaaatataacctcatctagaattgcttttaaaacaagcaaaagcctattttagtacaaatgtagggtgggtagttgttttaaggtagcaaaatacttcaagattttctatctttttaatttttcatgaagacagaagaaatactttcaccccaaccaatgactgtaagatcttgagagtatgttcttactcatttctgtaattgcagtagtgtagtcatctgcatataaatttaataaatgcatgttaaaatttaagttgatgccttttagtcctctcagagtctgtcacagtttctttgtgtaaatgataaaaaagtttgaatttaatcaataaaacttaaaaatcacaatatcaatcaa

SEQ ID NO: 308128 - DNA, 737 bp, Artificial Sequence
  derived and/or modified sequence
tttgtcggcccttgccttggcagagctgaggtgtgtgtccggcgagtgcgaggggattggggagaccctgcccgggaagctcggggtccgggaatgaaagcgggcgcacctctttagcgagccctaaagcgtttgggagacgatcgttccgtccctgggagcggcacttggtggggctgggcggagggaggctctgcaagagaaacccggagtccgggaaacccagtagtaagaaaaatcaccaagaatattatttttggtatttggaattgaatttgccaggaatgcaagcactgctacctaactaaagaccttggctttggaaacatcttaccccttggcagctctccagagtttagacttggcagcatcaaagacacaacgcaagcaggcattttggagatcaaagatgggtagaaaagatgctgctactataaaacttcctgttgatcagtacagaaaacaaattggtaaacaggattataaaaaaactaaacctattttacgagcaaccaaattaaaagcagaagcaaagaaaacagcaataggcataaaggaagttggccttgtacttgcagctatattggcactactactggctttctatgctttcttttatctcagactcaccacggatgttgaccctgatctggaccaagatgaagattagctaagcaacaatcaatgcatgaaagagaaataactttacgaaagcaccttttgggaccaaaactttc

SEQ ID NO: 308129 - DNA, 3510 bp, Artificial Sequence
  derived and/or modified sequence
ctcttttccgcctcaccctttgggagtaggggtgtgcggctggcttgtcccgcccctgcccctgagtgacagaaccgtggacagcaacatttcccacaggacacgaagtttgtcggcccttgccttggcagagctgagcaggcattttggagatcaaagatgggtagaaaagatgctgctactataaaacttcctgttgatcagtacagaaaacaaattggtaaacaggattataaaaaaactaaacctattttacgagcaaccaaattaaaagcagaagcaaagaaaacagcaataggcataaaggaagttggccttgtacttgcagctatattggcactactactggctttctatgctttcttttatctcagactcaccacggatgttgaccctgatctggaccaagatgaagattagctaagcaacaatcaatgcatgaaagagaaataactttacgaaagcaccttttgggaccaaaactttcaatactgaaactgtaacatctttaattctttctgctaatattttcagtttgcagacatatgatttttgatagttgcataggatgtcaggaaaagaaccttacctagcaatgcagtatagtatgtgctactggatacttttatatatctttctgctttgacagccaccctatacatggtacatttagatgaaatgggaaccagatcctaaatttttcaaatgtcattgccaatttatgtgtataattccatcacttcctgatgagtaagtctatttttgttctatatacatcataagttagtatatattcttatttacagaaacatgctcaaatcacattcagaaagaacaaaaagtcatgggaaattttttattttacaacaaagccctgctttctttctggacgtattttacatcattagagagactatctgcacatacatctaccataatctttttccttctttgccaactgttcagtgcacatgtgctgcatcagaaatggcacctggatgacagaagctcaaagagtcacatatgtctctaaaatagagttcttttcctcttgggctgtctgaactggtgtaaatagaagctcagttgatcttggttttaattaacttattactctattaatataaccttggaattctattctaattatgttgttctggctgcttgtagtatcagttcgcccctcttgttagggagatatgtaacaatctgtcatttaattgagcagtctttttcacataacagtaatagcaaaaatcctacctactcagaatcatcttcttaggttgtctcctaaatctgaacaatacagttgttttataaaattacattttgtctcttgagatttaatcaattagaactctttagggagaaaataaataatagaagaaaatatatgcctcatatttcatatgtaattatctgttgatataatttttcaatgtattttgtatttgtgggagcataatgacctgtacattcaatatttttactggtaattcaatttttaaatatgtttttacaatgcttgaacacataaaccttagaaaactggaaaatacgtgtccacagaaagagttattagctactaccttatgtaaagatgcatagaaaatgaaattgttggaaacatgtgcacaaagtgttttatattatatacattgtatttatgaagaataaataaaatattaagattgttttcctgctagccaagagaagaaatccttgggaaatatctaaggagtatatggggctttataagcactgtttctaaaagatattctctggtacttttgcaaaaagtcgactgtgactgtgtagcattatgttctgtagaatttttttcaagtagcataatttatttcattggtgtgaaaacagccaaaggttccaatatcctcacaaatcatttatgccaaacatctgagggcaaaatttagccggtgttatttactagattcttccctttgaactcacagactcaagagacagaccaagagttcttatatactcaccacagcggaccaatccaagtggcatttttaggaaaggttgcagcatttaatgccatgtggtatgtctgttcgtcaagtgggtggcaagggaatatccaagctggcattttggatatgatgggccttttactttcctgagtgacatgccacatgtcaagaaatactgctccccacccccccactcccatcacatttacgtgaacaattttcatttagttatttcccgttccatatggtgttaaaacagtcgtattaaataaagattatttctagttttcagtggtaatttaaatgagaggatatgtaataattgcttattagatacttatccaaatgaaatataacagagtttacagtacttaaaatggctggttatggtcttggaaatgtttgaaaattcattatcctgaaaaaaactttaccattctgttttacccttgaggtattttttggggaaaaatgtttttgataactattaatctaaatatagtataattataggcaaatttcactgcctagttttattgatatcctgagtctacagctagtccattcgtatgactgattgatttatgatagctccagagaaccataaatttcaaaggctaaactctctgattttagtaaatagtaggtaaagtgacacaatatatgtttacacaacactgttttcatgaaatgcaaactttgcaaaactcacattaactgggaagcagccaaccctctgtagagaaatcccagattgggagtctggtttgaatctttgaagacagaaaggtgatatccggcctgctgttttaaagggaccacacttttgaatacctactggtgtttggcagaaatctgagactggcaccagacacaaattttagacatgggtatcttccctccagtaattcactgctcagagtaatttagaagacaaaaacagaaaaaattgtaatgattttttaagtgttagaatatgtttgttaacatactctgcaaaataaatttcaactaatgcaatagacttaaaatatagcctatggaatactgtgattgaagtttgaaggcttgctggttcttattttgcatgcaagtttagacagggtaaagaatgtataaatttatttgagatgagatacagtattgtaaaaatataacctcatctagaattgcttttaaaacaagcaaaagcctattttagtacaaatgtagggtgggtagttgttttaaggtagcaaaatacttcaagattttctatctttttaatttttcatgaagacagaagaaatactttcaccccaaccaatgactgtaagatcttgagagtatgttcttactcatttctgtaattgcagtagtgtagtcatctgcatataaatttaataaatgcatgttaaaatttaagttgatgccttttagtcctctcagagtctgtcacagtttctttgtgtaaatgataaaaaagtttgaatttaatcaataaaacttaaaaatcacaatatcaatc

SEQ ID NO: 308130 - DNA, 261 bp, Artificial Sequence
  derived and/or modified sequence
atgggcagaaaggacgccgccaccatcaagctgcccgtggaccagtacagaaagcagatcggcaagcaggactacaagaagaccaagcccatcctgagagccaccaagctgaaggccgaggccaagaagaccgccatcggcatcaaggaggtgggcctggtgctggccgccatcctggccctgctgctggccttctacgccttcttctacctgagactgaccaccgacgtggaccccgacctggaccaggacgaggactag

SEQ ID NO: 308131 - DNA, 228 bp, Artificial Sequence
  derived and/or modified sequence
atgggcagaaaggacgccgccaccatcaagctgcccgtggaccagtacagaaagcagatcggcaagcaggactacaagaagaccaagcccatcctgagagccaccaagctgaaggccgaggccaagaagaccgccatcggcatcaaggaggtgggcctggtgctggccgccatcctggccctgctgctggccttctacgccttcttctacctgagactgaccacctag

SEQ ID NO: 308132 - DNA, 261 bp, Artificial Sequence
  derived and/or modified sequence
atggggcgcaaagacgccgccacaatcaagctcccagtcgatcaatatcgtaagcagataggaaagcaggactataagaagactaagcccattttaagggctaccaaactgaaagccgaagcaaagaagacagccatcggcatcaaagaagtgggtttggtgctggctgcaattctggccctgctccttgccttttatgcatttttttatctacggctgactactgatgttgacccggacctggatcaggatgaagattag

SEQ ID NO: 308133 - DNA, 228 bp, Artificial Sequence
  derived and/or modified sequence
atggggagaaaggatgccgccaccatcaaactgcctgtggaccaatacaggaagcaaattgggaaacaggactacaaaaaaacaaagccaatcctgcgagctactaagctcaaagcagaggccaaaaaaactgctattggcatcaaagaagtcgggctcgttttggcagccatacttgctctcctgctagcgttctatgcctttttttatctgcggcttacaacctag

SEQ ID NO: 308134 - DNA, 261 bp, Artificial Sequence
  derived and/or modified sequence
atgggacgaaaggatgcagctaccatcaaactccccgtggaccagtaccgaaaacaaattggtaagcaagactacaagaagacaaaaccaatactaagagccaccaagctgaaggccgaggctaaaaagaccgcgatcggaatcaaagaggtgggattggtcctcgcagctatcctcgcactgctgctggccttctacgctttcttttatctgcggctgactacagacgtcgatccagacctggaccaggacgaagattag

SEQ ID NO: 308135 - DNA, 261 bp, Artificial Sequence
  derived and/or modified sequence
atgggcaggaaagacgcagctaccataaagttaccggtggatcagtacaggaagcagattggcaaacaagattacaaaaagactaaacccatcctgagagccacaaaactcaaagcggaggccaagaagacagccattggaatcaaggaagtcggactcgtattggctgcaattctagctctgctccttgcattttatgcattcttttatttaagacttacgacagacgtagaccctgacctagatcaggatgaggactag

SEQ ID NO: 308136 - DNA, 261 bp, Artificial Sequence
  derived and/or modified sequence
atgggtaggaaggatgccgcgaccatcaagttgccagttgaccagtacagaaagcagattggtaagcaagactacaaaaagacaaaacctatccttagggcaacaaaactgaaggccgaagccaagaagactgccattggtattaaggaagttgggcttgtacttgccgccattctggccctcctccttgctttttacgctttcttttaccttcggctgacaactgacgtcgacccggatctcgaccaggatgaagactag

SEQ ID NO: 308137 - DNA, 261 bp, Artificial Sequence
  derived and/or modified sequence
atgggtcgtaaggatgcagccaccattaaactgcctgttgaccagtatcggaaacagattggaaaacaggactataaaaagaccaagcccatccttagagccactaagttgaaagcagaggctaaaaagacagcgatcggcataaaggaagtaggcctggtgctcgctgccatcctggccctgttgctcgctttctatgccttcttttacctgagactgactacagacgtggatcctgatttagatcaggatgaagactag

SEQ ID NO: 308138 - DNA, 261 bp, Artificial Sequence
  derived and/or modified sequence
atgggacggaaggacgccgctactattaagctgccagtggatcagtaccgcaagcagatcggtaagcaggattacaagaaaacgaagccgatcttgcgcgcaacaaaactgaaggcggaggcaaagaaaaccgccattggcatcaaagaggtcggtctggtgcttgccgctattttagcgctcctgctggcgttctatgcattcttctacctgaggctgacaactgatgtggacccagacctggaccaggacgaagattag

SEQ ID NO: 308139 - DNA, 261 bp, Artificial Sequence
  derived and/or modified sequence
atgggccgtaaagatgcagccacaattaagctgcctgttgatcagtatagaaagcagatcggcaagcaggattacaaaaagaccaaaccaatcttgcgggccacaaaattgaaggccgaagccaagaagaccgctattggtataaaggaagttgggctggtgttggcggcgatcctcgctctcttgctggcattttacgcttttttttacttgagactcaccactgacgtggatcctgacctggaccaggatgaggactag

SEQ ID NO: 308140 - DNA, 261 bp, Artificial Sequence
  derived and/or modified sequence
atgggccggaaagacgccgcaaccataaaattaccggtagatcagtaccggaagcagatcgggaagcaggactacaagaaaaccaaacctattctccgggccactaagctgaaggcggaagcaaagaaaacagctataggtattaaggaagtcggactggtgctggcagcgattctggctttgctgctggctttttatgcatttttctatctgcgtctaaccaccgacgttgaccccgatctggaccaggatgaagactag

SEQ ID NO: 308141 - DNA, 261 bp, Artificial Sequence
  derived and/or modified sequence
atggggcggaaggacgccgccaccatcaaactgcctgtggaccaatacagaaaacagatcggtaagcaggattacaaaaagaccaagccgattcttcgagctacgaagttaaaagccgaagcaaaaaaaactgcaatcggaatcaaggaagtcggcttggttctagcagcaattttggccctattgttagccttctacgcatttttttacctccgcttgacgacagatgtagatccagaccttgaccaggatgaagattag

SEQ ID NO: 308142 - DNA, 261 bp, Artificial Sequence
  derived and/or modified sequence
atgggcaggaaggatgctgccaccatcaagctgcctgtggaccagtacaggaagcagatcggcaagcaggactacaagaagaccaagcccatcctgcgggccaccaagctgaaggccgaggccaagaagacagccatcggcatcaaggaggtgggcctggtgctggccgccatcctggccctgctgctggccttctacgccttcttctacctgcggctgaccacagatgtggaccctgacctggaccaggatgaagattag

SEQ ID NO: 308143 - DNA, 228 bp, Artificial Sequence
  derived and/or modified sequence
atgggcaggaaggatgctgccaccatcaagctgcctgtggaccagtacaggaagcagatcggcaagcaggactacaagaagaccaagcccatcctgcgggccaccaagctgaaggccgaggccaagaagacagccatcggcatcaaggaggtgggcctggtgctggccgccatcctggccctgctgctggccttctacgccttcttctacctgcggctgaccacctag

SEQ ID NO: 308144 - DNA, 261 bp, Artificial Sequence
  derived and/or modified sequence
atgggccggaaggacgccgccaccatcaagctgcccgtggaccagtaccgaaagcaaattgggaaacaggactataaaaagaccaaaccaatcctcagagccaccaaacttaaagcagaggccaaaaaaacagctatcggcatcaaggaagtgggactggttttggctgccattctagctctcctgctcgctttctatgcctttttttacctccgccttacgaccgatgtcgaccccgatctagatcaggatgaagactag

SEQ ID NO: 308145 - DNA, 228 bp, Artificial Sequence
  derived and/or modified sequence
atgggccggaaggacgccgccaccatcaagctgcccgtggaccagtataggaagcaaattggcaaacaggactacaagaaaacaaagcccatactgcgagcaactaagttgaaagcagaggcgaagaaaacggcgattggcatcaaggaggtcgggcttgtactagccgccatcctggcactgttgctcgcattctatgcatttttctacctcagactgactacatag

SEQ ID NO: 308146 - DNA, 261 bp, Artificial Sequence
  derived and/or modified sequence
atgggccggaaggacgccgccaccatcaagctgcccgtggaccagtaccggaagcagatcggaaaacaggattataaaaagacaaagcccattctgcgggctacgaaactgaaggcagaagcaaaaaagacggctattggtatcaaagaagtggggctggtcctggcagccattctagcgctcctcctggccttttacgccttcttctatttaagactgactactgacgtcgatcctgatctcgatcaggacgaagattag

SEQ ID NO: 308147 - DNA, 261 bp, Artificial Sequence
  derived and/or modified sequence
atgggccggaaggacgccgccaccatcaagctgcccgtggaccagtaccggaagcagattggaaagcaggattataaaaagactaagcccattctgagagcaactaagctcaaggctgaagccaaaaaaaccgctattggtatcaaggaggtgggcctggttttagcggctattttagcactgttactggcattttacgcatttttctacctgcggctgactaccgacgtggaccctgacctagaccaagatgaagactag

SEQ ID NO: 308148 - DNA, 261 bp, Artificial Sequence
  derived and/or modified sequence
atgggccggaaggacgccgccaccatcaagctgcccgtggaccagtaccggaaacagatcggaaaacaagactacaagaaaaccaagccaattcttagggctacgaagcttaaagctgaggcgaagaagactgccatcggaatcaaggaggtgggcttggtcctggccgccattctcgccctgctcctggccttttacgcctttttttacctgcgtctcactaccgacgtcgatccagacctcgatcaggatgaggattag

SEQ ID NO: 308149 - DNA, 261 bp, Artificial Sequence
  derived and/or modified sequence
atgggccggaaggacgccgccaccatcaagctgcccgtggaccagtaccgaaagcagattgggaaacaagactataaaaaaacaaagcctatcctgcgggcgacgaaactcaaagctgaggccaagaagacggccattggcattaaggaggtgggtcttgtcctcgctgctatactggctctgctactggctttttacgcgttcttttacttgagactgaccactgatgtcgatcctgaccttgaccaggacgaagactag

SEQ ID NO: 308150 - DNA, 261 bp, Artificial Sequence
  derived and/or modified sequence
atgggccggaaggacgccgccaccatcaagctgcccgtggaccagtataggaaacagataggcaaacaggactataagaagacaaagcctattctccgcgcaacaaagctcaaagccgaagcgaagaaaacagctatcgggatcaaagaggtgggactggtgctggcagcaattctggccctacttctggccttttatgcttttttctacctgagactgaccactgatgttgatcctgatcttgaccaggacgaggactag

SEQ ID NO: 308151 - DNA, 261 bp, Artificial Sequence
  derived and/or modified sequence
atgggccggaaggacgccgccaccatcaagctgcccgtggaccagtacagaaagcagatcggaaaacaggactacaaaaagacaaaaccaatcctgagagcaacgaagcttaaagcggaggccaagaagaccgccattggtatcaaagaggtgggacttgtcctggccgccatactggcccttctgttagccttctacgcttttttctacttgcgcttaactaccgacgtggatcctgacctggaccaagacgaggactag

SEQ ID NO: 308152 - DNA, 261 bp, Artificial Sequence
  derived and/or modified sequence
atgggccggaaggacgccgccaccatcaagctgcccgtggaccagtatagaaaacaaatcggaaaacaggattacaagaaaacgaaacccattctgagagcaactaaacttaaggctgaagcaaagaaaacggccatagggataaaagaggtgggcctggtactggccgctatattggcccttctgctggcattttatgcttttttttaccttcgactgaccacggacgttgatccagatctagatcaagacgaggactag

SEQ ID NO: 308153 - DNA, 261 bp, Artificial Sequence
  derived and/or modified sequence
atgggccggaaggacgccgccaccatcaagctgcccgtggaccagtatcgcaaacagattggaaagcaggactataaaaagactaagcctattctgcgggccaccaaactgaaagccgaggcaaaaaagactgctatcggaataaaagaggtcggactagttcttgctgcaatactcgctcttctgctggcattttacgccttcttttatctccggctgaccactgacgtcgatccggatctcgaccaggacgaggattag

SEQ ID NO: 308154 - DNA, 261 bp, Artificial Sequence
  derived and/or modified sequence
atgggacggaaggatgctgccacgattaagttgccagtagaccagtatcgcaaacagattgggaagcaagactacaagaaaacaaagccgatacttcgagctaccaagctcaaggcagaagctaagaaaaccgctatcggcattaaggaggttgggctagtgttggctgccattctggccttgctgctggctttctacgcattcttctacctgcggttaacaaccgatgtggatcctgatctggatcaggatgaagattag

SEQ ID NO: 308155 - DNA, 228 bp, Artificial Sequence
  derived and/or modified sequence
atgggacgcaaagacgccgctactatcaaactgcccgtcgaccagtaccgcaagcagataggcaaacaggattacaaaaagactaagccaatcttgcgtgctaccaagctgaaagccgaagctaaaaaaaccgcaatcggaattaaggaagtgggtctcgtgcttgcagcaatacttgcactgctactggcgttctacgcctttttctacctacggcttacaacttag

SEQ ID NO: 308156 - DNA, 261 bp, Artificial Sequence
  derived and/or modified sequence
atgggccgtaaagacgccgctacaattaagctgcccgttgaccagtaccgcaagcagataggcaagcaggattataagaagaccaagcccattttgagagccactaagttgaaggcggaagccaagaaaacagctattggcatcaaagaagtaggactcgtcctcgctgccatcctggcattgctgctcgccttttacgctttcttttaccttaggttgaccacagatgtggatccagacttggaccaggatgaggactag

SEQ ID NO: 308157 - DNA, 261 bp, Artificial Sequence
  derived and/or modified sequence
atggggagaaaagatgcagctaccattaagctgccggtggaccaatataggaagcagataggcaaacaggactacaaaaagaccaaacctattttaagggccacgaagttgaaagcagaggccaaaaaaaccgccatcggcatcaaggaggtgggtcttgtcctggcggcaatcctcgccctcttgttagcattttacgcattcttttatctccggcttacaaccgacgtcgacccagacctcgatcaggacgaggattag

SEQ ID NO: 308158 - DNA, 261 bp, Artificial Sequence
  derived and/or modified sequence
atggggcgtaaggacgcggctactattaagttacctgtggaccagtacagaaagcaaatcggcaagcaggactacaagaagaccaagcctattcttagagctaccaagctgaaagccgaagccaagaaaacagctatcgggattaaggaggtgggcctggtgctggcagctatcctggccttactcttggccttttatgcattcttctatctgagactgacaacagatgtggatcctgacctcgatcaggatgaggactag

SEQ ID NO: 308159 - DNA, 261 bp, Artificial Sequence
  derived and/or modified sequence
atggggcgaaaggatgcggcaacaattaagctgcctgttgatcagtatagaaaacagattggcaaacaagattacaagaagactaagcctatcctgcgcgcaacaaagctcaaggccgaggcaaaaaaaactgccataggaatcaaagaagttggactcgtccttgcagcgatcctagccctgctcttggcattttatgcattcttctacctccgcctgaccactgatgtggaccctgatctggaccaggacgaagactag

SEQ ID NO: 308160 - DNA, 261 bp, Artificial Sequence
  derived and/or modified sequence
atggggcgtaaagatgcagctacgatcaaactgcctgtggatcaatacagaaaacagatcggaaaacaggactataagaagaccaagcctatattgcgggctactaagcttaaagccgaggcaaagaaaacggccatcgggataaaagaggttggactcgttctagctgccatcctagcattgctgctcgctttctatgccttcttttatctccgcctcacgacagatgtagaccccgatctagatcaggacgaagactag

SEQ ID NO: 308161 - DNA, 261 bp, Artificial Sequence
  derived and/or modified sequence
atgggtcggaaggatgccgcaactataaagctgcctgtggaccaatataggaagcagatcgggaagcaggactacaagaaaactaaacctattctgcgtgccacaaagctgaaagccgaggccaaaaagaccgccattggcattaaggaggtgggcttggtgctggcggctattctagccctgttattggcattctacgcattcttctacctgcgtcttacaacggacgtggaccctgacctggaccaggatgaggattag

SEQ ID NO: 308162 - DNA, 261 bp, Artificial Sequence
  derived and/or modified sequence
atggggagaaaggatgcagccacaataaaactcccagtggatcagtaccgcaagcagatcggcaaacaggactataagaagaccaaacccatcctgcgagccaccaaactgaaggctgaagcaaaaaaaacggccatcgggatcaaggaggttggcctcgtgctggcagcgattttggccttattgttagccttttacgcattcttttatctccgcctgacaactgatgtcgaccctgatctcgaccaagatgaggattag

SEQ ID NO: 308163 - DNA, 261 bp, Artificial Sequence
  derived and/or modified sequence
atgggcaggaaggatgcggctactatcaagttaccagtggatcagtatagaaagcaaattgggaagcaagactataagaagactaagcccattctgagagctacaaagctgaaggccgaggcaaaaaagactgcaataggcataaaagaggtgggtttggtcttggccgcaatcctggcgctgttactggcattctatgcattcttctatctgagattgacaaccgatgtggatccagacctcgatcaggatgaagactag

SEQ ID NO: 308164 - protein, 496 aa, Artificial Sequence
  derived and/or modified sequence
MASSTGDRSQAVRHGLRAKVLTLDGMNPRVRRVEYAVRGPIVQRALELEQELRQGVKKPFTEVIRANIGDAQAMGQRPITFLRQVLALCVNPDLLSSPNFPDDAKKRAERILQACGGHSLGAYSVSSGIQLIREDVARYIERRDGGIPADPNNVFLSTGASDAIVTVLKLLVAGEGHTRTGVLIPIPQYPLYSATLAELGAVQVDYYLDEERAWALDVAELHRALGQARDHCRPRALCVINPGNPTGQVQTRECIEAVIRFAFEERLFLLADEVYQDNVYAAGSQFHSFKKVLMEMGPPYAGQQELASFHSTSKGYMGECGFRGGYVEVVNMDAAVQQQMLKLMSVRLCPPVPGQALLDLVVSPPAPTDPSFAQFQAEKQAVLAELAAKAKLTEQVFNEAPGISCNPVQGAMYSFPRVQLPPRAVERAQELGLAPDMFFCLRLLEETGICVVPGSGFGQREGTYHFRMTILPPLEKLRLLLEKLSRFHAKFTLEYS

SEQ ID NO: 308165 - DNA, 1491 bp, Artificial Sequence
  derived and/or modified sequence
atggccagttctacgggcgatagatctcaggcggttcgccatggattgcgcgctaaggtgctcacactggatggaatgaatccccgggtgcggagggtggaatacgcagtgcgaggcccaattgtacagcgcgctctcgagctcgagcaggagcttaggcagggcgtgaaaaaacccttcaccgaggtcattcgagccaacatcggagacgctcaggctatgggccaaagaccgatcacgttcctgcggcaggtcttggctctctgcgttaatcccgatctgctgagttcacccaatttcccagacgatgcaaagaagcgagctgaaaggattctccaagcctgtggaggtcacagtcttggtgcatattccgtatctagtgggatccagctgattagagaggatgtagcccgctacatcgaaagacgagacggtggcattccagcggaccccaacaacgtgttcctgagcaccggcgcatctgatgcaatagtaacggtgttaaagctgttggtggctggggaggggcatacgcgaacaggagtcctcataccaatcccccagtacccgttatactccgccactttagccgaacttggcgctgttcaagtggactactacctggatgaggagcgggcctgggccctggacgtagcagagctgcacagggctttgggacaggctcgggatcactgtcgccctagggcattgtgcgtgatcaatcccggtaaccctaccggtcaggtgcagactagggaatgcatcgaggccgtgatcagatttgcttttgaggagcgactgttcctgctggctgacgaagtgtatcaggacaatgtgtatgccgcaggttctcagttccactcctttaagaaggtgttaatggagatggggcctccatatgccggccagcaggaacttgccagcttccatagtaccagtaaggggtacatgggagaatgcgggttcagggggggttatgttgaagtggtgaatatggacgctgcagtgcagcagcagatgctgaagctcatgtctgtaaggctgtgccctcctgttcctggacaggcactgctagatctggtcgtttcgccacctgcaccgaccgatcccagcttcgcacaattccaggcagagaaacaggcagtgctagcggaactggctgcaaaggccaaacttacagagcaagtgtttaacgaggcacctgggatctcctgcaacccagttcagggtgccatgtattctttccctcgggtgcagctccctccccgggcggttgagcgggcacaggaactcgggctggcgcctgacatgttcttttgcctacgtttattggaggagaccggaatctgcgtcgtgcctggctccggattcggccagagggaggggacttaccactttcgaatgactatcttgccccccctggagaagctgcggctcctgttggaaaagctgagcagattccacgctaagtttaccctggagtactcctag

SEQ ID NO: 308166 - DNA, 1491 bp, Artificial Sequence
  derived and/or modified sequence
atggcaagtagtaccggtgaccgttctcaggccgtaaggcatgggctacgagctaaggtcctcacactcgatgggatgaacccacgggttcgaagagttgagtacgctgtgagaggccctatcgtccagcgggcacttgagttagaacaggaacttaggcagggggtcaagaagcccttcaccgaggtgattcgtgctaacatcggagacgcgcaagccatggggcagaggccaatcacctttcttcgacaggtactcgctctatgtgtgaatccagacctgctgagctctccgaatttccccgatgatgccaaaaagcgcgcagaacgtatcctgcaggcatgcggcggccattccctgggtgcctacagtgtgtcgtctgggatccagctgatcagggaagatgttgcccggtatatcgaacgtcgcgatggaggcattccagcagacccaaacaacgtgttcttaagcaccggggcctccgatgcgatcgttacagtactgaaactgctggtagcaggtgagggccacactcgcacaggggtcctaatccccattcctcagtacccattgtacagtgccaccctggccgaactaggagccgttcaggtcgattactacctagatgaagaacgagcctgggcccttgacgtggcagagctgcaccgcgccctggggcaggctagggaccactgcagacccagggccctgtgcgtcatcaatccgggaaaccccactggccaagtccaaacccgcgaatgcatagaggctgtaattcgcttcgcattcgaggaacggctctttcttctggctgacgaggtgtatcaggacaatgtctatgcagccggttcccagttccacagtttcaaaaaagtgctgatggaaatgggcccaccttatgccggtcagcaggaactcgcttcatttcacagcactagtaaagggtatatgggggagtgcggcttccggggtggatacgtcgaggttgtaaacatggacgcagctgtacagcaacagatgctcaaactgatgtctgttaggttgtgtccccccgtaccaggccaggcattactcgacttagtggtatcgccacctgcccctacagacccatcattcgcccaatttcaggccgaaaagcaggctgttctcgccgaactcgcagcgaaggcgaagctcacggaacaggtgtttaatgaagcgccgggtatatcatgcaatcctgtgcagggcgccatgtatagttttcccagagtacagctccctccacgggccgtggaaagagcccaggagctgggcctagcgcctgacatgtttttttgcctccggctactggaggagactgggatttgcgtcgtgccgggaagcggtttcggccagcgcgaaggaacctaccatttccggatgactattctgcctcctttggaaaagttgagactcctgttagagaaattatcccggtttcacgccaagttcactctggagtactcctag

SEQ ID NO: 308167 - DNA, 1885 bp, Artificial Sequence
  derived and/or modified sequence
agacgggtggggcggggcccaactgtccccagctccttcagccctttctgtccctcccagtgaggccagctgcggtgaagagggtgctctcttgcctggagttccctctgctacggctgccccctcccagccctggcccactaagccagacccagctgtcgccattcccacttctggtcctgccacctcctgagctgccttcccgcctggtctgggtagagtcatggcctcgagcacaggtgaccggagccaggcggtgaggcatggactgagggcgaaggtgctgacgctggacggcatgaacccgcgtgtgcggagagtggagtacgcagtgcgtggccccatagtgcagcgagccttggagctggagcaggagctgcgccagggtgtgaagaagcctttcaccgaggtcatccgtgccaacatcggggacgcacaggctatggggcagaggcccatcaccttcctgcgccaggtcttggccctctgtgttaaccctgatcttctgagcagccccaacttccctgacgatgccaagaaaagggcggagcgcatcttgcaggcgtgtgggggccacagtctgggggcctacagcgtcagctccggcatccagctgatccgggaggacgtggcgcggtacattgagaggcgtgacggaggcatccctgcggaccccaacaacgtcttcctgtccacaggggccagcgatgccatcgtgacggtgctgaagctgctggtggccggcgagggccacacacgcacgggtgtgctcatccccatcccccagtacccactctactcggccacgctggcagagctgggcgcagtgcaggtggattactacctggacgaggagcgtgcctgggcgctggacgtggccgagcttcaccgtgcactgggccaggcgcgtgaccactgccgccctcgtgcgctctgtgtcatcaaccctggcaaccccaccgggcaggtgcagacccgcgagtgcatcgaggccgtgatccgcttcgccttcgaagagcggctctttctgctggcggacgaggtgtaccaggacaacgtgtacgccgcgggttcgcagttccactcattcaagaaggtgctcatggagatggggccgccctacgccgggcagcaggagcttgcctccttccactccacctccaagggctacatgggcgagtgcgggttccgcggcggctatgtggaggtggtgaacatggacgctgcagtgcagcagcagatgctgaagctgatgagtgtgcggctgtgcccgccggtgccaggacaggccctgctggacctggtggtcagcccgcccgcgcccaccgacccctcctttgcgcagttccaggctgagaagcaggcagtgctggcagagctggcggccaaggccaagctcaccgagcaggtcttcaatgaggctcctggcatcagctgcaacccagtgcagggcgccatgtactccttcccgcgcgtgcagctgcccccgcgggcggtggagcgcgctcaggagctgggcctggcccccgatatgttcttctgcctgcgcctcctggaggagaccggcatctgcgtggtgccagggagcggctttgggcagcgggaaggcacctaccacttccggatgaccattctgccccccttggagaaactgcggctgctgctggagaagctgagcaggttccatgccaagttcaccctcgagtactcctgagcaccccagctggggccaggctgggtcgccctggactgtgtgctcaggagccctgggaggctctggagcccactgtacttgctcttgatgcctggcggggtggggtggggggggtgctgggcccctgcctctctgcaggtccctaataaagctgtgtggcagtctgactcc

SEQ ID NO: 308168 - DNA, 1822 bp, Artificial Sequence
  derived and/or modified sequence
agggctgccacttggactcccttgccagggggcgggcaggggctggctctgcctggggccaggcccatgttaacctgtgccccggcctgggggccagaggggcaggcctgcgcacggggaggctgttgtggcagcggaacagagacgtgcacgagtcatggcctcgagcacaggtgaccggagccaggcggtgaggcatggactgagggcgaaggtgctgacgctggacggcatgaacccgcgtgtgcggagagtggagtacgcagtgcgtggccccatagtgcagcgagccttggagctggagcaggagctgcgccagggtgtgaagaagcctttcaccgaggtcatccgtgccaacatcggggacgcacaggctatggggcagaggcccatcaccttcctgcgccaggtcttggccctctgtgttaaccctgatcttctgagcagccccaacttccctgacgatgccaagaaaagggcggagcgcatcttgcaggcgtgtgggggccacagtctgggggcctacagcgtcagctccggcatccagctgatccgggaggacgtggcgcggtacattgagaggcgtgacggaggcatccctgcggaccccaacaacgtcttcctgtccacaggggccagcgatgccatcgtgacggtgctgaagctgctggtggccggcgagggccacacacgcacgggtgtgctcatccccatcccccagtacccactctactcggccacgctggcagagctgggcgcagtgcaggtggattactacctggacgaggagcgtgcctgggcgctggacgtggccgagcttcaccgtgcactgggccaggcgcgtgaccactgccgccctcgtgcgctctgtgtcatcaaccctggcaaccccaccgggcaggtgcagacccgcgagtgcatcgaggccgtgatccgcttcgccttcgaagagcggctctttctgctggcggacgaggtgtaccaggacaacgtgtacgccgcgggttcgcagttccactcattcaagaaggtgctcatggagatggggccgccctacgccgggcagcaggagcttgcctccttccactccacctccaagggctacatgggcgagtgcgggttccgcggcggctatgtggaggtggtgaacatggacgctgcagtgcagcagcagatgctgaagctgatgagtgtgcggctgtgcccgccggtgccaggacaggccctgctggacctggtggtcagcccgcccgcgcccaccgacccctcctttgcgcagttccaggctgagaagcaggcagtgctggcagagctggcggccaaggccaagctcaccgagcaggtcttcaatgaggctcctggcatcagctgcaacccagtgcagggcgccatgtactccttcccgcgcgtgcagctgcccccgcgggcggtggagcgcgctcaggagctgggcctggcccccgatatgttcttctgcctgcgcctcctggaggagaccggcatctgcgtggtgccagggagcggctttgggcagcgggaaggcacctaccacttccggatgaccattctgccccccttggagaaactgcggctgctgctggagaagctgagcaggttccatgccaagttcaccctcgagtactcctgagcaccccagctggggccaggctgggtcgccctggactgtgtgctcaggagccctgggaggctctggagcccactgtacttgctcttgatgcctggcggggtggggtggggggggtgctgggcccctgcctctctgcaggtccctaataaagctgtgtggcagtctgactccagg

SEQ ID NO: 308169 - DNA, 1491 bp, Artificial Sequence
  derived and/or modified sequence
atggccagcagcactggagacaggagccaggccgtgcgccacggcctgcgggccaaggtgctgaccctggatggcatgaacccccgggtgagaagagtggagtatgctgtgcggggccccatcgtgcagagggccctggagctggagcaggagctgcggcagggcgtgaagaagcccttcacagaggtgatccgggccaacattggagatgcccaggccatgggccagaggcccatcaccttcctgcggcaggtgctggccctgtgtgtgaacccagacctgctgagcagccccaacttcccagatgatgccaagaagagagctgagcgcatcctgcaggcctgtggcggccacagcctgggcgcctacagcgtgagcagcggcatccagctgatccgggaggatgtggcccgctacatcgagaggagagatggcggcatcccagctgaccccaacaacgtgttcctgagcactggagccagtgatgccatcgtgacagtgctgaagctgctggtggccggggagggccacaccaggactggagtgctgatccccatcccccagtaccccctgtacagcgccaccctggccgagctgggcgctgtgcaggtggactactacctggatgaggagcgggcctgggccctggatgtggccgagctgcaccgggccctgggccaggcccgggaccactgccggccccgggccctgtgtgtgatcaaccctggcaaccccaccggccaggtgcagaccagagaatgtattgaagctgtgatccgctttgcctttgaggagcggctcttcctgctggctgatgaggtgtaccaggacaacgtgtatgctgctggcagccagttccacagcttcaagaaggtgctgatggagatgggccccccctatgccggccagcaggagctggccagcttccacagcaccagcaagggctacatgggagaatgtggcttccggggcggctacgtggaggtggtgaacatggatgctgctgtgcagcagcagatgctgaagctgatgtctgtgcggctgtgcccccctgtgcccggccaggccctgctggacctggtggtgagccccccagcccccacagaccccagctttgcccagttccaggccgagaagcaggccgtgctggccgagctggccgccaaggccaagctgacagagcaggtgttcaatgaggcccctggcatcagctgcaaccctgtgcagggcgccatgtacagcttcccccgggtgcagctgccccccagggctgtggagcgggcccaggagctgggcctggccccagacatgttcttctgcctgcggctgctggaggagaccggcatctgtgtggtgcccggcagcggcttcggccagcgggagggcacctaccacttcaggatgaccatcctgccccccctggagaagctgcggctgctgctggagaagctgagccgcttccacgccaagttcaccctggagtacagctag

SEQ ID NO: 308170 - DNA, 1491 bp, Artificial Sequence
  derived and/or modified sequence
atggccagcagcaccggcgaccggagccaggccgtgcggcacggcttacgtgcaaaggtgctgacgctcgatgggatgaacccccgggtccgcagagtagaatacgccgttcggggtcccattgtgcagagggccctggagttggaacaggagctgcgtcagggggtgaaaaaacctttcactgaagttattcgtgctaacattggcgatgcacaggctatgggtcaaagaccaatcacgttcttgcgccaggttctggccctttgcgttaatcctgacctactaagttccccaaattttccagatgatgccaaaaagcgtgctgagaggatcctccaggcctgcggggggcacagccttggagcatattccgtgtcatcggggattcaattaattagggaggatgtagcccggtacatcgaaaggcgggacgggggcatccccgccgaccccaataatgttttcctgtctacaggtgcctcagatgccatcgtgactgtgttaaaattgttggtcgccggggagggccacaccagaaccggtgtgttgattcccatcccgcaatatccgttgtactccgccactcttgccgagctgggcgcagtgcaagtggactactacttagacgaggagcgcgcctgggctcttgatgtagcggagctgcatcgggcgctggggcaagcacgggaccattgccgcccccgagccttatgtgtgataaatccagggaaccccacgggccaggtacaaactcgcgaatgtatcgaagccgttatcagatttgcttttgaagagagactattcttgctggccgacgaggtgtatcaagataacgtctacgccgcaggctcccaatttcatagctttaaaaaggtgttaatggagatgggccccccttacgccgggcagcaggaacttgcaagctttcacagcaccagcaaaggctatatgggggagtgtggtttccgtggaggatatgtggaggtcgttaatatggatgcggcagtgcagcaacagatgctaaaactgatgtcagtgaggctttgtccccctgtgcctggacaagccctgctcgatcttgtcgtgagtccccccgctcctactgacccgtccttcgcccagttccaggcagagaaacaagccgttctggcagaactggccgcaaaagctaaactgacagaacaggtgttcaatgaagcccccggaattagttgcaacccagtacagggagcaatgtatagcttcccccgcgtgcaattgcccccccgcgctgtcgagcgggctcaggaattgggattggccccagacatgttcttttgcctacgtttactcgaagagaccggcatctgtgtggtgcctggatccgggttcgggcagagagaaggcacctatcacttccggatgaccatactaccaccactggaaaaactccgtcttttactggaaaagctgagtcgctttcacgctaaattcactctggaatactcatag

SEQ ID NO: 308171 - DNA, 1491 bp, Artificial Sequence
  derived and/or modified sequence
atggccagcagcaccggcgaccggagccaggccgtgcggcacggcctaagagcaaaagtccttacgctggacgggatgaaccctagggtgagaagagtggagtacgccgttcggggaccaattgtccagcgggcgctggagctcgaacaggagctgcggcaaggggtgaagaagcctttcactgaggtgatccgcgctaacataggcgacgctcaagcaatgggccagcgaccaattaccttcctccgacaagttttagcactgtgcgttaaccctgaccttctgagcagtcccaacttccccgatgacgctaagaaacgggctgagcgcatcttgcaggcctgtggggggcactctctgggtgcgtactccgtgtccagcggcatccagctaattagggaggatgtggcccgctatattgaaaggcgggacggcggcattccagccgaccccaataacgtcttcttgtccaccggcgcttctgatgcaattgtgacagtgctgaagttattggtcgcaggagagggccatactcggaccggcgtcctgatccccatcccacagtacccactttactccgccactttggccgaactcggagccgttcaagtggattattatctggatgaagagcgggcgtgggctctggacgtggcggagcttcacagagccctggggcaggctagggatcattgtcgcccccgagcactttgcgtaataaaccctgggaatccaactggccaggtgcagacacgggaatgtattgaagctgtcattcggttcgcctttgaagagcgcctctttcttctggctgacgaggtctaccaggataacgtttatgctgccggctcacagttccacagcttcaaaaaggtgctgatggaaatgggcccaccgtacgcgggccagcaggagctcgcatcctttcactcaacatctaaaggttatatgggagagtgcggtttcaggggaggctatgttgaggtggtcaatatggacgcagcagtgcagcagcagatgctgaagttaatgtccgtgcgtctttgtccaccagtccccggccaagccctgctggatctggtggtcagtccaccggcaccaactgatccatcattcgctcagttccaggcagagaaacaggctgtcctcgccgagctggctgcgaaggccaagctgactgagcaagtgtttaacgaggcaccagggatctcttgtaacccagttcagggcgccatgtactcctttccaagagttcagctcccccctcgggcagtcgaacgggcacaggagctgggtctcgctccagacatgtttttctgtttacgtctgctggaagagaccggcatctgcgttgtgccagggagcggctttgggcaacgtgagggaacttatcactttcggatgaccattcttccccctctcgaaaagctaagattgctgttagagaagttgtcccgtttccatgccaagtttacactagaatactcgtag

SEQ ID NO: 308172 - DNA, 1491 bp, Artificial Sequence
  derived and/or modified sequence
atggccagcagcaccggcgaccgatcacaagccgtgagacacggattgcgagccaaagtgctcactcttgatggaatgaatccgagagtgcgcagagtggaatacgcggtccggggaccgattgtgcaacgggctctcgaactagaacaggaacttcgacagggtgtgaagaaaccctttacagaagtgatcagagcgaatatcggtgacgctcaagctatgggtcagcgccctatcacctttctacgccaggttttagcactctgcgtgaacccagatcttctgtcctcgccaaatttcccagatgacgctaaaaagcgcgctgaaaggattctgcaagcctgtggcggacattctcttggtgcctattctgtgagcagtgggatccaacttatccgggaggatgtagcaaggtatatagagaggagggatggtggaatccctgccgacccgaataacgtctttctcagcacaggggctagcgatgccatcgtcacggtgcttaaactgctggttgctggtgagggccacacaaggaccggtgtgctcatacctattccccaatatccgttatattcggcaacactggctgagctaggcgctgtgcaggtggattattatttagacgaagagcgcgcttgggctttggatgtcgcagaactgcaccgagctctgggccaagccagagatcattgcagaccgagggccctgtgcgtcatcaatcccggaaatcccactgggcaggtacagactagagagtgtattgaggcggttatcaggttcgcattcgaggaacgcctgtttttactagccgatgaggtatatcaggataatgtctatgcagccggatcccagttccactcttttaagaaagtgctgatggaaatgggaccaccctatgcgggacagcaagagctagcaagtttccattccacctcgaaaggttatatgggtgaatgtgggttcagggggggatatgtggaagtggttaacatggatgccgctgtgcagcaacaaatgctgaaattgatgtcagttcgactgtgtcctccagtgcccggtcaggctctgctcgacctcgtggtgagtcccccagctccgactgacccctccttcgcccaatttcaggcagagaagcaagccgttcttgcagaactcgcagctaaagccaagctgaccgagcaagtattcaatgaggccccaggcatcagctgcaatccagttcagggagctatgtactcctttccccgtgtgcagttgccaccccgagcagttgaacgggcacaggagctgggtctggctcccgatatgttcttttgcctgaggcttctcgaggagacaggcatatgcgtcgtgcccggttctggttttggtcagagagaaggcacgtaccatttccgcatgactatactccctcccctggagaaactgcggctcctactggagaaacttagccgttttcacgcaaagttcaccttagagtattcctag

SEQ ID NO: 308173 - DNA, 1491 bp, Artificial Sequence
  derived and/or modified sequence
atggctagttctacaggtgatcgctcgcaggccgtaaggcacggactgagggccaaagtcctgactcttgacggcatgaaccctcgggtccggcgagtggagtacgccgtgcgcggaccgatcgtccagcgggctttagaactcgagcaagaactgaggcagggtgtaaagaagccatttacagaagtgattagggcaaatataggagacgcacaggctatggggcaaaggcccatcacatttctaagacaggtactggccctctgcgtgaatcccgacttgctgagctccccaaatttccctgatgatgccaaaaaacgggcagagcggattctacaggcgtgtggaggtcatagcctgggggcatatagcgtgtctagcggcattcagttgattcgggaagacgtcgcacgatacatcgagaggagggatggcggaatccctgccgaccctaataacgtgtttctgtctacaggtgccagcgacgcaatcgtgacggtcctcaagctgttggtggctggcgaaggccacaccaggactggggttctgattcccatccctcagtatccactgtattccgctacactggcggaactgggagctgttcaggttgactactacttagatgaagaacgggcatgggccctcgatgtggctgagctgcatagagctctgggacaagctcgggaccactgcagacctcgcgcattgtgcgtcattaatccaggtaacccaacagggcaagtacaaactcgggaatgcatcgaggccgtgatcaggttcgccttcgaagagagactctttcttcttgccgacgaggtctaccaggataacgtgtatgcggctggctctcaattccactcctttaaaaaagttctgatggaaatggggccaccgtacgcaggccagcaggagctggctagtttccactctacaagcaagggctatatgggggagtgcggcttccgcggaggctatgtggaggtggtgaatatggacgccgctgtgcaacaacagatgctgaagctgatgagtgtacgattgtgccctcccgtgccgggacaggctctgctggacctggtagtatctcctccagcgccaaccgatcccagcttcgctcagttccaggcagaaaagcaggcggtgctcgccgagctggccgcaaaggccaagttaaccgagcaggtgttcaatgaggctccgggtatttcgtgcaatcctgtgcagggtgctatgtacagcttcccccgtgtgcagctcccccctagagccgtcgagagagcccaggagcttggtcttgcccctgacatgtttttctgtctgaggcttcttgaggagacgggcatctgtgtcgtacccggaagtggctttgggcaacgcgagggaacctatcattttcggatgaccatcctaccacccttggagaagttgagactgcttctggaaaaactctcgcgattccacgccaagtttactctagaatatagctag

SEQ ID NO: 308174 - DNA, 1491 bp, Artificial Sequence
  derived and/or modified sequence
atggccagcagcaccggcgacagaagccaggccgtgagacacggcctgagagccaaggtgctgaccctggacggcatgaaccccagagtgagaagagtggagtacgccgtgagaggccccatcgtgcagagagccctggagctggagcaggagctgagacagggcgtgaagaagcccttcaccgaggtgatcagagccaacatcggcgacgcccaggccatgggccagagacccatcaccttcctgagacaggtgctggccctgtgcgtgaaccccgacctgctgagcagccccaacttccccgacgacgccaagaagagagccgagagaatcctgcaggcctgcggcggccacagcctgggcgcctacagcgtgagcagcggcatccagctgatcagagaggacgtggccagatacatcgagagaagagacggcggcatccccgccgaccccaacaacgtgttcctgagcaccggcgccagcgacgccatcgtgaccgtgctgaagctgctggtggccggcgagggccacaccagaaccggcgtgctgatccccatcccccagtaccccctgtacagcgccaccctggccgagctgggcgccgtgcaggtggactactacctggacgaggagagagcctgggccctggacgtggccgagctgcacagagccctgggccaggccagagaccactgcagacccagagccctgtgcgtgatcaaccccggcaaccccaccggccaggtgcagaccagagagtgcatcgaggccgtgatcagattcgccttcgaggagagactgttcctgctggccgacgaggtgtaccaggacaacgtgtacgccgccggcagccagttccacagcttcaagaaggtgctgatggagatgggccccccctacgccggccagcaggagctggccagcttccacagcaccagcaagggctacatgggcgagtgcggcttcagaggcggctacgtggaggtggtgaacatggacgccgccgtgcagcagcagatgctgaagctgatgagcgtgagactgtgcccccccgtgcccggccaggccctgctggacctggtggtgagcccccccgcccccaccgaccccagcttcgcccagttccaggccgagaagcaggccgtgctggccgagctggccgccaaggccaagctgaccgagcaggtgttcaacgaggcccccggcatcagctgcaaccccgtgcagggcgccatgtacagcttccccagagtgcagctgccccccagagccgtggagagagcccaggagctgggcctggcccccgacatgttcttctgcctgagactgctggaggagaccggcatctgcgtggtgcccggcagcggcttcggccagagagagggcacctaccacttcagaatgaccatcctgccccccctggagaagctgagactgctgctggagaagctgagcagattccacgccaagttcaccctggagtacagctag

SEQ ID NO: 308175 - protein, 552 aa, Artificial Sequence
  derived and/or modified sequence
MHCERFLCILRIIGTTLFGVSLLLGITAAYIVGYQFIQTDNYYFSFGLYGAFLASHLIIQSLFAFLEHRKMKKSLETPIKLNKTVALCIAAYQEDPDYLRKCLQSVKRLTYPGIKVVMVIDGNSEDDLYMMDIFSEVMGRDKSATYIWKNNFHEKGPGETDESHKESSQHVTQLVLSNKSICIMQKWGGKREVMYTAFRALGRSVDYVQVCDSDTMLDPASSVEMVKVLEEDPMVGGVGGDVQILNKYDSWISFLSSVRYWMAFNIERACQSYFGCVQCISGPLGMYRNSLLHEFVEDWYNQEFMGNQCSFGDDRHLTNRVLSLGYATKYTARSKCLTETPIEYLRWLNQQTRWSKSYFREWLYNAMWFHKHHLWMTYEAIITGFFPFFLIATVIQLFYRGKIWNILLFLLTVQLVGLIKSSFASCLRGNIVMVFMSLYSVLYMSSLLPAKMFAIATINKAGWGTSGRKTIVVNFIGLIPVSVWFTILLGGVIFTIYKESKRPFSESKQTVLIVGTLLYACYWVMLLTLYVVLINKCGRRKKGQQYDMVLDV

SEQ ID NO: 308176 - protein, 316 aa, Artificial Sequence
  derived and/or modified sequence
MHCERFLCILRIIGTTLFGVSLLLGITAAYIVGYQFIQTDNYYFSFGLYGAFLASHLIIQSLFAFLEHRKMKKSLETPIKLNKTVALCIAAYQEDPDYLRKCLQSVKRLTYPGIKVVMVIDGNSEDDLYMMDIFSEVMGRDKSATYIWKNNFHEKGPGETDESHKESSQHVTQLVLSNKSICIMQKWGGKREVMYTAFRALGRSVDYVQVCDSDTMLDPASSVEMVKVLEEDPMVGGVGGDVQILNKYDSWISFLSSVRYWMAFNIERACQSYFGCVQCISGPLGMYRNSLLHVLTFAVTHNTLVPLGAVQYCGIR

SEQ ID NO: 308177 - DNA, 1659 bp, Artificial Sequence
  derived and/or modified sequence
atgcactgcgagagattcctgtgcatcctaaggatcatcggtacaacactcttcggggtgtcgctgcttctcggcataacagctgcttacatcgtcggctatcagttcatccagactgacaactattatttctcctttggactctacggcgctttcctggctagccacttgattattcagagcctgtttgcttttctcgagcatcggaaaatgaagaaatctcttgaaacacctatcaagctgaacaagacagttgccttgtgtattgcagcttatcaggaggatcccgactacctccgaaaatgcctccagagtgttaaaagacttacctaccctggtataaaggtcgtcatggtcatagatgggaactctgaagacgatctctatatgatggatattttcagcgaagtcatggggcgtgataagtccgctacctatatttggaagaacaacttccacgagaagggccccggggagaccgacgagagtcataaggagtcttcccagcatgtcactcagttggtgctgagtaacaaatcgatatgcatcatgcagaaatggggaggcaaacgagaggtaatgtacacagctttcagagccctagggaggagtgtcgattacgtgcaagtctgcgactcagacacaatgctcgatcccgcctcaagcgtagagatggttaaggtcttagaggaggacccaatggttggcggcgtaggaggggacgtgcaaatcctgaataaatatgactcctggatcagtttcctttcttcagtcaggtactggatggcatttaacatcgagcgagcctgtcagagctattttggatgtgtccagtgcatctctggcccactcggtatgtaccgcaactccctgctccatgagttcgttgaggattggtataatcaggaatttatgggaaatcagtgctctttcggagacgacagacatctgacaaaccgcgtcctcagccttggctacgcgactaaatacacagcaagaagcaaatgcctgacagaaacccccattgaataccttcggtggctcaaccagcagactcgatggtctaagagctactttcgcgaatggctctataatgccatgtggttccacaaacaccatctgtggatgacatacgaggcaattattacaggtttcttccccttttttctgatcgccaccgtgatccaactcttttacagggggaagatctggaatatactgcttttcctgctcaccgtccaactggttggcctgatcaaatcaagttttgcatcatgtctgcgtggcaacatagttatggtgtttatgtctttgtattctgtcctctatatgtcttctttgcttccagccaagatgtttgcgattgccaccataaacaaggcgggttggggcacctctggccgaaaaactattgtagtcaattttatcggcctcatcccagtctcggtgtggtttactattcttcttggcggcgtaatttttacgatatataaggaatccaaaagaccgttcagcgagtctaagcagactgtactgatcgttgggactttattgtacgcctgctactgggttatgctgctgaccctttatgtggtgttgataaataaatgcggacgcaggaagaaaggacagcagtatgacatggtcctggatgtgtag

SEQ ID NO: 308178 - DNA, 951 bp, Artificial Sequence
  derived and/or modified sequence
atgcactgtgagaggttcctttgtatcctgcggatcatcgggacaaccctctttggcgtctcactgttgcttggcattaccgccgcctatattgtcggctaccagtttatccaaaccgacaactactatttctcatttgggctttacggtgcttttctagccagccacctgatcatccagtcattgtttgcttttctagagcatcgtaaaatgaagaagagtctggaaactcccattaaacttaacaaaacagttgcactgtgtatagccgcatatcaggaggatccagattatctgcgcaaatgcctccagtcagtgaagaggctcacttatccggggattaaggtcgtgatggtgatagacggcaactctgaggacgacctttatatgatggacatttttagtgaagtgatgggccgggataaaagtgcgacttatatttggaagaataatttccacgagaaggggccaggagagactgacgagtctcacaaagagtcgtctcaacatgtgactcagcttgttttgtcaaacaagtcgatttgtattatgcaaaagtggggaggtaagagagaggtgatgtataccgccttccgggcgctgggccggagcgtggattacgtccaggtgtgcgacagtgacactatgttagatcccgcgtctagcgtagagatggtgaaggtgctcgaggaagaccccatggtggggggggtgggaggcgatgtgcagattctcaacaaatacgattcatggatctcattcctttcctctgtgagatattggatggcattcaatattgaaagggcttgccagtcctacttcggctgcgttcagtgcatatccgggcccttgggcatgtatagaaactcgctcctacacgtccttactttcgcagtcacccataatactttggtgcctctgggtgctgtgcagtactgtggaattcgttag

SEQ ID NO: 308179 - DNA, 4190 bp, Artificial Sequence
  derived and/or modified sequence
gaagtcaagacgtctggaaagaattacccagtcctggcttcgagcagcccattgaaccagagacttgaaacagccccagccaaagacttttctcccaattctgcgcttcctgggttctgctgagtcttccacaggctttttttttttttttttttttttttaagacgaaaaagagattttctgttatcgggggcagaaagactgaagcccaaaaaaaaaaaaaaaaaaaaaagaaaagaaaagaaaaaagaaaagttaatttatttttaaagcataatttttttaagaattagactgaagtgcaacggaaacataaagagaatattagtgaaattattttttaaagtggggaagaatcaaacatttaagactcccctatcctttttaaatgttgtttttaaatttcttattttttttggccggtcgtctcaaattcatctgatctcttattacctcaattttggaaactgcccgccaccgaccctccgggaccacacagacaggctgaggacgactttatgaccaagagctgaacaagatgcattgtgagaggtttctatgtatcctgagaataattggaaccacactctttggagtctctctcctccttggaatcacagctgcttatattgttggctaccagtttatccaaacggataattactatttctcttttggactgtatggtgcctttttggcatcacacctcatcatccaaagcctgtttgcctttttggagcaccgaaaaatgaaaaaatccctagaaacccccataaagttgaacaaaacagttgccctttgcatcgctgcctatcaagaagatccagactacttaaggaaatgtttgcaatctgtgaaaaggctaacctaccctgggattaaagttgtcatggtcatagatgggaactcagaagatgacctttacatgatggacatcttcagtgaagtcatgggcagagacaaatcagccacttatatctggaagaacaacttccacgaaaagggtcccggtgagacagatgagtcacataaagaaagctcgcaacacgtaacgcaattggtcttgtccaacaaaagtatctgcatcatgcaaaaatggggtggaaaaagagaagtcatgtacacagccttcagagcactgggacgaagtgtggattatgtacaggtttgtgattcagacactatgcttgacccagcctcatctgtggagatggtaaaagttttagaagaagatcccatggttggaggtgttgggggagatgtccagattttaaacaagtacgattcctggatctcattcctcagcagtgtaagatattggatggcttttaatatagaaagggcctgtcagtcttattttgggtgtgttcagtgcattagtggacctctgggaatgtacagaaactccttgttgcatgagtttgtggaagattggtacaatcaagaatttatgggcaaccaatgtagctttggtgatgacaggcatctcacgaaccgggtgctgagcctgggctatgcaacaaaatacacagctcgatctaagtgccttactgaaacacctatagaatatctcagatggctaaaccagcagacccgttggagcaagtcctacttccgagaatggctgtacaatgcaatgtggtttcacaaacatcacttgtggatgacctacgaagcgattatcactggattctttcctttctttctcattgccacagtaatccagctcttctaccggggtaaaatttggaacattctcctcttcttgttaactgtccagctagtaggtctcataaaatcatcttttgccagctgccttagaggaaatatcgtcatggtcttcatgtctctctactcagtgttatacatgtcgagtttacttcccgccaagatgtttgcaattgcaacaataaacaaagctgggtggggcacatcaggaaggaaaaccattgttgttaatttcataggactcattccagtatcagtttggtttacaatcctcctgggtggtgtgattttcaccatttataaggagtctaaaaggccattttcagaatccaaacagacagttctaattgttggaacgttgctctatgcatgctattgggtcatgcttttgacgctgtatgtagttctcatcaataagtgtggcaggcggaagaagggacaacaatatgacatggtgcttgatgtatgatcttccatgttttgacgtttgcagtcacacacaacaccttagttcctctaggggctgtacagtattgtggcatcagataatgccaccaaaggagacatatcactgctgctgggacttgaacaaagacatttatatgggtttattttcattctgccaaagtaaaacaatacatcaacaagaagaaactcagatttaacctgttatttctatgaaaatgggatgaattctttgtttatgcactttttccttactgtgcatccgcctgaaagtgttttgccctatatacctcactagccatgctttatgtgggttatcatggaagaaaaggattttggaaactcaaggaaaagttctttcaacctatacaacctaacttatggactgttttgatagatgataattttttttttttaggaaggattttctttttaactttaccaaatgaaatgccaaaggaagttttaaaggccgttggctgtgctgtattttgatataattgtactgtgtttttaaattttgtatgccaatcttaaagacaaattttgcatattctctattttacttttctgccaaaataaacctgttcttccttttttaaaataaaataagttcttaaaaaatttatacttaaaaaatcctgcccaaaatgtgaagcttggttgactgatgttcatgatagaaagaataaaatgtttctctctctctaccttttaaaattgaatagtttatttctgtgaaagaagtatttaaactttcaatattttaactttttgtttttatttcttttagaaaaggccaatatacctatcacactttggaagtaaaaatacacactttcgtgtgtacctaaaaaaaaaatcgttgaaaatcaaggccaaaggtagtgcaattttttcattaagatttaaaaaaaagggaatgatagtctttgaaagaaaacagtaggcatccagcactggacaaaacatgggtatcaaagatgaataatctttggagattctggcagtgttttcccagaacaagtcaagtggaaagtggagaaattatctgtataattttggacacatacaatgcagtttatcaaaggttttgttctgtggcctgaatttactgggtcctacctacacattgaacatgttttgcctgtcttttttttttttttcaacttgccagttcactttacatgttagtataatgtttacacgggtgagttggataaattataaaacatataaattcaaaattggcagatagaatcaccaagtatctatcctcttttactttcaaatgaggaattttgtttttctgaattacacagatcatcacttcctatttcctgttctggacctgtataaaaatgtctacacagtagaagtgacatcaaggtttaataagtatatcaatgattggcacatataaaaattgttgaaccacatactctgaacttggctaatttagttactgcaaggcctccattatccagttttattttttacacgattgaccttgccttgtagctggtgctgtgtagacctgtgttgaaaacacaatcggaatatatgaataattgaataaacagcattatggtgaggcagagacacatggagaagtgttaaaaaaaaaatgggcttcctgcctttctgcctcttttttatgcagtcatctatgttacatctatcctgcctaagaaaaagctgcacatcctaccttcagagtacaaaaaggtacatctgagactcaagactctcactgattggagagcttgtggaaaacaaaacacaccatgccaataaatgagatgaaaacttgagtttgcctttttaactatttatgttctaagttaagctttgataacattcaaatgtcaaattctctcattcttataaaaagttgaattaattgcctgtatttattttagcaattattcaatgtatttccagtataggatgtatagtataattaattttttgtaaataaaatatttttgataaga

SEQ ID NO: 308180 - DNA, 1706 bp, Artificial Sequence
  derived and/or modified sequence
agacccccttaagttggaggaggcagaagggcaacaacggcggggaaggagaagtcaagacgtctggaaagaattacccagtcctggcttcgagcagcccattgaaccagagacttgaaacagccccagccaaagacttttctcccaattctgcgcttcctgggttctgctgagtcttccacaggctttttttttttttttttttttttttaagacgaaaaagagattttctgttatcgggggcagaaagactgaagcccaaaaaaaaaaaaaaaaaaaaaagaaaagaaaagaaaaaagaaaagttaatttatttttaaagcataatttttttaagaattagactgaagtgcaacggaaacataaagagaatattagtgaaattattttttaaagtggggaagaatcaaacatttaagactcccctatcctttttaaatgttgtttttaaatttcttattttttttggccggtcgtctcaaattcatctgatctcttattacctcaattttggaaactgcccgccaccgaccctccgggaccacacagacaggctgaggacgactttatgaccaagagctgaacaagatgcattgtgagaggtttctatgtatcctgagaataattggaaccacactctttggagtctctctcctccttggaatcacagctgcttatattgttggctaccagtttatccaaacggataattactatttctcttttggactgtatggtgcctttttggcatcacacctcatcatccaaagcctgtttgcctttttggagcaccgaaaaatgaaaaaatccctagaaacccccataaagttgaacaaaacagttgccctttgcatcgctgcctatcaagaagatccagactacttaaggaaatgtttgcaatctgtgaaaaggctaacctaccctgggattaaagttgtcatggtcatagatgggaactcagaagatgacctttacatgatggacatcttcagtgaagtcatgggcagagacaaatcagccacttatatctggaagaacaacttccacgaaaagggtcccggtgagacagatgagtcacataaagaaagctcgcaacacgtaacgcaattggtcttgtccaacaaaagtatctgcatcatgcaaaaatggggtggaaaaagagaagtcatgtacacagccttcagagcactgggacgaagtgtggattatgtacaggtttgtgattcagacactatgcttgacccagcctcatctgtggagatggtaaaagttttagaagaagatcccatggttggaggtgttgggggagatgtccagattttaaacaagtacgattcctggatctcattcctcagcagtgtaagatattggatggcttttaatatagaaagggcctgtcagtcttattttgggtgtgttcagtgcattagtggacctctgggaatgtacagaaactccttgttgcatgttttgacgtttgcagtcacacacaacaccttagttcctctaggggctgtacagtattgtggcatcagataatgccaccaaaggagacatatcactgctgctgggacttgaacaaagacatttatatgggtttattttcattctgccaaagtaaaacaatacatcaacaagaagaaactcagatttaacctgttatttctatgaaaatgggatgaattctttgtttatgcactttttcc

SEQ ID NO: 308181 - DNA, 1659 bp, Artificial Sequence
  derived and/or modified sequence
atgcactgtgagcgcttcctgtgcatcctgcgcatcatcggcaccaccctgtttggagtgtccctgctgctgggcatcacagctgcctacatcgtgggctaccagttcatccagacagacaactactacttctcctttggcctgtatggagccttcctggccagccacctgatcatccagagcctgtttgccttcctggagcacaggaagatgaagaagagcctggagacccccatcaagctgaacaagacagtggccctgtgcatcgccgcctaccaggaggaccctgactacctgaggaagtgcctgcagagcgtgaagaggctgacctacccaggcatcaaggtggtgatggtgattgatggcaacagtgaagatgacctgtacatgatggacatcttcagcgaggtgatgggccgggacaagagcgccacctacatctggaagaacaacttccacgagaagggccctggagaaacagatgagagccacaaggagagcagccagcacgtgacccagctggtgctgagcaacaagagcatctgcatcatgcagaagtggggcggcaagcgggaggtgatgtacacagccttccgggccctgggccgctctgtggactatgtgcaggtgtgtgacagcgacaccatgctggaccctgccagctctgtggagatggtgaaggtgctggaggaggaccccatggtgggcggcgtgggcggagatgtgcagatcctgaacaagtatgacagctggatctccttcctgagctctgtgcgctactggatggccttcaacatcgagcgggcctgccagagctacttcggctgtgtgcagtgcatcagcggccccctgggcatgtacagaaacagcctgctgcatgaatttgtggaggactggtacaaccaggagttcatgggcaaccagtgcagctttggagatgacagacacctgaccaacagagtgctgagcctgggctacgccaccaagtacacagcccggagcaagtgcctgacagagacccccatcgagtacctgcgctggctgaaccagcagacccgctggagcaagagctacttccgggagtggctgtacaatgccatgtggttccacaagcaccacctgtggatgacctatgaggccatcatcaccggcttcttccccttcttcctgattgccaccgtcatccagctgttctaccggggcaagatctggaacatcctgctcttcctgctgactgtgcagctggtgggcctcatcaagagcagctttgccagctgcctgcggggcaacatcgtgatggtgttcatgagcctgtacagcgtgctgtacatgagcagcctgctgcctgccaagatgtttgccatcgccaccatcaacaaggccggctggggcaccagcggcaggaagaccatcgtggtgaacttcatcggcctcatccctgtgtctgtgtggttcaccatcctgctgggcggcgtcatcttcaccatctacaaggagagcaagaggcccttcagcgagagcaagcagacagtgctgattgtgggcaccctgctgtatgcctgctactgggtgatgctgctgaccctgtatgtggtgctgatcaacaagtgtggccgcaggaagaagggccagcagtatgacatggtgctggatgtgtag

SEQ ID NO: 308182 - DNA, 951 bp, Artificial Sequence
  derived and/or modified sequence
atgcactgtgagcgcttcctgtgcatcctgcgcatcatcggcaccaccctgtttggagtgtccctgctgctgggcatcacagctgcctacatcgtgggctaccagttcatccagacagacaactactacttctcctttggcctgtatggagccttcctggccagccacctgatcatccagagcctgtttgccttcctggagcacaggaagatgaagaagagcctggagacccccatcaagctgaacaagacagtggccctgtgcatcgccgcctaccaggaggaccctgactacctgaggaagtgcctgcagagcgtgaagaggctgacctacccaggcatcaaggtggtgatggtgattgatggcaacagtgaagatgacctgtacatgatggacatcttcagcgaggtgatgggccgggacaagagcgccacctacatctggaagaacaacttccacgagaagggccctggagaaacagatgagagccacaaggagagcagccagcacgtgacccagctggtgctgagcaacaagagcatctgcatcatgcagaagtggggcggcaagcgggaggtgatgtacacagccttccgggccctgggccgctctgtggactatgtgcaggtgtgtgacagcgacaccatgctggaccctgccagctctgtggagatggtgaaggtgctggaggaggaccccatggtgggcggcgtgggcggagatgtgcagatcctgaacaagtatgacagctggatctccttcctgagctctgtgcgctactggatggccttcaacatcgagcgggcctgccagagctacttcggctgtgtgcagtgcatcagcggccccctgggcatgtacagaaacagcctgctgcacgtgctgacctttgctgtgacccacaacaccctggtgcccctgggcgctgtgcagtactgcggcatcagatag

SEQ ID NO: 308183 - DNA, 1659 bp, Artificial Sequence
  derived and/or modified sequence
atgcactgcgagcggttcctgtgcatcctgcggatcatcggcaccactctgttcggggttagcctgctgctgggcattacggccgcatatatcgtgggttaccaatttatacagactgacaattactacttttcatttggcctgtatggagccttcttggcaagccaccttattatccagagtctgttcgccttcctggagcacagaaaaatgaaaaaatcgctcgagacccccatcaaactgaacaaaactgtcgccctctgtattgctgcctatcaagaggacccagattatctcaggaagtgtctgcagtccgtgaaacgcctgacgtatccaggaatcaaagtagttatggttatcgacggcaatagtgaggacgacctctatatgatggatatttttagcgaagtgatgggcagagataaatctgccacttacatctggaagaataactttcacgagaaagggcccggtgaaacagacgagagccacaaagagtcatcccagcacgtcacccagttggtgctctccaataagagtatctgcatcatgcagaagtggggcgggaagagagaggtgatgtataccgcatttcgcgctttggggaggagtgtagattacgtacaggtgtgcgatagtgacacgatgctggaccctgcttcatctgtcgagatggtgaaggtcctcgaggaggaccctatggtcggaggcgtgggcggcgacgtgcagattctcaacaaatacgactcatggatcagctttctgtcctctgtccgctattggatggctttcaacatcgagagggcgtgtcagtcctacttcggatgtgtgcaatgcattagcgggcccctcgggatgtaccgaaattctctgctgcatgagtttgtggaagattggtataatcaggagttcatgggcaaccaatgcagttttggagacgatcgacatctgactaaccgggtgctgagcctcggatacgcgacaaaatacacggcgcgatccaagtgcttgaccgagaccccaatcgaatatcttcggtggttgaaccaacagacaaggtggtctaagagttactttcgggagtggttgtataatgccatgtggtttcataagcaccacctgtggatgacctatgaggctattatcacaggattctttcctttctttctgatcgcaacggtcattcagttgttctatcgagggaaaatttggaacatcctccttttcctcctgacagtacagctggtcggactgataaagagttctttcgcttcctgcctccggggcaatatcgtaatggtattcatgtcactttatagcgttctgtacatgtccagtcttttgccagccaagatgttcgctatcgccactataaataaggccggctgggggacctccgggcgtaagaccatagtagttaacttcattggactaattcccgtaagcgtctggttcacgatcttactgggtggagtaatcttcacaatctacaaagagtctaagaggcctttctccgagtcaaaacagacagtactgattgtaggcacactgctgtacgcctgttattgggtgatgttactcactttgtacgtggttctgatcaacaagtgcggtcggcgaaaaaagggtcagcaatacgatatggtgctcgacgtgtag

SEQ ID NO: 308184 - DNA, 951 bp, Artificial Sequence
  derived and/or modified sequence
atgcactgcgagcggttcctgtgcatcctgcggatcatcggcaccacactctttggggtttctttgctgctgggaattacggccgcatatattgtgggttatcagttcattcaaaccgataattattacttcagcttcgggctgtatggcgctttcttagcctcccaccttatcatacaatctctgttcgcttttctcgaacatcgcaaaatgaaaaaatccctagaaacgcccatcaaactcaataaaaccgttgctctgtgtattgcggcttaccaggaggaccccgattacctgcgtaaatgcctgcagtccgtaaagagattgacctacccaggcatcaaggtagtgatggtcatcgatggcaactcagaagacgacctgtatatgatggatatattctcagaggtcatggggagagataagagcgctacgtacatctggaaaaacaactttcatgagaagggtcccggggaaacagacgagtctcataaggagtcgtcacagcatgtgacgcagctcgtgctgtcgaataaatccatctgcatcatgcagaagtggggcggcaaaagagaggtgatgtacacagctttccgggcgttgggcaggtccgttgactacgtgcaagtttgtgacagcgacacaatgttggatcccgcgtcctcagtggaaatggtgaaggtactcgaagaggacccgatggttggaggcgtcggaggagatgtacaaattctcaacaagtatgattcttggatctcattcctatcttccgtgagatactggatggcttttaatatcgaaagggcatgtcagtcatattttggctgcgtgcagtgcatttccggacccctaggaatgtataggaacagcttgctgcacgtactgaccttcgccgtcacgcacaatacactggtgcccctgggggctgtgcagtattgtgggattcggtag

SEQ ID NO: 308185 - DNA, 1659 bp, Artificial Sequence
  derived and/or modified sequence
atgcactgtgaacgttttctttgcatactacggataattgggacaaccctcttcggggtaagtctgttgcttggaattactgcggcatatattgtgggctaccaattcattcagacggataactattacttctccttcgggctgtacggcgcattcctcgcaagccatctgataatccagagcctgtttgcatttctggagcacaggaaaatgaagaagagcctcgagacccccatcaaactcaataagacagtggccttgtgcatcgctgcctaccaggaggatccagactatcttcgtaagtgcctccaatccgtgaagagattaacctacccagggataaaggtggtgatggtaatcgacggcaacagcgaggacgacctttacatgatggacatctttagcgaggttatgggaagggataagagcgccacgtacatttggaagaataactttcacgagaagggcccaggcgagaccgacgaatcacataaggagtctagccagcacgtgacccaactggtgctttccaacaagtcgatctgtatcatgcagaagtggggaggaaaacgcgaggttatgtataccgctttcagagccctggggaggtcggtggactatgtgcaggtatgcgattccgacaccatgctcgatcccgcatctagtgtcgaaatggttaaggtgttagaggaagatcccatggtgggtggagtgggcggtgatgtacagatcctgaacaagtatgatagctggatttccttcctttccagcgtgaggtattggatggccttcaacatagagagagcatgccagagttatttcggatgtgtgcagtgtatctctggaccactgggcatgtaccgaaattccctgctgcacgagtttgttgaggactggtataatcaagagttcatgggaaaccaatgttcttttggcgacgacaggcacttgacaaatagagtgctcagcctggggtacgctacgaaatacacagcccgtagcaaatgcctgactgagaccccaatcgagtaccttagatggttgaatcagcagacccgctggtctaaaagttatttcagggagtggctgtataatgctatgtggttccacaagcaccatctgtggatgacttacgaagcaattattactggcttcttccccttttttctcattgcaactgtcatccagctgttttataggggcaagatctggaacatcctcttgttcctgctcaccgtacaactagtggggttgattaaaagctcttttgcatcgtgccttagaggaaatattgtgatggtgttcatgtccctctactccgtgctgtacatgagctccctgctgcccgcaaagatgtttgcgattgcaactattaataaggccggatggggcacctcgggtaggaagacaatagttgtgaatttcattgggctgattcctgtgagcgtgtggttcactatcctgctgggtggtgtcatcttcacgatttataaggagtcaaaacgcccattcagcgagtctaagcagaccgtcctcatcgtgggaacactgctgtatgcctgttactgggtgatgctgctgacactgtatgtagtgttaattaataagtgcggtcggcgtaaaaaggggcagcagtacgacatggtactcgatgtctag

SEQ ID NO: 308186 - DNA, 951 bp, Artificial Sequence
  derived and/or modified sequence
atgcattgcgagcggttcctctgtatcttgagaatcattggcaccactttattcggcgtgagtctactcctcggcatcaccgcagcctatatagtgggatatcagtttattcagacagataactactacttttccttcgggctgtacggagcatttctggccagccacctgattatacagagccttttcgccttcctggaacacaggaagatgaaaaagagtttggaaacacccattaagctaaataagacagtagccctttgtatcgcggcatatcaggaggatcccgactatctgcgcaagtgcctgcaatctgtgaagaggcttacataccccggtatcaaggtggttatggtcattgatgggaacagtgaggacgatctctacatgatggacatctttagcgaagttatggggagggacaaaagtgctacgtacatctggaaaaataactttcatgaaaagggtcccggagagaccgatgagtcacacaaggagtcttctcaacacgtcactcagctggtgctgtccaataagtccatatgcatcatgcaaaagtgggggggtaagcgcgaagtcatgtatacggccttcagggccctgggacggtctgttgactatgttcaagtgtgtgactctgatacgatgctggaccctgctagcagcgttgagatggtcaaggtgttagaggaagatcctatggtgggcggagtggggggagacgtgcagattcttaataaatacgacagctggatcagcttcctgtccagtgtgcggtactggatggcctttaatatagagcgcgcttgtcaatcttatttcgggtgtgttcagtgtatcagtggtcctctaggcatgtatcgcaatagccttctgcacgtcctgacattcgcagttacacataataccctagtgccacttggcgcagtacagtattgcgggattaggtag

SEQ ID NO: 308187 - DNA, 1659 bp, Artificial Sequence
  derived and/or modified sequence
atgcactgcgagagattcctgtgcatcctgagaatcatcggcaccaccctgttcggcgtgagcctgctgctgggcatcaccgccgcctacatcgtgggctaccagttcatccagaccgacaactactacttcagcttcggcctgtacggcgccttcctggccagccacctgatcatccagagcctgttcgccttcctggagcacagaaagatgaagaagagcctggagacccccatcaagctgaacaagaccgtggccctgtgcatcgccgcctaccaggaggaccccgactacctgagaaagtgcctgcagagcgtgaagagactgacctaccccggcatcaaggtggtgatggtgatcgacggcaacagcgaggacgacctgtacatgatggacatcttcagcgaggtgatgggcagagacaagagcgccacctacatctggaagaacaacttccacgagaagggccccggcgagaccgacgagagccacaaggagagcagccagcacgtgacccagctggtgctgagcaacaagagcatctgcatcatgcagaagtggggcggcaagagagaggtgatgtacaccgccttcagagccctgggcagaagcgtggactacgtgcaggtgtgcgacagcgacaccatgctggaccccgccagcagcgtggagatggtgaaggtgctggaggaggaccccatggtgggcggcgtgggcggcgacgtgcagatcctgaacaagtacgacagctggatcagcttcctgagcagcgtgagatactggatggccttcaacatcgagagagcctgccagagctacttcggctgcgtgcagtgcatcagcggccccctgggcatgtacagaaacagcctgctgcacgagttcgtggaggactggtacaaccaggagttcatgggcaaccagtgcagcttcggcgacgacagacacctgaccaacagagtgctgagcctgggctacgccaccaagtacaccgccagaagcaagtgcctgaccgagacccccatcgagtacctgagatggctgaaccagcagaccagatggagcaagagctacttcagagagtggctgtacaacgccatgtggttccacaagcaccacctgtggatgacctacgaggccatcatcaccggcttcttccccttcttcctgatcgccaccgtgatccagctgttctacagaggcaagatctggaacatcctgctgttcctgctgaccgtgcagctggtgggcctgatcaagagcagcttcgccagctgcctgagaggcaacatcgtgatggtgttcatgagcctgtacagcgtgctgtacatgagcagcctgctgcccgccaagatgttcgccatcgccaccatcaacaaggccggctggggcaccagcggcagaaagaccatcgtggtgaacttcatcggcctgatccccgtgagcgtgtggttcaccatcctgctgggcggcgtgatcttcaccatctacaaggagagcaagagacccttcagcgagagcaagcagaccgtgctgatcgtgggcaccctgctgtacgcctgctactgggtgatgctgctgaccctgtacgtggtgctgatcaacaagtgcggcagaagaaagaagggccagcagtacgacatggtgctggacgtgtag

SEQ ID NO: 308188 - DNA, 951 bp, Artificial Sequence
  derived and/or modified sequence
atgcactgcgagagattcctgtgcatcctgagaatcatcggcaccaccctgttcggcgtgagcctgctgctgggcatcaccgccgcctacatcgtgggctaccagttcatccagaccgacaactactacttcagcttcggcctgtacggcgccttcctggccagccacctgatcatccagagcctgttcgccttcctggagcacagaaagatgaagaagagcctggagacccccatcaagctgaacaagaccgtggccctgtgcatcgccgcctaccaggaggaccccgactacctgagaaagtgcctgcagagcgtgaagagactgacctaccccggcatcaaggtggtgatggtgatcgacggcaacagcgaggacgacctgtacatgatggacatcttcagcgaggtgatgggcagagacaagagcgccacctacatctggaagaacaacttccacgagaagggccccggcgagaccgacgagagccacaaggagagcagccagcacgtgacccagctggtgctgagcaacaagagcatctgcatcatgcagaagtggggcggcaagagagaggtgatgtacaccgccttcagagccctgggcagaagcgtggactacgtgcaggtgtgcgacagcgacaccatgctggaccccgccagcagcgtggagatggtgaaggtgctggaggaggaccccatggtgggcggcgtgggcggcgacgtgcagatcctgaacaagtacgacagctggatcagcttcctgagcagcgtgagatactggatggccttcaacatcgagagagcctgccagagctacttcggctgcgtgcagtgcatcagcggccccctgggcatgtacagaaacagcctgctgcacgtgctgaccttcgccgtgacccacaacaccctggtgcccctgggcgccgtgcagtactgcggcatcagatag

SEQ ID NO: 308189 - protein, 176 aa, Artificial Sequence
  derived and/or modified sequence
MRQYGECLHSCPSGYYGHRAPDMNRCARCRIENCDSCFSKDFCTKCKVGFYLHRGRCFDECPDGFAPLEETMECVEGCEVGHWSEWGTCSRNNRTCGFKWGLETRTRQIVKKPVKDTILCPTIAESRRCKMTMRHCPGGKRTPKAKEKRNKKKKRKLIERAQEQHSVFLATDRANQ

SEQ ID NO: 308190 - protein, 168 aa, Artificial Sequence
  derived and/or modified sequence
MRQYGECLHSCPSGYYGHRAPDMNRCARCRIENCDSCFSKDFCTKCKVGFYLHRGRCFDECPDGFAPLEETMECVEGCEVGHWSEWGTCSRNNRTCGFKWGLETRTRQIVKKPVKDTILCPTIAESRRCKMTMRHCPGGKRTPKAKEKRNKKKKRKLIERAQEQHSVF

SEQ ID NO: 308191 - protein, 89 aa, Artificial Sequence
  derived and/or modified sequence
MRQYGECLHSCPSGYYGHRAPDMNRCARCRIENCDSCFSKDFCTKCKVGFYLHRGRCFDECPDGFAPLEETMECVEGCEVGHWSEWGTC

SEQ ID NO: 308192 - DNA, 2487 bp, Artificial Sequence
  derived and/or modified sequence
cttttttctggaaactgcgacgagatgggaactttctgaattaagcagcaattcccgcgctggttttctggggagtcctcgcctccagagctagttatgtatcaaatcccatttgcaagggttgtttgtcttgttcaaaggacaatgggtgtagccgatgtcaacagaagttgttcttcttccttcgaagagaagggatgcgccagtatggagagtgcctgcattcctgcccatccgggtactatggacaccgagccccagatatgaacagatgtgcaagatgcagaatagaaaactgtgattcttgctttagcaaagacttttgtaccaagtgcaaagtaggcttttatttgcatagaggccgttgctttgatgaatgtccagatggttttgcaccattagaagaaaccatggaatgtgtggaaggatgtgaagttggtcattggagcgaatggggaacttgtagcagaaataatcgcacatgtggatttaaatggggtctggaaaccagaacacggcaaattgttaaaaagccagtgaaagacacaatactgtgtccaaccattgctgaatccaggagatgcaagatgacaatgaggcattgtccaggagggaagagaacaccaaaggcgaaggagaagaggaacaagaaaaagaaaaggaagctgatagaaagggcccaggagcaacacagcgtcttcctagctacagacagagctaaccaataaaacaagagatccggtagatttttaggggtttttgtttttgcaaatgtgcacaaagctactctccactcctgcacactggtgtgcagcctttgtgctgctctgcccagtatctgttcccagtaacatggtgaaaggaagcaccaccagcatggcccctgtgttatttatgctttgatttgaatctggagactgtgaaggcaggagtaagtgcacagcccgtgacttggctcagtgtgtgctgagagaatccgtccccggcaccatggacatgctagaggtgtgaggctgcagaacaccgctggaggacggacttgtgcctatttatgtgaaagaagatgcttggcaggcaatgcgctactcactcgtgacctttatttctcacattgtgcattttcaaggatatgtttgtgtggatatctgcttagtgttaccacatggtattctcagcatgttaccttcacactgttgtgcgatgaaactgcttttagctgaggatatgctctggaaattcctgctcagtttcactgcagccctaatatgtacatatactgcaggagctacatataaagctcttatttactgtatatttatgctttcttgtgggtaacaagtcatacctgattaatatgatgccactttgtttctagtggttcctaacccattgtctgataaatgacttttctagtttggggaattgacacttgttttgttgcctcttgaaactttttttttttcccctcattgtgggcttatttctcattgtaagggtaggataaactagtttttgtatatagagtcaaatgaccagtgtcaaagagtttgcatattgggtagaccttctccactccacatgtcccacacatatagataaagcagcaggcggcatctggcaatcagaagcccaaactgcctttgagtctaagatgtgatgactttgatgaaacacaactgaaaacatgagggactatatccagtcacttgtagccagtttcacaggccagctacagaattgtccaaacaaacattatttctgactgcaatttttttcccccaaatttaaagcaatccctggctttaaatgacaaggcacctaccaatgttcttgggtcactgaagaagctactaccatgagcctgggcatagaattttaggagataaaaggatgaatttctgtgactgccagtcagatcttaacaggtttctgttgagccagaatctgtttcagatccaagatggagaggaacactatggaaacttcccaggtgactttcagagcagttgtttcaaacacatcattgtccttttaggggaaccagtttttagaaggttgtgaattggctttttcacaaagcatgattatcttcctggctgatccaggagaaaattagaacagaaaaataatggttgtggattttgaaacaaagcaaggtaaagccttttttttttcaccttgcattggcaaaactacctcttcagtgtttttaacttttgattcaaaagcatcttaccaataaggataaatatcatatacatcgttatgaaaatattgctatgagataataagccacatatgaatgttgtatacaactttagggtttacatttaatcctgaagtgttacctcctttcatgtctatttacactattttcccatttactaagtggggagggggtctccttatatagtgcttcatcgttaataagtcaatacctgttgttcctgggatgttcttttttgtgcattaaaaacttcaaaatta

SEQ ID NO: 308193 - DNA, 579 bp, Artificial Sequence
  derived and/or modified sequence
atttcttggcctgggttgaggaccttgccctaagttctacctctgtctggtctgacatccccatgagccattcagctttagcttctggcctcaactctgcctctgagtttcctctttgtttctaagtttggttgtgtattaacaactttttgggtggaggaggtagagggaagaaggggagggatattttatttagtatttctatctagttatgtatcaaatcccatttgcaagggttgtttgtcttgttcaaaggacaatgggtgtagccgatgtcaacagaagttgttcttcttccttcgaagagaagggatgcgccagtatggagagtgcctgcattcctgcccatccgggtactatggacaccgagccccagatatgaacagatgtgcaagatgcagaatagaaaactgtgattcttgctttagcaaagacttttgtaccaagtgcaaagtaggcttttatttgcatagaggccgttgctttgatgaatgtccagatggttttgcaccattagaagaaaccatggaatgtgtggaaggatgtgaagttggtcattggagcgaatggggaacttgt

SEQ ID NO: 308194 - DNA, 1544 bp, Artificial Sequence
  derived and/or modified sequence
gagcgcgcacgtcccggagcccatgccgaccgcaggcgccgtatccgcgctcgtctagcagccccggttacgcggttgcacgtcggccccagccctgaggagccggaccgatgtggaaactgctgcccgccgcgggcccggcaggaggagaaccatacagacttttgactggcgttgagtacgttgttggaaggaaaaactgtgccattctgattgaaaatgatcagtcgatcagccgaaatcatgctgtgttaactgctaacttttctgtaaccaacctgagtcaaacagatgaaatccctgtattgacattaaaagataattctaagtatggtacctttgttaatgaggaaaaaatgcagaatggcttttcccgaactttgaagtcgggggatggtattacttttggagtgtttggaagtaaattcagaatagagtatgagcctttggttgcatgctcttcttgtttagatgtctctgggaaaactgctttaaatcaagctatattgcaacttggaggatttactgtaaacaattggacagaagaatgcactcaccttgtcatggtatcagtgaaagttaccattaaaacaatatgtgcactcatttgtggacgtccaattgtaaagccagaatattttactgaattcctgaaagcagttgagtccaagaagcagcctccacaaattgaaagtttttacccacctcttgatgaaccatctattggaagtaaaaatgttgatctgtcaggacggcaggaaagaaaacaaatcttcaaagggaaaacatttatatttttgaatgccaaacagcataagaaattgagttccgcagttgtctttggaggtggggaagctaggttgataacagaagagaatgaagaagaacataatttctttttggctccgggaacgtgtgttgttgatacaggaataacaaactcacagaccttaattcctgactgtcagaagaaatggattcagtcaataatggatatgctccaaaggcaaggtcttagacctattcctgaagcagaaattggattggcggtgattttcatgactacaaagaattactgtgatcctcagggccatcccagtacaggattaaagacaacaactccaggaccaagcctttcacaaggcgtgtcagttgatgaaaaactaatgccaagcgccccagtgaacactacaacatacgtagctgacacagaatcagagcaagcagatacatgggatttgagtgaaaggccaaaagaaatcaaagtctccaaaatggaacaaaaattcagaatgctttcacaagatgcacccactgtaaaggagtcctgcaaaacaagctctaataataatagtatggtatcaaatactttggctaagatgagaatcccaaactatcagctttcaccaactaaattgccaagtataaataaaagtaaagatagggcttctcagcagcagcagaccaactccatcagaaactactttcagccgtctaccaaaaaaagagagagactccatctcaaaaaaaaaaaaaaaaaaaag

SEQ ID NO: 308195 - protein, 1132 aa, Artificial Sequence
  derived and/or modified sequence
MRSSASRLSSFSSRDSLWNRMPDQISVSEFIAETTEDYNSPTTSSFTTRLHNCRNTVTLLEEALDQDRTALQKVKKSVKAIYNSGQDHVQNEENYAQVLDKFGSNFLSRDNPDLGTAFVKFSTLTKELSTLLKNLLQGLSHNVIFTLDSLLKGDLKGVKGDLKKPFDKAWKDYETKFTKIEKEKREHAKQHGMIRTEITGAEIAEEMEKERRLFQLQMCEYLIKVNEIKTKKGVDLLQNLIKYYHAQCNFFQDGLKTADKLKQYIEKLAADLYNIKQTQDEEKKQLTALRDLIKSSLQLDQKEARQDSQSRQGGYSMHQLQGNKEYGSEKKGYLLKKSDGIRKVWQRRKCSVKNGILTISHATSNRQPAKLNLLTCQVKPNAEDKKSFDLISHNRTYHFQAEDEQDYVAWISVLTNSKEEALTMAFRGEQSAGENSLEDLTKAIIEDVQRLPGNDICCDCGSSEPTWLSTNLGILTCIECSGIHREMGVHISRIQSLELDKLGTSELLLAKNVGNNSFNDIMEANLPSPSPKPTPSSDMTVRKEYITAKYVDHRFSRKTCSTSSAKLNELLEAIKSRDLLALIQVYAEGVELMEPLLEPGQELGETALHLAVRTADQTSLHLVDFLVQNCGNLDKQTALGNTVLHYCSMYSKPECLKLLLRSKPTVDIVNQAGETALDIAKRLKATQCEDLLSQAKSGKFNPHVHVEYEWNLRQEEIDESDDDLDDKPSPIKKERSPRPQSFCHSSSISPQDKLALPGFSTPRDKQRLSYGAFTNQIFVSTSTDSPTSPTTEAPPLPPRNAGKGPTGPPSTLPLSTQTSSGSSTLSKKRPPPPPPGHKRTLSDPPSPLPHGPPNKGAVPWGNDGGPSSSSKTTNKFEGLSQQSSTSSAKTALGPRVLPKLPQKVALRKTDHLSLDKATIPPEIFQKSSQLAELPQKPPPGDLPPKPTELAPKPQIGDLPPKPGELPPKPQLGDLPPKPQLSDLPPKPQMKDLPPKPQLGDLLAKSQTGDVSPKAQQPSEVTLKSHPLDLSPNVQSRDAIQKQASEDSNDLTPTLPETPVPLPRKINTGKNKVRRVKTIYDCQADNDDELTFIEGEVIIVTGEEDQEWWIGHIEGQPERKGVFPVSFVHILSD

SEQ ID NO: 308196 - DNA, 3399 bp, Artificial Sequence
  derived and/or modified sequence
atgcgaagtagcgcctcacggctgagtagctttagcagcagagattccctgtggaacaggatgcctgaccagataagcgtctcagagtttattgctgagaccaccgaggattacaattcccccactacctcatcctttactaccaggctgcataactgcagaaacacagtgacacttctggaggaagcattagaccaggatcgaaccgccctccaaaaggtgaaaaaatctgttaaggcaatatacaacagcggtcaggaccacgtgcagaatgaggaaaactatgcccaggttctggataaattcggctcgaactttttgtcacgagacaatcccgacctaggtaccgctttcgtcaagtttagtactctgaccaaagaactcagtacactgctcaaaaacctgttacagggattgtcgcacaacgttatatttacccttgactctctgcttaagggagacctgaagggggtgaagggggatttaaagaagccttttgacaaggcctggaaagactacgaaaccaagtttaccaaaatcgaaaaggagaagcgagaacacgcgaagcagcatgggatgattcgtacagagataacaggtgccgaaatcgctgaggaaatggaaaaggagagacgactttttcagcttcagatgtgcgagtacctaattaaggtgaatgaaattaaaaccaaaaagggcgtggacctgctccagaacctgattaagtattatcacgcacagtgcaactttttccaagacggattgaaaactgcggacaagctgaagcagtacattgagaagcttgccgcagacctgtacaatattaaacagacccaggatgaggaaaaaaagcagctgaccgccctgcgcgaccttatcaagtccagccttcagcttgatcagaaggaggcccggcaggatagtcagtcacgacaaggcgggtattcaatgcatcagctacaaggcaataaggagtacggaagcgaaaagaaagggtatctgctgaagaagagtgatggtatacggaaggtgtggcagcgcagaaaatgttctgtgaaaaatggaattctgaccataagccatgccacttccaacaggcagccggctaagctgaacctcttgacatgccaagtaaaaccaaatgctgaagacaaaaaaagctttgatttgattagccataatagaacctatcactttcaggctgaagacgagcaggattatgtggcctggatctccgttctgacaaactccaaggaagaagctctgactatggctttccgaggggagcagtctgcaggcgaaaatagtctggaagacctcacaaaagccattatcgaggatgtgcagcgcctccccggcaacgatatctgttgcgactgtgggagctcagagcctacatggctgtccaccaacctggggattttaacatgcatcgagtgctcgggcatccacagggaaatgggcgttcatatctcccgaatccagagcttagaactcgacaagctgggaacctctgagctgctgttggcgaaaaacgttgggaataactcttttaacgatatcatggaggccaaccttccttccccctcccccaagccgaccccttcatccgacatgaccgtgaggaaggaatacatcacagctaagtacgtagaccacagattcagccgtaaaacctgttcaacctcctctgccaaattgaacgagctgcttgaggcaattaagtcgcgggaccttctggccctgattcaggtctatgccgagggagtggagctgatggaacctttgctggagcctggacaagagctaggcgagactgccctccatttggctgtgcgaacagctgaccagacttcactccacctcgtcgactttctcgtacagaactgcggcaatctggacaaacaaaccgcccttggaaatacagtcctgcactactgtagcatgtacagcaagcctgagtgcctcaagcttttgctgcgtagcaaaccaactgtggacattgtgaatcaggctggggaaactgcgctcgacatcgctaaaagactgaaagcaactcagtgcgaggatctgttatctcaggctaaatctggcaaatttaaccctcacgtgcacgtggaatatgaatggaatttgaggcaagaggaaattgacgagagtgacgatgacctcgacgataaaccctcacccatcaaaaaggaacgcagtcccagacctcagagcttttgccatagttcaagtatctccccccaggacaagttagcactgccagggttctctaccccccgcgacaaacagaggctctcatacggggcatttacaaaccagatttttgtctcaaccagcacagatagccctacttctcctacaacggaggccccacccttacctccacggaatgcggggaaaggacccacaggtccaccgtctacactgcccctgagcacacaaaccagcagcggtagttctaccctgtcgaagaagcgccctccaccacctccacccggccataagcgcaccctgagtgatcctcccagccctctgccgcatggaccgcccaataaaggagccgttccatggggcaatgacggcgggccatcctcctctagcaagactactaacaagtttgaggggcttagccagcagtcgagtacctctagtgccaagacagccctggggccaagggtactgccaaaactcccgcaaaaggtcgctctgcggaagactgaccaccttagcctggacaaggcaacaatccccccagaaatttttcagaagtcaagccagctggccgaactgccccagaagcccccaccaggtgatcttccaccaaagcccacagagctcgcgccaaagccccaaatcggcgatctaccgcccaaacccggtgagctgcccccgaaacctcaactgggcgacctgcctccgaaaccacagctgtctgatctaccccccaaacctcagatgaaagatctgcctcccaagccccagctgggggatctcctggccaaaagccaaaccggcgacgtaagtccaaaggctcagcagcctagtgaggtgaccctcaaaagtcatccacttgacctgtctcccaatgtacagagccgggacgccatccagaagcaagcgtcggaggacagtaacgatctaacacccaccctcccagagactccagtccctctaccgcggaagattaacaccggaaagaataaagtccgtagggtcaagacaatctacgactgccaggccgacaatgatgacgaactaacttttattgaaggtgaagtaattattgtgactggcgaggaagatcaagagtggtggattggccacatcgagggacagcctgaaagaaagggcgtgtttcctgtctcattcgtgcatattttgagcgattag

SEQ ID NO: 308197 - DNA, 3399 bp, Artificial Sequence
  derived and/or modified sequence
atgaggagcagcgccagccggctgagcagcttcagcagccgggacagcctgtggaacaggatgccagaccagatctctgtgtctgagttcatcgccgagaccacagaggactacaacagccccaccaccagcagcttcaccacccggctgcacaactgcaggaacacagtgaccctgctggaggaggccctggaccaggacagaacagccctgcagaaggtgaagaagtctgtgaaggccatctacaacagcggccaggaccacgtgcagaatgaagaaaattatgcccaggtgctggacaagtttggcagcaacttcctgagccgggacaacccagacctgggcacagcctttgtgaagttcagcaccctgaccaaggagctgagcaccctgctgaagaacctgctgcagggcctgagccacaacgtcatcttcaccctggacagcctgctgaagggggacctgaagggcgtgaagggggacctgaagaagccctttgacaaggcctggaaggactatgagaccaagttcaccaagattgagaaggagaagcgggagcacgccaagcagcacggcatgatcagaacagagatcactggagctgagattgctgaggagatggagaaggagaggaggctcttccagctgcagatgtgtgagtacctgatcaaggtgaatgagatcaagaccaagaagggcgtggacctgctgcagaacctgatcaagtactaccacgcccagtgcaacttcttccaggacggcctgaagacagctgacaagctgaagcagtacatcgagaagctggccgctgacctgtacaacatcaagcagacccaggatgaggagaagaagcagctgacagccctgcgggacctgatcaagagcagcctgcagctggaccagaaggaggcccggcaggacagccagagccggcagggcggctacagcatgcaccagctgcagggcaacaaggagtatggcagcgagaagaagggctacctgctgaagaagagtgatggcatcaggaaggtgtggcagaggaggaaatgttctgtgaagaatggcatcctgaccatcagccacgccaccagcaaccggcagcctgccaagctgaacctgctgacctgccaggtgaagcccaatgctgaggacaagaagagctttgacctgatcagccacaacagaacctaccacttccaggccgaggatgagcaggactatgtggcctggatctctgtgctgaccaacagcaaggaggaggccctgaccatggccttccggggggagcagagcgctggggagaacagcctggaggacctgaccaaggccatcattgaagatgtgcagaggctgcctggaaatgacatctgctgtgactgtggcagcagcgagcccacctggctgagcaccaacctgggcatcctgacctgcattgaatgttctggcatccaccgggagatgggcgtgcacatcagccgcatccagagcctggagctggacaagctgggcaccagcgagctgctgctggccaagaatgtgggcaacaacagcttcaatgacatcatggaggccaacctgcccagccccagccccaagcccacccccagcagtgacatgacagtgaggaaggagtacatcacagccaagtatgtggaccaccgcttcagcaggaagacctgcagcaccagcagcgccaagctgaatgagctgctggaggccatcaagagccgggacctgctggccctgatccaggtgtatgcagagggcgtggagctgatggagcccctgctggagcccggccaggagctgggggagacagccctgcacctggccgtgaggacagctgaccagaccagcctgcacctggtggacttcctggtgcagaactgtggcaacctggacaagcagacagccctgggcaacacagtgctgcactactgcagcatgtacagcaagccagagtgcctgaagctgctgctgcggagcaagcccaccgtggacatcgtgaaccaggccggggagacagccctggacatcgccaagaggctgaaggccacccagtgtgaggacctgctgagccaggccaagagcggcaagttcaacccccacgtgcacgtggagtatgagtggaacctgcggcaggaggagattgatgaaagtgatgatgacctggatgacaagcccagccccatcaagaaggagaggagcccccggccccagagcttctgccacagcagcagcatcagcccccaggacaagctggccctgcccggcttcagcaccccccgggacaagcagaggctgtcctatggagccttcaccaaccagatctttgtgtccaccagcacagacagccccaccagccccaccacagaggccccacccctgcccccaagaaatgctgggaagggccccaccggcccccccagcaccctgcccctgagcacccagaccagcagcggcagcagcaccctgagcaagaagaggcctcctcctcctcctcctggccacaagaggaccctgagtgacccccccagccccctgccccacggcccccccaacaagggagctgtgccctggggcaatgatggcggccccagcagcagcagcaagaccaccaacaagtttgagggcctgagccagcagagcagcaccagcagcgccaagacagccctgggcccccgggtgctgcccaagctgccccagaaggtggccctgaggaagacagaccacctgagcctggacaaggccaccatccccccagagatcttccagaagagcagccagctggccgagctgccccagaagcccccacctggggacctgccccccaagcccacagagctggcccccaagccccagattggagacctgccccccaagccaggagagctgccccccaagccccagctgggggacctgccccccaagccccagctgagtgacctgccccccaagccccagatgaaggacctgccccccaagccccagctgggggacctgctggccaagagccagacaggagatgtgagccccaaggcccagcagcccagcgaggtgaccctgaagagccaccccctggacctgagccccaacgtgcagagcagagatgccatccagaagcaggccagcgaggacagcaatgacctgacccccaccctgcctgagacccctgtgcccctgcccaggaagatcaacacaggcaagaacaaggtgagaagagtgaagaccatctatgactgccaggccgacaatgatgatgagctgaccttcatcgagggggaggtgatcatcgtgactggagaggaggaccaggagtggtggattggccacatcgagggccagcctgagaggaaaggagtcttccctgtgtcctttgtgcacatcctgagtgactag

SEQ ID NO: 308198 - DNA, 3399 bp, Artificial Sequence
  derived and/or modified sequence
atgcggagcagcgccagccggctgagcagcttcagcagccgggactccctgtggaatcgcatgccggaccaaatcagcgtaagtgaattcattgccgagaccactgaagactacaacagcccaacaacctcttccttcactacccgattgcataattgccgcaacacagtcactctactagaagaagcactggatcaggacagaacagcgctccagaaagttaagaagagtgtgaaagcaatttacaattcaggacaggaccacgttcagaatgaagagaactatgcacaggtgctcgataagtttggaagtaattttctgtctcgggacaaccccgacctaggaaccgccttcgtgaaattctctacactgacaaaagaattgtcgactctgctgaaaaacctgctccagggcctgtctcacaatgtgatcttcactctggattccctcttaaagggagatcttaagggggtaaagggcgacctcaaaaaacccttcgataaagcatggaaagactacgaaacaaagtttaccaagatcgaaaaagagaaaagggaacatgccaagcaacatgggatgatccggaccgagataactggggctgaaatagcggaagagatggagaaagaacgcagactgttccagctgcagatgtgcgaatacctgattaaggtgaacgagataaaaacaaagaaaggcgtagacctgctgcaaaacctcatcaagtattatcatgcccagtgcaacttctttcaggacgggttgaagacagctgataagctgaagcaatatatcgaaaaactggctgcagatctgtacaacatcaagcagacacaggatgaagagaaaaagcagctgaccgctctgcgtgacctcatcaagagttctctgcaactggatcagaaggaggcacggcaggatagtcaatcgcgccagggaggctacagcatgcaccagcttcaggggaacaaagagtacggaagtgaaaagaagggctacctcctcaaaaagtcggatggtatacgcaaggtgtggcagcggcgaaaatgttctgtgaagaacggaattcttactataagccacgcgaccagtaatagacagcctgcgaaactcaacctgttaacatgtcaggtgaagcccaacgccgaggataaaaagagtttcgacctcatctcccataatcgaacttaccactttcaggctgaggacgagcaggattatgttgcctggatttctgtccttactaactctaaggaagaagctctaaccatggcgttccgtggcgagcagagtgccggcgagaatagtcttgaggacctaacgaaggcaatcatcgaggatgttcagcgattgcccggcaatgacatttgctgtgactgcggaagttccgaacctacttggctctccaccaatctgggaattctgacatgcattgagtgttctggtattcaccgcgaaatgggggtgcacatcagccgtattcaaagtttggaacttgataaattaggaactagtgaacttctgcttgccaagaatgtaggaaacaactccttcaacgatattatggaagcaaatttgcctagccctagcccaaaacccacaccgagctcagacatgactgtgagaaaagagtatataaccgccaaatatgttgaccatagattttcccgcaagacttgctccacttccagtgcaaagttgaatgagctgctggaagcgatcaagtccagagatcttctggcgcttatccaggtctatgcggaaggggtcgaactcatggaaccactattggaacctggccaggaactgggcgaaaccgccctacacctcgcagtccgcaccgcagatcagacctccctccacttggtggactttcttgtgcaaaattgtggtaatttggacaagcagactgccctcgggaacaccgtgctgcactactgctctatgtattcaaagccagagtgtctgaagcttttgctgaggtcgaaacccacagttgacattgtgaaccaggccggcgagactgctctggatattgctaaaagattgaaggcgacccaatgcgaagacctgctgagccaggccaagtccggaaaatttaatccccacgttcacgtggaatatgagtggaatctcaggcaggaggagattgatgaatctgatgacgatctagatgataaaccatctcctattaaaaaagagcgcagcccccgtccgcagtccttttgccacagctccagtatctctccccaggacaagctcgcgctacccggcttcagtacccctcgagataagcagagactgagctatggagcgttcaccaatcagatattcgtttcaacttctacggacagtccgacaagtcccacaactgaggcacccccattacctccacgaaatgccggtaagggacctaccgggccacccagcacacttccgcttagtacacagactagtagcgggtcaagtaccttgtctaagaaacgtcctcctccaccccctcccggtcataaaaggacgctgtccgaccctccgtcccccctgccccatggtccacctaataagggagccgttccttggggcaatgacggtgggccttcaagcagcagcaaaactacaaataagtttgaaggactctcccagcagagcagtacgtccagtgcaaagacggctctgggtccccgggttctccctaagttgcctcaaaaagtggcgctgcgtaagaccgatcacctttccttggacaaagccacaatccctcctgagatttttcagaaaagctcccagttggccgagctgccacaaaaacctcccccaggggatctgccgccgaaacccacagaactggcgcctaagccgcagataggggacctgcccccgaagccgggtgaactgccaccaaaaccccaactcggagacctgccacccaagccacagttgagtgatctgcccccaaagccccagatgaaggatttgccaccaaagccccagctcggggacttactggccaagagccagactggcgatgtgagcccaaaggcccagcagccttcagaggtcacgctcaagagccacccactggacctgtcccccaatgtgcagtcccgcgatgccatccaaaaacaagcatctgaggatagcaacgacctgacgccgacattacctgagaccccggttcctctccctagaaaaattaacacgggaaaaaataaggtgcgtcgtgtgaaaaccatttacgactgtcaggctgataacgacgacgaactgacatttattgagggcgaagtaattattgtcaccggagaggaggaccaagagtggtggattggacacatagaaggacaacccgaaagaaaaggggtgtttcccgtgtccttcgtgcacatcttatcagattag

SEQ ID NO: 308199 - DNA, 3399 bp, Artificial Sequence
  derived and/or modified sequence
atgagaagctcagccagccgtttgagctctttctcatcccgcgattccctctggaaccgaatgcccgatcaaattagcgtttccgaatttatagcggagactactgaagattacaattctcctactacctcctcctttaccacgcgacttcataattgcaggaacactgttacactgcttgaggaagctctcgaccaggaccgcactgccctgcagaaggtcaagaagtccgtgaaggcaatttataactcaggccaggaccacgtacaaaacgaggagaattacgcgcaagtcctggataaatttggcagcaatttcctctcaagggacaaccctgacctgggaacagccttcgtgaagttttctacgcttaccaaggaactgtccactctgctgaagaacctcttgcagggcttgtcacacaatgtgatcttcacattagactcactcttaaaaggggatctgaaaggggtcaaaggcgatctgaagaaaccttttgacaaggcctggaaggattatgaaacaaaattcacaaagatcgagaaggaaaaacgagaacatgcgaagcaacatggtatgatccggacagagattactggtgctgagatcgccgaggagatggagaaagaaagacgcttgtttcaattgcagatgtgcgagtacctgataaaggtgaatgaaatcaagaccaaaaaaggtgtcgacttgctacagaacctgattaagtactaccacgctcagtgcaacttcttccaggatggcctaaaaaccgcagacaagctgaaacaatacatagagaagctggcagcggatttgtacaacatcaagcagacccaggatgaggaaaagaagcagcttactgccctgcgggaccttatcaaaagctctttacaattggatcagaaggaggcacggcaagactcccaatccagacagggcggttattcaatgcatcagttgcagggaaataaagagtatggaagtgaaaagaaagggtacctacttaaaaaaagtgatggcatcaggaaggtttggcagcgcaggaaatgtagcgtgaaaaacggcatcctgaccataagccatgctactagcaatcggcaaccagcaaagcttaatctcctgacctgtcaggtcaaacctaatgctgaggacaaaaaaagctttgacctgatttctcataacagaacctaccacttccaagccgaggatgaacaggactacgtggcctggatatctgtgctgacaaactccaaggaggaagcactgaccatggcattcaggggggaacagagcgctggagagaactctcttgaagacctgaccaaggcaatcatcgaggatgttcagcggcttcccggaaatgatatctgttgtgactgtggctcttccgagcccacttggctgagcacaaacctggggatactgacatgcattgagtgttccggcatccacagagagatgggggtccatatcagcaggatacaatcactggagctagataagttagggacatccgaactactcttagccaagaatgttggcaacaacagctttaacgacattatggaagcaaatctgccatcaccttctccgaaacctacaccttctagtgatatgaccgtgcgtaaagaatatatcaccgccaaatatgtcgatcataggttctccagaaaaacctgctcgacatcgtcagctaagctcaatgagctgctcgaggccatcaaatctcgcgacctgttagccctgatccaggtgtatgcagagggtgtcgagctgatggaaccccttttggaaccaggtcaagagctaggagaaacagccttgcacctcgctgtgcgcactgccgatcagacgagtctgcaccttgtcgacttcctggttcagaactgtggaaatcttgataaacagaccgcattggggaataccgtgctgcactattgttccatgtattcaaagcctgagtgtctgaaactgttgctacggtctaagcccacggtggatattgtgaatcaggctggagaaaccgccctggacatcgcaaagcgcttgaaagctacacagtgtgaagacctgctctcccaagctaaatcggggaagtttaatccacatgtacacgtggagtatgagtggaatctacgccaggaagagatcgacgagagtgacgatgacctcgacgacaaaccatctcctattaaaaaagaaaggagtcccaggccacagtcattttgccatagctccagcattagccctcaggacaagttagcgttaccaggcttcagcactcctcgcgacaagcagcgactgtcctacggggcatttaccaatcagatattcgttagcacatccaccgactctccgactagcccgacaaccgaggctccacctttgccaccaagaaacgctggtaagggcccaaccggccctccgtccacccttcccctgtctacgcagacctcctcaggttcatccacacttagcaagaaacggccacccccacctccgcctggtcacaagaggacactgagcgacccgccttcccctctcccccatgggccaccgaataaaggtgccgtgccatggggaaacgacggtggacccagcagttccagcaagaccactaataaatttgagggtctgtcgcagcagagcagcacaagcagcgctaagacagctctaggaccccgtgtcctccctaaactccctcaaaaggttgccttaaggaagaccgatcatcttagtctggataaggctaccattccaccagaaattttccagaaaagctcccagcttgccgaactgccccaaaagcccccacctggtgacctgccacctaagccgactgaattagcccctaaaccacagatcggagacctgccgccaaagcccggtgaactacctcctaagcctcagctgggggacctgcccccaaagcctcagttaagcgacttgcctccaaaacctcaaatgaaagatctcccaccgaagcctcagttaggtgacctgctggctaagagccaaaccggggatgtttcccctaaggcgcagcagccctctgaggtgaccctgaagtcccatcctctcgacctctccccgaacgtgcagtcccgagatgcaatccaaaaacaggcttctgaggactcgaatgatctcacccctactcttccagaaaccccggtgcccctgcctagaaaaatcaacactgggaagaataaagttcgccgagtgaagacaatctatgactgccaggcagacaatgacgacgaactcacgttcatagaaggagaagtgatcatcgttacaggggaagaagaccaagaatggtggatcggacacatcgagggccagcccgagcggaaaggtgttttccccgtcagcttcgtgcacatcctgtctgattag

SEQ ID NO: 308200 - DNA, 6051 bp, Artificial Sequence
  derived and/or modified sequence
ggtcgttttctgatgtgacggctgagacatgagatcttcagcctccaggctctccagtttttcgtcgagagattcactatggaatcggatgccggaccagatctctgtctcggagttcatcgccgagaccaccgaggactacaactcgcccaccacgtccagcttcaccacgcggctgcacaactgcaggaacaccgtcacgctgctggaggaggctctagaccaagatagaacagcccttcagaaagtgaagaagtctgtaaaagcaatatataattctggtcaagatcatgtacaaaatgaagaaaactatgcacaagttcttgataagtttgggagtaattttttaagtcgagacaaccccgaccttggcaccgcgtttgtcaagttttctactcttacaaaggaactgtccacactgctgaaaaatctgctccagggtttgagccacaatgtgatcttcaccttggattctttgttaaaaggagacctaaagggagtcaaaggagatctcaagaagccatttgacaaagcctggaaagattatgagacaaagtttacaaaaattgagaaagagaaaagagagcacgcaaaacaacatgggatgatccgcacagagataacaggagctgagattgcggaagaaatggagaaggaaaggcgcctctttcagctccaaatgtgtgaatatctcattaaagttaatgaaatcaagaccaaaaagggtgtggatctgctgcagaatcttataaagtattaccatgcacagtgcaatttctttcaagatggcttgaaaacagctgataagttgaaacagtacattgaaaaactggctgctgatttatataatataaaacagacccaggatgaagaaaagaaacagctaactgcactccgagacttaataaaatcctctcttcaactggatcagaaagaagcaagacaggattctcagagccggcaaggaggatacagcatgcatcagctccagggcaataaggaatatggcagtgaaaagaaggggtacctgctaaagaaaagtgacgggatccggaaagtatggcagaggaggaagtgttcagtcaagaatgggattctgaccatctcacatgccacatctaacaggcaaccagccaagttgaaccttctcacctgccaagtaaaacctaatgccgaagacaaaaaatcttttgacctgatatcacataatagaacatatcactttcaggcagaagatgagcaggattatgtagcatggatatcagtattgacaaatagcaaagaagaggccctaaccatggccttccgtggagagcagagtgcgggagagaacagcctggaagacctgacaaaagccattattgaggatgtccagcggctcccagggaatgacatttgctgcgattgtggctcatcagaacccacctggctttcaaccaacttgggtattttgacctgtatagaatgttctggcatccatagggaaatgggggttcatatttctcgcattcagtctttggaactagacaaattaggaacttctgaactcttgctggccaagaatgtaggaaacaatagttttaatgatattatggaagcaaatttacccagcccctcaccaaaacccaccccttcaagtgatatgactgtacgaaaagaatatatcactgcaaagtatgtagatcataggttttcaaggaagacctgttcaacttcatcagctaaactaaatgaattgcttgaggccatcaaatccagggatttacttgcactaattcaagtctatgcagaaggggtagagctaatggaaccactgctggaacctgggcaggagcttggggagacagcccttcaccttgccgtccgaactgcagatcagacatctctccatttggttgacttccttgtacaaaactgtgggaacctggataagcagacggccctgggaaacacagttctacactactgtagtatgtacagtaaacctgagtgtttgaagcttttgctcaggagcaagcccactgtggatatagttaaccaggctggagaaactgccctagacatagcaaagagactaaaagctacccagtgtgaagatctgctttcccaggctaaatctggaaagttcaatccacacgtccacgtagaatatgagtggaatcttcgacaggaggagatagatgagagcgatgatgatctggatgacaaaccaagccctatcaagaaagagcgctcacccagacctcagagcttctgccactcctccagcatctccccccaggacaagctggcactgccaggattcagcactccaagggacaaacagcggctctcctatggagccttcaccaaccagatcttcgtttccacaagcacagactcgcccacatcaccaaccacggaggctccccctctgcctcctaggaacgccgggaaaggtccaactggcccaccttcaacactccctctaagcacccagacctctagtggcagctccaccctatccaagaagaggcctcctcccccaccacccggacacaagagaaccctatccgaccctcccagcccactacctcatgggcccccaaacaaaggcgcagttccttggggtaacgatgggggtccatcctcttcaagtaagactacaaacaagtttgagggactatcccagcagtcgagcaccagttctgcaaagactgcccttggcccaagagttcttcctaaactacctcagaaagtggcactaaggaaaacagatcatctctccctagacaaagccaccatcccgcccgaaatctttcagaaatcatcacagttggcagagttgccacaaaagccaccacctggagacctgcccccaaagcccacagaactggcccccaagccccaaattggagatttgccgcctaagccaggagaactgccccccaaaccacagctgggggacctgccacccaaaccccaactctcagacttacctcccaaaccacagatgaaggacctgccccccaaaccacagctgggagacctgctagcaaaatcccagactggagatgtctcacccaaggctcagcaaccctctgaggtcacactgaagtcacacccattggatctatccccaaatgtgcagtccagagacgccatccaaaagcaagcatctgaagactccaacgacctcacgcctactctgccagagacgcccgtaccactgcccagaaaaatcaatacggggaaaaataaagtgaggcgagtgaagaccatttatgactgccaggcagacaacgatgacgagctcacattcatcgagggagaagtgattatcgtcacaggggaagaggaccaggagtggtggattggccacatcgaaggacagcctgaaaggaagggggtctttccagtgtcctttgttcatatcctgtctgactagcaaaacgcagaaccttaagattgtccacatccttcatgcaagactgctgccttcatgtaaccctgggcacagtgtgtatatagctgctgttacagagtaagaaactcatggaagggccacctcaggagggggatataatgtgtgttgtaaatatcctgtggttttctgccttcaccagtatgagggtagcctcggacccggcgcgccttactggtttgccaaagccatccttggcatctagcacttacatctctctatgctgttctacaagcaaacaaacaaaaataggagtataggaactgctggctttgcaaatagaagtggtctccagcaaccgttgaaaggcatagaattgactctgttcctaacaatgcagtattctcaattgtgttactgaaaatgcaacattagcaaagaggtgggttctgttttccaggtgaaacttttagctccatgacagaccagcctgtagttatctgtgtacacagtttacagctacaaaaacctactttggtatttattacagaaaagtgctcagttaaatgtaagtgttattccttcagcaaaatattcactgacccaaaactctttatggcattttacaatgcacacagcctcatgcaagtttagacaagtggatttatactgtcttatgagtgcccgcccctgatatattacctcattatgcaaaaataacatatctttcatgactattttgacaaaagtttaaaacacatatgaagttcaaatttcaggaaccaaggactgccagaaaatattagcctctacattacgcatgcatttagaagcttacctgaaatctgccttttataaaggaatagtatggataagtggaattgtacattttttaaacttgattgccattaaagcagaaattataaggttgcaacaatatttgtttctaatcactggctttctcaagagtatggattgacatattgtgttatgaatgcacatctctcagatgtgttgaagcatccattgcatccattttttattattttcttagttttgttcttggacaaatttaaacttttaaaagattattcaagatgaatttaaaagtcaacccttcacacagtttccctactgtatgtagaatccaggtgctgaaaccaagtgtttcttttcccatgctctttgttaaaccccaattatagataatttttccagtcttaagctctgtccaccttcaagtcaattcataaccaagtttttgaacgctgctatgaattgcactgtgaaaagcactcttccctctcagttttcttttcatcccagccatgtttatcagatccttaagaacattgtatttcagtcttttacatcagtctgaattttggaaaagaatgcaatagttgtactccacagtcagtggaactgttccctgagtccgaggctcatgtgtcattctggcactacatttgcttaaattgctattttggcaacagcacagaaaactaatatttttaagcagagaatcttggcaatgagtgagagatgttaatttcacagaagcacaactcccaacccaacccttaggaaaagccctcttccatcgttacagtgctcagtgaatattaatttagttctgcttaagtggttgctatacaaactttgaatagccacctaataaataaaccttgcatgacaaacctgcaaaatattttatcagctgttattggaaagtgattttaagcaattgcttcctcagtgtcagggcacatgtgaatttccacaccaaacagagcatgaggaaccagttgacatgctgggttgtgactggcagctttagcagcctcggtactgaagccacaccagtgtccggatggaagtctgcatctgaggttgctcagtgtcccggtcattcatttacacattttaacttgcattaaagagctgttcttttctgtggcctagactcttttcactgatctcaaaataaactggtttttttcaaaaaaaaaaaaaaaacaaaaacaaaaaaaaaacacaaaagctgcatgtctaaaattacatggagttagtgtctattctttttccccttttgcagcaacttacacagcatttttaacaccttttttttctagtttttttgttcggttttgttttccatcaggaatttgagttctctctaacccagcttactgtgggacataggaaaactcagtagaaatacctttggtgatcttgttgagtttaagtctgatcttgatcttaaactcagtaagccactatctgcaattttgtacattatatagtattttgaagatatggaaccttatgaaaaaaaaatagcaaattagttctttttcccccagaggggaaagttatgttctgcaaatagtgtgtgtcttattttactgttgaacagcaattgctatttatttttttattgcctagaacttcaacatgttgtataggaatcctgtagtgccactagttaaatgccgaattctcatctggatgttaccatcaaacatcagtacacttgtcatttcacatgtgtttaatgtgacagtttttcagtactgtatgtgttaatttctactttttttaatatttaaaattgcttttaaataaacatattctcagttgatccc

SEQ ID NO: 308201 - DNA, 3399 bp, Artificial Sequence
  derived and/or modified sequence
atgagaagcagcgccagcagactgagcagcttcagcagcagagacagcctgtggaacagaatgcccgaccagatcagcgtgagcgagttcatcgccgagaccaccgaggactacaacagccccaccaccagcagcttcaccaccagactgcacaactgcagaaacaccgtgaccctgctggaggaggccctggaccaggacagaaccgccctgcagaaggtgaagaagagcgtgaaggccatctacaacagcggccaggaccacgtgcagaacgaggagaactacgcccaggtgctggacaagttcggcagcaacttcctgagcagagacaaccccgacctgggcaccgccttcgtgaagttcagcaccctgaccaaggagctgagcaccctgctgaagaacctgctgcagggcctgagccacaacgtgatcttcaccctggacagcctgctgaagggcgacctgaagggcgtgaagggcgacctgaagaagcccttcgacaaggcctggaaggactacgagaccaagttcaccaagatcgagaaggagaagagagagcacgccaagcagcacggcatgatcagaaccgagatcaccggcgccgagatcgccgaggagatggagaaggagagaagactgttccagctgcagatgtgcgagtacctgatcaaggtgaacgagatcaagaccaagaagggcgtggacctgctgcagaacctgatcaagtactaccacgcccagtgcaacttcttccaggacggcctgaagaccgccgacaagctgaagcagtacatcgagaagctggccgccgacctgtacaacatcaagcagacccaggacgaggagaagaagcagctgaccgccctgagagacctgatcaagagcagcctgcagctggaccagaaggaggccagacaggacagccagagcagacagggcggctacagcatgcaccagctgcagggcaacaaggagtacggcagcgagaagaagggctacctgctgaagaagagcgacggcatcagaaaggtgtggcagagaagaaagtgcagcgtgaagaacggcatcctgaccatcagccacgccaccagcaacagacagcccgccaagctgaacctgctgacctgccaggtgaagcccaacgccgaggacaagaagagcttcgacctgatcagccacaacagaacctaccacttccaggccgaggacgagcaggactacgtggcctggatcagcgtgctgaccaacagcaaggaggaggccctgaccatggccttcagaggcgagcagagcgccggcgagaacagcctggaggacctgaccaaggccatcatcgaggacgtgcagagactgcccggcaacgacatctgctgcgactgcggcagcagcgagcccacctggctgagcaccaacctgggcatcctgacctgcatcgagtgcagcggcatccacagagagatgggcgtgcacatcagcagaatccagagcctggagctggacaagctgggcaccagcgagctgctgctggccaagaacgtgggcaacaacagcttcaacgacatcatggaggccaacctgcccagccccagccccaagcccacccccagcagcgacatgaccgtgagaaaggagtacatcaccgccaagtacgtggaccacagattcagcagaaagacctgcagcaccagcagcgccaagctgaacgagctgctggaggccatcaagagcagagacctgctggccctgatccaggtgtacgccgagggcgtggagctgatggagcccctgctggagcccggccaggagctgggcgagaccgccctgcacctggccgtgagaaccgccgaccagaccagcctgcacctggtggacttcctggtgcagaactgcggcaacctggacaagcagaccgccctgggcaacaccgtgctgcactactgcagcatgtacagcaagcccgagtgcctgaagctgctgctgagaagcaagcccaccgtggacatcgtgaaccaggccggcgagaccgccctggacatcgccaagagactgaaggccacccagtgcgaggacctgctgagccaggccaagagcggcaagttcaacccccacgtgcacgtggagtacgagtggaacctgagacaggaggagatcgacgagagcgacgacgacctggacgacaagcccagccccatcaagaaggagagaagccccagaccccagagcttctgccacagcagcagcatcagcccccaggacaagctggccctgcccggcttcagcacccccagagacaagcagagactgagctacggcgccttcaccaaccagatcttcgtgagcaccagcaccgacagccccaccagccccaccaccgaggccccccccctgccccccagaaacgccggcaagggccccaccggcccccccagcaccctgcccctgagcacccagaccagcagcggcagcagcaccctgagcaagaagagaccccccccccccccccccggccacaagagaaccctgagcgacccccccagccccctgccccacggcccccccaacaagggcgccgtgccctggggcaacgacggcggccccagcagcagcagcaagaccaccaacaagttcgagggcctgagccagcagagcagcaccagcagcgccaagaccgccctgggccccagagtgctgcccaagctgccccagaaggtggccctgagaaagaccgaccacctgagcctggacaaggccaccatcccccccgagatcttccagaagagcagccagctggccgagctgccccagaagcccccccccggcgacctgccccccaagcccaccgagctggcccccaagccccagatcggcgacctgccccccaagcccggcgagctgccccccaagccccagctgggcgacctgccccccaagccccagctgagcgacctgccccccaagccccagatgaaggacctgccccccaagccccagctgggcgacctgctggccaagagccagaccggcgacgtgagccccaaggcccagcagcccagcgaggtgaccctgaagagccaccccctggacctgagccccaacgtgcagagcagagacgccatccagaagcaggccagcgaggacagcaacgacctgacccccaccctgcccgagacccccgtgcccctgcccagaaagatcaacaccggcaagaacaaggtgagaagagtgaagaccatctacgactgccaggccgacaacgacgacgagctgaccttcatcgagggcgaggtgatcatcgtgaccggcgaggaggaccaggagtggtggatcggccacatcgagggccagcccgagagaaagggcgtgttccccgtgagcttcgtgcacatcctgagcgactag

SEQ ID NO: 308202 - protein, 153 aa, Artificial Sequence
  derived and/or modified sequence
MSEIQGTVEFSVELHKFYNVDLFQRGYYQIRVTLKVSSRIPHRLSASIAGQTESSSLHSACVHDSTVHSRVFQILYRNEEVPINDAVVFRVHLLLGGERMEDALSEVDFQLKVDLHFTDSEQQLRDVAGAPMVSSRTLGLHFHPRNGLHHQVP

SEQ ID NO: 308203 - protein, 68 aa, Artificial Sequence
  derived and/or modified sequence
MSEIQGTVEFSVELHKFYNVDLFQRGYYQIRVTLKVSSRIPHRLSASIAGQTEVLNIHMSEQEPAQGK

SEQ ID NO: 308204 - DNA, 462 bp, Artificial Sequence
  derived and/or modified sequence
atgagcgagatccagggcaccgtggagttcagcgtggagctgcacaagttctacaacgtggacctgttccagagaggctactaccagatcagagtgaccctgaaggtgagcagcagaatcccccacagactgagcgccagcatcgccggccagaccgagagcagcagcctgcacagcgcctgcgtgcacgacagcaccgtgcacagcagagtgttccagatcctgtacagaaacgaggaggtgcccatcaacgacgccgtggtgttcagagtgcacctgctgctgggcggcgagagaatggaggacgccctgagcgaggtggacttccagctgaaggtggacctgcacttcaccgacagcgagcagcagctgagagacgtggccggcgcccccatggtgagcagcagaaccctgggcctgcacttccaccccagaaacggcctgcaccaccaggtgccctag

SEQ ID NO: 308205 - DNA, 207 bp, Artificial Sequence
  derived and/or modified sequence
atgagcgagatccagggcaccgtggagttcagcgtggagctgcacaagttctacaacgtggacctgttccagagaggctactaccagatcagagtgaccctgaaggtgagcagcagaatcccccacagactgagcgccagcatcgccggccagaccgaggtgctgaacatccacatgagcgagcaggagcccgcccagggcaagtag

SEQ ID NO: 308206 - DNA, 558 bp, Artificial Sequence
  derived and/or modified sequence
agaggtgctttctctctggacagttttatgaatacataaggaggttctgtccccactcccttcgcaaccgcatcttattggtaatgagccaaaaagatcatgtctgaaatacaaggaacggttgagttttcggtagagctacataaattttataatgtggatctctttcagagagggtattaccagatccgagtgaccttgaaggtgtcttcaaggatcccccacagactgagtgcctccatcgctgggcagacagagagcagcagcctgcattcagcctgtgtccatgacagcaccgtgcacagccgggtctttcagatcttataccggaatgaagaggtacccataaatgatgctgtggtcttccgagttcatttactcttgggtggtgaaaggatggaagacgcactgagtgaagtagattttcaactcaaggtggatctgcactttacggacagtgaacagcagttgagggatgtggctggggcaccgatggtcagcagccgaacgcttggcctgcacttccacccccggaatggtctgcaccaccaggtcccg

SEQ ID NO: 308207 - DNA, 684 bp, Artificial Sequence
  derived and/or modified sequence
attgaatcaatacagcctgtgtttctcatgatcgcctggtccttgagactgttgataaggcattagagagcttcatggttgttgataatctgaggaacgccctctctagtgacagactgtcacggacatggaggattttttgaagtgccttttcaattttatgagttgaggatcctgcagccctggagatttataattgtccctgccactgctgctttgtgccttcttctagtttctgccttgtttatctggttttcttcccccatagtattttggcaattgtgaaaagtggttctggagaagtaccaacaaatgctcttactgcccgagaactgacacttttggaggctactgatgtttacggcaaaatagcctgagtcctttaatgtccttctttgattgttctaccagctacgattcctgcaaatccctgtcattcttcatcacaaagttatagaggtaatgagccaaaaagatcatgtctgaaatacaaggaacggttgagttttcggtagagctacataaattttataatgtggatctctttcagagagggtattaccagatccgagtgaccttgaaggtgtcttcaaggatcccccacagactgagtgcctccatcgctgggcagacagaggttctaaatatacatatgtcagaacaagaaccagcacaaggtaagta

SEQ ID NO: 308208 - DNA, 462 bp, Artificial Sequence
  derived and/or modified sequence
atgtctgagatccaaggcaccgtcgagttttctgtcgagctgcacaaattttataatgtggacctgttccagcgcggctattaccagattcgcgtcaccctgaaggtgtcctctcgtattccccataggctgtccgcttccatagccggtcagaccgagagcagctccctccattctgcgtgtgttcacgatagcaccgtgcactccagggtttttcagatactctaccgcaatgaggaggtgccaatcaacgatgccgttgttttccgggtccatctacttctgggaggagagagaatggaggacgccttgagtgaggtggatttccagctgaaagtcgacctccacttcaccgatagcgaacagcagttgcgggacgtggcgggagcgcccatggtgagttcgcggaccttgggcctgcactttcacccaaggaacgggctgcaccatcaggtgccctag

SEQ ID NO: 308209 - DNA, 207 bp, Artificial Sequence
  derived and/or modified sequence
atgagcgagattcagggaactgtagagtttagtgtggagcttcacaaattttataatgtggacctgtttcagcgcggctattaccaaatcagggtgaccctgaaggtgtcttctcgaataccacacagactgagcgccagtatcgctggacagacggaggttctgaacatacacatgtccgagcaggaacctgctcagggaaaatag

SEQ ID NO: 308210 - DNA, 462 bp, Artificial Sequence
  derived and/or modified sequence
atgtctgagatccagggcaccgtggagttctctgtggagctgcacaagttctacaacgtggacctcttccagaggggctactaccagatccgggtgaccctgaaggtgagcagccgcatcccccaccggctgagcgccagcattgctggccagacagagagcagcagcctgcacagcgcctgtgtgcatgacagcacagtgcacagcagggtcttccagatcctgtacagaaatgaggaggtgcccatcaatgatgctgtggtgttccgggtgcacctgctgctgggcggggagaggatggaggatgccctgtctgaggtggacttccagctgaaggtggacctgcacttcacagacagcgagcagcagctgagagatgtggccggggcccccatggtgagcagcaggaccctgggcctgcacttccaccccagaaatggcctgcaccaccaggtgccctag

SEQ ID NO: 308211 - DNA, 207 bp, Artificial Sequence
  derived and/or modified sequence
atgtctgagatccagggcaccgtggagttctctgtggagctgcacaagttctacaacgtggacctcttccagaggggctactaccagatccgggtgaccctgaaggtgagcagccgcatcccccaccggctgagcgccagcattgctggccagacagaggtgctgaacatccacatgtctgagcaggagcccgcccagggcaagtag

SEQ ID NO: 308212 - DNA, 462 bp, Artificial Sequence
  derived and/or modified sequence
atgagcgagatccagggcaccgtggagttcagcgtggagctgcacaaattttataacgtggacctattccagcgggggtattatcagatcagggtcacccttaaggtgagttcacggatcccacataggctaagtgcctcaatcgccgggcagactgagagctcctcccttcatagcgcatgcgtgcacgatagcaccgttcactctcgggtcttccagattctctaccgcaacgaagaggtgccaatcaacgatgctgtggtgttccgtgtgcatttgctgcttggtggcgagagaatggaggatgcgttgtcagaagtagatttccagctcaaggtggatttacatttcaccgacagtgagcagcagctgagggatgtcgccggtgcccctatggtcagttcaaggaccctggggcttcatttccatccaagaaatggccttcaccatcaggtcccatag

SEQ ID NO: 308213 - DNA, 207 bp, Artificial Sequence
  derived and/or modified sequence
atgagcgagatccagggcaccgtggagttcagcgtggagctgcacaagttctacaatgttgacttgttccagcgcggctactatcagatccgagtgacactgaaagtctcatccagaatcccccacagactctccgcttcaatcgcaggacagaccgaggtgctcaacattcatatgagcgaacaggaacctgctcagggaaagtag

SEQ ID NO: 308214 - DNA, 462 bp, Artificial Sequence
  derived and/or modified sequence
atgtcagagattcaggggaccgtcgagttctcagtggaactgcacaagttttataatgtcgacctgttccaacgaggctactaccagatcagggtaacccttaaagtgtctagcaggatcccccaccggctcagtgcctccatagccggtcagacagaaagtagttctctacattcagcttgcgtccatgattccactgtgcacagtagggtatttcagatcctctatcggaatgaggaggtgcctattaacgacgcagtggtctttcgtgtgcacctgctgttgggcggtgaacgcatggaagacgcactctccgaggtggattttcagctaaaagtggatctccacttcaccgacagcgaacagcagctgcgggatgtggccggagcgcctatggttagtagccgcactctcggccttcattttcaccctagaaacggactgcatcatcaggttccctag

SEQ ID NO: 308215 - DNA, 207 bp, Artificial Sequence
  derived and/or modified sequence
atgagcgagattcaaggaaccgtggagttctcagtggaactacataaattttacaatgtggacctgtttcagcggggatactatcagatccgggtgacgctgaaagtctcaagtaggattccccatcgtctttctgcctcaattgcaggacagacagaagttctaaatatccacatgagcgaacaagagcctgcccagggtaagtag

SEQ ID NO: 308216 - DNA, 462 bp, Artificial Sequence
  derived and/or modified sequence
atgagtgagatccagggaacggttgaattctccgtcgagcttcataaattctataacgttgacctgtttcagagagggtattatcagatacgcgtgaccctgaaggtctcatcacggatcccgcatcgactctctgccagtatcgccggacagactgaatcttcctcactacactcagcctgtgtgcatgattccaccgttcacagccgggtgttccagatcctctataggaacgaagaagttccaatcaacgacgccgttgtgttcagggtgcacctcctgctaggaggggaaagaatggaagatgccctcagcgaagttgacttccaactcaaagtggacctgcatttcactgactccgagcagcaactaagagacgtggccggcgctccgatggtatcaagtcgaactctaggacttcactttcacccgcggaatggtctgcaccaccaggtgccctag

SEQ ID NO: 308217 - DNA, 462 bp, Artificial Sequence
  derived and/or modified sequence
atgtccgaaattcaaggtacagtggagtttagcgtggagttgcataagttctataatgttgatttgtttcagaggggttactatcaaataagggttaccctgaaggtatccagtcgcatacctcatcgcctgagcgcaagtattgcagggcaaaccgagtcaagcagcctgcattccgcttgcgtgcatgatagcactgttcatagtagagtgtttcagatcttgtatcgcaatgaggaagtgccaatcaacgatgcagtcgtattcagagtccacctcttgctcggcggggagcgcatggaagacgctctgtctgaagtggatttccagttgaaggtggacctgcatttcaccgatagcgaacagcagttaagagacgtagccggcgctcccatggtttcttcccgcactctcggtctccacttccaccctcgcaatggcctccatcatcaagtaccctag

SEQ ID NO: 308218 - RNA, 462 nt, Artificial Sequence
  derived and/or modified sequence
augagugagauccagggaacgguugaauucuccgucgagcuucauaaauucuauaacguugaccuguuucagagaggguauuaucagauacgcgugacccugaaggucucaucacggaucccgcaucgacucucugccaguaucgccggacagacugaaucuuccucacuacacucagccugugugcaugauuccaccguucacagccggguguuccagauccucuauaggaacgaagaaguuccaaucaacgacgccguuguguucagggugcaccuccugcuaggaggggaaagaauggaagaugcccucagcgaaguugacuuccaacucaaaguggaccugcauuucacugacuccgagcagcaacuaagagacguggccggcgcuccgaugguaucaagucgaacucuaggacuucacuuucacccgcggaauggucugcaccaccaggugcccuag

SEQ ID NO: 308219 - RNA, 462 nt, Artificial Sequence
  derived and/or modified sequence
auguccgaaauucaagguacaguggaguuuagcguggaguugcauaaguucuauaauguugauuuguuucagagggguuacuaucaaauaaggguuacccugaagguauccagucgcauaccucaucgccugagcgcaaguauugcagggcaaaccgagucaagcagccugcauuccgcuugcgugcaugauagcacuguucauaguagaguguuucagaucuuguaucgcaaugaggaagugccaaucaacgaugcagucguauucagaguccaccucuugcucggcggggagcgcauggaagacgcucugucugaaguggauuuccaguugaagguggaccugcauuucaccgauagcgaacagcaguuaagagacguagccggcgcucccaugguuucuucccgcacucucggucuccacuuccacccucgcaauggccuccaucaucaaguacccuag

SEQ ID NO: 308220 - protein, 374 aa, Artificial Sequence
  derived and/or modified sequence
MKRQNVRTLSLIVCTFTYLLVGAAVFDALESDHEMREEEKLKAEEIRIKGKYNISSEDYRQLELVILQSEPHRAGVQWKFAGSFYFAITVITTIGYGHAAPGTDAGKAFCMFYAVLGIPLTLVMFQSLGERMNTFVRYLLKRIKKCCGMRNTDVSMENMVTVGFFSCMGTLCIGAAAFSQCEEWSFFHAYYYCFITLTTIGFGDYVALQTKGALQKKPLYVAFSFMYILVGLTVIGAFLNLVVLRFLTMNSEDERRDAEERASLAGNRNSMVIHIPEEPRPSRPRYKADVPDLQSVCSCTCYRSQDYGGRSVAPQNSFSAKLAPHYFHSISYKIEEISPSTLKNSLFPSPISSISPGLHSFTDHQRLMKRRKSV

SEQ ID NO: 308221 - DNA, 1125 bp, Artificial Sequence
  derived and/or modified sequence
atgaaacgacagaatgtgcgcactcttagcctgatagtgtgtacctttacttacctgctggtgggcgcggcagtctttgatgcgctcgagagtgaccacgaaatgagggaagaagaaaaacttaaagccgaggagattcgaatcaagggcaagtacaatatatcaagtgaggactatcgccagctggagctggtaattctgcagtctgaaccccatcgagccggagttcaatggaagtttgccggctcattctacttcgctatcaccgtgatcacaactataggctacgggcacgccgctcctggtactgatgccgggaaagcattttgcatgttctacgcagtgcttggaattcctctgaccctggtgatgttccagtccctcggggagcggatgaacacgtttgtgcgatatctgctcaagcgaataaagaagtgttgcggaatgcggaacaccgatgtttcaatggagaacatggtgaccgtcgggttcttttcatgcatgggtacgctgtgtataggcgccgccgcattcagccagtgcgaggagtggtcttttttccatgcctattattactgtttcatcacacttacaacaatcggctttggggattacgttgctctgcaaactaaaggtgctctccagaagaagccactgtacgtggctttttccttcatgtatatcctggtgggcctgacagtgattggcgcattcttgaacctcgttgtgctgcgctttctcactatgaactcggaggacgagagacgcgatgccgaggagcgagctagtctcgctggcaacaggaatagtatggtgattcacatcccagaggagcctaggccttcccggccacgctacaaggccgacgtgccagatctgcaatctgtgtgctcttgcacatgctatcgctcacaggactatggcgggcgaagcgtcgcgccacaaaactctttcagcgccaaactggctcctcattattttcattctattagctacaaaatagaggagatttctccctctacactgaagaacagcctctttccaagccccatcagctctatctcacctggactgcacagtttcacagaccatcagagactgatgaagcgacgaaaatcggtctag

SEQ ID NO: 308222 - DNA, 1125 bp, Artificial Sequence
  derived and/or modified sequence
atgaaaaggcagaacgttcgcacgttatcattaattgtgtgcaccttcacttacctgcttgttggggccgccgtgtttgatgcactcgaaagtgaccatgaaatgcgggaggaggagaaactcaaggcagaagagatcagaataaagggaaaatataatattagctccgaggattaccgacagctcgagctggtaattctacaatctgaaccccaccgggccggtgttcagtggaagttcgccgggagtttctactttgccatcacggttatcactacaatcggttatggtcacgccgcacccgggacagacgccggcaaagctttttgtatgttttatgctgttctcggaattcctctgaccctcgtgatgttccaaagcctgggcgagcgcatgaacacttttgttaggtatctactcaagcgcatcaagaaatgttgtggcatgagaaacacagacgttagcatggagaatatggtgacagtcggctttttttcatgtatgggcacgctctgtatcggggcggctgccttctcacagtgtgaagagtggagcttcttccacgcctactattattgctttatcaccctgactaccattgggtttggcgactatgtagcgctgcaaaccaaaggagccctccagaagaaaccattgtacgtcgctttttcgtttatgtacatactggtagggctcaccgtcataggggctttccttaatttggtggtcctgaggttcctcaccatgaacagcgaggatgagagaagagacgctgaggaacgcgctagtcttgccgggaaccggaatagcatggtaattcacatcccagaggagccgaggccatcacgccccaggtacaaagcagacgtgccagacttacagtctgtctgtagttgtacttgttacaggtcacaagactacgggggcaggtccgtcgcccctcagaactccttcagtgctaaactggctcctcactactttcactcaatctcctataaaatcgaggagatttccccgtccacccttaaaaacagtctcttcccgtctcccatctcaagtatcagcccgggattgcattcctttaccgatcaccagcgactcatgaagcggcgaaagtctgtgtag

SEQ ID NO: 308223 - DNA, 1125 bp, Artificial Sequence
  derived and/or modified sequence
atgaagcgccagaacgtcagaaccctatctctcattgtttgcaccttcacatacctacttgtcggggcggctgtttttgacgccctcgagtccgaccacgaaatgcgggaggaggagaaattgaaggccgaagaaatccgtattaagggaaaatataacattagttctgaagactaccggcagttggaactggtgatactccagtccgagcctcacagggccggcgtgcagtggaaattcgctgggtccttttactttgctatcacagtaatcaccactattgggtacgggcatgcagccccaggaacagacgcgggcaaagccttttgtatgttctacgccgttctgggaatacccctgacactcgtcatgttccagagcctgggcgagaggatgaacaccttcgttagatacctgttgaagagaatcaagaaatgttgtggaatgcgtaacactgatgtaagcatggaaaacatggtgactgttggatttttctcttgcatgggaacgctctgtatcggcgcagccgccttttcacagtgtgaagagtggtcctttttccacgcctattattattgcttcataacccttaccactattggtttcggcgattacgttgctctgcaaactaagggagctctacaaaaaaaacccctgtacgtggctttttcgtttatgtacattctggtgggactcactgtcatcggcgcatttctgaacttggtagtgttaaggttcctaacgatgaacagcgaagacgagaggagggatgcagaggagcgtgcctcccttgcgggcaatcggaatagcatggtcatccacatccccgaggagcccaggccttcccggccaaggtacaaagccgacgtacctgatctccagagtgtgtgcagttgcacttgttatagaagtcaagattacggagggaggagcgtagcgccacagaattcatttagtgctaaactggcaccccactatttccatagtattagctataagatcgaggagatctctccttccacactcaaaaactccctcttccctagccccatatcatccatttctccgggcttgcactcttttacagaccaccagagactaatgaagaggcgcaagtcagtctag

SEQ ID NO: 308224 - DNA, 1125 bp, Artificial Sequence
  derived and/or modified sequence
atgaagaggcagaatgtgaggaccctgagcctcatcgtgtgcaccttcacctacctgctggtgggcgctgctgtgtttgatgccctggagagtgaccacgagatgagggaggaggagaagctgaaggccgaggagatccgcatcaagggcaagtacaacatcagcagcgaggactaccggcagctggagctggtgatcctgcagagcgagccccaccgggccggcgtgcagtggaagtttgctggcagcttctactttgccatcaccgtcatcaccaccatcggctacggccatgctgcccctggaacagatgctgggaaggccttctgcatgttttatgctgtgctgggcatccccctgaccctggtgatgttccagagcctgggggagaggatgaacacctttgtgcgctacctgctgaagaggatcaagaagtgctgcggcatgaggaacacagatgtgtccatggagaacatggtgacagtgggcttcttcagctgcatgggcaccctgtgcattggagctgctgccttcagccagtgtgaggagtggagcttcttccacgcctactactactgcttcatcaccctgaccaccatcggctttggagactatgtggccctgcagaccaagggggccctgcagaagaagcccctgtatgtggccttctccttcatgtacatcctggtgggcctgactgtgattggagccttcctgaacctggtggtgctgcgcttcctgaccatgaacagtgaagatgaaagaagagatgctgaggagcgggccagcctggccggcaacagaaacagcatggtgatccacatccctgaggagccccggcccagccggccccgctacaaggcagatgtgcctgacctgcagagcgtgtgcagctgcacctgctaccgcagccaggactatggaggccgctctgtggccccccagaacagcttcagcgccaagctggccccccactacttccacagcatctcctacaagattgaggagatcagccccagcaccctgaagaacagcctcttccccagccccatcagcagcatcagccctggcctgcacagcttcacagaccaccagaggctgatgaagaggaggaagtctgtgtag

SEQ ID NO: 308225 - DNA, 1125 bp, Artificial Sequence
  derived and/or modified sequence
atgaagcggcagaacgtgcggaccctgagcctgatcgtgtgcaccttcacatacctgctggtgggcgcggccgtgttcgacgctcttgaatcagaccatgaaatgagagaggaagaaaaattgaaagccgaggaaatcagaattaaaggaaaatataacatttcttctgaggactatcgccagcttgagttggtgatcctccagtccgagccgcaccgcgccggcgtccagtggaagttcgcgggcagcttctatttcgccatcaccgtaatcaccactatcggttatggccatgcagctcctggtaccgatgcaggtaaggcgttttgcatgttctatgcagtgctgggtatccccctgacattagtgatgttccagagtctgggagaacgcatgaacacgttcgtcagatacctgctaaagagaatcaaaaagtgttgtggcatgagaaatacagatgttagtatggagaatatggtgacagtggggtttttcagctgtatgggaacattatgcatcggcgccgcagcgttttcacaatgtgaggagtggagcttctttcacgcgtactattattgttttatcacactgactaccattggcttcggtgactatgtggcgctccagactaaaggagcactgcagaaaaagccactgtacgttgccttcagtttcatgtacatactggtcgggcttacagtaataggagcttttctgaatctcgtggttctgagattcctgacaatgaatagcgaagatgagcggcgagacgccgaggaacgggcatccctcgccgggaacagaaattccatggtcatacacatccctgaggagccacgcccaagcaggccacggtacaaagccgacgtgccagacctgcagagcgtttgttcatgtacctgctaccgcagtcaggattatggggggcgaagcgtggcgccacagaacagtttttcagcaaagcttgctccacactacttccattccatctcctacaagatagaagagatctccccatctacgttaaaaaactccctgttcccaagccccatctcaagcatttcccctggccttcatagcttcacggaccaccagaggctgatgaagagacggaaatctgtctag

SEQ ID NO: 308226 - DNA, 1125 bp, Artificial Sequence
  derived and/or modified sequence
atgaagcggcagaacgtgcggaccctgagcctgatcgtgtgcacctttacttatctgttagtgggcgctgcagtctttgacgcactagaaagtgaccacgagatgcgcgaagaggaaaagctaaaggctgaggagattagaattaagggcaagtataatataagttctgaggactataggcagctggaactggttatcctacagtcagaaccacatagagcaggagtgcagtggaagttcgccgggtcattctactttgcaatcacagtgatcaccactatcggatatggacatgctgcccccgggaccgacgcaggtaaggccttttgtatgttctacgccgtactaggaatccctctcactttggtgatgttccagtctctgggtgagcgaatgaacaccttcgtgagataccttctgaagcgcatcaagaaatgctgtgggatgcgcaatactgacgtctcaatggagaacatggtgaccgttggatttttttcctgtatgggcaccctgtgcattggggctgctgcatttagccaatgcgaagagtggagcttctttcatgcctattattattgtttcatcactctgacgactatcggcttcggagactacgtcgctctacaaactaaaggcgccctgcagaagaagcctctgtacgtcgcgttcagctttatgtatatcctggtggggctcaccgtcatcggcgcatttctaaatctggtagttctgcggtttctcactatgaatagtgaagatgagcggcgcgatgccgaggaaagggcctcactggcaggaaaccggaattccatggtgatccacatcccagaggaaccccgcccgtcaagacctaggtataaggccgacgtgcctgacctgcaaagcgtttgcagttgcacgtgttatagaagccaagactatggtggccgatccgttgccccccagaattcctttagcgcaaagctggccccccactattttcattcgattagctataaaatagaagaaatctccccctcaacattaaaaaactcgctgttcccctcccccatttcttccatctctccgggcctacattcttttaccgaccaccagcgactgatgaagagacggaaatctgtgtag

SEQ ID NO: 308227 - DNA, 1125 bp, Artificial Sequence
  derived and/or modified sequence
atgaagcggcagaacgtgcggaccctgagcctgatcgtgtgcaccttcacttacctcctcgtaggcgcagccgtattcgatgcactcgagagcgatcacgagatgagggaagaggagaagctgaaagccgaagaaattagaattaagggtaagtataatatctcctctgaggattatcggcagctggagctggttatactgcaaagcgaaccccatagagcaggagtgcagtggaagttcgccggatctttctactttgctatcaccgttatcacaaccattggatatgggcacgccgctcctggcacagacgccggcaaggccttttgtatgttctatgctgtcctcggaatccccttgactctggtgatgtttcagagtcttggggaaaggatgaatacgtttgtgagatatctgcttaagcgcattaaaaagtgttgcggtatgcgcaatacagacgttagcatggagaatatggttaccgtcggcttcttctcttgtatggggacactttgtattggcgctgcagcttttagccaatgcgaagagtggtccttctttcatgcctactactattgtttcattactctgacaacgattgggtttggagattacgtggcgttgcagactaagggcgctctgcagaagaaacctctgtacgtagcattctcttttatgtacatcttggtcgggctgaccgtgatcggagcattcctgaatctcgtggtgttgaggttcctgacaatgaactcagaggacgaacggagagacgccgaggagagggcctctctggcgggtaatagaaattcgatggttatccacatacccgaagagccccggccatccaggcctcgatacaaggcagacgtgccggatcttcagagcgtctgtagctgcacatgttacagatctcaagactacggtggtaggagcgtggcgccacaaaacagcttctcagctaagctagctccacactacttccactcaatcagctacaagattgaagagatcagcccttctacactgaagaactcactgttcccaagtcccatttctagtatctcccctgggctccacagtttcacagaccatcagaggcttatgaagaggcgcaagagcgtgtag

SEQ ID NO: 308228 - DNA, 1303 bp, Artificial Sequence
  derived and/or modified sequence
gtgggacgcgcgcggctgtgagcctgcgggacatgccccccgcgccggctccttgctggcggccatgaagaggcagaacgtgcggactctgtccctcatcgtctgcaccttcacctacctgctggtgggcgccgccgtgttcgacgccctcgagtcggaccacgagatgcgcgaggaggagaaactcaaagccgaggagatccggatcaaggggaagtacaacatcagcagcgaggactaccggcagctggagctggtgatcctgcagtcggaaccgcaccgcgccggcgtccagtggaaattcgccggctccttctactttgcgatcacggtcatcaccaccataggttatgggcacgctgcacctggcaccgatgcgggcaaggccttctgcatgttctacgccgtgctgggcatcccgctgacactggtcatgttccagagcctgggcgagcgcatgaacaccttcgtgcgctacctgctgaagcgcattaagaagtgctgtggcatgcgcaacactgacgtgtctatggagaacatggtgactgtgggcttcttctcctgcatggggacgctgtgcatcggggcggccgccttctcccagtgtgaggagtggagcttcttccacgcctactactactgcttcatcacgttgactaccattgggttcggggactacgtggccctgcagaccaagggtgccctgcagaagaagccgctctacgtggcctttagctttatgtatatcctggtggggctgacggtcatcggggccttcctcaacctggtcgtcctcaggttcttgaccatgaacagtgaggatgagcggcgggatgctgaagagagggcatccctcgccggaaaccgcaacagcatggtcattcacatccctgaggagccgcggcccagccggcccaggtacaaggcggacgtcccggacctgcagtctgtgtgctcctgcacctgctaccgctcgcaggactatggcggccgctcggtggcaccgcagaactccttcagcgccaagcttgccccccactacttccactccatctcttacaagatcgaggagatctcaccaagcacattaaaaaacagcctcttcccatcgcctattagctccatctctcctgggttacacagctttaccgaccaccagaggctgatgaaacgccggaagtccgtttaggggaactaactgcacattcaagagaggcgtccgtggatgctgggtctcactgccaaagccgaacacggcttcgggatttctgccttctcaagtggacctctgctgtgctgggcg

SEQ ID NO: 308229 - DNA, 1441 bp, Artificial Sequence
  derived and/or modified sequence
gtgggacgcgcgcggctgtgagcctgcgggacatgccccccgcgccggctccttgctggcggccatgaagaggcagaacgtgcggactctgtccctcatcgtctgcaccttcacctacctgctggtgggcgccgccgtgttcgacgccctcgagtcggaccacgagatgcgcgaggaggagaaactcaaagccgaggagatccggatcaaggggaagtacaacatcagcagcgaggactaccggcagctggagctggtgatcctgcagtcggaaccgcaccgcgccggcgtccagtggaaattcgccggctccttctactttgcgatcacggtcatcaccaccataggttatgggcacgctgcacctggcaccgatgcgggcaaggccttctgcatgttctacgccgtgctgggcatcccgctgacactggtcatgttccagagcctgggcgagcgcatgaacaccttcgtgcgctacctgctgaagcgcattaagaagtgctgtggcatgcgcaacactgacgtgtctatggagaacatggtgactgtgggcttcttctcctgcatggggacgctgtgcatcggggcggccgccttctcccagtgtgaggagtggagcttcttccacgcctactactactgcttcatcacgttgactaccattgggttcggggactacgtggccctgcagaccaagggtgccctgcagaagaagccgctctacgtggcctttagctttatgtatatcctggtggggctgacggtcatcggggccttcctcaacctggtcgtcctcaggttcttgaccatgaacagtgaggatgagcggcgggatgctgaagagagggcatccctcgccggaaaccgcaacagcatggtcattcacatccctgaggagccgcggcccagccggcccaggtacaaggcggacgtcccggacctgcagtctgtgtgctcctgcacctgctaccgctcgcaggactatggcggccgctcggtggcaccgcagaactccttcagcgccaagcttgccccccactacttccactccatctcttacaagatcgaggagatctcaccaagcacattaaaaaacagcctcttcccatcgcctattagctccatctctcctgggttacacagctttaccgaccaccagaggctgatgaaacgccggaagtccgtttaggtgtggggagggaaatgggacagaaaagtcatttgtcatagttggtgttaatttccattggtccaactcgtcttttcttatttatttattattattattgtcatcattattactttctctccttcctcctttcttggtctcttggtctcattttcccccacctttccagccagacagagcaggccaaagggaaatacaggcccatcctcctctgaaactcacatctgagcatgaagcatggatctcctcctt

SEQ ID NO: 308230 - DNA, 3276 bp, Artificial Sequence
  derived and/or modified sequence
ctgtgagcctgcgggacatgccccccgcgccggctccttgctggcggccatgaagaggcagaacgtgcggactctgtccctcatcgtctgcaccttcacctacctgctggtgggcgccgccgtgttcgacgccctcgagtcggaccacgagatgcgcgaggaggagaaactcaaagccgaggagatccggatcaaggggaagtacaacatcagcagcgaggactaccggcagctggagctggtgatcctgcagtcggaaccgcaccgcgccggcgtccagtggaaattcgccggctccttctactttgcgatcacggtcatcaccaccataggttatgggcacgctgcacctggcaccgatgcgggcaaggccttctgcatgttctacgccgtgctgggcatcccgctgacactggtcatgttccagagcctgggcgagcgcatgaacaccttcgtgcgctacctgctgaagcgcattaagaagtgctgtggcatgcgcaacactgacgtgtctatggagaacatggtgactgtgggcttcttctcctgcatggggacgctgtgcatcggggcggccgccttctcccagtgtgaggagtggagcttcttccacgcctactactactgcttcatcacgttgactaccattgggttcggggactacgtggccctgcagaccaagggtgccctgcagaagaagccgctctacgtggcctttagctttatgtatatcctggtggggctgacggtcatcggggccttcctcaacctggtcgtcctcaggttcttgaccatgaacagtgaggatgagcggcgggatgctgaagagagggcatccctcgccggaaaccgcaacagcatggtcattcacatccctgaggagccgcggcccagccggcccaggtacaaggcggacgtcccggacctgcagtctgtgtgctcctgcacctgctaccgctcgcaggactatggcggccgctcggtggcaccgcagaactccttcagcgccaagcttgccccccactacttccactccatctcttacaagatcgaggagatctcaccaagcacattaaaaaacagcctcttcccatcgcctattagctccatctctcctgggttacacagctttaccgaccaccagaggctgatgaaacgccggaagtccgtttaggggaactaactgcacattcaagagaggcgtccgtggatgctgggtctcactgccaaagccgaacacggcttcgggatttctgccttctcaagtggacctctgctgtgctgggcgaatgctctactcattcccctacacaactgtggggatggtccagctacacatagacaggaagcccagagaaacgctcgatgtgagggtccccgcaagcccgtcgggctctttcggcacctggcccccccaaagctcctcaacgaggagtagagactgccaagcccttccactcattcatcatcataaaaatgtaacttgctatggcagcctcttggccattaagggctatactttgtgacctctgtccttgagatctttgctctgacaagttctatagccttctcagtgctgctatcgtgacgcagtgtccctgctgtggctaagtaacctttcgttttgatcaagatttgtccacgcagactcctacctctgcgcctttgcccgtgccgttcccactacctggaaggtctccccgttgctctccagctttgaggtggagacagagcatctcacacttccttttggtgtctcctgacccttttgctccctgctggacttggcgatgtcctcttctgggctcccctagtccttgttttggttgtgagcgaccgcaccagggagcaaaccttctatggccccggccacaggagcagcaagcactgggcagtgccccagacggaaggaccatcgcgagaataaaggcactgagatgtctggcatcttgcccaaatggccacttatcaccgtgattgaggcacgtcttaacttgctgaagtggaaacagggtaactcaatgcacgcctctgcaccatccctggaaaccaatccagatctatgagaagaaaactggtcatcatagcactggtgattcaacggcacctgcctggcagggtggagtgtgccccatacaacagggctggaagctgccacgccaggtatttctcataaggccggtacagggatggcaccagactatgggagcatacttgtgatgtcactctgaagaagttgggccccgtgatgggaatgtcatcaggaaactgggtccacactgttttcttgtggcaacacttctggtggaggctgcgaggggatggggacatgcaccatgagtgactcaggaacccccagcctctgtggcctggctcctgcccacccctagctctggggccttgagagaggcaagcacacgctcttctcgcctccagagagcggcgtgggggtgtggatactgctcaggccctggcatctcgcacgcctaggaccagcctctgccattcacaggaccgtgcaggcggccccaacagaggacggggacagctctctccttctgtaagtgaggcagcctcatccttccctggatcctcagcatctcttaaccagcagtggcagaggttgaattagaatggcaccagcttcggataaaaatccagatctcgcttttcaaaatgtgtctagagctggtggctgtaaggaaccagtcaagcctcagctgtgactctaatcctgccaagtccacctgagagccgactcattcatccaaagagagaacggtttggatggagctcaaggtgcctggctcgctggcatagcccagacaacctcttaaaggccgggccacagagctagaaggtctgtcactactcagttggggaaatcgtctgagaagttcaagtccactgcctcgcaactcaaatgagtcagcctcaccaaccaagaatcgcgttcataaacagactcagagcctgcgtgccgtggggtttccccgtctgcaactctctcacctggccctcctgcagggcccggcggggactggggagggtcagtgctccctggggcggggactgggtctgtttccaggctcagtgcctctgagtcatacagatgccaggtggtcctgctgcttaccctcgctgaacctcaggcttctcgtgtaaacagggcgcttttgaggaattattattaacatctccctgtgagtcaaagcacctactgagataatgtatgtgatgcttgtaataaatgcagctacatgccaggcactctga

SEQ ID NO: 308231 - DNA, 1125 bp, Artificial Sequence
  derived and/or modified sequence
atgaagaggcagaatgttcggacactttccttgattgtatgcacttttacctacctgcttgtgggggcagctgtgtttgacgcgttagagtcagaccatgaaatgagggaggaggaaaagctaaaggctgaggagattaggattaaagggaaatataacatcagtagcgaggattacagacagctcgagcttgttattttgcagtctgagcctcatcgggcaggtgtgcagtggaagtttgcgggaagtttctactttgccattaccgttatcacaaccattggatacggacatgctgcccctgggacagacgcaggcaaggccttttgtatgttctacgccgtgctcggcatcccactcaccttagtcatgtttcagtcactcggagagagaatgaacacgttcgtgcgatatttactgaagaggatcaagaagtgctgtgggatgaggaatacggatgtgagcatggagaacatggttactgtgggattcttcagctgtatgggaactctgtgcatcggggctgccgcattctcccagtgcgaagaatggtcttttttccacgcctattactattgctttataacattgaccacaattggctttggcgattatgtcgctttgcagactaagggggctttgcagaaaaaacccctctatgtggcgttctccttcatgtatattctcgttggcttaacggtgatcggagcttttttgaatctagttgtgctgagatttctcacgatgaacagcgaagacgagagaagggatgctgaggaaagagcaagtttggcgggtaatcgaaacagcatggtcatccatatcccagaggagcccaggccatcccggcctagatacaaagctgatgtgcctgatctccaaagtgtgtgcagctgcacatgctatcgaagccaggactatggtgggcgttccgtggcgcctcagaacagcttctccgcgaagttggctccgcactattttcactcaatcagttacaagatcgaagaaatttctccgagcacactgaaaaactcactctttcccagccccatcagctcgatctccccaggactgcacagtttcactgatcatcaaagactaatgaaacgcaggaaatccgtgtag

SEQ ID NO: 308232 - DNA, 1125 bp, Artificial Sequence
  derived and/or modified sequence
atgaaaagacagaacgtgcgcaccctttcacttatagtatgcacgtttacctatctgctcgtcggggctgccgtatttgacgctttagagtccgaccatgagatgcgggaagaggagaaactcaaggccgaagagattaggataaagggcaagtataacatctccagtgaggactatcgccagctggagctggtcatcctccaatctgaacctcatcgagctggcgtacaatggaagttcgcaggttctttctactttgctatcacagtgatcacgaccattgggtacgggcatgctgcaccaggtacagacgcaggcaaggccttctgcatgttctatgcggtgctcgggattcccctaacactagtgatgttccagtcacttggcgaacggatgaatacttttgttaggtacctgctgaaaagaatcaagaagtgctgtggcatgagaaatacagatgtgagcatggaaaacatggtgaccgtggggtttttttcatgcatggggaccctgtgcatcggtgcagcggcttttagccaatgcgaagagtggtcatttttccacgcctattactattgtttcatcactctgaccaccatcggcttcggggactatgtcgcccttcaaaccaaaggagccttgcaaaagaaacccctgtacgtggcattctccttcatgtatatactggtgggacttaccgtgataggcgcttttctcaatttggtggtgctgcgcttcctgacgatgaatagtgaggatgaaagacgggatgcagaagagagggcctctctggcaggaaatcgcaacagcatggttattcacattcctgaggagcctaggccgagccggccacggtataaggcggatgttcctgacctgcagtcggtttgtagttgcacttgttatagaagccaggactatggaggtagatctgtggctccccagaattccttttccgctaaacttgccccacattattttcattctatttcctacaaaatcgaagaaattagcccctcgaccctcaagaattcactgttcccttcccctatcagctcaattagccccggactgcacagtttcaccgatcatcaaagactgatgaagagacgtaagagtgtctag

SEQ ID NO: 308233 - DNA, 1125 bp, Artificial Sequence
  derived and/or modified sequence
atgaagcggcagaacgtaagaaccctgtcgctgatcgtttgtacttttacgtatctactggtaggtgcagctgtgttcgacgctctcgaatctgatcacgaaatgagggaggaggagaagttaaaagctgaggagatcagaatcaagggcaagtacaatatcagttccgaggactaccgccagctcgagcttgtgatcttgcagagcgaacctcaccgcgctggcgtgcagtggaaattcgccggaagtttttattttgccattacagtgattactactataggatacggccacgctgccccaggcactgacgctggcaaagcgttttgcatgttttacgcagttctgggcatccccctgaccctggtcatgttccagtctctcggtgaacggatgaacactttcgtgagatacctcctcaaacgcatcaaaaagtgctgcggcatgaggaatacagacgtgagcatggaaaatatggttactgttggttttttcagctgcatggggacactgtgtatcggcgcagccgctttctcccagtgcgaggagtggtccttttttcatgcttattactattgtttcattactctgactactataggctttggagactatgtcgcccttcagaccaaaggtgcactccagaagaagccactgtacgttgctttctcttttatgtatatcctggtgggtttaacagttattggtgcattcctcaacctggttgtgctgcgatttctgaccatgaactctgaagacgaaaggcgggacgcggaagaaagggctagcctcgccggaaaccgcaattccatggttatccacatccccgaagaacccagaccctcacggccacgctataaagctgatgtgcctgacctgcaatcagtatgtagttgtacttgttaccgatctcaggattacggaggcagatctgtcgcccctcagaattccttcagcgctaaactcgcaccacactactttcacagcatctcctataaaattgaagagatctccccgtcgactctgaagaactctctcttccctagccccatctccagtatctctcctgggctgcacagctttacagaccatcagcgactgatgaagaggcgaaaatccgtgtag

SEQ ID NO: 308234 - DNA, 1125 bp, Artificial Sequence
  derived and/or modified sequence
atgaagagacagaacgtgagaaccctgagcctgatcgtgtgcaccttcacctacctgctggtgggcgccgccgtgttcgacgccctggagagcgaccacgagatgagagaggaggagaagctgaaggccgaggagatcagaatcaagggcaagtacaacatcagcagcgaggactacagacagctggagctggtgatcctgcagagcgagccccacagagccggcgtgcagtggaagttcgccggcagcttctacttcgccatcaccgtgatcaccaccatcggctacggccacgccgcccccggcaccgacgccggcaaggccttctgcatgttctacgccgtgctgggcatccccctgaccctggtgatgttccagagcctgggcgagagaatgaacaccttcgtgagatacctgctgaagagaatcaagaagtgctgcggcatgagaaacaccgacgtgagcatggagaacatggtgaccgtgggcttcttcagctgcatgggcaccctgtgcatcggcgccgccgccttcagccagtgcgaggagtggagcttcttccacgcctactactactgcttcatcaccctgaccaccatcggcttcggcgactacgtggccctgcagaccaagggcgccctgcagaagaagcccctgtacgtggccttcagcttcatgtacatcctggtgggcctgaccgtgatcggcgccttcctgaacctggtggtgctgagattcctgaccatgaacagcgaggacgagagaagagacgccgaggagagagccagcctggccggcaacagaaacagcatggtgatccacatccccgaggagcccagacccagcagacccagatacaaggccgacgtgcccgacctgcagagcgtgtgcagctgcacctgctacagaagccaggactacggcggcagaagcgtggccccccagaacagcttcagcgccaagctggccccccactacttccacagcatcagctacaagatcgaggagatcagccccagcaccctgaagaacagcctgttccccagccccatcagcagcatcagccccggcctgcacagcttcaccgaccaccagagactgatgaagagaagaaagagcgtgtag

SEQ ID NO: 308235 - protein, 527 aa, Artificial Sequence
  derived and/or modified sequence
MAVHRVKVTFKDEPGEGSGVARSFYTAIAQAFLSNEKLPNLECIQNANKGTHTSLMQRLRNRGERDREREREREMRRSSGLRAGSRRDRDRDFRRQLSIDTRPFRPASEGNPSDDPEPLPAHRQALGERLYPRVQAMQPAFASKITGMLLELSPAQLLLLLASEDSLRARVDEAMELIIAHGRENGADSILDLGLVDSSEKVQENRKRHGSSRSVVDMDLDDTDDGDDNAPLFYQPGKRGFYTPRPGKNTEARLNCFRNIGRILGLCLLQNELCPITLNRHVIKVLLGRKVNWHDFAFFDPVMYESLRQLILASQSSDADAVFSAMDLAFAIDLCKEEGGGQVELIPNGVNIPVTPQNVYEYVRKYAEHRMLVVAEQPLHAMRKGLLDVLPKNSLEDLTAEDFRLLVNGCGEVNVQMLISFTSFNDESGENAEKLLQFKRWFWSIVEKMSMTERQDLVYFWTSSPSLPASEEGFQPMPSITIRPPDDQHLPTANTCISRLYVPLYSSKQILKQKLLLAIKTKNFGFV

SEQ ID NO: 308236 - DNA, 750 bp, Artificial Sequence
  derived and/or modified sequence
atgcagaaggcatcttggaggacttgcagtcatacagaggagctggccacgaaatacgagagggcaatccagcatccagcagatgagaagttgcaagagaaggcatggggtgcagttgttccactagtaggcaaagaaattttacgaattttctcagaggttagaagcagcattaagaggtcttctgggagccttaacaagtaccccatattctcccacccagcatctagagcgagacaggctcttgctaaacagtttgcagaaattcttcatttcacactccggtttgatgaactcaagatgacaaatcctgccatacagaatgatttcagctattatagaagaacattgagtcgtatgaggattacaatgtaccgggcagaaggagaaaatgaagtaaataatgaattggcaaatcgaatgtctttgttttatgctgaggcaactccaatgctgaaaaccttgagtgatgccacaacaaaatttgtatcagagaataaaaatttaccaatagaaaataccacagattgtttaagcacaatggctagtgtatgcagagtcatgctggaaacaccggaatacagaagcagatttacaaatgaagagacagtgtcattccttgagggtaatggtgggtgtcataatactctatgaccacgtacatccagtgggagcatttgctaaaacttccaaaattgatatgaaaggttgtatcaaagttcttaaggaccaacctcctaatagtgtgga

SEQ ID NO: 308237 - protein, 217 aa, Artificial Sequence [sequence omitted]

SEQ ID NO: 308238 - protein, 448 aa, Artificial Sequence
  derived and/or modified sequence
MKGFIDDANYSVGLLDEGTNLGNVIDNYVYEHTLTGKNAFFVGDLGKIVKKHSQWQNVVAQIKPFYTVKCNSAPAVLEILAALGTGFACSSKNEMALVQELGVPPENIIYISPCKQVSQIKYAAKVGVNILTCDNEIELKKIARNHPNAKVLLHIATEDNIGGEEGNMKFGTTLKNCRHLLECAKELDVQIIGVKFHVSSACKESQVYVHALSDARCVFDMAGEIGFTMNMLDIGGGFTGTEFQLEEVNHVISPLLDIYFPEGSGVKIISEPGSYYVSSAFTLAVNIIAKKVVENDKFPSGVEKTGSDEPAFMYYMNDGVYGSFASKLSEDLNTIPEVHKKYKEDEPLFTSSLWGPSCDELDQIVESCLLPELNVGDWLIFDNMGADSFHEPSAFNDFQRPAIYYMMSFSDWYEMQDAGITSDSMMKNFFFVPSCIQLSQEDSFSAEA

SEQ ID NO: 308239 - protein, 33 aa, Artificial Sequence
  derived and/or modified sequence
MKGFIDDANYSVGLLDEGTNLGNVIDNYVYEHT

SEQ ID NO: 308240 - DNA, 1347 bp, Artificial Sequence
  derived and/or modified sequence
atgaaggggttcattgacgatgccaactattcagtcggacttctagatgaggggaccaacctagggaatgtaattgataattatgtgtatgagcatacactaacgggtaagaatgcctttttcgtaggagacctcggcaaaattgtcaagaagcactcccagtggcagaacgtggttgcccagatcaaaccattctatacagtgaaatgtaactccgccccagccgtcttggagatcctggccgctctgggaaccgggtttgcatgttcatcaaagaacgagatggctctcgtgcaggagctgggagtgccgcctgaaaatatcatctacatctcaccttgtaagcaagtgtcccaaatcaagtatgccgccaaagtcggagtgaacattctcacttgtgataacgaaatcgagttaaaaaagatagctaggaatcatcctaatgctaaagtccttctgcacatagccaccgaagacaacattggcggtgaagaagggaatatgaaattcggtactacattgaagaattgccggcacctgctagaatgcgctaaggagttagatgtccagatcatcggggtgaaatttcatgtatccagcgcctgcaaagaatctcaggtatatgtgcatgccttgtccgatgctagatgtgtgtttgacatggcaggcgaaataggctttactatgaacatgctcgacatcggaggaggcttcaccgggacagagtttcagctagaagaggtaaaccacgttatttcccctcttcttgatatatacttccctgaaggaagcggtgtgaaaatcatcagtgaacccggatcctattacgtttcttcggcattcacactggcggtgaacatcatcgccaagaaagtagtggagaatgataagtttccgtctggcgtagagaaaacgggtagtgacgaacccgcatttatgtactacatgaacgatggagtgtacgggtcctttgcctctaagctgtctgaagatctaaatactatccccgaggtccataaaaaatataaagaggatgagccgctcttcacaagcagtctgtggggacctagctgcgatgagctggaccagatcgttgagtcctgcttgcttccggagctaaacgtgggcgactggttaatattcgataatatgggagccgacagtttccacgagccctcagcctttaacgacttccaacggcccgcaatttattatatgatgtccttttccgactggtacgagatgcaggacgccggtattaccagtgactcaatgatgaagaatttcttttttgttccttcttgcattcaattatctcaggaagattccttcagcgccgaagcctag

SEQ ID NO: 308241 - DNA, 1347 bp, Artificial Sequence
  derived and/or modified sequence
atgaagggatttattgacgacgccaattactctgtgggcttattagatgagggcacgaacttggggaacgtgatcgataactatgtgtatgagcacaccctaacgggcaaaaacgcctttttcgtgggggacctgggtaaaattgtcaagaagcattcgcagtggcagaatgtcgttgcccagatcaagcccttctacaccgtgaaatgtaactcggctccagccgttctcgaaatcctcgccgccttgggcactggctttgcctgctcctcaaagaatgagatggctctggtccaggagttgggtgttccaccagagaacattatttacatctctccttgcaaacaggttagccagatcaagtacgccgccaaggtgggagttaatatcttaacctgcgataacgaaatcgagttgaagaaaatagcccggaatcatcctaacgccaaggtactactgcacattgccacagaagacaatataggtggggaggaaggaaacatgaagtttggaacaactttaaagaactgtaggcacctgcttgagtgcgccaaagagcttgacgttcagatcatcggagtaaagttccatgtctcctcggcctgcaaggagagtcaggtgtatgtgcacgctcttagcgacgcccggtgtgtgttcgatatggctggagaaatcgggtttaccatgaacatgctcgatattggggggggatttacaggcactgagttccagttggaagaggtgaatcacgtgataagccctttgcttgatatctacttccctgaagggagcggcgttaagatcatcagcgaacccgggagttattacgtgtcctctgctttcacactcgctgtgaacatcatcgccaagaaagttgtggaaaacgataaattcccctctggcgtggaaaaaacaggaagcgacgaaccggcgtttatgtattatatgaacgacggcgtttatgggtcctttgcctccaaactgtccgaggatttaaacacaatcccagaagttcacaaaaagtacaaagaagacgaacccctgttcacttcaagcctttgggggcctagctgtgacgaactcgatcagatcgtggaatcctgtctcctgcctgagcttaatgtgggcgattggttaatcttcgacaacatgggggctgattcctttcacgaaccttctgcatttaacgactttcaacgaccagccatttattacatgatgagttttagcgactggtatgaaatgcaggatgctggaatcacatccgattcaatgatgaagaacttttttttcgttcccagctgcatacaacttagccaggaggattcattcagtgctgaggcatag

SEQ ID NO: 308242 - DNA, 1347 bp, Artificial Sequence
  derived and/or modified sequence
atgaagggcttcattgatgatgccaactacagcgtgggcctgctggatgagggcaccaacctgggcaatgtgattgacaactacgtgtatgagcacaccctgaccgggaagaatgccttctttgtgggggacctgggcaagatcgtgaagaagcacagccagtggcagaatgtggtggcccagatcaagcccttctacacagtgaagtgcaacagcgccccagctgtgctggagatcctggccgccctgggcactggatttgcctgcagcagcaagaatgagatggccctggtgcaggagctgggcgtgcccccagagaacatcatctacatcagcccctgcaagcaggtgtcccagatcaagtatgctgccaaggtgggcgtgaacatcctgacctgtgacaatgaaattgagctgaagaagatcgccaggaaccaccccaatgccaaggtgctgctgcacatcgccacagaggacaacattggaggagaggagggcaacatgaagtttggcaccaccctgaagaactgccgccacctgctggagtgtgccaaggagctggatgtgcagatcatcggcgtgaagttccacgtgagcagcgcctgcaaggagagccaggtgtatgtgcacgccctgagtgatgcccgctgtgtgtttgacatggccggggagatcggcttcaccatgaacatgctggacatcggcggcggcttcaccggcacagagttccagctggaggaggtgaaccacgtgatcagccccctgctggacatctacttccctgagggcagcggcgtgaagatcatcagcgagcccggcagctactacgtgtcctctgccttcaccctggccgtgaacatcatcgccaagaaggtggtggagaatgacaagttccccagcggcgtggagaagacaggcagtgatgagcccgccttcatgtactacatgaatgatggagtgtatggcagctttgccagcaagctgtctgaggacctgaacaccatccctgaggtgcacaagaagtacaaggaggatgagcccctcttcaccagcagcctgtggggccccagctgtgatgagctggaccagatcgtggagagctgcctgctgcctgagctgaatgtgggggactggctgatctttgacaacatgggcgctgacagcttccacgagcccagcgccttcaatgacttccagaggcctgccatctactacatgatgtccttcagtgactggtatgagatgcaggatgctggcatcaccagtgacagcatgatgaagaacttcttctttgtgcccagctgcatccagctgagccaggaggacagcttctctgctgaggcctag

SEQ ID NO: 308243 - DNA, 1347 bp, Artificial Sequence
  derived and/or modified sequence
atgaagggcttcatcgacgacgccaactacagcgtgggcctgctggacgaaggtacaaatctcgggaacgtcatcgacaattacgtttatgagcacactctcaccggcaagaacgctttttttgttggtgacctgggaaaaatagtaaaaaaacatagtcagtggcagaatgtcgtagcccaaatcaagccattttacacggtgaagtgcaactcagcgcctgctgtgcttgagatactcgccgcgctgggcactggttttgcctgtagctcaaagaatgagatggccctggtacaggaactgggggtgcctcctgagaacataatctatatttcaccttgtaagcaggtaagccagattaaatacgccgccaaagtaggcgtaaacattctgacctgcgacaatgaaattgagctgaagaaaatcgccaggaatcaccctaatgcgaaggtgttattgcacatcgctacagaggacaacatcgggggagaggagggaaacatgaagtttggcaccacccttaagaattgcaggcatctgctggagtgtgcgaaggagctcgatgtgcaaatcatcggagtgaagtttcacgtgtccagtgcctgtaaggagtcccaggtgtatgtccatgcactgtcggacgctcggtgtgtcttcgacatggctggcgagataggttttaccatgaatatgctggacatagggggtggttttaccggtaccgaatttcagttagaggaagttaaccatgtgattagcccgctgctcgacatctattttccagaagggtctggggtaaagataataagtgagccaggatcttattacgtgtcatccgctttcacgcttgcggtaaatatcatcgcaaagaaggttgttgagaatgacaaattcccctcgggcgtggagaagactgggagtgacgaacccgcattcatgtactatatgaacgacggcgtctatggtagttttgcatcaaaactgtccgaggacctaaacactattcctgaggtgcataagaagtataaggaggacgaacccttgttcacttcatccctttggggaccatcctgcgacgagcttgaccaaatagtcgaatcctgcctcctgcctgaactgaacgtgggggactggctaatttttgataacatgggggccgattctttccatgagcccagcgctttcaatgatttccagcggcccgccatctattatatgatgtccttctccgactggtatgaaatgcaagacgctgggatcacgtccgacagcatgatgaagaattttttttttgtgccaagctgcatacaattgagccaggaggactctttctccgcagaggcttag

SEQ ID NO: 308244 - DNA, 1347 bp, Artificial Sequence
  derived and/or modified sequence
atgaagggcttcatcgacgacgccaactacagcgtgggcctgctggatgagggtaccaatctgggcaatgtgattgataactacgtgtatgagcacactcttactgggaagaacgcgttcttcgtgggagacctcggcaagattgttaagaagcactcacagtggcagaacgtggtggcccagatcaagccattttatactgtgaaatgtaacagcgcaccggcagtgctcgagattttggcagctcttgggactggcttcgcttgttccagtaagaatgagatggccttggtccaggaattgggcgtccctccagagaatatcatctacatttcgccttgcaagcaggtgtctcagattaaatacgcagctaaggtcggagttaacatactgacttgcgataacgagatcgaactcaagaagattgctcgtaaccatcccaatgccaaagtgttgctgcacattgctacagaggataatattggcggagaagaagggaatatgaagttcgggacgaccttgaaaaattgcagacacctgttggaatgcgctaaagaactggacgtgcagattatcggggtgaagtttcatgtgagctctgcatgtaaggagtcacaggtgtacgttcatgccctttcagacgctcggtgcgtgttcgatatggccggggagatcggctttactatgaacatgcttgatatcggaggtggcttcaccgggactgaattccagctggaagaggtcaatcacgtgatttctccattactcgatatctactttccagaggggtcgggtgtgaagattattagtgaaccaggctcctactatgtgtcgtccgctttcacactggcagtcaacattatagctaaaaaggtcgtggaaaatgataaatttccttccggcgtagagaaaacggggtccgacgagcctgcatttatgtattatatgaacgacggtgtttatgggtcattcgccagcaaactcagcgaagacctgaatacaatcccagaagttcacaagaagtacaaggaggatgaaccccttttcacaagctcactgtggggtccatcttgcgatgaactcgaccagatcgtggaatcatgcctgcttcccgagctgaacgttggagattggctgattttcgacaatatgggagctgattcattccacgagcccagtgccttcaatgacttccagcgcccggccatctactatatgatgagcttctctgactggtacgaaatgcaggatgccggaatcacaagcgattcaatgatgaaaaacttcttctttgtcccatcctgtatccagttgagtcaggaggattccttttctgccgaggcctag

SEQ ID NO: 308245 - DNA, 1347 bp, Artificial Sequence
  derived and/or modified sequence
atgaaagggttcattgacgacgccaactatagtgttggacttctggacgaaggaactaacctggggaacgttattgataattacgtgtacgagcataccttaaccggtaagaacgctttttttgtcggtgatctggggaaaattgtgaagaagcacagtcagtggcagaacgtcgtcgcccagattaaacctttttacaccgttaagtgtaattcggcaccggctgtcttggagatccttgctgcccttgggacagggttcgcttgctccagtaaaaacgagatggcactggtccaggagttgggcgtgcctccagagaatataatttacatttcgccttgtaaacaggttagtcaaattaaatatgccgcaaaagttggggtaaacattttgacctgtgacaatgagatagaattgaaaaaaatcgcccgaaaccatcccaatgcaaaggtcctccttcatatcgccactgaggataatatcggcggagaggaggggaacatgaagttcgggactacactgaaaaactgccgacacctcttggagtgcgcgaaggagctcgacgtgcaaatcattggagtgaagtttcacgttagctctgcctgcaaggaatcccaggtgtatgtccatgcattgagtgacgctcggtgcgtcttcgacatggctggtgaaatcggattcacaatgaacatgcttgacatcggcggaggctttaccggcacagaattccagctggaggaggtgaatcacgtcatttccccgctgctggatatctattttcctgagggatctggcgtcaagattataagtgaacccggaagttactatgtctcaagtgcctttacccttgcagtcaacatcattgcaaaaaaagtggttgagaacgacaaatttccatctggcgtggagaagactggcagtgacgagccggcttttatgtactacatgaatgacggtgtatacggatcgtttgcttctaagttaagtgaggatttaaacaccattccagaggttcacaaaaagtacaaagaggacgagccactgtttacaagttccttatggggcccttcatgtgacgagctcgaccagatcgtcgaaagctgcctgctgcccgagcttaatgtgggtgactggctcatctttgataatatgggagccgacagctttcacgaaccgagtgccttcaacgattttcaacgtcctgcaatatattacatgatgtccttcagcgactggtatgaaatgcaagacgctggtataacctctgactccatgatgaagaatttcttctttgttcccagttgcatccaattgtctcaagaggactcttttagcgcagaggcttag

SEQ ID NO: 308246 - DNA, 1347 bp, Artificial Sequence
  derived and/or modified sequence
atgaagggatttatagacgacgcaaactactctgtcgggctgctcgatgagggcactaatctgggcaacgtcatcgataattacgtgtatgagcatactctcactggtaaaaacgcgttttttgtgggtgacctgggcaaaatcgtaaaaaaacatagtcagtggcagaacgtggtggctcagatcaagcccttttataccgtgaagtgcaactcagctccagctgtcctggaaattcttgctgccttagggacagggttcgcgtgttcctccaaaaatgagatggctctggtgcaggaactcggtgtgccccctgaaaacattatctacatatccccctgtaagcaggtatcgcagatcaaatacgccgctaaggtaggcgttaatatcttgacttgtgacaatgaaattgagttgaaaaaaatcgccaggaaccatcccaatgcaaaggtgctcctgcatatcgctactgaggacaacataggaggcgaggagggcaatatgaagtttggaacgaccctgaaaaactgcaggcaccttttagagtgcgcaaaggagctcgatgtgcagatcattggggttaaattccacgtgagctctgcttgtaaagagtctcaggtgtatgtgcatgccctgtccgacgcacggtgcgtgttcgacatggccggagaaatagggttcaccatgaacatgctggacatcggaggtggattcaccggaacagaatttcagttggaggaggtgaatcatgtgatttctccactcttggacatctactttcctgagggctcaggcgtgaaaattatctctgagccaggcagttattacgtgtccagcgcattcactctagcagttaacatcattgccaagaaggtggtagaaaatgacaagtttccctccggagtcgaaaaaactggatctgacgagcccgctttcatgtactatatgaatgacggcgtgtatggatcttttgcgagtaagctaagcgaggacctcaacacgattcccgaagtgcacaagaagtataaagaggacgaacctttattcactagttctctgtggggtcctagttgtgatgagctggatcaaattgtcgagtcttgcctcttgccagagttgaacgtgggggactggttgattttcgataatatgggtgcagattcctttcatgagcctagtgctttcaatgactttcagaggccagccatctactacatgatgtctttctcagattggtatgagatgcaggatgctggaatcaccagtgacagtatgatgaagaatttcttcttcgtgccaagttgtatccaacttagccaggaggacagtttctccgccgaagcctag

SEQ ID NO: 308247 - DNA, 4721 bp, Artificial Sequence
  derived and/or modified sequence
atcaccgagggcgggcgcctcagcccgggaggacactccccagggtaaactacaggcctcacaaagcggagggagctggacgcgaaggctcggcagcggcgccgacaggcttaccccaggcccactctaggccgcacagggttcgcgccacctccggcccaggacagctctcagacgctgccagcgtggagctcgacccggctcacaatgcgctgggccccgcagcgtgagcgcaggcgcccgagaggcggcgggggtcgggcggacggcgcgctccagccgagccgcctccctctctcggcccacacccgcgcggccgcccttcgcctgccggggagctgcgggtggctggagggcgggaagcgaccggccagtctgcacctgcatgacccggtcgcgcgccgacccctcccctctctctcccgggctcagtcctccttcctcttccgtccccctcccttttctccgggctgcaaccgggttccgccccgctcgcgcggctgcccggccagctgtgatgtcaccaggccacgccccctaatataaatactggcgtcgctggcgccgccttctcacactttcaggctctgatcgcggccgcagtttttccttttttcttctgccgtcgccttctctgcctcttctcatcctttctcgctctgctgctctgcagtgtgacgagtccgaatcctcttcccacccagcccgcgcctttcttcttttgcctgcgctgttctatttctccttcggccgccgccgccactgctgcacacagctggtgtcggtgccgcgcttttacccccaagtcgttcccgcagcctatggcccaggccgccttgggtatttctgctcaaggtaaccacatccctctttaaaaattccgccgaaaaagagaagacgctttacccgactctttgggccgttatctcacggcgaactttctgaccaagtatacaactacccagagggcctaggagaagtgctgtatagagagcagttcgacttcaacgctgagccaccttgggaacctagctgatgataggggggttccatctcccaacttgtccattttgttgcatattctaaggacccagacataggcttggtggcccgtctcttgtctttcctggtttatgactttcggctttgtggaatacggctgagatgaaaggatttattgatgatgcaaactactccgttggcctgttggatgaaggaacaaaccttggaaatgttattgataactatgtttatgaacataccctgacagggaaaaatgcattttttgtgggagatcttggaaagattgtgaagaaacacagtcaatggcagaatgtagtggctcagataaagccattctacacagtgaagtgcaactctgctccagctgtacttgagattttggcagctcttggaaccggatttgcttgttccagtaaaaatgaaatggctttagtgcaagagttgggtgtacctccagaaaacattatttacataagtccttgcaagcaagtgtctcagataaagtatgcagcaaaagttggagtgaatatcctgacatgtgacaatgaaattgaattgaagaaaattgcacgtaatcacccaaatgccaaggtcttactacatattgcaacagaagataatattggaggtgaagagggtaacatgaagtttggcactaccctgaagaactgtaggcatctcttggaatgtgctaaggaacttgatgtccaaataattggggttaaatttcatgtttcgagtgcttgcaaagaatctcaagtatatgtacatgctctatctgatgctcgatgtgtgtttgacatggctggagaaattggctttacgatgaacatgttagacattggtggaggattcacgggaactgaatttcaattggaagaggttaatcatgttatcagccctctgttggatatctactttcctgaaggatctggtgttaagataatttcagaacccggaagctactatgtgtcttctgcatttacactcgcagttaatatcatagcaaagaaagttgttgaaaatgataaatttccctctggagtagaaaaaaccggaagtgatgaaccagccttcatgtattatatgaatgatggtgtttatggttcttttgcaagtaaactgtctgaggacttaaataccattccagaggttcacaagaaatacaaggaagatgagcctctgtttacaagcagcctttggggtccatcctgtgatgagcttgatcaaattgtggaaagctgtcttcttcctgagctgaatgtgggagattggcttatctttgataacatgggagcagattctttccatgaaccatctgcttttaatgattttcagaggccagccatttattacatgatgtcattcagtgattggtatgagatgcaagatgctggaattacttcagactcaatgatgaagaacttcttctttgtgccttcttgcattcagctgagccaagaagacagcttttccgctgaagcttaaacaggcattaacgcttctttagatctgaagttgcaggttaagcttgtctggtcaacattccagtgtggaaaaataatttaaacaatcttattctcttaattcttttggcaacaaaaactattagtaatagctatttgggaccagacaaaatcagctttcatctataattcattggggataatgggagatttagataatgtatccagatttaaacctaccagtttgtcctaccccttaagcgtttaaaataaaatatgcaacaaaatggatgacttagtggagatggaagcccattaattgggttccccattaaatcgtttacatacaagaacacagtttttatactaaggatttgtgtttaaagtcttgtaaagttcatgtctttcacccagatatatcaaatgttagaagaccagtgtgacttcattagataacgtttagtgtatttagaatgtgtaaatttgtgctttgaactgtagtttaataaatgtaaaattgcatcatagtatttgttgacctaatgtaacccttgtatgattgcaataaaattttgtgtagattttactgttttttcaggctaaaactttgggaaaggggctagctagcaaaggtagttttgaaatagatgtgtatatggactgttttgaagggtttttttctttatagcccagttaagttttgtttggctcggtgcatttttcatttatttaattagtaatttaagtaaagtgtttggtaaatcattgtgaagttcagattcattatggagagttgatgtgcagtaagcatgatgtttaacaattttaacaccaaaaatgttaatcctgcataaatcaactgtaataataaataggtgtttctgtatagatagaatgcatagagtaccttagtaaatctttgaatcacaatcttttggctgaaatggaagattctgttaaatactttgaataaacttggggggagggaaataaaattgcagaaaactgcagagcactaaaacttaaagaagggctacatctttatccagaaacctgttgctcttttgcacggaatgtttaaattcagagttgggatgggggttggggtgaagcacacttattatcttcagttgcagtgatttcaaatttaggattttttgttgttggtttgaactgtccccttagtttcttgttatttccaatttgttctgcttagtcattacttttaattcttttcttactaaaattttatggtggttgggggaagggagttagcatcactaacctgacagttgttgccaggaatttgctttgtttactgctagtatattagaaatcctagatctcagaatcacaatagtaataaacaacaggggtcattttttcctaacttactctgtgttcaggtgtggaatttctgtctcccaagaggaaatgtgacttcactttggtgccaatggacagaaaattctacctgtgctacataggagaagtttggaatgcacttaatagctggtttttacaccttgatttcgaggtggaaagaaattgatcatgaatctctaataaatttaaatctcttaaaccagtaggtgcttaatattttttgatttgattaatgcccatttaaatctcatgggttctattaaaaatatatatatatagggccccaatccattgccatcaaattgcccttggacttttccaaggtatattatggggttttatgcaaaattccaagctaccatgtaactttttttaaccatttaacaaggagggggaactgtttcctaccttctttacatgttgtgcattgttgtggtccagaaatgccaaacctttttaaagatggtgcaactttgagtccttggcttgactatacaggccttgaacttcatggcatatcaactttgccatatctgcaggagagctgttctataagaaatagctcagagttgcaaatatcacatgtgaatgatacggtaacttttaagaaatgtctgtattgtatttgaagactgtttgccataaatctgaaatttgaacctatgtatttcaatttggtatgctaaaaagttctgaattaatgtaaagttttttgttataatattgtaatctcagttcaaaagttaactgcaaatataaaacccaatgatttctatatagtaaattgaactgtaaaggtaacttgtgtgtgattctgaatacatagataaatgtttttattcctca

SEQ ID NO: 308248 - DNA, 2857 bp, Artificial Sequence
  derived and/or modified sequence
aaatactggcgtcgctggcgccgccttctcacactttcaggctctgatcgcggccgcagtttttccttttttcttctgccgtcgccttctctgcctcttctcatcctttctcgctctgctgctctgcagtgtgacgagtccgaatcctcttcccacccagcccgcgcctttcttcttttgcctgcgctgttctatttctccttcggccgccgccgccactgctgcacacagctggtgtcggtgccgcgcttttacccccaagtcgttcccgcagcctatggcccaggccgccttgggtatttctgctcaaggtaaccacatccctctttaaaaattccgccgaaaaagagaagacgctttacccgactctttgggccgttatctcacggcgaactttctgaccaagtatacaactacccagagggcctaggagaagtgctgtatagagagcagttcgacttcaacgctgagccaccttgggaacctagctgatgataggggggttccatctcccaacttgtccatggaggtcttcacttcagaaatccaagactcatattcatccagcttggtgtcaagtgggctgttgctgccagaattatcttgtgattatttgagagatgtatcagtttcttctgaagtacaatcaactgtagaagcctttgtagcagtttgttgcatattctaaggacccagacataggcttggtggcccgtctcttgtctttcctggtttatgactttcggctttgtggaatacggctgagatgaaaggatttattgatgatgcaaactactccgttggcctgttggatgaaggaacaaaccttggaaatgttattgataactatgtttatgaacataccctgacagggaaaaatgcattttttgtgggagatcttggaaagattgtgaagaaacacagtcaatggcagaatgtagtggctcagataaagccattctacacagtgaagtgcaactctgctccagctgtacttgagattttggcagctcttggaaccggatttgcttgttccagtaaaaatgaaatggctttagtgcaagagttgggtgtacctccagaaaacattatttacataagtccttgcaagcaagtgtctcagataaagtatgcagcaaaagttggagtgaatatcctgacatgtgacaatgaaattgaattgaagaaaattgcacgtaatcacccaaatgccaaggtcttactacatattgcaacagaagataatattggaggtgaagagggtaacatgaagtttggcactaccctgaagaactgtaggcatctcttggaatgtgctaaggaacttgatgtccaaataattggggttaaatttcatgtttcgagtgcttgcaaagaatctcaagtatatgtacatgctctatctgatgctcgatgtgtgtttgacatggctggagaaattggctttacgatgaacatgttagacattggtggaggattcacgggaactgaatttcaattggaagaggttaatcatgttatcagccctctgttggatatctactttcctgaaggatctggtgttaagataatttcagaacccggaagctactatgtgtcttctgcatttacactcgcagttaatatcatagcaaagaaagttgttgaaaatgataaatttccctctggagtagaaaaaaccggaagtgatgaaccagccttcatgtattatatgaatgatggtgtttatggttcttttgcaagtaaactgtctgaggacttaaataccattccagaggttcacaagaaatacaaggaagatgagcctctgtttacaagcagcctttggggtccatcctgtgatgagcttgatcaaattgtggaaagctgtcttcttcctgagctgaatgtgggagattggcttatctttgataacatgggagcagattctttccatgaaccatctgcttttaatgattttcagaggccagccatttattacatgatgtcattcagtgattggtatgagatgcaagatgctggaattacttcagactcaatgatgaagaacttcttctttgtgccttcttgcattcagctgagccaagaagacagcttttccgctgaagcttaaacaggcattaacgcttctttagatctgaagttgcaggttaagcttgtctggtcaacattccagtgtggaaaaataatttaaacaatcttattctcttaattcttttggcaacaaaaactattagtaatagctatttgggaccagacaaaatcagctttcatctataattcattggggataatgggagatttagataatgtatccagatttaaacctaccagtttgtcctaccccttaagcgtttaaaataaaatatgcaacaaaatggatgacttagtggagatggaagcccattaattgggttccccattaaatcgtttacatacaagaacacagtttttatactaaggatttgtgtttaaagtcttgtaaagttcatgtctttcacccagatatatcaaatgttagaagaccagtgtgacttcattagataacgtttagtgtatttagaatgtgtaaatttgtgctttgaactgtagtttaataaatgtaaaattgcatcatagtatttgttgacctaatgtaacccttgtatgattgcaataaaattttgtgtagattttactgttttttcaggctaaaactttgggaaaggggctagctagcaaaggtagttttgaaatagatgtgtatatggactgttttgaagggtttttttctttatagcccagttaagttttgtttggctcggtgcatttttcatttatttaattagtaatttaagtaaagtgtttggtaaatcat

SEQ ID NO: 308249 - DNA, 1347 bp, Artificial Sequence
  derived and/or modified sequence
atgaagggcttcatcgacgacgccaactacagcgtgggcctgctggacgagggcaccaacctgggcaacgtgatcgacaactacgtgtacgagcacaccctgaccggcaagaacgccttcttcgtgggcgacctgggcaagatcgtgaagaagcacagccagtggcagaacgtggtggcccagatcaagcccttctacaccgtgaagtgcaacagcgcccccgccgtgctggagatcctggccgccctgggcaccggcttcgcctgcagcagcaagaacgagatggccctggtgcaggagctgggcgtgccccccgagaacatcatctacatcagcccctgcaagcaggtgagccagatcaagtacgccgccaaggtgggcgtgaacatcctgacctgcgacaacgagatcgagctgaagaagatcgccagaaaccaccccaacgccaaggtgctgctgcacatcgccaccgaggacaacatcggcggcgaggagggcaacatgaagttcggcaccaccctgaagaactgcagacacctgctggagtgcgccaaggagctggacgtgcagatcatcggcgtgaagttccacgtgagcagcgcctgcaaggagagccaggtgtacgtgcacgccctgagcgacgccagatgcgtgttcgacatggccggcgagatcggcttcaccatgaacatgctggacatcggcggcggcttcaccggcaccgagttccagctggaggaggtgaaccacgtgatcagccccctgctggacatctacttccccgagggcagcggcgtgaagatcatcagcgagcccggcagctactacgtgagcagcgccttcaccctggccgtgaacatcatcgccaagaaggtggtggagaacgacaagttccccagcggcgtggagaagaccggcagcgacgagcccgccttcatgtactacatgaacgacggcgtgtacggcagcttcgccagcaagctgagcgaggacctgaacaccatccccgaggtgcacaagaagtacaaggaggacgagcccctgttcaccagcagcctgtggggccccagctgcgacgagctggaccagatcgtggagagctgcctgctgcccgagctgaacgtgggcgactggctgatcttcgacaacatgggcgccgacagcttccacgagcccagcgccttcaacgacttccagagacccgccatctactacatgatgagcttcagcgactggtacgagatgcaggacgccggcatcaccagcgacagcatgatgaagaacttcttcttcgtgcccagctgcatccagctgagccaggaggacagcttcagcgccgaggcctag

SEQ ID NO: 308250 - protein, 537 aa, Artificial Sequence
  derived and/or modified sequence
MPAPTQLFFPLIRNCELSRIYGTACYCHHKHLCCSSSYIPQSRLRYTPHPAYATFCRPKENWWQYTQGRRYASTPQKFYLTPPQVNSILKANEYSFKVPEFDGKNVSSILGFDSNQLPANAPIEDRRSAATCLQTRGMLLGVFDGHAGCACSQAVSERLFYYIAVSLLPHETLLEIENAVESGRALLPILQWHKHPNDYFSKEASKLYFNSLRTYWQELIDLNTGESTDIDVKEALINAFKRLDNDISLEAQVGDPNSFLNYLVLRVAFSGATACVAHVDGVDLHVANTGDSRAMLGVQEEDGSWSAVTLSNDHNAQNERELERLKLEHPKSEAKSVVKQDRLLGLLMPFRAFGDVKFKWSIDLQKRVIESGPDQLNDNEYTKFIPPNYHTPPYLTAEPEVTYHRLRPQDKFLVLATDGLWETMHRQDVVRIVGEYLTGMHHQQPIAVGGYKVTLGQMHGLLTERRTKMSSVFEDQNAATHLIRHAVGNNEFGTVDHERLSKMLSLPEELARMYRDDITIIVVQFNSHVVGAYQNQE

SEQ ID NO: 308251 - protein, 72 aa, Artificial Sequence
  derived and/or modified sequence
MPAPTQLFFPLIRNCELSRIYGTACYCHHKHLCCSSSYIPQSRLRYTPHPAYATFCRPKENWWQYTQGRRYA

SEQ ID NO: 308252 - protein, 147 aa, Artificial Sequence
  derived and/or modified sequence
MPAPTQLFFPLIRNCELSRIYGTACYCHHKHLCCSSSYIPQSRLRYTPHPAYATFCRPKENWWQYTQGRRYASTPQKFYLTPPQVNSILKANEYSFKVPEFDGKNVSSILGFDSNQLPANAPIEDRRSAATCLQTRGMLLGVFDGHA

SEQ ID NO: 308253 - DNA, 1284 bp, Artificial Sequence
  derived and/or modified sequence
atagaacgctcattaattacagcacagttttcataaattccaacttccctaggaattttgtcttttgaaggcatgttggaagttggggcattaggatataatctcagtccatgtactaagcctctgcataactgaaagatagagtcaataaaattcactctctcattttttgtttttaatctcaagaatttttgccttgaaggaaaaatgtagtggagaatttgatgtttgaacgttagaagagtgagactcaaagatgtgagctgacttttccaagattatttgggagttggtggcagacctatgcccgttagcctggcaaattgccacagtggactagagaagcaagttttgcaagaccatctactgggctttccccagccaaatctgttgtacattctgcacagtttgtactgcacaaaggacgacaaagaaaagagaaaattgaagtttgagtataggagccaggagttcagtcgtggttccacgaatgattgggagttgtgcctgccagaatataccctgtagaaatagtacatgatgaatcccagtcagaagttccagcctgccactgttctctgatgccatgccagcaccaactcaactgttttttcctctcatccgtaactgtgaactgagcaggatctatggcactgcatgttactgccaccacaaacatctctgttgttcctcatcgtacattcctcagagtcgactgagatacacacctcatccagcatatgctaccttttgcaggccaaaggagaactggtggcagtacacccaaggaaggagatatgcttccacaccacagaaattttacctcacacctccacaagtcaatagcatccttaaagctaatgaatacagtttcaaagtgccagaatttgacggcaaaaatgtcagttctatccttggatttgacagcaatcagctgcctgcaaatgcacccattgaggaccggagaagtgcagcaacctgcttgcagaccagagggatgcttttgggggtttttgatggccatgcaggttgtgcttgttcccaggcagtcagtgaaagactcttttattatattgctgtctctttgttaccccatgagactttgctagagattgaaaatgcagtggagagcggccgggcactgctacccattctccagtggcacaagcaccccaatgattactttagtaaggaggcatccaaattgtactttaacagcttgaggacttactggcaagagcttatagacctcaacactggtgagtcgactgatattgatgttaa

SEQ ID NO: 308254 - protein, 76 aa, Artificial Sequence
  derived and/or modified sequence
MPAPTQLFFPLIRNCELSRIYGTACYCHHKHLCCSSSYIPQSRLRYTPHPAYATFCRPKENWWQYTQGRRYASTPQ

SEQ ID NO: 308255 - protein, 128 aa, Artificial Sequence
  derived and/or modified sequence
MPAPTQLFFPLIRNCELSRIYGTACYCHHKHLCCSSSYIPQSRLRYTPHPAYATFCRPKENWWQYTQGRRYASTPQKFYLTPPQVNSILKANEYSFKVPEFDGKNVSSILGFDSNQLPANAPIEDRRS

SEQ ID NO: 308256 - protein, 232 aa, Artificial Sequence
  derived and/or modified sequence
MPAPTQLFFPLIRNCELSRIYGTACYCHHKHLCCSSSYIPQSRLRYTPHPAYATFCRPKENWWQYTQGRRYASTPQKFYLTPPQVNSILKANEYSFKVPEFDGKNVSSILGFDSNQLPANAPIEDRRSAATCLQTRGMLLGVFDGHAGCACSQAVSERLFYYIAVSLLPHETLLEIENAVESGRALLPILQWHKHPNDYFSKEASKLYFNSLRTYWQELIDLNTGESTDIDV

SEQ ID NO: 308257 - DNA, 1614 bp, Artificial Sequence
  derived and/or modified sequence
atgcctgcacccacccagcttttttttccactgatacgtaactgcgagctgtcacggatttatggcacagcctgttattgccaccacaagcacctgtgctgctcctcttcttacattccgcagtcgaggctgaggtatactcctcaccctgcgtacgcaactttctgcaggccaaaggagaactggtggcagtatacacagggcagacggtacgccagcacgccccaaaaattctatttgacacccccccaggtgaatagcattctaaaggccaacgaatactcttttaaagtgccagaattcgacggtaaaaacgtgtcgagtatccttggtttcgactccaaccagcttccagcgaacgctcctattgaggaccgcaggtccgccgctacatgcttgcaaactagaggaatgttgttaggcgtctttgatggccacgcagggtgcgcgtgtagtcaggccgtgtccgagaggttgttttattatatcgccgttagcctattgccacatgagacgcttctggagatcgagaatgcggttgaaagtggccgcgcactgctccctatcctgcagtggcataagcacccaaatgattatttttccaaggaagcaagcaagctgtactttaattctctccggacttactggcaagagctgatcgatctcaataccggtgagagcaccgacattgacgtgaaagaagctctaattaatgcatttaagaggcttgataatgacatcagcctggaggcccaagtaggtgatcctaacagcttcctaaactatctggtgcttcgcgtcgccttcagcggggcaactgcatgtgtagcccacgttgatggcgtggatttacacgtagctaacacaggcgacagtcgggccatgctaggcgtgcaggaagaagatggaagctggtccgcagtgaccctttctaatgatcacaatgcccagaatgaaagggagcttgagcggctaaagctagaacaccctaaatcagaagccaagtctgtggttaagcaagacaggcttctcgggctgctcatgccgttccgagcgttcggagacgtcaaattcaaatggagcatcgacctgcagaagcgagtcatcgaatcaggccctgatcagctaaatgataacgagtacacaaagttcattccacccaactaccacacccccccatatctgactgccgagcctgaggtgacttatcaccggctgcgaccccaagataagtttctcgtgctggctaccgatggactctgggagaccatgcatcgccaggacgtggtgcgaatcgtgggtgagtaccttactgggatgcatcaccagcagcccattgccgtgggggggtacaaagtgaccctcgggcagatgcacggtctgctgacagaacggcgcactaagatgtccagcgtatttgaggatcagaatgccgccactcatctcattaggcacgctgtgggcaataatgaatttggaaccgttgatcatgaaaggctgtccaaaatgttgagcctcccagaggaacttgcaaggatgtaccgagacgatattacaatcattgtcgtgcagtttaatagccatgttgttggggcctatcagaatcaagaatag

SEQ ID NO: 308258 - DNA, 1614 bp, Artificial Sequence
  derived and/or modified sequence
atgcctgcccctacgcagctgtttttcccgcttatccgcaattgcgagctctctaggatttacgggactgcctgctactgtcaccataagcatctgtgttgttcatctagttacattccccaatctcgactacgctatacaccccatcccgcttacgccacattttgccggcctaaggagaattggtggcaatacactcaaggccggcgttatgcttcaacccctcagaagttctacctgacacctccccaggtgaacagtatcctgaaagcaaacgaatattccttcaaagtgccagaattcgatggaaaaaacgtttctagcatcctgggcttcgacagcaatcagcttcctgcaaacgcgccgattgaggatcgaagaagtgccgccacatgcctgcagacccgcgggatgctattgggggtctttgacggccacgctggctgcgcttgtagtcaggccgtaagcgagcggctgttctactacatcgcagtgagcttgttaccgcacgaaaccctgttggagattgagaatgctgttgaaagtgggagggctctcctccccattcttcaatggcataagcatcccaatgactacttttccaaagaagcgagcaaactgtactttaacagcctgcgcacttactggcaggaactgattgatctgaacaccggcgagagtactgacattgatgttaaagaggccctgattaatgctttcaagagattggataacgacatcagcctggaggctcaagtcggggatccaaactctttcctcaattatttagtgcttcgcgtggcatttagtggagctacagcctgtgtagcccacgtggacggagtggaccttcatgtggccaataccggcgattcccgagccatgctgggtgtgcaggaggaggatggatcctggagcgctgtgacactgtccaatgaccacaacgcacagaacgaacgggaactggaacgcctgaagctggagcaccctaaatccgaggctaagtccgtcgtcaagcaggatagactcctgggactgctcatgccgttccgcgccttcggggatgtcaaattcaaatggagcatagacctccagaaacgcgtgattgaatctgggcctgaccaactcaacgataatgagtacacaaaattcattcctcctaattaccacacacctccttatctcactgcagagccggaggtcacatatcatcgcctcagaccgcaggacaaattcctcgtactggccacggatggcctctgggagacaatgcatagacaggatgttgtgaggatcgtaggagagtatctgacaggaatgcatcaccaacagccgattgcagtaggggggtacaaggtgacactaggtcagatgcatggtttgctgacagagcgcagaaccaaaatgtcctccgtgtttgaggatcaaaacgctgctacccatttaattaggcatgctgttggaaataatgaatttggtacagtggatcacgagcggctgtctaagatgctttctctgccagaagaactggctagaatgtaccgggacgatattaccatcatcgttgttcaatttaatagccatgtcgtgggggcctatcagaaccaggaatag

SEQ ID NO: 308259 - DNA, 231 bp, Artificial Sequence
  derived and/or modified sequence
atgcctgcccccactcagttgttcttccctcttatacggaactgtgagttaagcaggatttacggaacagcatgttattgtcaccacaaacacctgtgctgctcttcttcatatattccccagtcccgcctacgatacactccccacccagcctatgcaacattctgtagacccaaggaaaattggtggcagtatacacaaggcaggcggtatgccagcacccctcagtag

SEQ ID NO: 308260 - DNA, 387 bp, Artificial Sequence
  derived and/or modified sequence
atgcccgctccaacacaactcttcttccccttaatacggaactgtgagctcagccgtatatacggtacagcatgttattgccaccacaagcatctctgctgctcctcgtcatacattccacagtcgagactgcggtacactcctcatccggcttacgcaaccttttgtcggcccaaagagaattggtggcagtatacacagggacgccggtacgcctccactccccagaagttttaccttaccccaccccaggtgaactccatcctcaaggccaatgagtacagttttaaggtgcctgaatttgacggaaaaaacgtctcttctatccttggcttcgactcgaaccaactccccgcaaacgcccctatagaagaccgcagaagctag

SEQ ID NO: 308261 - DNA, 699 bp, Artificial Sequence
  derived and/or modified sequence
atgccagctccaacgcagctgttctttccgctcatccgcaattgtgaactttctaggatctatggaaccgcctgttactgccaccacaagcatctctgctgttcttcaagctacatcccgcagtccagactgcgctacaccccccaccccgcctacgcaacattttgtagaccaaaggagaactggtggcagtacacgcagggtcgtaggtacgcttcaacaccccaaaaattctacctgacccccccacaagtaaatagcattctcaaggctaatgaatactcctttaaggtgccagagttcgacggcaagaacgtgtctagcatcttgggcttcgacagcaaccagcttcctgccaatgcgcctattgaagatcggagaagcgctgctacgtgcctccagacacgcgggatgctgctgggcgttttcgacggccacgccggatgtgcctgctctcaggctgtttctgagcggctgttctactatatagccgtctcattgctgccgcatgaaactctgctcgaaatcgaaaatgctgtcgagtctgggagagcgttactccccattctgcaatggcacaaacacccaaatgattatttctctaaggaagccagcaagctttattttaacagcctgaggacgtattggcaggaacttatagatctaaatacgggggagtcgacagacatcgatgtgtag

SEQ ID NO: 308262 - DNA, 219 bp, Artificial Sequence
  derived and/or modified sequence
atgcccgcacctacacaattattctttccacttatcagaaattgtgagctgtcacggatttacggcacagcatgttactgtcaccacaagcatctgtgttgcagcagcagctacattcctcagagtcgactgcgctatactccccatccagcctatgcaaccttttgtagacctaaagagaattggtggcagtacactcaggggaggaggtacgcttag

SEQ ID NO: 308263 - DNA, 1614 bp, Artificial Sequence
  derived and/or modified sequence
atgcctgcccctacacagctctttttcccgctgatcaggaattgcgaactttccagaatatatggcaccgcctgctattgccaccataagcatctctgctgcagtagcagctacatcccccagagtcgactccgctatactccacatcctgcatatgccactttttgcaggcccaaagagaactggtggcagtacacccagggacgccggtacgcgagcacaccccagaaattctatctgactccaccccaagtgaatagtattctcaaagccaatgagtacagcttcaaggtgcctgagttcgatggcaagaatgtgagctccatcttgggatttgactccaaccagttgcccgcaaacgcccccatcgaagatcgtcgatccgccgccacttgcctccagacacgaggtatgcttctcggagtctttgacgggcacgccggctgtgcctgcagccaggctgtgtccgaaagactcttctactacattgcagtgtctttgttgcctcacgagactctgcttgaaatcgagaacgccgttgagagcggtagggccctgctccccatactgcagtggcacaagcacccgaacgactacttcagcaaggaagcaagtaagctttatttcaatagcctcagaacttattggcaggagctgattgacctaaacaccggcgaatctactgacatcgatgttaaggaggccttgattaatgcctttaaaagattggacaatgacattagtctcgaggcacaggtgggtgaccccaactctttcctcaactatttggttcttcgcgtcgcctttagtggagccacggcatgtgtcgcacatgtcgacggtgtagatctacacgtggctaacaccggagattcaagggccatgctcggagtgcaggaggaggacggatcctggagcgccgtgactctctccaatgaccacaatgcacaaaatgagcgggagctggaacgattaaagttggagcacccgaagtctgaggccaagtccgtggtgaagcaggacaggctgctggggttgctgatgccttttagggcgttcggagacgttaagttcaaatggtcaatcgacttgcagaaaagggtcatcgaatcaggccctgaccagctcaatgacaacgaatacactaaatttattccacctaattaccacacccccccctacctgacagccgagccagaggtgacctaccaccggctgcggccccaagacaaattcctagtgcttgctaccgatggcctgtgggagacgatgcacagacaggacgtggtacggatcgtgggtgagtaccttaccggaatgcaccatcagcagcctatcgcagtaggcggttacaaggttaccttaggtcagatgcacggtcttttgactgaacgacgcaccaaaatgagcagcgtgtttgaggaccagaacgcggccacgcacctgatcagacacgcggtagggaataacgagtttgggacagtggaccacgaacggctgtcgaaaatgctaagtcttcccgaggaactggcgaggatgtatcgggatgatattacaatcatcgtcgttcagttcaatagtcacgtggttggagcttaccagaaccaagaatag

SEQ ID NO: 308264 - DNA, 444 bp, Artificial Sequence
  derived and/or modified sequence
atgccagccccaacgcaacttttcttcccacttattcggaattgtgagctcagtcggatctacggcaccgcatgctattgccaccataagcacttatgttgctcttcttcctatatcccccagtcgaggctgcgttataccccacaccctgcatacgccacgttttgcaggcccaaggagaactggtggcaatatacacagggacgccgctatgcctcaacccctcagaaattctacttgactcccccacaggtgaattctattttaaaagctaacgagtattcctttaaagtgccagagtttgatggaaagaatgtttcctcaatattggggtttgattctaaccagttgcctgcaaacgctcctatcgaggatcgaaggtctgcggcaacatgtctacagaccagaggaatgctgctaggggtgttcgacggccatgcgtag

SEQ ID NO: 308265 - DNA, 1614 bp, Artificial Sequence
  derived and/or modified sequence
atgcctgcccccacccagctgttcttccccctcatccggaactgtgagctgagccgcatctatggaacagcctgctactgccaccacaagcacctgtgctgcagcagcagctacatcccccagagccggctgcgctacaccccccacccagcctatgccaccttctgccggcccaaggagaactggtggcagtacacccagggcagaagatatgccagcaccccccagaagttctacctgaccccaccccaggtgaacagcatcctgaaggccaatgagtacagcttcaaggtgcctgagtttgatggcaagaatgtgagcagcatcctgggctttgacagcaaccagctgcctgccaatgcccccatcgaggaccggcgctctgctgccacctgcctgcagacccggggcatgctgctgggcgtgtttgatggccatgctggctgtgcctgcagccaggccgtgtctgagcggctcttctactacatcgctgtgtccctgctgccccatgagaccctgctggagattgaaaatgctgtggagagcggccgggccctgctgcccatcctgcagtggcacaagcaccccaatgactacttcagcaaggaggccagcaagctgtacttcaacagcctgcggacctactggcaggagctgattgacctgaacacaggagagagcacagacattgatgtgaaggaggccctgatcaatgccttcaagaggctggacaatgacatcagcctggaggcccaggtgggggaccccaacagcttcctgaactacctggtgctgcgggtggccttcagcggggccacagcctgtgtggcccacgtggatggagtggacctgcacgtggccaacacaggagacagccgggccatgctgggcgtgcaggaggaggatggctcctggagcgctgtgaccctgagcaatgaccacaatgcccagaatgaaagagagctggagcggctgaagctggagcaccccaagtctgaggccaagtctgtggtgaagcaggaccggctgctgggcctgctgatgcccttccgggcctttggagatgtgaagttcaagtggagcattgacctgcagaagagggtgattgaaagtggccctgaccagctgaatgacaatgagtacaccaagttcatcccccccaactaccacaccccaccctacctgacagctgagcctgaggtgacctaccaccggctgcggccccaggacaagttcctggtgctggccacagatggcctgtgggagaccatgcaccggcaggatgtggtgcgcatcgtgggggagtacctgaccggcatgcaccaccagcagcccatcgctgtgggcggctacaaggtgaccctgggccagatgcacggcctgctgacagaaagaaggaccaagatgagctctgtgtttgaggaccagaatgctgccacccacctgatcagacatgctgtgggcaacaatgaatttggcaccgtggaccacgagcggctgagcaagatgctgagcctgcctgaggagctggccaggatgtacagagatgacatcaccatcatcgtggtgcagttcaacagccacgtggtgggcgcctaccagaaccaggagtag

SEQ ID NO: 308266 - DNA, 231 bp, Artificial Sequence
  derived and/or modified sequence
atgcctgcccccacccagctgttcttccccctcatccggaactgtgagctgagccgcatctatggaacagcctgctactgccaccacaagcacctgtgctgcagcagcagctacatcccccagagccggctgcgctacaccccccacccagcctatgccaccttctgccggcccaaggagaactggtggcagtacacccagggcagaagatatgccagcaccccccagtag

SEQ ID NO: 308267 - DNA, 387 bp, Artificial Sequence
  derived and/or modified sequence
atgcctgcccccacccagctgttcttccccctcatccggaactgtgagctgagccgcatctatggaacagcctgctactgccaccacaagcacctgtgctgcagcagcagctacatcccccagagccggctgcgctacaccccccacccagcctatgccaccttctgccggcccaaggagaactggtggcagtacacccagggcagaagatatgccagcaccccccagaagttctacctgaccccaccccaggtgaacagcatcctgaaggccaatgagtacagcttcaaggtgcctgagtttgatggcaagaatgtgagcagcatcctgggctttgacagcaaccagctgcctgccaatgcccccatcgaggaccggcgctcctag

SEQ ID NO: 308268 - DNA, 699 bp, Artificial Sequence
  derived and/or modified sequence
atgcctgcccccacccagctgttcttccccctcatccggaactgtgagctgagccgcatctatggaacagcctgctactgccaccacaagcacctgtgctgcagcagcagctacatcccccagagccggctgcgctacaccccccacccagcctatgccaccttctgccggcccaaggagaactggtggcagtacacccagggcagaagatatgccagcaccccccagaagttctacctgaccccaccccaggtgaacagcatcctgaaggccaatgagtacagcttcaaggtgcctgagtttgatggcaagaatgtgagcagcatcctgggctttgacagcaaccagctgcctgccaatgcccccatcgaggaccggcgctctgctgccacctgcctgcagacccggggcatgctgctgggcgtgtttgatggccatgctggctgtgcctgcagccaggccgtgtctgagcggctcttctactacatcgctgtgtccctgctgccccatgagaccctgctggagattgaaaatgctgtggagagcggccgggccctgctgcccatcctgcagtggcacaagcaccccaatgactacttcagcaaggaggccagcaagctgtacttcaacagcctgcggacctactggcaggagctgattgacctgaacacaggagagagcacagacattgatgtgtag

SEQ ID NO: 308269 - DNA, 219 bp, Artificial Sequence
  derived and/or modified sequence
atgcctgcccccacccagctgttcttccccctcatccggaactgtgagctgagccgcatctatggaacagcctgctactgccaccacaagcacctgtgctgcagcagcagctacatcccccagagccggctgcgctacaccccccacccagcctatgccaccttctgccggcccaaggagaactggtggcagtacacccagggcagaagatatgcctag

SEQ ID NO: 308270 - DNA, 444 bp, Artificial Sequence
  derived and/or modified sequence
atgcctgcccccacccagctgttcttccccctcatccggaactgtgagctgagccgcatctatggaacagcctgctactgccaccacaagcacctgtgctgcagcagcagctacatcccccagagccggctgcgctacaccccccacccagcctatgccaccttctgccggcccaaggagaactggtggcagtacacccagggcagaagatatgccagcaccccccagaagttctacctgaccccaccccaggtgaacagcatcctgaaggccaatgagtacagcttcaaggtgcctgagtttgatggcaagaatgtgagcagcatcctgggctttgacagcaaccagctgcctgccaatgcccccatcgaggaccggcgctctgctgccacctgcctgcagacccggggcatgctgctgggcgtgtttgatggccacgcctag

SEQ ID NO: 308271 - DNA, 1614 bp, Artificial Sequence
  derived and/or modified sequence
atgcccgcccccacccagctgttcttccccctgatccggaactgcgaactctctagaatctatggcaccgcctgctactgccatcacaagcacctctgctgttccagctcctacatccctcaatcgcgcctgaggtacaccccacatcccgcttacgctactttttgtcgcccaaaggagaactggtggcagtatacacaggggagacgttacgcttcgactcctcagaaattttatttgaccccacctcaggtaaacagtatcttgaaagcaaatgagtattccttcaaggtgcccgagttcgatggcaagaatgttagcagtattctgggtttcgattccaaccagctgcctgctaacgcccctatagaggatagacggagcgcagcaacttgtctgcagacaaggggcatgctgctaggggtatttgatgggcacgctgggtgcgcgtgttcacaggccgtgagtgaacggctgttctactatatcgccgtgagcctgctgcctcacgagacactcctggagatcgagaacgccgttgaatccggccgcgccctgctcccgatcctacaatggcacaagcaccccaacgactacttctccaaagaggccagtaaactgtactttaatagcttacgtacctactggcaggagctgatcgaccttaataccggcgagtcaacagacatagacgtcaaggaggctctgatcaacgcgtttaaaagactagataacgatatcagtcttgaggctcaggtgggcgatccgaactcgtttctcaattatctagtcttaagggtggccttttcaggagccacagcctgtgttgcacacgtggatggcgtagatcttcacgtcgctaacaccggggactcacgcgccatgctgggggtgcaggaagaggacggcagctggagcgctgtgaccctgtccaatgaccataatgcacaaaacgaacgcgagctggagcgactcaagctggagcatccaaagagcgaggctaaatctgtggtgaagcaggatcggctgctcggcctgctgatgccattccgcgcattcggggacgtcaaattcaagtggagtattgatctccagaagagagtgatcgagagtggccctgaccaactaaacgacaacgaatataccaagtttatcccccccaactatcacacgcccccgtatttgacagcggagcccgaggttacttatcaccggctacgcccacaggacaaatttctcgttttagccactgacggcttatgggagaccatgcaccggcaggacgtcgtaaggattgttggcgagtacttaactggaatgcaccatcaacagcccatcgccgtgggtggctacaaggtgactctagggcaaatgcacggactgctgacagagagaaggactaagatgagcagcgtattcgaagatcagaatgctgcaacacatttgatcaggcatgccgttgggaacaatgagttcggaaccgtggaccacgagagactttccaagatgttaagccttcctgaggaactggcccggatgtaccgagacgatattacaattattgtggtccagtttaacagtcatgtggtaggtgcctaccaaaatcaggaatag

SEQ ID NO: 308272 - DNA, 1614 bp, Artificial Sequence
  derived and/or modified sequence
atgcccgcccccacccagctgttcttccccctgatccggaactgcgagctttctcgcatttatggcacggcttgttactgccaccataagcatctgtgctgttctagtagttatatcccccagtcaaggctgcgctataccccacacccagcatacgccacattttgcaggccaaaggaaaactggtggcagtacacccagggcagacggtacgcaagtacaccccaaaagttttatcttacacctccacaggtgaatagtattctaaaggcaaatgaatattccttcaaggtgccagaatttgacggaaaaaacgtgtcttcaatcctaggcttcgattcaaatcaactaccagctaatgcgcccatcgaagataggcggagtgccgccacctgcctgcaaaccaggggaatgcttcttggtgtgttcgacgggcatgcaggatgcgcttgttcccaggccgtttctgaaaggcttttttactacattgcggtttcactgctgccacatgagaccttgctggagatcgagaacgctgtggaatctggccgtgcattgctgcccatcctgcagtggcacaaacatcccaacgattatttcagtaaggaagcttcaaaactgtactttaattctctcagaacgtattggcaggagctgatagacctgaatactggagagtctactgacatagacgtaaaggaggctttaattaacgcctttaaaaggttagacaacgacatttcgcttgaggcccaggtgggggatccaaatagcttcctcaattatctggtccttcgagtggcattctcgggagctacggcctgcgtggctcacgtggacggcgtcgatcttcacgtggccaacacgggagactcaagggctatgttgggggtgcaagaggaagatggatcttggagtgccgtaacacttagtaacgatcacaacgctcagaatgagagggaactagaacgattaaagctggaacatcccaagtccgaagctaagagtgtggtcaagcaggaccggctgctgggcttactgatgccattccgggccttcggagatgtgaagttcaaatggagcattgatctccagaagagggtaatcgagagtggacccgaccaattaaacgacaacgaatacactaaatttattcctcctaactaccatactcccccttatctgaccgccgaaccagaggttacataccacagacttcggccccaggataagttcctggtgctggctaccgacgggctttgggagacaatgcacagacaggatgtggtgagaatcgtgggagagtatctcactggtatgcaccatcagcaacctatcgccgtggggggctataaagttaccctggggcagatgcacggccttctcactgaaaggagaactaaaatgtcttctgtgttcgaagaccagaatgccgccacacacctgatcagacatgcggtggggaataatgagttcggcactgtcgaccacgaacgcttgtctaaaatgctgtcactccccgaggaacttgcacggatgtacagggatgacatcaccatcatagtcgtgcagttcaatagtcatgtggtcggcgcttatcaaaatcaggaatag

SEQ ID NO: 308273 - DNA, 231 bp, Artificial Sequence
  derived and/or modified sequence
atgcccgcccccacccagctgttcttccccctgatccggaactgcgaactttctagaatttacggtactgcctgctactgtcaccataaacacctgtgttgctcaagttcttacattccccagagcaggctgcgatacactccccatccggcctacgccaccttctgtcggcctaaagagaattggtggcagtacacacagggacggcggtatgcctcaaccccccaatag

SEQ ID NO: 308274 - DNA, 387 bp, Artificial Sequence
  derived and/or modified sequence
atgcccgcccccacccagctgttcttccccctgatccggaactgcgagctctcacgaatatatgggaccgcgtgttattgtcaccacaaacacctgtgttgttctagttcatatattcctcagagccgtctgcggtacacccctcacccggcttatgctactttttgccgacctaaagagaattggtggcagtacacacaaggaaggcgatacgcgagcaccccacaaaagttctatctgacaccacctcaggtcaactccatcctgaaggcaaatgagtattcatttaaagttccagaattcgatggtaagaacgtatcatcgatactgggtttcgacagtaaccagcttcctgccaacgcccccattgaagatagacgttcctag

SEQ ID NO: 308275 - DNA, 699 bp, Artificial Sequence
  derived and/or modified sequence
atgcccgcccccacccagctgttcttccccctgatccggaactgcgaactctcacgtatctatgggaccgcatgctactgtcatcacaagcacctgtgttgtagtagcagctacattcctcagagtcggctgagatacacacctcacccagcctacgccacattctgtaggccaaaagaaaactggtggcagtacactcagggacggcgatatgcaagtactccccagaaattctacctgaccccccctcaagttaactctatcctgaaagccaacgaatacagctttaaagtgcccgagttcgatggcaaaaatgtctctagcatactgggcttcgatagcaaccagctgcctgctaatgcgcccatcgaagaccggcgcagtgccgccacgtgtctgcagacacgcgggatgctcttgggagttttcgacggtcacgctggttgcgcttgctcacaagctgtgagcgaacgacttttctattatatagccgtgtcactcctcccacatgaaacactgctcgaaatcgagaatgcagtggagagtggacgcgctcttcttccaatcctgcagtggcacaaacacccaaacgactactttagtaaggaggcttctaagttgtattttaacagcttgaggacgtactggcaggaattgatcgacttgaataccggcgagagtactgatattgacgtttag

SEQ ID NO: 308276 - DNA, 219 bp, Artificial Sequence
  derived and/or modified sequence
atgcccgcccccacccagctgttcttccccctgatccggaactgcgaactgtcccggatttacgggacagcatgctattgtcatcataagcatttgtgctgcagctcttcatatataccccaaagccggctgaggtacacacctcacccggcctatgccaccttctgccgcccgaaggaaaactggtggcagtacactcagggacgcaggtacgcatag

SEQ ID NO: 308277 - DNA, 1614 bp, Artificial Sequence
  derived and/or modified sequence
atgcccgcccccacccagctgttcttccccctgatccggaactgcgagctgagccgcatatacggaacagcgtgctactgtcatcacaaacacctgtgttgtagctcctcctacattccacaatcaaggctccgatacactccccaccctgcatatgcaaccttctgtcggccaaaggagaactggtggcagtacactcagggcaggagatacgccagcacacctcaaaagttctacctgacgccaccccaagtgaactccatactgaaggccaatgagtacagcttcaaagttcccgaatttgatgggaaaaatgtttcgtctattctgggttttgactccaaccagctgccagcaaatgctccaattgaagatcgccggagtgctgccacctgtcttcagacccgcgggatgttactcggcgtgtttgacggtcacgccggctgcgcctgttcccaagcagtctcagaacggcttttctactatattgctgtcagcctacttccacacgagacacttttggagattgagaacgccgtcgagtccggacgggcactcctgccaattctgcagtggcacaaacaccctaatgattacttcagcaaggaagcctcgaagctgtactttaattctctccgaacctattggcaggagctgattgacctcaacactggggagtccaccgacattgatgtgaaagaggctctcatcaacgcattcaagcgtttagacaacgacatctccttagaggcacaggttggcgatcctaactcctttctcaattatttagtgctgcgagttgcattcagcggtgcaaccgcctgcgtggcccatgtggacggggtcgatctacacgtagcaaacactggcgacagcagggcaatgttaggagtgcaagaagaggatggcagctggagcgccgtcacactttccaatgaccataatgcccaaaatgaaagagagctggaacgcctgaaactggagcatccaaagtctgaggcaaaaagcgtcgtgaagcaggataggctgctggggttactaatgcctttcagggcctttggggacgtcaagtttaagtggtcaatcgatctgcagaaacgagttattgaaagcggtccggaccagctgaacgacaatgagtacaccaagttcatacccccgaattatcatacacctccctacttgaccgcggaacctgaggtaacgtaccaccgccttcgtcctcaggataagtttctggtgctcgccaccgacggtctgtgggagaccatgcacagacaggatgtggtccggattgtgggggaatatctgactggtatgcaccatcagcagccaattgcagtgggtggatataaagtgactctgggccagatgcatgggctgttgaccgaacgcagaactaaaatgagcagtgtgtttgaggatcaaaatgccgcaactcacctcataaggcacgccgttggaaataacgagtttggcaccgtcgaccatgagaggctgagtaaaatgctgtctcttccagaagaattagcaagaatgtacagagacgacattaccattatcgtagtacagtttaattcccacgttgtcggggcataccagaaccaagagtag

SEQ ID NO: 308278 - DNA, 444 bp, Artificial Sequence
  derived and/or modified sequence
atgcccgcccccacccagctgttcttccccctgatccggaactgcgagctgtcaaggatttatggcactgcctgctattgccaccataagcatctgtgttgctctagctcctatatcccccagtccagactgaggtataccccccatcctgcatatgcaacattttgtcgccccaaagagaactggtggcaatacacgcaggggcgtaggtatgcatcgactccacagaagttctacttgaccccgccccaagtgaattctattttgaaagccaacgagtattcatttaaagttccagaatttgacggaaagaacgtgtctagcatcctgggatttgatagtaaccagctgcccgccaatgcccctatcgaggatcggagatctgccgctacatgtctacagactaggggcatgctgttgggcgtctttgatggccacgcctag

SEQ ID NO: 308279 - DNA, 1614 bp, Artificial Sequence
  derived and/or modified sequence
atgccagcccctacacaactgtttttcccattgattcggaattgcgagctctccaggatttacggcacagcctgctactgccaccacaagcatctctgttgctcctcctcttatatcccgcagtctcggttgaggtacaccccccaccccgcttacgcaactttctgcagaccaaaggaaaattggtggcagtacactcagggcagaagatacgcttccactccccagaaattctatctgactcccccacaggtcaattctatattgaaagccaacgagtatagcttcaaagtgccagagtttgatgggaagaatgtctcatctatcctgggatttgacagtaaccagcttccagccaacgccccaatcgaagacaggcgctccgcagcaacttgcctccagacccgcggtatgctgttaggcgtgttcgacggccacgctggatgcgcgtgttctcaagctgtgagcgagcgcctcttttactacatcgctgtgtcactccttccccacgagacactgctagagatagagaatgccgtcgagtcaggacgagccctcctacctatcttacagtggcacaaacaccctaacgattatttcagtaaggaggccagcaagctgtactttaatagcctccgaacctactggcaggagttgatcgacctgaacactggagagtcaactgatatagatgtcaaagaggccttgatcaacgcgttcaaaaggttggacaacgacatctctctggaggctcaagtgggcgatccaaacagttttttaaactacctggtcttgagagttgccttctcaggggctaccgcttgtgtggcacacgttgatggcgttgatctccacgtggcaaatacaggcgattcccgggcaatgcttggggtgcaggaggaggacggctcctggagtgccgtgacactttctaacgatcataacgcccagaacgagcgggagctcgagaggttaaagcttgaacaccccaagtcagaggccaagagcgtggtgaagcaggataggttacttggtctgttgatgccctttagggcattcggcgatgttaagttcaaatggagtatagacctgcaaaagcgagtgatcgagagcggcccagaccagcttaacgacaatgaatacaccaaattcatcccgccaaactaccacacccccccatatctgacggctgagccagaagttacgtatcatcggctgcgcccacaagataaatttctggtattggccaccgatgggctgtgggaaaccatgcatcgccaagatgttgtacggatcgtaggggagtacctcactggcatgcaccatcaacagcctatcgcggtgggcggatataaagtgacgctgggtcagatgcatgggcttctaaccgaaagaaggaccaagatgagttcagtttttgaggatcaaaatgcagccacccatctaatcagacacgcggtggggaacaacgagttcggcaccgtcgatcacgagcggctgagcaagatgctctctctgcctgaggaactcgcccgaatgtaccgagacgacattacgatcatcgtagtccaatttaacagccacgtggtcggagcatatcaaaatcaggaatag

SEQ ID NO: 308280 - DNA, 1614 bp, Artificial Sequence
  derived and/or modified sequence
atgccagctcctactcagcttttctttccactgattagaaactgtgaactgtctcggatctacggcacagcctgctattgccaccacaagcatttgtgttgttcgagttcctacattccacagtcgcgattacgatataccccacatcccgcttacgccacattctgccgaccaaaggaaaactggtggcagtatacgcaaggtcggagatacgcatcaacccctcaaaaattttatctcacccctccacaggtgaattccatcctgaaagcaaacgagtattctttcaaggtcccggagtttgatgggaagaatgtgagctccattttggggttcgatagtaaccagctcccggctaacgctcccatcgaagacagacgctctgccgctacctgcttgcagacaagaggaatgttactgggtgtttttgatgggcatgcaggatgcgcctgttcccaggcggtcagcgaaagactgttttactacatcgcggtgtcgctgttgccgcacgagaccctcctggaaatcgagaatgcagtggagtcaggtagggctttgctgccaatcctgcagtggcataagcaccctaacgattacttctcaaaagaggccagcaaactgtacttcaacagcctgagaacatactggcaggagctcattgatcttaatactggcgagtccaccgatatcgatgtgaaggaggcgcttataaacgcttttaagcgcttggataatgacatctcattagaagctcaggtgggggaccctaattctttcctgaactacctggtgctgagggtagcgttttccggagcaaccgcttgtgtggcacatgtggatggggtggacctccacgtggctaatacaggtgactccagagcaatgctcggcgtgcaggaggaggatggctcctggagtgctgttaccctttctaacgaccataatgcacagaatgagagagaactggagcgtctgaagctggagcatcccaaatcagaagccaaatcagtcgtcaaacaggaccggctcctcggcctgctaatgccctttcgggctttcggcgatgtaaagttcaaatggagcatagatttgcagaaacgggttattgaatccgggcctgaccaactgaacgataacgagtacacaaaatttatcccacccaactatcataccccaccttacctcacggccgagcctgaagtaacttaccacagactgaggccgcaggataaatttctcgtgcttgccacagacggactttgggaaactatgcacagacaggatgttgtgagaatcgtgggggagtacttaaccggtatgcatcaccagcagcccattgcagtgggcggttataaagttactctgggccagatgcacggactgctgaccgaacggaggaccaaaatgagcagcgtcttcgaggaccagaatgcggctactcacctgattcgccatgcagtcgggaataacgagttcggaacagtggatcatgagagactgagcaagatgctctcacttcctgaggaactggcccgtatgtaccgcgatgatataactataatcgtggttcagtttaactctcatgtggtgggggcataccagaatcaggagtag

SEQ ID NO: 308281 - DNA, 231 bp, Artificial Sequence
  derived and/or modified sequence
atgcctgcccctactcagctgttttttcctctgataaggaattgtgaactttcacgaatctatggcacggcctgttactgccaccacaaacatctgtgttgctccagctcctacatacctcaatcaagactgcggtacacgccacacccagcctatgctacattctgtagaccaaaagagaattggtggcagtatactcagggcaggagatacgcaagcaccccacagtag

SEQ ID NO: 308282 - DNA, 387 bp, Artificial Sequence
  derived and/or modified sequence
atgcctgctcctacccagcttttctttccattgatcagaaactgtgaactatcgaggatttatggtactgcgtgctattgtcaccacaaacacctgtgctgctctagctcgtatataccacagtcaaggctgaggtacacccctcatcccgcatatgccactttttgccggcctaaagagaactggtggcagtatactcaaggacgcagatacgcttctactcctcagaaattttacctgaccccacctcaggtaaattcgattctcaaagctaatgaatatagcttcaaggtgccagaattcgatggcaaaaacgtgagtagcatccttgggttcgattccaaccaactgccagccaacgcccctatcgaagaccgaaggagctag

SEQ ID NO: 308283 - DNA, 699 bp, Artificial Sequence
  derived and/or modified sequence
atgccagctcctactcagctgttttttccactgattcgcaactgcgagctgtccaggatctacggaaccgcctgctactgccaccacaaacatctgtgttgttcttccagctacatccctcagtctagactgagatacaccccccaccccgcatacgccaccttttgtcgtccaaaggagaactggtggcaatacacacagggacggcgatacgcaagcaccccccaaaaattctacctgacaccacctcaggtcaactccatcttgaaggctaacgaatactcgtttaaggtcccggaattcgatgggaagaatgtgagctctatcctaggcttcgacagtaaccagctgcccgcaaatgcgccaatagaagaccgtcgatcagcagccacctgtctgcaaacccggggtatgcttcttggtgtgttcgatgggcacgcgggatgcgcctgttctcaggccgtatccgaacgtctattttactatatcgcagtctccttattaccccacgaaaccttattggagatagaaaacgccgtcgagtcaggtcgagccttactgcccattctccagtggcacaaacatcctaatgattacttctcaaaggaggcaagcaagctgtatttcaacagtctcagaacatactggcaggaacttattgacctgaacactggagaatccacagacatcgacgtgtag

SEQ ID NO: 308284 - DNA, 219 bp, Artificial Sequence
  derived and/or modified sequence
atgcctgccccaacccagctcttcttcccactgattagaaactgtgaactgtccaggatctacggcaccgcctgttattgccaccataaacacctctgctgctcctcctcgtatatcccgcagtctaggctgcggtacactccccatcccgcatatgccacgttctgcagaccaaaagagaactggtggcagtatacgcaggggcgtcgatacgcatag

SEQ ID NO: 308285 - DNA, 1614 bp, Artificial Sequence
  derived and/or modified sequence
atgccagcccctactcagcttttcttccctcttatccgcaattgtgaactgtccaggatatatggaacggcttgctactgtcaccataaacacctgtgctgttcctcctcatacatcccgcagagcaggctcagatacactccacatccggcatatgcaacattctgccgacctaaggagaactggtggcagtacacacagggcagaagatatgcgagtaccccacagaagttttatcttacaccccctcaggtgaactcaatattaaaggcaaacgaatactcattcaaggtgcctgagtttgacggcaagaatgtgtccagtatactaggtttcgattcgaaccagctgccagcaaacgcaccaattgaggaccggcgtagcgccgctacatgtttgcagacaaggggaatgctgctcggagtgttcgacgggcacgccggatgtgcttgcagccaggcagtctccgagcggctgttctattacatagcagtgtccttacttcctcacgaaacactcctagaaattgaaaatgccgtcgaatccggacgggcactcctccccattctgcagtggcacaagcatcccaacgattatttttctaaggaagccagcaagctatacttcaattccctacgaacgtactggcaggaattgattgacctgaatactggggaaagcacagatatcgacgtgaaagaggccctcataaatgcctttaagagacttgataacgacatttctttagaagctcaggtcggagatcctaattcattcctgaattatcttgtgctgagagttgccttttccggagcaaccgcttgtgtcgctcacgtggatggggtggacttgcacgtcgccaacacaggagatagccgggcaatgctgggagtccaagaggaagacgggtcatggtccgcagtgactctctcaaatgaccacaacgctcaaaacgagcgggaactggaaagactaaagctcgagcatccgaaaagtgaggcgaagtccgtagtcaagcaagatcgtcttctcggtttattaatgcccttcagagcgtttggcgatgtcaaattcaaatggagcatcgacctacaaaaacgtgtgatcgagagtggccctgatcagcttaacgataatgaatataccaagtttatcccccctaattatcatacaccgccttatttaaccgccgagccagaggtgacctaccaccgactgagaccccaagacaagttcctcgttctggcaactgatggcctgtgggagacaatgcaccgacaggacgtggtgagaatagtgggggagtacctgacgggtatgcatcaccagcagcccattgcagtcgggggttacaaagttaccctcggccagatgcacggcttgcttacggagcggcgaactaaaatgtcctctgtctttgaggatcagaatgccgctacgcaccttattaggcatgcagttggtaataatgagttcggaacggttgatcatgaaaggctttccaagatgctgtctctgccggaagaactggctcggatgtaccgggatgacataacaatcatcgtcgtgcaattcaactcacatgtggtcggcgcatatcagaatcaagaatag

SEQ ID NO: 308286 - DNA, 444 bp, Artificial Sequence
  derived and/or modified sequence
atgccagccccaacacagctgttttttcccctgattcgaaactgtgagctgagtcggatctatgggacagcctgttactgccaccataaacacctgtgctgcagctcaagctacattccgcagagtcgccttagatacaccccccaccctgcttacgctacattttgcaggcctaaggagaactggtggcagtacacacagggcaggcggtatgcctcaactccacagaagttctacctcacccccccacaggtgaacagcatactgaaggccaatgaatacagcttcaaggtccccgaatttgatggcaagaacgtctcctcaattctgggctttgactctaatcagttaccggctaatgctcccatcgaagaccgacgctccgcagccacctgtttgcaaactaggggtatgctcctgggcgtctttgacggtcacgcgtag

SEQ ID NO: 308287 - DNA, 1614 bp, Artificial Sequence
  derived and/or modified sequence
atgcccgcccccacccagctgttcttccccctgatcagaaactgcgagctgagcagaatctacggcaccgcctgctactgccaccacaagcacctgtgctgcagcagcagctacatcccccagagcagactgagatacaccccccaccccgcctacgccaccttctgcagacccaaggagaactggtggcagtacacccagggcagaagatacgccagcaccccccagaagttctacctgacccccccccaggtgaacagcatcctgaaggccaacgagtacagcttcaaggtgcccgagttcgacggcaagaacgtgagcagcatcctgggcttcgacagcaaccagctgcccgccaacgcccccatcgaggacagaagaagcgccgccacctgcctgcagaccagaggcatgctgctgggcgtgttcgacggccacgccggctgcgcctgcagccaggccgtgagcgagagactgttctactacatcgccgtgagcctgctgccccacgagaccctgctggagatcgagaacgccgtggagagcggcagagccctgctgcccatcctgcagtggcacaagcaccccaacgactacttcagcaaggaggccagcaagctgtacttcaacagcctgagaacctactggcaggagctgatcgacctgaacaccggcgagagcaccgacatcgacgtgaaggaggccctgatcaacgccttcaagagactggacaacgacatcagcctggaggcccaggtgggcgaccccaacagcttcctgaactacctggtgctgagagtggccttcagcggcgccaccgcctgcgtggcccacgtggacggcgtggacctgcacgtggccaacaccggcgacagcagagccatgctgggcgtgcaggaggaggacggcagctggagcgccgtgaccctgagcaacgaccacaacgcccagaacgagagagagctggagagactgaagctggagcaccccaagagcgaggccaagagcgtggtgaagcaggacagactgctgggcctgctgatgcccttcagagccttcggcgacgtgaagttcaagtggagcatcgacctgcagaagagagtgatcgagagcggccccgaccagctgaacgacaacgagtacaccaagttcatcccccccaactaccacacccccccctacctgaccgccgagcccgaggtgacctaccacagactgagaccccaggacaagttcctggtgctggccaccgacggcctgtgggagaccatgcacagacaggacgtggtgagaatcgtgggcgagtacctgaccggcatgcaccaccagcagcccatcgccgtgggcggctacaaggtgaccctgggccagatgcacggcctgctgaccgagagaagaaccaagatgagcagcgtgttcgaggaccagaacgccgccacccacctgatcagacacgccgtgggcaacaacgagttcggcaccgtggaccacgagagactgagcaagatgctgagcctgcccgaggagctggccagaatgtacagagacgacatcaccatcatcgtggtgcagttcaacagccacgtggtgggcgcctaccagaaccaggagtag

SEQ ID NO: 308288 - DNA, 231 bp, Artificial Sequence
  derived and/or modified sequence
atgcccgcccccacccagctgttcttccccctgatcagaaactgcgagctgagcagaatctacggcaccgcctgctactgccaccacaagcacctgtgctgcagcagcagctacatcccccagagcagactgagatacaccccccaccccgcctacgccaccttctgcagacccaaggagaactggtggcagtacacccagggcagaagatacgccagcaccccccagtag

SEQ ID NO: 308289 - DNA, 387 bp, Artificial Sequence
  derived and/or modified sequence
atgcccgcccccacccagctgttcttccccctgatcagaaactgcgagctgagcagaatctacggcaccgcctgctactgccaccacaagcacctgtgctgcagcagcagctacatcccccagagcagactgagatacaccccccaccccgcctacgccaccttctgcagacccaaggagaactggtggcagtacacccagggcagaagatacgccagcaccccccagaagttctacctgacccccccccaggtgaacagcatcctgaaggccaacgagtacagcttcaaggtgcccgagttcgacggcaagaacgtgagcagcatcctgggcttcgacagcaaccagctgcccgccaacgcccccatcgaggacagaagaagctag

SEQ ID NO: 308290 - DNA, 699 bp, Artificial Sequence
  derived and/or modified sequence
atgcccgcccccacccagctgttcttccccctgatcagaaactgcgagctgagcagaatctacggcaccgcctgctactgccaccacaagcacctgtgctgcagcagcagctacatcccccagagcagactgagatacaccccccaccccgcctacgccaccttctgcagacccaaggagaactggtggcagtacacccagggcagaagatacgccagcaccccccagaagttctacctgacccccccccaggtgaacagcatcctgaaggccaacgagtacagcttcaaggtgcccgagttcgacggcaagaacgtgagcagcatcctgggcttcgacagcaaccagctgcccgccaacgcccccatcgaggacagaagaagcgccgccacctgcctgcagaccagaggcatgctgctgggcgtgttcgacggccacgccggctgcgcctgcagccaggccgtgagcgagagactgttctactacatcgccgtgagcctgctgccccacgagaccctgctggagatcgagaacgccgtggagagcggcagagccctgctgcccatcctgcagtggcacaagcaccccaacgactacttcagcaaggaggccagcaagctgtacttcaacagcctgagaacctactggcaggagctgatcgacctgaacaccggcgagagcaccgacatcgacgtgtag

SEQ ID NO: 308291 - DNA, 219 bp, Artificial Sequence
  derived and/or modified sequence
atgcccgcccccacccagctgttcttccccctgatcagaaactgcgagctgagcagaatctacggcaccgcctgctactgccaccacaagcacctgtgctgcagcagcagctacatcccccagagcagactgagatacaccccccaccccgcctacgccaccttctgcagacccaaggagaactggtggcagtacacccagggcagaagatacgcctag

SEQ ID NO: 308292 - DNA, 444 bp, Artificial Sequence
  derived and/or modified sequence
atgcccgcccccacccagctgttcttccccctgatcagaaactgcgagctgagcagaatctacggcaccgcctgctactgccaccacaagcacctgtgctgcagcagcagctacatcccccagagcagactgagatacaccccccaccccgcctacgccaccttctgcagacccaaggagaactggtggcagtacacccagggcagaagatacgccagcaccccccagaagttctacctgacccccccccaggtgaacagcatcctgaaggccaacgagtacagcttcaaggtgcccgagttcgacggcaagaacgtgagcagcatcctgggcttcgacagcaaccagctgcccgccaacgcccccatcgaggacagaagaagcgccgccacctgcctgcagaccagaggcatgctgctgggcgtgttcgacggccacgcctag

SEQ ID NO: 308293 - DNA, 198 bp, Artificial Sequence
  derived and/or modified sequence
atggccgccgcctacctggaccccaacctgaaccacacccccaacagcagcaccaagacccacctgggcaccggcatggagagaagccccggcgccatggagagagtgctgaaggtgttccactacttcgagagcaacagcgagcccaccacctgggccagcatcatcagacacggcgacgccaccgacgtgagatag

SEQ ID NO: 308294 - DNA, 156 bp, Artificial Sequence
  derived and/or modified sequence
atggccgccgcctacctggaccccaacctgaaccacacccccaacagcagcaccaagacccacctgggcaccggcatggagagaagccccggcgccatggagagagtgctgaaggtgttccactacttcgagagcaacagcgagcccaccacctag

SEQ ID NO: 308295 - DNA, 198 bp, Artificial Sequence
  derived and/or modified sequence
atggccgccgcctaccttgaccccaacctgaatcatacgcctaattcctctactaagactcacctggggaccggcatggagcgatccccaggcgcaatggaaagagtgctgaaggtgttccactacttcgagtctaacagtgaaccaacaacctgggctagcattatccgtcacggggacgctaccgatgtgagatag

SEQ ID NO: 308296 - DNA, 156 bp, Artificial Sequence
  derived and/or modified sequence
atggccgctgcctatctggatccaaatctaaaccacacaccaaactccagcacaaaaacccaccttggcactggtatggagcggagtccgggcgctatggagagagttctgaaggtcttccactacttcgaaagcaactctgagccaactacatag

SEQ ID NO: 308297 - DNA, 198 bp, Artificial Sequence
  derived and/or modified sequence
atggctgctgcctacctggaccccaacctgaaccacacccccaacagcagcaccaagacccacctgggcaccggcatggagaggagccctggggccatggagcgggtgctgaaggtgttccactactttgagagcaacagcgagcccaccacctgggccagcatcatcagacatggagatgccacagatgtgaggtag

SEQ ID NO: 308298 - DNA, 156 bp, Artificial Sequence
  derived and/or modified sequence
atggctgctgcctacctggaccccaacctgaaccacacccccaacagcagcaccaagacccacctgggcaccggcatggagaggagccctggggccatggagcgggtgctgaaggtgttccactactttgagagcaacagcgagcccaccacctag

SEQ ID NO: 308299 - DNA, 198 bp, Artificial Sequence
  derived and/or modified sequence
atggccgccgcctacctggaccccaacctgaaccacacccccaactcgtccaccaagacccacctaggaacaggtatggaacgtagcccaggagctatggagcgcgtcctaaaagtctttcattacttcgaaagcaacagcgagcctactacctgggcgtcaatcattcgccacggtgacgctacagatgttcggtag

SEQ ID NO: 308300 - DNA, 156 bp, Artificial Sequence
  derived and/or modified sequence
atggccgccgcctacctggaccccaacctgaaccacacccccaactctagcactaagactcacctgggaactgggatggaacgctcacctggggccatggagcgggtactgaaagtgtttcactacttcgagtcaaactccgagccaaccacctag

SEQ ID NO: 308301 - DNA, 198 bp, Artificial Sequence
  derived and/or modified sequence
atggccgctgcctatctggaccccaatctcaaccacactcccaactcctctactaagacacacctaggtactggaatggagcgctcccctggcgcaatggagagggttctgaaagtgttccattactttgaaagtaattctgagcctaccacctgggcttccattattcgccacggcgacgccaccgacgtgcgctag

SEQ ID NO: 308302 - DNA, 156 bp, Artificial Sequence
  derived and/or modified sequence
atggcggctgcctatctagatccaaacctaaatcatacgcctaattcatcgactaaaacacatctcggtaccggcatggagcggagccccggtgccatggagagggtcctcaaagtgtttcattatttcgaaagcaactccgagccaaccacatag

SEQ ID NO: 308303 - DNA, 475 bp, Artificial Sequence
  derived and/or modified sequence
gagcccgcgccgccgccgccgccgccggtcccggaccactgtgagcccgcggcgtgaggcgtgggaggaagcgcggctgctgtcgcccagcgccgccccgtcgtcgtctgccttcgcttcacggcgccgagccgcggtccgaatccatggttggttgaatctggatgtggaacccgctgacgtggatggctgactgtattgcagaactggggctcccttgcatcttccagttacaaattcagtgccttctgcagtttccccagagctcctcaagaataacggaagggagaatatgacagatacctagcatctagcaaaataatggcagctgcttaccttgaccccaacttgaatcacacaccaaattcgagtactaagactcacctgggtactggtatggaacgttctcctggtgcaatggagcgagtattaaaggtctttcattattttgaaagcaatagtgagccaaccacct

SEQ ID NO: 308304 - protein, 750 aa, Artificial Sequence
  derived and/or modified sequence
MADLIDGYCRLVNGTSQSFIIRPQKEGERALPSIPKLANSEKQGMRTHAVSVSGVSHCQHKVKKARRFLPLVFCSHDPPSTDEISGDETDDYAEIIDEEDTYTMPSTRDYEIQRERIELGRCIGEGQFGDVHQGIYMSPENPALAVAIKTCKNCTSDSVREKFLQEALTMRQFDHPHIVKLIGVITENPVWIIMELCTLGELRSFLQVRKYSLDLASLILYAYQLSTALAYLESKRFVHRDIAARNVLVSSNDCVKLGDFGLSRYMEDSTYYKASKGKLPIKWMAPESINFRRFTSASDVWMFGVCMWEILMHGVKPFQGVKNNDVIGRIENGERLPMPPNCPPTLYSLMTKCWAYDPSRRPRFTELKAQLSTILEEEKAQQEERMRMESRRQATVSWDSGGSDEAPPKPSRPGYPSPRSSEGFYPSPQHMVQTNHYQVSGYPGSHGITAMAGSIYPGQASLLDQTDSWNHRPQEIAMWQPNVEDSTVLDLRGIGQVLPTHLMEERLIRQQQEMEEDQRWLEKEERFLKPDVRLSRGSIDREDGSLQGPIGNQHIYQPVGKPDPAAPPKKPPRPGAPGHLGSLASLSSPADSYNEGVKPCRLQPQEISPPPTANLDRSNDKVYENVTGLVKAVIEMSSKIQPAPPEEYVPMVKEVGLALRTLLATVDETIPLLPASTHREIEMAQKLLNSDLGELINKMKLAQQYVMTSLQQEYKKQMLTAAHALAVDAKNLLDVIDQARLKMLGQTRPH

SEQ ID NO: 308305 - protein, 753 aa, Artificial Sequence
  derived and/or modified sequence
AENMADLIDGYCRLVNGTSQSFIIRPQKEGERALPSIPKLANSEKQGMRTHAVSVSGVSHCQHKVKKARRFLPLVFCSHDPPSTDEISGDETDDYAEIIDEEDTYTMPSTRDYEIQRERIELGRCIGEGQFGDVHQGIYMSPENPALAVAIKTCKNCTSDSVREKFLQEALTMRQFDHPHIVKLIGVITENPVWIIMELCTLGELRSFLQVRKYSLDLASLILYAYQLSTALAYLESKRFVHRDIAARNVLVSSNDCVKLGDFGLSRYMEDSTYYKASKGKLPIKWMAPESINFRRFTSASDVWMFGVCMWEILMHGVKPFQGVKNNDVIGRIENGERLPMPPNCPPTLYSLMTKCWAYDPSRRPRFTELKAQLSTILEEEKAQQEERMRMESRRQATVSWDSGGSDEAPPKPSRPGYPSPRSSEGFYPSPQHMVQTNHYQVSGYPGSHGITAMAGSIYPGQASLLDQTDSWNHRPQEIAMWQPNVEDSTVLDLRGIGQVLPTHLMEERLIRQQQEMEEDQRWLEKEERFLKPDVRLSRGSIDREDGSLQGPIGNQHIYQPVGKPDPAAPPKKPPRPGAPGHLGSLASLSSPADSYNEGVKPWRLQPQEISPPPTANLDRSNDKVYENVTGLVKAVIEMSSKIQPAPPEEYVPMVKEVGLALRTLLATVDETIPLLPASTHREIEMAQKLLNSDLGELINKMKLAQQYVMTSLQQEYKKQMLTAAHALAVDAKNLLDVIDQARLKMLGQTRPH

SEQ ID NO: 308306 - DNA, 2253 bp, Artificial Sequence
  derived and/or modified sequence
atggccgacctgatcgacggctactgcagactggtgaacggcaccagccagagcttcatcatcagaccccagaaggagggcgagagagccctgcccagcatccccaagctggccaacagcgagaagcagggcatgagaacccacgccgtgagcgtgagcggcgtgagccactgccagcacaaggtgaagaaggccagaagattcctgcccctggtgttctgcagccacgacccccccagcaccgacgagatcagcggcgacgagaccgacgactacgccgagatcatcgacgaggaggacacctacaccatgcccagcaccagagactacgagatccagagagagagaatcgagctgggcagatgcatcggcgagggccagttcggcgacgtgcaccagggcatctacatgagccccgagaaccccgccctggccgtggccatcaagacctgcaagaactgcaccagcgacagcgtgagagagaagttcctgcaggaggccctgaccatgagacagttcgaccacccccacatcgtgaagctgatcggcgtgatcaccgagaaccccgtgtggatcatcatggagctgtgcaccctgggcgagctgagaagcttcctgcaggtgagaaagtacagcctggacctggccagcctgatcctgtacgcctaccagctgagcaccgccctggcctacctggagagcaagagattcgtgcacagagacatcgccgccagaaacgtgctggtgagcagcaacgactgcgtgaagctgggcgacttcggcctgagcagatacatggaggacagcacctactacaaggccagcaagggcaagctgcccatcaagtggatggcccccgagagcatcaacttcagaagattcaccagcgccagcgacgtgtggatgttcggcgtgtgcatgtgggagatcctgatgcacggcgtgaagcccttccagggcgtgaagaacaacgacgtgatcggcagaatcgagaacggcgagagactgcccatgccccccaactgcccccccaccctgtacagcctgatgaccaagtgctgggcctacgaccccagcagaagacccagattcaccgagctgaaggcccagctgagcaccatcctggaggaggagaaggcccagcaggaggagagaatgagaatggagagcagaagacaggccaccgtgagctgggacagcggcggcagcgacgaggccccccccaagcccagcagacccggctaccccagccccagaagcagcgagggcttctaccccagcccccagcacatggtgcagaccaaccactaccaggtgagcggctaccccggcagccacggcatcaccgccatggccggcagcatctaccccggccaggccagcctgctggaccagaccgacagctggaaccacagaccccaggagatcgccatgtggcagcccaacgtggaggacagcaccgtgctggacctgagaggcatcggccaggtgctgcccacccacctgatggaggagagactgatcagacagcagcaggagatggaggaggaccagagatggctggagaaggaggagagattcctgaagcccgacgtgagactgagcagaggcagcatcgacagagaggacggcagcctgcagggccccatcggcaaccagcacatctaccagcccgtgggcaagcccgaccccgccgccccccccaagaagccccccagacccggcgcccccggccacctgggcagcctggccagcctgagcagccccgccgacagctacaacgagggcgtgaagccctgcagactgcagccccaggagatcagccccccccccaccgccaacctggacagaagcaacgacaaggtgtacgagaacgtgaccggcctggtgaaggccgtgatcgagatgagcagcaagatccagcccgccccccccgaggagtacgtgcccatggtgaaggaggtgggcctggccctgagaaccctgctggccaccgtggacgagaccatccccctgctgcccgccagcacccacagagagatcgagatggcccagaagctgctgaacagcgacctgggcgagctgatcaacaagatgaagctggcccagcagtacgtgatgaccagcctgcagcaggagtacaagaagcagatgctgaccgccgcccacgccctggccgtggacgccaagaacctgctggacgtgatcgaccaggccagactgaagatgctgggccagaccagaccccactag

SEQ ID NO: 308307 - DNA, 2262 bp, Artificial Sequence
  derived and/or modified sequence
gccgagaacatggccgacctgatcgacggctactgcagactggtgaacggcaccagccagagcttcatcatcagaccccagaaggagggcgagagagccctgcccagcatccccaagctggccaacagcgagaagcagggcatgagaacccacgccgtgagcgtgagcggcgtgagccactgccagcacaaggtgaagaaggccagaagattcctgcccctggtgttctgcagccacgacccccccagcaccgacgagatcagcggcgacgagaccgacgactacgccgagatcatcgacgaggaggacacctacaccatgcccagcaccagagactacgagatccagagagagagaatcgagctgggcagatgcatcggcgagggccagttcggcgacgtgcaccagggcatctacatgagccccgagaaccccgccctggccgtggccatcaagacctgcaagaactgcaccagcgacagcgtgagagagaagttcctgcaggaggccctgaccatgagacagttcgaccacccccacatcgtgaagctgatcggcgtgatcaccgagaaccccgtgtggatcatcatggagctgtgcaccctgggcgagctgagaagcttcctgcaggtgagaaagtacagcctggacctggccagcctgatcctgtacgcctaccagctgagcaccgccctggcctacctggagagcaagagattcgtgcacagagacatcgccgccagaaacgtgctggtgagcagcaacgactgcgtgaagctgggcgacttcggcctgagcagatacatggaggacagcacctactacaaggccagcaagggcaagctgcccatcaagtggatggcccccgagagcatcaacttcagaagattcaccagcgccagcgacgtgtggatgttcggcgtgtgcatgtgggagatcctgatgcacggcgtgaagcccttccagggcgtgaagaacaacgacgtgatcggcagaatcgagaacggcgagagactgcccatgccccccaactgcccccccaccctgtacagcctgatgaccaagtgctgggcctacgaccccagcagaagacccagattcaccgagctgaaggcccagctgagcaccatcctggaggaggagaaggcccagcaggaggagagaatgagaatggagagcagaagacaggccaccgtgagctgggacagcggcggcagcgacgaggccccccccaagcccagcagacccggctaccccagccccagaagcagcgagggcttctaccccagcccccagcacatggtgcagaccaaccactaccaggtgagcggctaccccggcagccacggcatcaccgccatggccggcagcatctaccccggccaggccagcctgctggaccagaccgacagctggaaccacagaccccaggagatcgccatgtggcagcccaacgtggaggacagcaccgtgctggacctgagaggcatcggccaggtgctgcccacccacctgatggaggagagactgatcagacagcagcaggagatggaggaggaccagagatggctggagaaggaggagagattcctgaagcccgacgtgagactgagcagaggcagcatcgacagagaggacggcagcctgcagggccccatcggcaaccagcacatctaccagcccgtgggcaagcccgaccccgccgccccccccaagaagccccccagacccggcgcccccggccacctgggcagcctggccagcctgagcagccccgccgacagctacaacgagggcgtgaagccctggagactgcagccccaggagatcagccccccccccaccgccaacctggacagaagcaacgacaaggtgtacgagaacgtgaccggcctggtgaaggccgtgatcgagatgagcagcaagatccagcccgccccccccgaggagtacgtgcccatggtgaaggaggtgggcctggccctgagaaccctgctggccaccgtggacgagaccatccccctgctgcccgccagcacccacagagagatcgagatggcccagaagctgctgaacagcgacctgggcgagctgatcaacaagatgaagctggcccagcagtacgtgatgaccagcctgcagcaggagtacaagaagcagatgctgaccgccgcccacgccctggccgtggacgccaagaacctgctggacgtgatcgaccaggccagactgaagatgctgggccagaccagaccccactag

SEQ ID NO: 308308 - DNA, 2253 bp, Artificial Sequence
  derived and/or modified sequence
atggccgatcttatcgatgggtactgtcgcctcgtcaatggaacgtcgcagtcgttcattattcgcccgcagaaagagggcgaaagagccctcccaagtatcccgaagctggccaacagcgaaaagcagggtatgagaacccatgccgtgtccgtgagtggagtgtctcactgtcagcacaaagtcaaaaaggccaggcggttcctcccacttgtattttgttctcatgaccccccctccacggacgaaataagtggcgatgagaccgatgactatgccgagataatcgatgaggaggatacatatactatgccttcaacccgggactacgagattcagcgggaacgaattgagcttggccgctgcattggggaaggtcagttcggcgacgtgcatcagggcatctatatgtctccagaaaaccccgccttggcggtggcaattaagacctgcaagaactgtaccagtgactctgtgcgagaaaagttcctgcaagaagccttgacaatgaggcagtttgatcatcctcatattgttaagctaatcggagtcataactgagaacccagtgtggattatcatggagctgtgtactctgggagaactgaggagtttcctccaggtgcggaagtactctctcgatttagcgagtcttatcctgtatgcctaccaattgtctacagccctggcttatctcgaaagcaagcgtttcgtgcatagagacatcgccgcccgtaatgtccttgtaagttccaatgactgtgtgaagctaggagatttcgggttaagtagatacatggaggactcaacatattacaaagcatccaaaggcaaattacctattaaatggatggctccagagtctatcaatttccgtaggtttacttcagcctcagacgtttggatgttcggagtctgcatgtgggaaattctgatgcacggagtgaaaccgttccagggtgtgaagaataatgatgtaataggacggatcgagaacggcgaaaggcttccaatgcccccaaactgtccccctaccctctactcattgatgaccaaatgctgggcttatgatccgtctagacgcccaagattcaccgaactcaaagcgcaattgagcaccatcctggaagaggagaaagcgcagcaggaggagcgaatgcggatggagagtaggcgccaagctacagtgtcgtgggactctggggggtcagatgaggccccaccaaaaccaagcaggccagggtatcccagtccaaggtcttccgaaggcttttacccatccccgcagcacatggttcagacaaaccattaccaggtctctggctacccaggctcacacggcataaccgctatggccggttccatctatccggggcaagcctctcttctggatcaaacggattcttggaaccacaggcctcaggagattgccatgtggcagccaaacgtggaagacagcactgttttggaccttagggggatcggtcaggttctgcctacacaccttatggaagagcggttgattcggcagcagcaggaaatggaagaagaccagcgctggttggagaaggaagaaaggtttctgaagcccgatgtgagacttagcagaggaagcattgacagagaggacggctccctgcagggtccaattggcaatcagcacatttatcaacccgttgggaagcccgaccctgccgctcccccaaagaaacccccgcgacctggagcacctgggcacctcggtagcctggcttccctgtcctctccagcagactcatataacgagggagtgaaaccttgtaggttgcagcctcaagagattagcccccccccaacagccaatttggacaggtccaatgacaaggtttacgaaaatgttaccggtctcgtgaaagccgtgattgagatgtcttccaaaatacagcctgccccccctgaggagtacgtgccaatggtgaaagaggttggcctggcactgcgcacgttactggccaccgtcgacgaaactattccactgctgcctgcatcaacgcacagagaaattgaaatggcccagaaactcctgaattccgacctcggagaactgataaacaagatgaagctggctcaacagtacgttatgacctcattgcagcaggaatacaagaagcaaatgctcacagcggcccacgccctcgcagtggacgcgaaaaacctgcttgacgtaattgaccaagcacgactgaaaatgctgggtcaaactcgaccccattag

SEQ ID NO: 308309 - DNA, 2262 bp, Artificial Sequence
  derived and/or modified sequence
gccgagaacatggccgacctcatcgacgggtactgtagactcgttaacgggacaagtcagagctttattattcgcccacaaaaggagggggagcgcgccctgccaagtatccccaagctcgcaaactcagagaaacaggggatgcggacccacgccgtatcagtttcgggggtgagccattgccagcacaaggtgaagaaggcaagaagattcctgccactcgtcttctgctctcacgatccaccttctacagatgagatctcaggcgacgaaaccgacgattacgctgaaatcatcgatgaagaggatacttacaccatgccaagtacccgggattatgagatacagagagagaggatcgaactgggccggtgtattggggaaggacagtttggtgacgtccatcagggaatttacatgagccctgaaaacccagcgttggccgtggccattaagacctgtaaaaactgcacatctgactctgtgagagaaaaatttctccaggaggcattaaccatgcggcaattcgatcatccacatattgtcaagttgattggagtgattactgagaacccagtttggataatcatggaactctgcaccctcggggagctgagatcgttccttcaggttcgaaaatactcgctggacctggcctcacttatcctctatgcctaccagctttccaccgcactggcatacctcgaatccaagagattcgtccaccgcgatattgcagccagaaacgtgctcgtcagctctaacgactgcgtgaagctgggggacttcggtctctcaaggtatatggaagactcaacctattacaaagcttctaagggaaagctccccattaagtggatggcgcccgagtctatcaacttcaggaggttcacaagcgcttccgacgtttggatgttcggagtttgcatgtgggaaatactgatgcacggcgttaaaccatttcaaggagtgaaaaacaacgatgtaattggacgtatcgagaatggggaaaggttacccatgcccccgaattgtcctcctaccctttattccctgatgaccaagtgttgggcctacgacccttctagacgtcctcgttttactgagttaaaggcccagctttcgacaatccttgaggaagaaaaagctcaacaggaagagcgcatgaggatggagagtcgacgccaggccaccgtgtcctgggatagcggtggctctgacgaagcgcccccgaaacccagccgtccaggctaccccagtcctaggtcttcagagggattttatcccagccctcagcacatggtccaaacaaatcattatcaggtgtcagggtacccaggtagtcacggtattaccgccatggccggctccatctatccaggccaggcttctctgctggatcagactgacagttggaaccatagaccacaggagatcgccatgtggcagcccaatgtagaggactccacggttctcgatctgagaggcattgggcaagtgctccccactcatctgatggaggagaggctcatacgacagcaacaggaaatggaggaggatcagcgatggttggaaaaggaagaacgcttcctgaagcccgatgttaggctatctcgcgggtcgatagatcgggaggacgggtcgctgcagggaccaatcgggaaccaacacatttatcagcctgtcggaaagccagaccccgccgcaccccccaagaaacccccacgcccgggcgcccctggtcatcttggatcattagcctcactcagctccccggctgactcgtacaacgaaggggtgaaaccatggcgccttcagccacaggagatttcaccaccccctaccgctaatttggatcgctccaacgataaagtttatgagaatgtgactgggttggtcaaggctgtcattgagatgagttcaaagattcagcctgcgccaccagaggagtatgtacccatggtgaaggaggtcggcttagccttaagaactctgcttgctacggtggatgagaccatccccctattgcctgcaagcacccaccgcgaaatagaaatggcacagaaactactgaactcagaccttggtgagctcatcaataagatgaaactcgcccagcagtatgtgatgacctcacttcagcaagagtataaaaaacagatgctgacagcagcgcacgcactggctgttgatgccaaaaacctcctcgatgttattgaccaggctcgacttaaaatgttaggccaaacgaggccgcattag

SEQ ID NO: 308310 - DNA, 2253 bp, Artificial Sequence
  derived and/or modified sequence
atggctgacctgattgatggctactgccgcctggtgaatggcaccagccagagcttcatcatccggccccagaaggagggggagcgggccctgcccagcatccccaagctggccaacagcgagaagcagggcatgaggacccatgctgtgtctgtgtctggagtgagccactgccagcacaaggtgaagaaggcccggcgcttcctgcccctggtgttctgcagccatgacccccccagcacagatgagatctctggagatgaaacagatgattatgcagagatcattgatgaggaggacacctacaccatgcccagcacccgggactatgagatccagcgggagagaattgagctgggccgctgcattggagagggccagtttggagatgtgcaccagggcatctacatgagccctgagaacccagccctggccgtggccatcaagacctgcaagaactgcaccagtgacagcgtgcgggagaagttcctgcaggaggccctgaccatgaggcagtttgaccacccccacatcgtgaagctgattggagtcatcacagaaaatcctgtgtggatcatcatggagctgtgcaccctgggggagctgcggagcttcctgcaggtgaggaagtacagcctggacctggccagcctcatcctgtatgcctaccagctgagcacagccctggcctacctggagagcaagagatttgtgcaccgggacattgctgccagaaatgtgctggtgagcagcaatgactgtgtgaagctgggggactttggcctgagccgctacatggaggacagcacctactacaaggccagcaagggcaagctgcccatcaagtggatggcccctgagagcatcaacttccgccgcttcaccagcgccagtgatgtgtggatgtttggagtgtgcatgtgggagatcctgatgcatggagtgaagcccttccagggcgtgaagaacaatgatgtgattggaagaattgaaaatggagagcggctgcccatgccacccaactgcccccccaccctgtacagcctgatgaccaagtgctgggcctatgaccccagccggcggccccgcttcacagagctgaaggcccagctgagcaccatcctggaggaggagaaggcccagcaggaggagaggatgaggatggagagccggcggcaggccaccgtgtcctgggacagcggcggcagtgatgaggccccacccaagcccagcaggcctggctaccccagccccaggagcagcgagggcttctaccccagcccccagcacatggtgcagaccaaccactaccaggtgtctggctacccaggcagccacggcatcacagccatggccggcagcatctacccaggccaggccagcctgctggaccagacagacagctggaaccaccggccccaggagatcgccatgtggcagcccaacgtggaggacagcacagtgctggacctgcggggcatcggccaggtgctgcccacccacctgatggaggagcggctcatccggcagcagcaggagatggaggaggaccagcgctggctggagaaggaggagcgcttcctgaagccagatgtgcggctgagccggggcagcattgaccgggaggatggcagcctgcagggccccatcggcaaccagcacatctaccagcctgtgggcaagccagaccctgctgccccacccaagaagccacccaggcctggggcccctggccacctgggcagcctggccagcctgagcagccctgctgacagctacaatgaaggagtgaagccctgccgcctgcagccccaggagatcagccccccacccacagccaacctggacaggagcaatgacaaggtgtatgaaaatgtgacaggcctggtgaaggccgtcatcgagatgagcagcaagatccagcctgcccctcctgaggagtatgtgcccatggtgaaggaggtgggcctggccctgcggaccctgctggccaccgtggatgagaccatccccctgctgcctgccagcacccaccgggagattgagatggcccagaagctgctgaacagcgacctgggggagctgatcaacaagatgaagctggcccagcagtatgtgatgaccagcctgcagcaggagtacaagaagcagatgctgacagctgcccacgccctggccgtggatgccaagaacctgctggatgtgattgaccaggcccggctgaagatgctgggccagacccggccccactag

SEQ ID NO: 308311 - DNA, 2262 bp, Artificial Sequence
  derived and/or modified sequence
gctgagaacatggctgacctgattgatggctactgccgcctggtgaatggcaccagccagagcttcatcatccggccccagaaggagggggagcgggccctgcccagcatccccaagctggccaacagcgagaagcagggcatgaggacccatgctgtgtctgtgtctggagtgagccactgccagcacaaggtgaagaaggcccggcgcttcctgcccctggtgttctgcagccatgacccccccagcacagatgagatctctggagatgaaacagatgattatgcagagatcattgatgaggaggacacctacaccatgcccagcacccgggactatgagatccagcgggagcgcatcgagctgggccgctgcatcggggagggccagtttggagatgtgcaccagggcatctacatgagcccagaaaatcctgccctggccgtggccatcaagacctgcaagaactgcaccagtgacagcgtgcgggagaagttcctgcaggaggccctgaccatgaggcagtttgaccacccccacatcgtgaagctgattggagtcatcacagagaaccctgtgtggatcatcatggagctgtgcaccctgggggagctgcgctccttcctgcaggtgaggaagtacagcctggacctggccagcctcatcctgtatgcctaccagctgagcacagccctggcctacctggagagcaagagatttgtgcaccgggacattgctgccagaaatgtgctggtgagcagcaatgactgtgtgaagctgggggactttggcctgagccgctacatggaggacagcacctactacaaggccagcaagggcaagctgcccatcaagtggatggcccctgagagcatcaacttccgccgcttcaccagcgccagtgatgtgtggatgtttggagtgtgcatgtgggagatcctgatgcacggcgtgaagcccttccagggcgtgaagaacaatgatgtgattggaagaattgaaaatggagagcggctgcccatgccacccaactgcccccccaccctgtacagcctgatgaccaagtgctgggcctatgaccccagcagaagaccccgcttcacagagctgaaggcccagctgagcaccatcctggaggaggagaaggcccagcaggaggagaggatgaggatggagagccggcggcaggccaccgtgtcctgggacagcggcggcagtgatgaggccccacccaagcccagccggcccggctaccccagccccaggagcagcgagggcttctaccccagcccccagcacatggtgcagaccaaccactaccaggtgtctggctacccaggcagccacggcatcacagccatggccggcagcatctacccaggccaggccagcctgctggaccagacagacagctggaaccaccggccccaggagatcgccatgtggcagcccaacgtggaggacagcacagtgctggacctgcggggcatcggccaggtgctgcccacccacctgatggaggagcggctcatccggcagcagcaggagatggaggaggaccagcgctggctggagaaggaggagcgcttcctgaagccagatgtgcggctgagccggggcagcattgacagagaagatggcagcctgcagggccccatcggcaaccagcacatctaccagcctgtgggcaagccagaccctgctgccccacccaagaagccacccaggcctggggcccctggccacctgggcagcctggccagcctgagcagccctgctgacagctacaatgaaggagtgaagccctggaggctgcagccccaggagatcagccccccacccacagccaacctggacaggagcaatgacaaggtgtatgaaaatgtgacaggcctggtgaaggctgtgattgagatgagcagcaagatccagcctgcccctcctgaggagtatgtgcccatggtgaaggaggtgggcctggccctgcggaccctgctggccaccgtggatgagaccatccccctgctgcctgccagcacccaccgggagattgagatggcccagaagctgctgaacagcgacctgggggagctgatcaacaagatgaagctggcccagcagtatgtgatgaccagcctgcagcaggagtacaagaagcagatgctgacagctgcccacgccctggccgtggatgccaagaacctgctggatgtgattgaccaggcccggctgaagatgctgggccagacccggccccactag

SEQ ID NO: 308312 - DNA, 2253 bp, Artificial Sequence
  derived and/or modified sequence
atggccgacctgatcgacggctactgccggctggtgaacggcaccagccaaagctttattattaggccgcagaaggagggagaaagggccctaccatctattcctaagctggccaatagcgaaaaacaggggatgcgcacccatgccgtttccgtaagcggtgtgagccattgccaacacaaagtgaaaaaggctcgcagatttctgccccttgtcttctgctcgcatgatccccccagtactgatgaaatttcaggagatgaaactgacgactacgccgagatcatagatgaagaagatacatacactatgcccagcacgcgcgactacgagattcaacgagaaagaatagagcttgggcgctgcatcggcgagggccagttcggggacgttcaccaagggatttatatgtccccagagaatcccgccttggcggtcgccattaagacttgtaagaactgcacctctgattctgttcgggaaaagtttctgcaggaggccctcactatgcgccagtttgatcacccacatatcgtaaagctcatcggtgtgatcacagagaaccctgtgtggatcataatggagctgtgtaccctgggtgagctgcggtccttcttgcaagtgaggaaatatagcttggacctagcgtccttgattctctacgcatatcagctgtccaccgccctggcctatctggaatctaagaggtttgtgcaccgggacattgcagcccgtaatgtccttgtgtcctcaaacgattgtgtgaaactgggtgacttcggtctctcccgatatatggaggactcaacttactataaagcgagcaagggaaaattgcccattaaatggatggcgcccgaatctataaactttagacgattcacctccgcctcagatgtgtggatgtttggcgtgtgtatgtgggagatactcatgcacggagtaaagccctttcagggtgtgaagaataatgacgttatcgggcgcatcgagaacggcgaacgactccctatgccccccaattgtccccctaccttgtactcactcatgacaaagtgttgggcctatgacccctcccgaaggcctcggtttacagaactgaaagcacaactgagcaccattctcgaagaggagaaggcccagcaagaagaaaggatgcgcatggagtccagacgtcaggccacagttagttgggatagcggcggcagtgacgaagcaccacctaagccaagccgtcctggctatccttctccccggtcaagcgagggattctacccatcgcctcagcacatggttcagacaaaccattatcaggtatctgggtatcccggcagccacggaataacggctatggcaggaagcatctatccagggcaggcaagcttactggaccaaacggacagctggaatcatcggccacaggaaatagccatgtggcagcccaacgtggaggactcaacagtgttggacctgcgcgggatcgggcaagtgctgccgactcatctaatggaagagcgtctgattcgccagcagcaggagatggaggaggatcaacggtggctggagaaagaggagagatttctcaaacctgatgtaagactgagcagaggctctattgatcgggaggatggctcgctccaagggcccatcggtaaccagcacatataccagccagtgggaaagcccgatccggcagccccacccaagaaacctccaaggcccggcgcccccggacatctgggttccctggcctccctgagcagccccgcggactcttacaacgagggcgtgaagccttgccggctgcagccccaggaaatcagccccccacccacagctaacctggatcgctctaatgataaagtgtacgagaatgtgaccggcctggtcaaagctgtgatcgagatgagttcaaaaatccaaccagcccctcccgaagagtatgtcccaatggtgaaggaagttggtcttgccctgagaacattacttgctacggtggatgaaaccatccctttgttgcctgcctccactcaccgcgagatcgaaatggctcagaaactattaaactctgacctgggtgagcttattaacaagatgaagttggcccagcaatatgtcatgacctcactgcagcaggaatacaagaaacagatgttaactgcggcccacgctctggctgtggacgccaagaacctgctggatgtgatcgaccaggctaggctgaagatgttaggacagacacggccacactag

SEQ ID NO: 308313 - DNA, 2262 bp, Artificial Sequence
  derived and/or modified sequence
gccgagaacatggccgacctgatcgacggctactgccggctggtgaacgggaccagtcaatcattcattattagaccacaaaaagagggcgaaagagctcttccctcaatacccaagttggctaattccgagaagcagggcatgcgcactcacgctgtctcggtatccggtgtatctcattgccaacataaggtcaagaaggcacgacggttcctgcctctggttttttgctcgcatgaccccccatctaccgacgagatttctggggacgaaaccgatgactacgcggaaatcattgatgaagaagatacatacaccatgccttctactcgcgattatgaaattcagcgggagaggatcgagctgggacgatgtatcggggagggacagtttggtgacgtccaccaggggatctacatgagcccagagaaccccgcattagccgtcgctattaagacctgcaaaaactgcacgtcagacagtgtaagagagaagtttctccaggaagcgctgactatgcgccagttcgatcatccacatattgtgaaactgatcggagttatcactgagaatccagtctggattattatggaactgtgcactctcggcgaattgaggagcttcctccaggttcggaagtatagcctggatctggcgagtctcatactctacgcatatcagctgtctacagctctggcgtacctcgagagcaaacgattcgtgcacagagacattgcggcccgcaatgttctcgtcagttcaaatgactgcgtgaagctcggcgactttggtttgagcagatacatggaggactccacctattataaggcatccaaaggaaaattacccattaagtggatggccccagagagtataaatttcaggaggtttactagcgcatctgacgtgtggatgttcggcgtgtgtatgtgggaaatcctgatgcatggagttaaacctttccagggtgtcaagaataatgacgtaattggtcgcattgagaacggagagcgactccccatgccaccaaattgccctcctacactgtattcgctgatgaccaaatgttgggcttatgaccccagtcgccgtcccagattcaccgagcttaaggcccagctctctactatcctcgaagaggagaaggcccaacaggaggagcggatgcggatggagtcaagaaggcaggccacagtgtcttgggattctggaggaagcgacgaggcccctcctaaaccctctaggccaggttacccgtctccacggtccagcgaaggtttctacccgagcccccagcatatggttcaaactaaccattaccaggtgagtggatatcccgggtctcatgggatcacagcaatggccggaagtatttacccgggccaggcgtccctgcttgatcagacagatagttggaaccaccggcctcaggaaatcgcaatgtggcagccaaatgtggaagacagcaccgtgctggatctgcgtggaatagggcaggtgctgcctacccatttgatggaggagaggctgattcgccagcaacaggagatggaagaggaccagagatggttggaaaaggaagaacgattcctgaagcctgacgtgagactgagccggggtagtattgacagggaagacggatctttgcaaggcccaatcggcaaccagcatatttaccaacctgtgggtaagccggacccagcggccccccccaagaaacccccacgtcctggcgctcctggacacctcggcagcctggcatccctgtcctcccccgcggacagttacaacgaaggtgtaaagccttggcgacttcaaccccaggagatcagtcccccgcctacagcaaacctggatcgatccaatgacaaggtatatgaaaatgtgacaggccttgtaaaagccgtaatcgaaatgtcctcgaagatccagcccgcgccccccgaagaatatgtcccaatggtgaaagaggtcggcctggccctgaggactttactagctaccgtcgacgagacaattcctctgcttcctgcctctacccatagggagatcgaaatggcccagaagctactgaacagtgacctgggcgaactgattaacaagatgaaactcgcccaacagtatgttatgacttctctgcaacaggaatataagaagcagatgcttacagccgcccacgccttggccgttgacgccaaaaatctgttggatgtcatagaccaggccaggttgaagatgctgggccagacccggcctcactag

SEQ ID NO: 308314 - DNA, 2253 bp, Artificial Sequence
  derived and/or modified sequence
atggccgatctgatagacggatattgtcgcctcgtgaacggcactagccagtccttcattattaggcctcaaaaggagggcgagcgcgcactgccttctattcctaaacttgcgaatagtgaaaaacagggaatgcgtacacatgctgtgtccgtctctggggttagccactgtcagcataaggttaaaaaagccaggaggttcctgcctctggttttttgttcccacgatcctccctcaaccgacgagatcagcggtgatgaaacagacgactatgcggaaattatcgatgaagaggacacctataccatgccaagcacacgcgactacgagattcaaagagagaggatagagctgggccgatgcattggtgagggccagtttggcgacgtgcaccagggtatttacatgtcaccagagaaccccgcattggcagtcgcgataaagacatgcaaaaactgcacaagcgacagcgtgcgtgagaaatttttgcaggaggcgttgaccatgcgtcaatttgaccacccacatatcgtcaagctgatcggcgtcatcacggaaaatccagtctggatcatcatggaactctgcaccctgggggagctgcggtctttcctgcaggtacgaaaatatagtctggacctggcttccttaatattgtacgcttaccagttgagtacagctctggcttacctggagtctaagcggttcgtgcaccgcgacatcgcagcacggaatgtgttggtgtcgagcaacgattgcgtcaaattgggcgacttcggcctctcaagatacatggaagactctacatactacaaggcgagcaaggggaagctccccatcaagtggatggctccggaaagtatcaactttcgacggttcacatctgcctcagacgtgtggatgttcggagtgtgtatgtgggagatattaatgcatggagtgaaaccatttcagggcgtcaagaataacgacgtcattggtcggattgaaaatggcgagaggctcccaatgccccctaactgtccccctactctgtactctctcatgactaagtgctgggcttacgacccctctaggcgacctaggtttacagagctcaaagcacagctgtctaccatccttgaagaggaaaaagcccagcaggaagagaggatgagaatggagagccgacgccaagccactgtctcctgggactcggggggatcagacgaagcacccccaaagccaagtcggcctggatacccatccccacgcagctccgagggattctatccctccccacagcacatggtccagaccaatcactaccaggtgtcgggctaccccggttcccatggcatcaccgctatggcgggatccatttatcccggacaggcatccctgctggaccagacagacagctggaatcaccgccctcaggaaatagcgatgtggcaacccaacgtggaggactcaaccgtgttagatttgcgcggtataggtcaggtactgcctactcacctcatggaggaaagactcattagacaacagcaagagatggaggaggaccaacggtggctcgagaaagaggagcgatttctgaaaccggacgttagattatccagggggagcattgaccgcgaagatggctctctccaaggccctatcggtaaccagcacatctaccagcccgtggggaaaccagatcctgctgccccacctaagaagcctcctcgacctggggcaccagggcacttgggttcactggcaagcttaagttcacccgctgacagttataacgaaggggttaaaccatgtcgactgcagccacaggaaatttcaccacctccgacggccaatttagacaggagcaacgataaggtttatgaaaacgtgacaggtctggtaaaggccgtgatagaaatgagcagtaaaatccaacccgctcctcctgaagagtacgtgccaatggttaaagaggttggtttggccctgcgaacattactcgcaaccgtggacgaaaccatccccttactgccagcttccacacatagagaaatagagatggcacagaagttactgaacagtgatcttggggaactgataaacaaaatgaagctggctcaacagtatgtgatgacctcgctgcagcaggaatacaaaaaacagatgctgaccgccgcacatgctcttgctgtggatgcaaagaatttacttgacgtgatcgatcaggctaggctgaaaatgctggggcagactagacctcactag

SEQ ID NO: 308315 - DNA, 2262 bp, Artificial Sequence
  derived and/or modified sequence
gcagagaacatggcagatcttatcgatggctattgccgtctggtcaacggaacaagtcagagctttattatcagaccccagaaagaaggcgagcgtgcactcccaagcatccctaagctggccaatagcgaaaagcagggtatgcgaacccacgctgtgagcgtcagcggagtgtcacactgccagcataaagttaaaaaagctagaagatttttgcccctggtcttttgcagtcatgacccaccatcgaccgatgagatctcaggcgacgaaacagatgactacgctgaaattatagacgaggaggacacttatacgatgccgtccactcgagactacgagatccagcgcgagagaatcgagctcggcagatgtatcggtgagggtcagttcggggatgttcaccagggaatatacatgtctcctgaaaatcctgccctggctgtagccattaaaacttgtaaaaactgcacgtctgactcagtgagagagaaattcttacaagaggctctcaccatgcgacaattcgatcacccgcatatagtaaagctgatcggagtaatcactgaaaatccagtatggattataatggagttgtgcactctaggggagctgaggagctttttgcaggtgcggaagtattccctggatcttgcatcgttaatcctatacgcctatcagctttcgacagcgcttgcctatttggagagtaaacgcttcgtgcatagggatatcgctgctcgaaatgtcttggtgagctctaatgactgtgtaaaacttggcgacttcggcctttcgaggtacatggaagactccacctactacaaggcatcaaaagggaagttgcctataaagtggatggccccagagtcgatcaatttccggaggtttactagcgcaagcgatgtgtggatgttcggcgtgtgtatgtgggagatccttatgcatggggttaaacctttccaaggggtaaaaaacaacgacgtgattggccgtatagagaacggcgagagactgccaatgcctccaaattgtcctccaacactctattctctgatgacaaaatgctgggcatacgacccatcgcgacggccaaggttcacagaattaaaggctcagctatccactatcctcgaggaggagaaagcgcagcaggaggagcgaatgcgcatggagagcaggaggcaggcaacggtaagctgggacagcggcggatctgacgaggcacctccaaaaccatctagaccgggatacccctcgccgaggagttcggagggcttttaccctagccctcagcatatggtccagactaatcattatcaggtgtcgggctacccaggcagtcacgggatcacagccatggcgggatccatctatcccggacaggccagcttactggatcagacggattcctggaatcacaggcctcaggagatcgccatgtggcaacccaatgttgaagacagtacagtgctagacttgcgcggaatcggtcaggtcctacccacccacttaatggaagagagactgatcaggcaacagcaggagatggaagaggaccaacgctggctcgagaaggaggagagattcttgaagcccgatgtacggctgagccgaggtagcatcgaccgcgaggacggaagcctgcaaggcccaatcggcaatcagcacatataccagcccgtagggaaacccgacccagcagcgccacccaagaagccacccagacctggagctcccggacacctggggtctctggcctctctgtcctcccctgccgattcttacaacgagggggttaagccatggaggctgcagccccaggaaataagtccgccacctacagcaaatctagacaggtccaatgacaaggtctacgaaaacgtaaccggcctggtgaaggccgtcatagagatgtccagcaagatccagcccgctccccctgaggagtatgttcctatggtgaaggaggttgggctcgctctgcggaccctgcttgccacagtggacgaaacaatcccactcttgccggcttctacacatagagagatagagatggctcaaaaacttctgaactcagacttaggcgaactgattaataagatgaagctcgcccagcagtatgtgatgacatctcttcagcaggaatacaaaaagcagatgttgactgccgcacacgccctggctgtcgacgcaaagaacttactggacgtgatcgatcaggccagactgaagatgcttgggcagactaggccgcactag

SEQ ID NO: 308316 - DNA, 4564 bp, Artificial Sequence
  derived and/or modified sequence
gaccactgtgagcccgcggcgtgaggcgtgggaggaagcgcggctgctgtcgcccagcgccgccccgtcgtcgtctgccttcgcttcacggcgccgagccgcggtccgagcagaactggggctcccttgcatcttccagttacaaattcagtgccttctgcagtttccccagagctcctcaagaataacggaagggagaatatgacagatacctagcatctagcaaaataatggcagctgcttaccttgaccccaacttgaatcacacaccaaattcgagtactaagactcacctgggtactggtatggaacgttctcctggtgcaatggagcgagtattaaaggtctttcattattttgaaagcaatagtgagccaaccacctgggccagtattatcaggcatggagatgctactgatgtcaggggcatcattcagaagatagtggacagtcacaaagtaaagcatgtggcctgctatggattccgcctcagtcacctgcggtcagaggaggttcactggcttcacgtggatatgggcgtctccagtgtgagggagaagtatgagcttgctcacccaccagaggagtggaaatatgaattgagaattcgttatttgccaaaaggatttctaaaccagtttactgaagataagccaactttgaatttcttctatcaacaggtgaagagcgattatatgttagagatagctgatcaagtggaccaggaaattgctttgaagttgggttgtctagaaatacggcgatcatactgggagatgcggggcaatgcactagaaaagaagtctaactatgaagtattagaaaaagatgttggtttaaagcgattttttcctaagagtttactggattctgtcaaggccaaaacactaagaaaactgatccaacaaacatttagacaatttgccaaccttaatagagaagaaagtattctgaaattctttgagatcctgtctccagtctacagatttgataaggaatgcttcaagtgtgctcttggttcaagctggattatttcagtggaactggcaatcggcccagaagaaggaatcagttacctaacggacaagggctgcaatcccacacatcttgctgacttcactcaagtgcaaaccattcagtattcaaacagtgaagacaaggacagaaaaggaatgctacaactaaaaatagcaggtgcacccgagcctctgacagtgacggcaccatccctaaccattgcggagaatatggctgacctaatagatgggtactgccggctggtgaatggaacctcgcagtcatttatcatcagacctcagaaagaaggtgaacgggctttgccatcaataccaaagttggccaacagcgaaaagcaaggcatgcggacacacgccgtctctgtgtcaggagtcagtcactgccaacataaagttaagaaagctaggcgctttctccctttggtcttctgttcccatgatcctccttctacggatgaaattagtggggacgaaacagatgattatgctgagattatagatgaagaagatacttacaccatgccctcaaccagggattatgagattcaaagagaaagaatagaacttggacgatgtattggagaaggccaatttggagatgtacatcaaggcatttatatgagtccagagaatccagctttggcggttgcaattaaaacatgtaaaaactgtacttcggacagcgtgagagagaaatttcttcaagaagccttaacaatgcgtcagtttgaccatcctcatattgtgaagctgattggagtcatcacagagaatcctgtctggataatcatggagctgtgcacacttggagagctgaggtcatttttgcaagtaaggaaatacagtttggatctagcatctttgatcctgtatgcctatcagcttagtacagctcttgcatatctagagagcaaaagatttgtacacagggacattgctgctcggaatgttctggtgtcctcaaatgattgtgtaaaattaggagactttggattatcccgatatatggaagatagtacttactacaaagcttccaaaggaaaattgcctattaaatggatggctccagagtcaatcaattttcgacgttttacctcagctagtgacgtatggatgtttggtgtgtgtatgtgggagatactgatgcatggtgtgaagccttttcaaggagtgaagaacaatgatgtaatcggtcgaattgaaaatggggaaagattaccaatgcctccaaattgtcctcctaccctctacagccttatgacgaaatgctgggcctatgaccccagcaggcggcccaggtttactgaacttaaagctcagctcagcacaatcctggaggaagagaaggctcagcaagaagagcgcatgaggatggagtccagaagacaggccacagtgtcctgggactccggagggtctgatgaagcaccgcccaagcccagcagaccgggttatcccagtccgaggtccagcgaaggattttatcccagcccacagcacatggtacaaaccaatcattaccaggtttctggctaccctggttcacatggaatcacagccatggctggcagcatctatccaggtcaggcatctcttttggaccaaacagattcatggaatcatagacctcaggagatagcaatgtggcagcccaatgtggaggactctacagtattggacctgcgagggattgggcaagtgttgccaacccatctgatggaagagcgtctaatccgacagcaacaggaaatggaagaagatcagcgctggctggaaaaagaggaaagatttctgaaacctgatgtgagactctctcgaggcagtattgacagggaggatggaagtcttcagggtccgattggaaaccaacatatatatcagcctgtgggtaaaccagatcctgcagctccaccaaagaaaccgcctcgccctggagctcccggtcatctgggaagccttgccagcctcagcagccctgctgacagctacaacgagggtgtcaagccttgcagacttcagccccaggaaatcagcccccctcctactgccaacctggaccggtcgaatgataaggtgtacgagaatgtgacgggcctggtgaaagctgtcatcgagatgtccagtaaaatccagccagccccaccagaggagtatgtccctatggtgaaggaagtcggcttggccctgaggacattattggccactgtggatgagaccattcccctcctaccagccagcacccaccgagagattgagatggcacagaagctattgaactctgacctgggtgagctcatcaacaagatgaaactggcccagcagtatgtcatgaccagcctccagcaagagtacaaaaagcaaatgctgactgctgctcacgccctggctgtggatgccaaaaacttactcgatgtcattgaccaagcaagactgaaaatgcttgggcagacgagaccacactgagcctcccctaggagcacgtcttgctaccctcttttgaagatgttctctagccttccaccagcagcgaggaattaaccctgtgtcctcagtcgccagcacttacagctccaacttttttgaatgaccatctggttgaaaaatctttctcatataagtttaaccacactttgatttgggttcattttttgttttgtttttttcaatcatgatattcagaaaaatccaggatccaaaatgtggcgtttttctaagaatgaaaattatatgtaagcttttaagcatcatgaagaacaatttatgttcacattaagatacgttctaaagggggatggccaaggggtgacatcttaattcctaaactaccttagctgcatagtggaagaggagagcatgaagcaaagaattccaggaaacccaagaggctgagaattcttttgtctaccatagaattattatccagactggaatttttgtttgttagaacacccttcagttgcaatatgctaatcccactttacaaagaatataaaagctatattttgaagacttgagttatttcagaaaaaactacagccctttttgtcttacctgccttttactttcgtgtggatatgtgaagcattgggtcgggaactagctgtagaacacaactaaaaactcatgtcttttttcacagaataatgtgccagttttttgtagcaatgttatttctcttggaagcagaaatgctttgtaccagagcacctccaaactgcattgaggagaagttccagaaccatcccctttttccatttttatataatttataaagaaagattaaagccatgttgactattttacagccactggagttaactaacccttccttgtatctgtcttcccaggagagaatgaagcaaaacaggaatttggttttcttttgatgtccagttacaccatccattctgttaattttgaaaaaatataccctccctttagtttgttgggggatataaattattctcaggaagaatataatgaactgtacagttactttgacctattaaaaaggtgttaccagtaaa

SEQ ID NO: 308317 - DNA, 2393 bp, Artificial Sequence
  derived and/or modified sequence
gcggagaatatggctgacctaatagatgggtactgccggctggtgaatggaacctcgcagtcatttatcatcagacctcagaaagaaggtgaacgggctttgccatcaataccaaagttggccaacagcgaaaagcaaggcatgcggacacacgccgtctctgtgtcaggagtcagtcactgccaacataaagttaagaaagctaggcgctttctccctttggtcttctgttcccatgatcctccttctacggatgaaattagtggggacgaaacagatgattatgctgagattatagatgaagaagatacttacaccatgccctcaaccagggattatgagattcaaagagaaagaatagaacttggacgatgtattggagaaggccaatttggagatgtacatcaaggcatttatatgagtccagagaatccagctttggcggttgcaattaaaacatgtaaaaactgtacttcggacagcgtgagagagaaatttcttcaagaagccttaacaatgcgtcagtttgaccatcctcatattgtgaagctgattggagtcatcacagagaatcctgtctggataatcatggagctgtgcacacttggagagctgaggtcatttttgcaagtaaggaaatacagtttggatctagcatctttgatcctgtatgcctatcagcttagtacagctcttgcatatctagagagcaaaagatttgtacacagggacattgctgctcggaatgttctggtgtcctcaaatgattgtgtaaaattaggagactttggattatcccgatatatggaagatagtacttactacaaagcttccaaaggaaaattgcctattaaatggatggctccagagtcaatcaattttcgacgttttacctcagctagtgacgtatggatgtttggtgtgtgtatgtgggagatactgatgcatggtgtgaagccttttcaaggagtgaagaacaatgatgtaatcggtcgaattgaaaatggggaaagattaccaatgcctccaaattgtcctcctaccctctacagccttatgacgaaatgctgggcctatgaccccagcaggcggcccaggtttactgaacttaaagctcagctcagcacaatcctggaggaagagaaggctcagcaagaagagcgcatgaggatggagtccagaagacaggccacagtgtcctgggactccggagggtctgatgaagcaccgcccaagcccagcagaccgggttatcccagtccgaggtccagcgaaggattttatcccagcccacagcacatggtacaaaccaatcattaccaggtttctggctaccctggttcacatggaatcacagccatggctggcagcatctatccaggtcaggcatctcttttggaccaaacagattcatggaatcatagacctcaggagatagcaatgtggcagcccaatgtggaggactctacagtattggacctgcgagggattgggcaagtgttgccaacccatctgatggaagagcgtctaatccgacagcaacaggaaatggaagaagatcagcgctggctggaaaaagaggaaagatttctgaaacctgatgtgagactctctcgaggcagtattgacagggaggatggaagtcttcagggtccgattggaaaccaacatatatatcagcctgtgggtaaaccagatcctgcagctccaccaaagaaaccgcctcgccctggagctcccggtcatctgggaagccttgccagcctcagcagccctgctgacagctacaacgagggtgtcaagccatggaggcttcagccccaggaaatcagcccccctcctactgccaacctggaccggtcgaatgataaggtgtacgagaatgtgacgggcctggtgaaagctgtcatcgagatgtccagtaaaatccagccagccccaccagaggagtatgtccctatggtgaaggaagtcggcttggccctgaggacattattggccactgtggatgagaccattcccctcctaccagccagcacccaccgagagattgagatggcacagaagctattgaactctgacctgggtgagctcatcaacaagatgaaactggcccagcagtatgtcatgaccagcctccagcaagagtacaaaaagcaaatgctgactgctgctcacgccctggctgtggatgccaaaaacttactcgatgtcattgaccaagcaagactgaaaatgcttgggcagacgagaccacactgagcctcccctaggagcacgtcttgctaccctcttttgaagatgttctctagccttccaccagcagcgaggaattaaccctgtgtcctcagtcgccagcacttacagctccaacttttttgaatgaccatctg

SEQ ID NO: 308318 - protein, 51 aa, Artificial Sequence
  derived and/or modified sequence
MAAAYLDPNLNHTPNSSTKTHLGTGMERSPGAMERVLKVFHYFESNSEPTT

SEQ ID NO: 308319 - protein, 65 aa, Artificial Sequence
  derived and/or modified sequence
MAAAYLDPNLNHTPNSSTKTHLGTGMERSPGAMERVLKVFHYFESNSEPTTWASIIRHGDATDVR

SEQ ID NO: 308320 - protein, 107 aa, Artificial Sequence
  derived and/or modified sequence
MAAAYLDPNLNHTPNSSTKTHLGTGMERSPGAMERVLKVFHYFESNSEPTTWASIIRHGDATDVRGIIQKIVDSHKVKHVACYGFRLSHLRSEEVHWLHVDMGVSSV

SEQ ID NO: 308321 - protein, 724 aa, Artificial Sequence
  derived and/or modified sequence
IAENMADLIDGYCRLVNGTSQSFIIRPQKEGERALPSIPKLANSEKQGMRTHAVSVSETDDYAEIIDEEDTYTMPSKSYGIDEARDYEIQRERIELGRCIGEGQFGDVHQGIYMSPENPALAVAIKTCKNCTSDSVREKFLQEALTMRQFDHPHIVKLIGVITENPVWIIMELCTLGELRSFLQVRKYSLDLASLILYAYQLSTALAYLESKRFVHRDIAARNVLVSSNDCVKLGDFGLSRYMEDSTYYKASKGKLPIKWMAPESINFRRFTSASDVWMFGVCMWEILMHGVKPFQGVKNNDVIGRIENGERLPMPPNCPPTLYSLMTKCWAYDPSRRPRFTELKAQLSTILEEEKAQQEERMRMESRRQATVSWDSGGSDEAPPKPSRPGYPSPRSSEGFYPSPQHMVQTNHYQVSGYPGSHGITAMAGSIYPGQASLLDQTDSWNHRPQEIAMWQPNVEDSTVLDLRGIGQVLPTHLMEERLIRQQQEMEEDQRWLEKEERFLKPDVRLSRGSIDREDGSLQGPIGNQHIYQPVGKPDPAAPPKKPPRPGAPGHLGSLASLSSPADSYNEGVKLQPQEISPPPTANLDRSNDKVYENVTGLVKAVIEMSSKIQPAPPEEYVPMVKEVGLALRTLLATVDETIPLLPASTHREIEMAQKLLNSDLGELINKMKLAQQYVMTSLQQEYKKQMLTAAHALAVDAKNLLDVIDQARLKMLGQTRPH

SEQ ID NO: 308322 - protein, 720 aa, Artificial Sequence
  derived and/or modified sequence
MADLIDGYCRLVNGTSQSFIIRPQKEGERALPSIPKLANSEKQGMRTHAVSVSETDDYAEIIDEEDTYTMPSKSYGIDEARDYEIQRERIELGRCIGEGQFGDVHQGIYMSPENPALAVAIKTCKNCTSDSVREKFLQEALTMRQFDHPHIVKLIGVITENPVWIIMELCTLGELRSFLQVRKYSLDLASLILYAYQLSTALAYLESKRFVHRDIAARNVLVSSNDCVKLGDFGLSRYMEDSTYYKASKGKLPIKWMAPESINFRRFTSASDVWMFGVCMWEILMHGVKPFQGVKNNDVIGRIENGERLPMPPNCPPTLYSLMTKCWAYDPSRRPRFTELKAQLSTILEEEKAQQEERMRMESRRQATVSWDSGGSDEAPPKPSRPGYPSPRSSEGFYPSPQHMVQTNHYQVSGYPGSHGITAMAGSIYPGQASLLDQTDSWNHRPQEIAMWQPNVEDSTVLDLRGIGQVLPTHLMEERLIRQQQEMEEDQRWLEKEERFLKPDVRLSRGSIDREDGSLQGPIGNQHIYQPVGKPDPAAPPKKPPRPGAPGHLGSLASLSSPADSYNEGVKLQPQEISPPPTANLDRSNDKVYENVTGLVKAVIEMSSKIQPAPPEEYVPMVKEVGLALRTLLATVDETIPLLPASTHREIEMAQKLLNSDLGELINKMKLAQQYVMTSLQQEYKKQMLTAAHALAVDAKNLLDVIDQARLKMLGQTRPH

SEQ ID NO: 308323 - DNA, 2175 bp, Artificial Sequence
  derived and/or modified sequence
atcgccgagaacatggccgacctgatcgacggctactgcagactggtgaacggcaccagccagagcttcatcatcagaccccagaaggagggcgagagagccctgcccagcatccccaagctggccaacagcgagaagcagggcatgagaacccacgccgtgagcgtgagcgagaccgacgactacgccgagatcatcgacgaggaggacacctacaccatgcccagcaagagctacggcatcgacgaggccagagactacgagatccagagagagagaatcgagctgggcagatgcatcggcgagggccagttcggcgacgtgcaccagggcatctacatgagccccgagaaccccgccctggccgtggccatcaagacctgcaagaactgcaccagcgacagcgtgagagagaagttcctgcaggaggccctgaccatgagacagttcgaccacccccacatcgtgaagctgatcggcgtgatcaccgagaaccccgtgtggatcatcatggagctgtgcaccctgggcgagctgagaagcttcctgcaggtgagaaagtacagcctggacctggccagcctgatcctgtacgcctaccagctgagcaccgccctggcctacctggagagcaagagattcgtgcacagagacatcgccgccagaaacgtgctggtgagcagcaacgactgcgtgaagctgggcgacttcggcctgagcagatacatggaggacagcacctactacaaggccagcaagggcaagctgcccatcaagtggatggcccccgagagcatcaacttcagaagattcaccagcgccagcgacgtgtggatgttcggcgtgtgcatgtgggagatcctgatgcacggcgtgaagcccttccagggcgtgaagaacaacgacgtgatcggcagaatcgagaacggcgagagactgcccatgccccccaactgcccccccaccctgtacagcctgatgaccaagtgctgggcctacgaccccagcagaagacccagattcaccgagctgaaggcccagctgagcaccatcctggaggaggagaaggcccagcaggaggagagaatgagaatggagagcagaagacaggccaccgtgagctgggacagcggcggcagcgacgaggccccccccaagcccagcagacccggctaccccagccccagaagcagcgagggcttctaccccagcccccagcacatggtgcagaccaaccactaccaggtgagcggctaccccggcagccacggcatcaccgccatggccggcagcatctaccccggccaggccagcctgctggaccagaccgacagctggaaccacagaccccaggagatcgccatgtggcagcccaacgtggaggacagcaccgtgctggacctgagaggcatcggccaggtgctgcccacccacctgatggaggagagactgatcagacagcagcaggagatggaggaggaccagagatggctggagaaggaggagagattcctgaagcccgacgtgagactgagcagaggcagcatcgacagagaggacggcagcctgcagggccccatcggcaaccagcacatctaccagcccgtgggcaagcccgaccccgccgccccccccaagaagccccccagacccggcgcccccggccacctgggcagcctggccagcctgagcagccccgccgacagctacaacgagggcgtgaagctgcagccccaggagatcagccccccccccaccgccaacctggacagaagcaacgacaaggtgtacgagaacgtgaccggcctggtgaaggccgtgatcgagatgagcagcaagatccagcccgccccccccgaggagtacgtgcccatggtgaaggaggtgggcctggccctgagaaccctgctggccaccgtggacgagaccatccccctgctgcccgccagcacccacagagagatcgagatggcccagaagctgctgaacagcgacctgggcgagctgatcaacaagatgaagctggcccagcagtacgtgatgaccagcctgcagcaggagtacaagaagcagatgctgaccgccgcccacgccctggccgtggacgccaagaacctgctggacgtgatcgaccaggccagactgaagatgctgggccagaccagaccccactag

SEQ ID NO: 308324 - DNA, 2163 bp, Artificial Sequence
  derived and/or modified sequence
atggccgacctgatcgacggctactgcagactggtgaacggcaccagccagagcttcatcatcagaccccagaaggagggcgagagagccctgcccagcatccccaagctggccaacagcgagaagcagggcatgagaacccacgccgtgagcgtgagcgagaccgacgactacgccgagatcatcgacgaggaggacacctacaccatgcccagcaagagctacggcatcgacgaggccagagactacgagatccagagagagagaatcgagctgggcagatgcatcggcgagggccagttcggcgacgtgcaccagggcatctacatgagccccgagaaccccgccctggccgtggccatcaagacctgcaagaactgcaccagcgacagcgtgagagagaagttcctgcaggaggccctgaccatgagacagttcgaccacccccacatcgtgaagctgatcggcgtgatcaccgagaaccccgtgtggatcatcatggagctgtgcaccctgggcgagctgagaagcttcctgcaggtgagaaagtacagcctggacctggccagcctgatcctgtacgcctaccagctgagcaccgccctggcctacctggagagcaagagattcgtgcacagagacatcgccgccagaaacgtgctggtgagcagcaacgactgcgtgaagctgggcgacttcggcctgagcagatacatggaggacagcacctactacaaggccagcaagggcaagctgcccatcaagtggatggcccccgagagcatcaacttcagaagattcaccagcgccagcgacgtgtggatgttcggcgtgtgcatgtgggagatcctgatgcacggcgtgaagcccttccagggcgtgaagaacaacgacgtgatcggcagaatcgagaacggcgagagactgcccatgccccccaactgcccccccaccctgtacagcctgatgaccaagtgctgggcctacgaccccagcagaagacccagattcaccgagctgaaggcccagctgagcaccatcctggaggaggagaaggcccagcaggaggagagaatgagaatggagagcagaagacaggccaccgtgagctgggacagcggcggcagcgacgaggccccccccaagcccagcagacccggctaccccagccccagaagcagcgagggcttctaccccagcccccagcacatggtgcagaccaaccactaccaggtgagcggctaccccggcagccacggcatcaccgccatggccggcagcatctaccccggccaggccagcctgctggaccagaccgacagctggaaccacagaccccaggagatcgccatgtggcagcccaacgtggaggacagcaccgtgctggacctgagaggcatcggccaggtgctgcccacccacctgatggaggagagactgatcagacagcagcaggagatggaggaggaccagagatggctggagaaggaggagagattcctgaagcccgacgtgagactgagcagaggcagcatcgacagagaggacggcagcctgcagggccccatcggcaaccagcacatctaccagcccgtgggcaagcccgaccccgccgccccccccaagaagccccccagacccggcgcccccggccacctgggcagcctggccagcctgagcagccccgccgacagctacaacgagggcgtgaagctgcagccccaggagatcagccccccccccaccgccaacctggacagaagcaacgacaaggtgtacgagaacgtgaccggcctggtgaaggccgtgatcgagatgagcagcaagatccagcccgccccccccgaggagtacgtgcccatggtgaaggaggtgggcctggccctgagaaccctgctggccaccgtggacgagaccatccccctgctgcccgccagcacccacagagagatcgagatggcccagaagctgctgaacagcgacctgggcgagctgatcaacaagatgaagctggcccagcagtacgtgatgaccagcctgcagcaggagtacaagaagcagatgctgaccgccgcccacgccctggccgtggacgccaagaacctgctggacgtgatcgaccaggccagactgaagatgctgggccagaccagaccccactag

SEQ ID NO: 308325 - DNA, 2175 bp, Artificial Sequence
  derived and/or modified sequence
attgctgagaacatggcagaccttatcgatgggtattgccggcttgtaaatggcacctctcaatcatttatcatcagacctcagaaagagggagaacgggcccttccatccattcctaagctcgcaaacagcgagaaacagggcatgcggacccacgccgtgagcgtatcggaaaccgatgattacgccgaaatcattgatgaggaagacacctacacaatgccttcgaagtcttacgggatagacgaggccagagactatgagatacagcgtgaacgcattgagttgggaaggtgcatcggagaggggcagttcggtgacgtgcatcagggaatttatatgagcccggagaaccctgccctggcggtcgctataaagacctgcaagaactgcaccagtgattccgttagagaaaaatttcttcaggaagcactcaccatgcgccagttcgaccaccctcacatcgtcaagcttattggtgtcatcaccgagaacccagtgtggattatcatggagctgtgcaccttaggcgagctacgctccttcctccaggtaagaaaatacagcctcgacctggcaagtctcattctttacgcatatcagctgagtacagcccttgcctatttggagtcaaaacggttcgtacaccgtgatatcgcggccaggaacgtgctcgtttcgtcgaacgactgtgtcaaactcggcgatttcggtctgtcgcggtatatggaggactctacatactataaagcatccaaggggaaactgcccatcaagtggatggcccctgaatcgatcaactttcggcggttcaccagtgcatccgatgtgtggatgttcggggtgtgtatgtgggaaatactgatgcacggcgtgaaaccttttcagggcgtgaagaacaatgatgtaattgggagaattgaaaatggcgagagactgcccatgcctcccaactgtccacctacactgtactcccttatgacaaagtgctgggcctacgacccgagcaggcgaccaagattcacagaactgaaggcccaactgtccactatcctcgaggaagagaaagcacagcaagaggagcggatgaggatggaatctcgccggcaagccactgtttcctgggacagtggcggctccgacgaagctcctcccaagccatcccggcccggatatccgagcccccggtccagcgaaggattctaccccagcccccaacatatggttcaaacgaaccactatcaggtgtctggatatccggggtcccatgggatcacagcaatggctggctccatttatcctgggcaggcctccctgttggaccagaccgactcttggaatcaccgtcctcaggagatcgcgatgtggcagcccaatgtggaggacagtaccgttttggatctccggggcattggccaggttcttccgactcacctcatggaagagcggctgatcagacaacagcaggagatggaagaggaccagcgctggctcgaaaaggaagaacgcttccttaagcccgatgttagactttccaggggctctatagacagagaggatggcagcctgcagggtccaatcgggaaccagcatatctatcagccagtgggtaagccagaccccgcagccccccccaaaaaaccccctaggcctggggcacccggacatttgggatctctcgccagtttgagtagcccagccgacagctacaacgagggcgttaaactccaaccacaagagatttcacctcctcctacagctaatttagacagaagcaatgataaagtgtacgaaaatgtgacagggctggttaaagccgtgattgaaatgtcaagtaaaatccaacccgccccccccgaagagtacgtgcctatggtgaaagaagtcgggctcgccctgcggactctgctcgcaaccgtggacgaaacaattcccttacttccagcatcgacacacagggaaatagaaatggcgcagaagctgctgaattcagacttgggtgagctcataaataagatgaagctggcccagcaatacgtcatgacttccttacagcaggaatacaaaaaacaaatgcttaccgcagcgcatgcactggctgtcgacgcaaagaatctccttgacgttatcgaccaggccagactcaagatgttgggtcaaacgcgaccacactag

SEQ ID NO: 308326 - DNA, 2163 bp, Artificial Sequence
  derived and/or modified sequence
atggcagatcttatagatggctattgtaggctggtgaacggtaccagccagtcctttatcatccggccacaaaaagagggggagagagccctgccgtcaatcccaaagctggcaaacagcgagaagcagggcatgcggacacatgcagtttccgtgtctgaaacagatgactacgcagagatcatcgacgaggaggatacgtacacaatgccttctaaatcttacggaatcgatgaggcgcgagattatgagatccagcgggagcggatagaactgggaagatgcattggagaagggcagttcggcgatgtgcaccagggaatctacatgtcccccgaaaacccagccttagcagtcgcaatcaagacctgcaagaattgcacctcggattctgttagggagaagttccttcaggaagccttgacaatgcgtcagttcgaccatccccatattgttaaattaattggagtcataacagaaaatcccgtatggatcatcatggagctatgcacacttggagagctgcgctctttcctccaggtcaggaagtattctctggacctggcctcgctaatactctatgcttatcagctgtctacagctcttgcctacctggaatctaagcggtttgtgcacagagacattgcagcccggaatgttctcgtgagcagtaacgactgcgttaagttgggtgacttcggcttaagccgatacatggaggactccacttactataaggcgtccaagggaaaattgcccattaagtggatggctccagaaagtataaactttaggcggtttacctccgcatccgacgtttggatgttcggtgtgtgtatgtgggagatactgatgcacggggtgaagccatttcagggtgtgaagaacaacgacgtgattggacgcatcgaaaatggcgagagacttccgatgcccccaaactgtcctcctacgttgtactcactcatgacgaaatgttgggcttatgatccttccagacggcctaggttcaccgaattgaaagcacagttatccactattctagaggaggagaaggcacagcaggaagaaaggatgagaatggagagtcgcaggcaggccactgtgtcctgggattctggcggctccgatgaagcccctcctaaacccagccgccccggttaccctagcccaaggtcttctgaggggttctacccctcgcctcaacatatggtgcagaccaatcattaccaggttagtggatatcccgggtcccacgggatcacagccatggctggcagcatttatcctggacaggcctcactcctagatcagacagactcttggaatcaccggccacaggaaatcgccatgtggcagcccaacgttgaagacagcacggtgctagacttgaggggcatcggtcaggtcttgcccacccacctgatggaggagaggctgatccgccagcagcaggagatggaagaggaccaacgttggttagagaaggaggagagatttctgaagccggatgtgagattgtctcggggatccatagacagggaggacgggtctctgcaaggaccaattggtaaccagcacatctatcaacccgtggggaagcccgaccccgctgccccacctaaaaaacccccacgcccaggcgcaccaggccacctgggctctctcgcaagtctgagttcccccgccgacagctacaacgaaggtgttaaactccagccccaggagatctcacctccccctaccgcaaatctcgatagaagcaacgacaaggtgtacgagaatgttacaggcctggtcaaagccgtcatcgagatgtcaagcaaaatccagcctgccccaccagaggagtacgtgcctatggtgaaggaagtgggtctggctctaaggacgctactggctaccgtcgatgaaacaattccgctcctcccagcaagcactcatagagagattgaaatggcccagaagctcctcaacagcgatctgggagaattgattaacaaaatgaaattggctcaacagtatgtgatgacttccctgcaacaggagtataagaagcagatgctcacagccgcacacgcccttgccgtggatgcaaagaatctgctcgatgttattgatcaagccaggctgaaaatgcttgggcagacacgcccccattag

SEQ ID NO: 308327 - DNA, 2175 bp, Artificial Sequence
  derived and/or modified sequence
attgctgagaacatggctgacctgattgatggctactgccgcctggtgaatggcaccagccagagcttcatcatccggccccagaaggagggggagcgggccctgcccagcatccccaagctggccaacagcgagaagcagggcatgaggacccatgctgtgtctgtgtctgaaacagatgattatgcagagatcattgatgaggaggacacctacaccatgcccagcaagagctatggaattgatgaggcccgggactatgagatccagcgggagcgcatcgagctgggccgctgcatcggggagggccagtttggagatgtgcaccagggcatctacatgagcccagaaaatcctgccctggccgtggccatcaagacctgcaagaactgcaccagtgacagcgtgcgggagaagttcctgcaggaggccctgaccatgaggcagtttgaccacccccacatcgtgaagctgattggagtcatcacagagaaccctgtgtggatcatcatggagctgtgcaccctgggggagctgcgctccttcctgcaggtgaggaagtacagcctggacctggccagcctcatcctgtatgcctaccagctgagcacagccctggcctacctggagagcaagagatttgtgcaccgggacattgctgccagaaatgtgctggtgagcagcaatgactgtgtgaagctgggggactttggcctgagccgctacatggaggacagcacctactacaaggccagcaagggcaagctgcccatcaagtggatggcccctgagagcatcaacttccgccgcttcaccagcgccagtgatgtgtggatgtttggagtgtgcatgtgggagatcctgatgcacggcgtgaagcccttccagggcgtgaagaacaatgatgtgattggaagaattgaaaatggagagcggctgcccatgccacccaactgcccccccaccctgtacagcctgatgaccaagtgctgggcctatgaccccagcagaagaccccgcttcacagagctgaaggcccagctgagcaccatcctggaggaggagaaggcccagcaggaggagaggatgaggatggagagccggcggcaggccaccgtgtcctgggacagcggcggcagtgatgaggccccacccaagcccagccggcccggctaccccagccccaggagcagcgagggcttctaccccagcccccagcacatggtgcagaccaaccactaccaggtgtctggctacccaggcagccacggcatcacagccatggccggcagcatctacccaggccaggccagcctgctggaccagacagacagctggaaccaccggccccaggagatcgccatgtggcagcccaacgtggaggacagcacagtgctggacctgcggggcatcggccaggtgctgcccacccacctgatggaggagcggctcatccggcagcagcaggagatggaggaggaccagcgctggctggagaaggaggagcgcttcctgaagccagatgtgcggctgagccggggcagcattgacagagaagatggcagcctgcagggccccatcggcaaccagcacatctaccagcctgtgggcaagccagaccctgctgccccacccaagaagccacccaggcctggggcccctggccacctgggcagcctggccagcctgagcagccctgctgacagctacaatgaaggagtgaagctgcagccccaggagatcagccccccacccacagccaacctggacaggagcaatgacaaggtgtatgaaaatgtgacaggcctggtgaaggccgtcatcgagatgagcagcaagatccagcctgcccctcctgaggagtatgtgcccatggtgaaggaggtgggcctggccctgcggaccctgctggccaccgtggatgagaccatccccctgctgcctgccagcacccaccgggagattgagatggcccagaagctgctgaacagcgacctgggggagctgatcaacaagatgaagctggcccagcagtatgtgatgaccagcctgcagcaggagtacaagaagcagatgctgacagctgcccacgccctggccgtggatgccaagaacctgctggatgtgattgaccaggcccggctgaagatgctgggccagacccggccccactag

SEQ ID NO: 308328 - DNA, 2163 bp, Artificial Sequence
  derived and/or modified sequence
atggctgacctgattgatggctactgccgcctggtgaatggcaccagccagagcttcatcatccggccccagaaggagggggagcgggccctgcccagcatccccaagctggccaacagcgagaagcagggcatgaggacccatgctgtgtctgtgtctgaaacagatgattatgcagagatcattgatgaggaggacacctacaccatgcccagcaagagctatggaattgatgaggcccgggactatgagatccagcgggagcgcatcgagctgggccgctgcatcggggagggccagtttggagatgtgcaccagggcatctacatgagcccagaaaatcctgccctggccgtggccatcaagacctgcaagaactgcaccagtgacagcgtgcgggagaagttcctgcaggaggccctgaccatgaggcagtttgaccacccccacatcgtgaagctgattggagtcatcacagagaaccctgtgtggatcatcatggagctgtgcaccctgggggagctgcgctccttcctgcaggtgaggaagtacagcctggacctggccagcctcatcctgtatgcctaccagctgagcacagccctggcctacctggagagcaagagatttgtgcaccgggacattgctgccagaaatgtgctggtgagcagcaatgactgtgtgaagctgggggactttggcctgagccgctacatggaggacagcacctactacaaggccagcaagggcaagctgcccatcaagtggatggcccctgagagcatcaacttccgccgcttcaccagcgccagtgatgtgtggatgtttggagtgtgcatgtgggagatcctgatgcacggcgtgaagcccttccagggcgtgaagaacaatgatgtgattggaagaattgaaaatggagagcggctgcccatgccacccaactgcccccccaccctgtacagcctgatgaccaagtgctgggcctatgaccccagcagaagaccccgcttcacagagctgaaggcccagctgagcaccatcctggaggaggagaaggcccagcaggaggagaggatgaggatggagagccggcggcaggccaccgtgtcctgggacagcggcggcagtgatgaggccccacccaagcccagccggcccggctaccccagccccaggagcagcgagggcttctaccccagcccccagcacatggtgcagaccaaccactaccaggtgtctggctacccaggcagccacggcatcacagccatggccggcagcatctacccaggccaggccagcctgctggaccagacagacagctggaaccaccggccccaggagatcgccatgtggcagcccaacgtggaggacagcacagtgctggacctgcggggcatcggccaggtgctgcccacccacctgatggaggagcggctcatccggcagcagcaggagatggaggaggaccagcgctggctggagaaggaggagcgcttcctgaagccagatgtgcggctgagccggggcagcattgacagagaagatggcagcctgcagggccccatcggcaaccagcacatctaccagcctgtgggcaagccagaccctgctgccccacccaagaagccacccaggcctggggcccctggccacctgggcagcctggccagcctgagcagccctgctgacagctacaatgaaggagtgaagctgcagccccaggagatcagccccccacccacagccaacctggacaggagcaatgacaaggtgtatgaaaatgtgacaggcctggtgaaggccgtcatcgagatgagcagcaagatccagcctgcccctcctgaggagtatgtgcccatggtgaaggaggtgggcctggccctgcggaccctgctggccaccgtggatgagaccatccccctgctgcctgccagcacccaccgggagattgagatggcccagaagctgctgaacagcgacctgggggagctgatcaacaagatgaagctggcccagcagtatgtgatgaccagcctgcagcaggagtacaagaagcagatgctgacagctgcccacgccctggccgtggatgccaagaacctgctggatgtgattgaccaggcccggctgaagatgctgggccagacccggccccactag

SEQ ID NO: 308329 - DNA, 2175 bp, Artificial Sequence
  derived and/or modified sequence
atcgccgagaacatggccgacctgatcgacggctactgccggctggtgaacggtacaagtcagagtttcattatccggcctcaaaaggagggtgaacgggccttgccctcaatcccgaagctcgctaatagtgaaaaacaaggtatgaggacgcacgcagtgtcagtgtctgagacagatgattacgccgagatcattgatgaggaagacacatacaccatgccctccaagtcttacggtattgacgaagcccgcgattatgagatccaacgtgagagaatcgaacttggtcgatgcattggcgaagggcaatttggcgacgtgcatcaaggtatttatatgagtccggagaatccagcactggccgtagccatcaaaacatgcaaaaattgcacatccgatagcgtgcgcgaaaaattccttcaggaagccttgaccatgcggcagttcgaccacccacacatcgtaaagcttatcggcgtaattaccgagaatccagtgtggatcattatggaactgtgtactctcggagaactgcggagttttttacaagtgagaaagtacagtcttgacctggcctccctgattttatacgcctaccagctgagcacggccctggcctacctggagtcaaagcgtttcgttcatcgtgatatagcagctaggaacgtactcgtgtcttccaacgattgcgtgaagctaggtgactttggcctcagtaggtatatggaggattcaacgtattataaggccagcaagggcaagctgcctatcaagtggatggctcccgagtccatcaatttccgccgcttcacttcagcttccgatgtctggatgttcggcgtgtgcatgtgggaaatcctcatgcacggcgtcaaacctttccaaggtgttaaaaacaacgatgttattggcaggatcgaaaatggagagcgccttcctatgccccctaactgccctcccactttgtactcccttatgaccaagtgctgggcttatgacccgtcccgccggccacgattcacggaattgaaggcccagctgtctactatattagaggaggaaaaggcacaacaggaagaaaggatgcggatggagtcacgacgacaggccaccgtgtcatgggattcaggagggagtgacgaggcacctccgaaacctagcaggccaggatatccatctccacggtcaagtgaaggattctacccgagcccccaacacatggtgcagactaatcactatcaagtcagtgggtatcccggctcccatggtattacggcgatggccgggtctatttatccgggccaggcctccttactggatcaaaccgactcgtggaaccaccggccgcaggagattgctatgtggcagcccaacgtggaagactccacagtgctcgacctgagaggtatcggacaggtgttgccgacccatcttatggaggaacggctaattagacaacagcaggagatggaagaggaccaaaggtggctcgagaaggaggagcgttttctgaaaccagatgtaagactgagtcgcggatccatcgaccgcgaagacggatcgttacagggtccaattgggaaccagcacatttatcagcccgtagggaagcctgatcccgctgccccacccaagaagccgcctagacccggtgcacccggccatttgggcagtttggcttccttaagtagcccggctgactcgtacaatgagggcgtgaaactccagccccaggaaataagtccaccacctacagccaacttggacagatccaatgacaaagtatacgagaatgtaaccgggcttgtgaaggccgtgattgagatgagctctaaaatccagccagcccctccggaagagtatgtcccaatggttaaagaggtgggcctggctcttagaacccttctggctaccgtcgacgagacaattcccttactgcctgccagcactcacagagaaattgaaatggcccaaaagctgctgaactctgatctcggcgaactgataaataagatgaagcttgcgcagcagtacgttatgacttctctgcaacaggagtataaaaagcagatgctgaccgccgctcacgctctggcggtagatgctaagaatctactggatgtcattgaccaggctcgcttaaaaatgttggggcagactagaccgcactag

SEQ ID NO: 308330 - DNA, 2163 bp, Artificial Sequence
  derived and/or modified sequence
atggccgacctgatcgacggctactgccggctggtgaacggcaccagccaatccttcatcatccgccctcagaaagagggcgaaagggctctgccatccattcccaaactcgccaattctgagaaacagggcatgcgaacccacgccgtgagcgtgtcagagacagacgactatgccgagatcatcgatgaggaggacacctacaccatgccttccaagagctatggaatagatgaagcacgcgattacgagatccagcgggagagaatcgagctgggcaggtgtattggcgaggggcagtttggggacgtgcatcagggaatttatatgtctcccgagaaccctgcactggctgtggcaatcaaaacctgcaaaaactgcacgtctgattccgtgcgggagaaattccttcaagaggctctcactatgaggcagttcgaccatccgcatatcgtcaaactgattggtgtgattaccgaaaatcccgtgtggattattatggaactgtgtacactaggtgagctgagaagtttcctccaggtgaggaagtattctctggacttagcctcacttatcctatacgcctatcaactctctaccgccctcgcatatttagagagtaaacggtttgtccatcgcgacatcgccgccaggaacgtcctggtgtcaagcaatgattgcgtgaaacttggcgatttcggcctgagccgctatatggaagattcgacttattataaagctagtaagggtaagctgcccatcaagtggatggcacccgaatcgatcaatttcagacgattcacatccgcgtctgatgtttggatgttcggagtttgcatgtgggagatcttgatgcacggggttaaacccttccagggcgtgaagaataatgatgttattggcagaatcgagaacggtgagcgattaccaatgccgccgaattgtcctcccacattatattccctcatgacaaagtgctgggcctatgacccgtctcgccgccctcgattcacagaacttaaggctcaattgagcaccatactcgaggaagagaaggcacagcaggaagaaagaatgcgcatggaatctcgccggcaagctacagtgtcgtgggactcaggcgggtccgacgaggcgccacctaagccatcccggccgggctatccctctccacggagctccgagggcttctatcccagcccgcaacatatggtccagaccaaccactaccaggtctccgggtaccccgggagtcatgggatcacagctatggctggtagtatttacccgggacaggcctccttgctggatcagaccgactcttggaatcacagaccgcaggagatcgccatgtggcagcccaacgtagaggattcaactgtccttgacttacgtggaatcggacaggtcctgcccacccaccttatggaagagagactgatccggcagcagcaagagatggaggaagaccagcggtggttggaaaaagaggagcgctttctgaagcccgacgtgagattgtcacgagggtctattgaccgggaggatggctcattgcagggtccaattgggaatcagcatatttatcaacctgttggcaagccggatccggccgctcctcctaaaaagcccccacggcctggtgcccctggccaccttggctccctggcgtccttatcatctcccgccgatagctataacgaaggggtgaaattgcaacctcaggaaatctcacctccccccaccgctaacctggacagaagcaacgataaggtctacgaaaatgtcactggcttagttaaggctgtaattgagatgtccagtaaaatacagccggcgccacctgaagaatatgtgccaatggtcaaagaagtaggtctcgcactgaggaccctcctcgccaccgtcgacgagactatccctctgctccccgcttcaacacacagagaaattgagatggctcaaaaacttctgaatagcgacctgggagagctgattaacaagatgaaacttgcccagcagtatgtgatgacatctctacaacaagagtacaaaaagcagatgctcaccgccgcccacgccttagcagtggatgcaaagaacctgctggacgtgatcgatcaggcccggcttaagatgctcggtcaaactcgccctcattag

SEQ ID NO: 308331 - DNA, 2175 bp, Artificial Sequence
  derived and/or modified sequence
atcgccgagaatatggccgatcttatcgacggttattgtaggctggtgaacgggacatcccaaagctttatcatacgaccccagaaagagggggagcgcgcactccccagcatcccaaaactcgcaaactccgaaaagcaaggaatgcggacgcacgcggtatcagtatccgagacagacgactacgctgaaatcatagatgaagaggatacctacaccatgcctagtaagtcttacggaatcgatgaggcaagagattacgaaatccagcgagagcgcatagagctaggcagatgtatcggggaagggcagttcggtgatgttcaccaaggcatttatatgtcgcccgagaacccagctctcgcagtcgcaatcaagacctgcaagaattgcacctccgattcggttcgggagaaattcctacaggaggccctcactatgcgacagttcgatcatccccacatagtgaaattaatcggggtaataaccgagaatcctgtttggattattatggagctgtgtacgctgggagaacttcgatccttcctgcaagtgcggaagtacagcctcgatcttgcgtccctgatcctctatgcttaccagctgtctactgccttagcataccttgagtcaaagagatttgtgcaccgggacatcgccgctcgcaacgtactcgttagcagtaacgactgtgtgaaactcggcgattttgggctgagcaggtacatggaggattctacctattataaggccagcaaggggaagctcccaatcaaatggatggcgccagagtccattaatttcagacgatttacatccgcaagcgacgtgtggatgttcggcgtgtgcatgtgggagattttgatgcatggggtgaagccattccagggagtgaaaaataatgacgtaattggccgaattgagaatggggagcggcttcctatgcctccgaattgtcctcctaccctgtattctcttatgacaaagtgttgggcctacgacccctctcggaggcccagattcaccgaacttaaggcccagctgtctacaatcctggaggaggaaaaagcccagcaagaggaaagaatgaggatggagtcgcggaggcaagcgacagtatcttgggacagtggtggctcagacgaggcccctcctaaacctagtcgcccagggtaccctagccccagatcatctgaagggttttatccatctccccaacacatggtccaaaccaaccactaccaggtgtcagggtatcccggatcccacgggataaccgcgatggctggttcaatctatcccggacaggcttcattgctcgaccagactgattcctggaaccacagaccccaggagatagccatgtggcagccgaatgtggaagactcaacagtacttgacttgcggggaataggccaagtcctcccaactcacctgatggaagagaggctgatcaggcagcagcaggagatggaggaggatcagcgatggctcgagaaagaagagcgcttccttaaacctgacgtgcggttgtcaagagggagtatcgacagggaggacggctcgctgcagggtcccatcggaaatcagcatatctaccagccagttggtaagcccgaccctgcggcaccacccaaaaagcctccccgtcctggagcaccaggacacttgggttccttagcatcgctatctagtcctgcagacagctacaatgagggggtgaaacttcagccccaggagatctctccacctccaaccgccaacctggatcggtctaacgataaggtatatgaaaatgtcactggactggtgaaggcggtaattgagatgtcctcaaaaattcagccagcaccacctgaagagtacgtaccaatggtgaaggaggtcggactggcactccgtactctgttggcaacggtagatgaaacgattccgctattgccggcatccacacaccgcgagatcgagatggcccaaaagcttctgaactcagacctaggagagctgataaacaagatgaaactcgcccagcagtacgtcatgacaagcttacaacaagaatataagaaacagatgctaactgccgctcacgccctggcagttgatgcaaaaaacctcctggatgtgatcgatcaagcaagactcaagatgctggggcaaacacgtccacactag

SEQ ID NO: 308332 - DNA, 2163 bp, Artificial Sequence
  derived and/or modified sequence
atggcagacctgatagacggatactgtaggctggtcaatggcaccagccagtcgttcataattagacctcaaaaggagggcgagagggcacttcccagcatccccaagctggctaacagcgagaaacagggaatgagaacacatgccgtttctgtgtccgaaactgatgattatgccgagatcattgacgaagaagatacttacaccatgcctagcaaaagctacgggattgacgaagccagagattacgagatccagcgcgagagaatcgagttgggccgatgcatcggggagggccaatttggagatgtgcatcaaggaatatatatgtcccctgagaatcccgctctcgctgtcgcgataaaaacgtgcaaaaactgcacctcagatagcgtccgagaaaagttcctccaagaagctttgacaatgaggcaattcgatcacccacacattgttaaattgatcggagttataactgaaaacccagtgtggatcatcatggagttgtgtacattgggagagctgcgctcttttcttcaggttcgtaagtattctttggacctggcatctctgattctgtatgcctaccagctgagcactgcgctagcgtacctggagtctaaaagatttgtgcacagagatatagcagcacgcaacgtcctggtatcttccaacgactgcgtcaaattgggggacttcgggctgtcccgctatatggaggactccacctattataaagcttccaaaggcaaattgcccattaagtggatggcgcctgaaagcatcaattttagacggtttacatccgcttctgatgtgtggatgttcggcgtctgtatgtgggaaatactaatgcacggcgtgaaaccatttcagggtgtcaagaataacgatgtgattggcagaattgagaacggcgaaaggttgccaatgcccccaaattgcccccctaccctttactctttgatgacaaaatgctgggcctacgatccctcccgtcggcctcgcttcaccgaactgaaggcccagctgagcacgattctagaagaggaaaaggctcagcaagaggagcggatgcgaatggagtctcggagacaggcaactgtatcctgggacagcgggggtagcgatgaggcacctccaaaaccgtctcgcccaggttacccaagccctcgcagctcagaggggttctacccctccccccagcacatggttcaaaccaaccattatcaagtcagtggttatccaggtagccatgggattacggcgatggcgggatccatctatcccggacaggccagcctcctggatcagacagatagctggaatcatagaccgcaggagatcgcaatgtggcagccaaacgtggaggacagtaccgtgttagacttgagaggcatcgggcaggtgttgcccactcacctcatggaagaaagactgatcagacagcagcaggaaatggaagaggaccaacgctggctggaaaaggaagagcggtttctcaagcctgatgtgcgactgagtcgtggttccattgacagagaagacggatcactccagggcccaattggaaatcagcatatctatcagcccgttgggaaacctgaccctgccgcaccccctaaaaagccgcctaggcctggagcacccggtcatcttggctcacttgccagcttgtccagtcccgcagacagctataatgagggagtgaagttgcagccccaggagatcagcccgccacctaccgctaacctagaccgttccaatgataaagtttatgagaacgtcacgggtctggttaaagcagtaatcgagatgagctcaaaaatccaaccagcgccaccagaggaatacgtgcctatggtcaaagaggtggggctcgcgttgaggaccctcctggcgactgtggatgaaacgatcccgctccttccagcatctacacaccgtgaaattgaaatggctcaaaagttattgaatagcgatctaggtgaactcattaacaaaatgaagcttgcccaacagtatgtgatgacctcactccaacaggagtataaaaaacaaatgctgaccgccgctcacgctctggcagttgatgcaaagaacctgctggacgtgatcgaccaggcaagactaaaaatgctaggacagacccgaccgcactag

SEQ ID NO: 308333 - DNA, 3236 bp, Artificial Sequence
  derived and/or modified sequence
attgcggagaatatggctgacctaatagatgggtactgccggctggtgaatggaacctcgcagtcatttatcatcagacctcagaaagaaggtgaacgggctttgccatcaataccaaagttggccaacagcgaaaagcaaggcatgcggacacacgccgtctctgtgtcagaaacagatgattatgctgagattatagatgaagaagatacttacaccatgccctcaaaaagctatggaatagatgaagccagggattatgagattcaaagagaaagaatagaacttggacgatgtattggagaaggccaatttggagatgtacatcaaggcatttatatgagtccagagaatccagctttggcggttgcaattaaaacatgtaaaaactgtacttcggacagcgtgagagagaaatttcttcaagaagccttaacaatgcgtcagtttgaccatcctcatattgtgaagctgattggagtcatcacagagaatcctgtctggataatcatggagctgtgcacacttggagagctgaggtcatttttgcaagtaaggaaatacagtttggatctagcatctttgatcctgtatgcctatcagcttagtacagctcttgcatatctagagagcaaaagatttgtacacagggacattgctgctcggaatgttctggtgtcctcaaatgattgtgtaaaattaggagactttggattatcccgatatatggaagatagtacttactacaaagcttccaaaggaaaattgcctattaaatggatggctccagagtcaatcaattttcgacgttttacctcagctagtgacgtatggatgtttggtgtgtgtatgtgggagatactgatgcatggtgtgaagccttttcaaggagtgaagaacaatgatgtaatcggtcgaattgaaaatggggaaagattaccaatgcctccaaattgtcctcctaccctctacagccttatgacgaaatgctgggcctatgaccccagcaggcggcccaggtttactgaacttaaagctcagctcagcacaatcctggaggaagagaaggctcagcaagaagagcgcatgaggatggagtccagaagacaggccacagtgtcctgggactccggagggtctgatgaagcaccgcccaagcccagcagaccgggttatcccagtccgaggtccagcgaaggattttatcccagcccacagcacatggtacaaaccaatcattaccaggtttctggctaccctggttcacatggaatcacagccatggctggcagcatctatccaggtcaggcatctcttttggaccaaacagattcatggaatcatagacctcaggagatagcaatgtggcagcccaatgtggaggactctacagtattggacctgcgagggattgggcaagtgttgccaacccatctgatggaagagcgtctaatccgacagcaacaggaaatggaagaagatcagcgctggctggaaaaagaggaaagatttctgaaacctgatgtgagactctctcgaggcagtattgacagggaggatggaagtcttcagggtccgattggaaaccaacatatatatcagcctgtgggtaaaccagatcctgcagctccaccaaagaaaccgcctcgccctggagctcccggtcatctgggaagccttgccagcctcagcagccctgctgacagctacaacgagggtgtcaagcttcagccccaggaaatcagcccccctcctactgccaacctggaccggtcgaatgataaggtgtacgagaatgtgacgggcctggtgaaagctgtcatcgagatgtccagtaaaatccagccagccccaccagaggagtatgtccctatggtgaaggaagtcggcttggccctgaggacattattggccactgtggatgagaccattcccctcctaccagccagcacccaccgagagattgagatggcacagaagctattgaactctgacctgggtgagctcatcaacaagatgaaactggcccagcagtatgtcatgaccagcctccagcaagagtacaaaaagcaaatgctgactgctgctcacgccctggctgtggatgccaaaaacttactcgatgtcattgaccaagcaagactgaaaatgcttgggcagacgagaccacactgagcctcccctaggagcacgtcttgctaccctcttttgaagatgttctctagccttccaccagcagcgaggaattaaccctgtgtcctcagtcgccagcacttacagctccaacttttttgaatgaccatctggttgaaaaatctttctcatataagtttaaccacactttgatttgggttcattttttgttttgtttttttcaatcatgatattcagaaaaatccaggatccaaaatgtggcgtttttctaagaatgaaaattatatgtaagcttttaagcatcatgaagaacaatttatgttcacattaagatacgttctaaagggggatggccaaggggtgacatcttaattcctaaactaccttagctgcatagtggaagaggagagcatgaagcaaagaattccaggaaacccaagaggctgagaattcttttgtctaccatagaattattatccagactggaatttttgtttgttagaacacccttcagttgcaatatgctaatcccactttacaaagaatataaaagctatattttgaagacttgagttatttcagaaaaaactacagccctttttgtcttacctgccttttactttcgtgtggatatgtgaagcattgggtcgggaactagctgtagaacacaactaaaaactcatgtcttttttcacagaataatgtgccagttttttgtagcaatgttatttctcttggaagcagaaatgctttgtaccagagcacctccaaactgcattgaggagaagttccagaaccatcccctttttccatttttatataatttataaagaaagattaaagccatgttgactattttacagccactggagttaactaacccttccttgtatctgtcttcccaggagagaatgaagcaaaacaggaatttggttttcttttgatgtccagttacaccatccattctgttaattttgaaaaaatataccctccctttagtttgttgggggatataaattattctcaggaagaatataatgaactgtacagttactttgacctattaaaaaggtgttaccagt

SEQ ID NO: 308334 - protein, 362 aa, Artificial Sequence
  derived and/or modified sequence
MRMESRRQATVSWDSGGSDEAPPKPSRPGYPSPRSSEGFYPSPQHMVQTNHYQVSGYPGSHGITAMAGSIYPGQASLLDQTDSWNHRPQEIAMWQPNVEDSTVLDLRGIGQVLPTHLMEERLIRQQQEMEEDQRWLEKEERFLKPDVRLSRGSIDREDGSLQGPIGNQHIYQPVGKPDPAAPPKKPPRPGAPGHLGSLASLSSPADSYNEGVKLQPQEISPPPTANLDRSNDKVYENVTGLVKAVIEMSSKIQPAPPEEYVPMVKEVGLALRTLLATVDETIPLLPASTHREIEMAQKLLNSDLGELINKMKLAQQYVMTSLQQEYKKQMLTAAHALAVDAKNLLDVIDQARLKMLGQTRPH

SEQ ID NO: 308335 - DNA, 570 bp, Artificial Sequence
  derived and/or modified sequence
acgtaaattttaagaaacttgttgggatggttgtgttctaaagttaaggaatcaaggatgatgtcaagaatatgacagatacctagcatctagcaaaataatggcagctgcttaccttgaccccaacttgaatcacacaccaaattcgagtactaagactcacctgggtactggtatggaacgttctcctggtgcaatggagcgagtattaaaggtctttcattattttgaaagcaatagtgagccaaccacctgggccagtattatcaggcatggagatgctactgatgtcaggggcatcattcagaagatagtggacagtcacaaagtaaagcatgtggcctgctatggattccgcctcagtcacctgcggtcagaggaggttcactggcttcacgtggatatgggcgtctccagtgtgagggagaagtatgagcttgctcacccaccagaggagtggaaatatgaattgagaattcgttatttgccaaaaggatttctaaaccagtttactgaagataagccaactttgaatttcttctatcaacaggtgaagagcgattatatgtt

SEQ ID NO: 308336 - DNA, 3024 bp, Artificial Sequence
  derived and/or modified sequence
aaggccgagtacgacagatacctggccagcagcaagatcatggccgccgcctacctggaccccaacctgaaccacacccccaaggagtggaagtacgagctgagaatcagatacctgcccaagggcttcctgaaccagttcaccgaggacaagcccaccctgaacttcttctaccagcaggtgaagagcgactacatgctggagatcgccgaccaggtggaccaggagatcgccctgaagctgggctgcctggagatcagaagaagctactgggagatgagaggcaacgccctggagaagaagagcaactacgaggtgctggagaaggacgtgggcctgaagagattcttccccaagagcctgctggacagcgtgaaggccaagaccctgagaaagctgatccagcagaccttcagacagttcgccaacctgaacagagaggagagcatcctgaagttcttcgagatcctgagccccgtgtacagattcgacaaggagtgcttcaagtgcgccctgggcagcagctggatcatcagcgtggagctggccatcggccccgaggagggcatcagctacctgaccgacaagggctgcaaccccacccacctggccgacttcacccaggtgcagaccatccagtacagcaacagcgaggacaaggacagaaagggcatgctgcagctgaagatcgccggcgcccccgagcccctgaccgtgaccgcccccagcctgaccatcgccgagaacatggccgacctgatcgacggctactgcagactggtgaacggcaccagccagagcttcatcatcagaccccagaaggagggcgagagagccctgcccagcatccccaagctggccaacagcgagaagcagggcatgagaacccacgccgtgagcgtgagcggcgtgagccactgccagcacaaggtgaagaaggccagaagattcctgcccctggtgttctgcagccacgacccccccagcaccgacgagatcagcggcgacgagaccgacgactacgccgagatcatcgacgaggaggacacctacaccatgcccagcatcaagagctactgcatcgacgtggccagagactacgagatccagagagagagaatcgagctgggcagatgcatcggcgagggccagttcggcgacgtgcaccagggcatctacatgagccccgagaaccccgccctggccgtggccatcaagacctgcaagaactgcaccagcgacagcgtgagagagaagttcctgcaggaggccctgaccatgagacagttcgaccacccccacatcgtgaagctgatcggcgtgatcaccgagaaccccgtgtggatcatcatggagctgtgcaccctgggcgagctgagaagcttcctgcaggtgagaaagtacagcctggacctggccagcctgatcctgtacgcctaccagctgagcaccgccctggcctacctggagagcaagagattcgtgcacagagacatcgccgccagaaacgtgctggtgagcagcaacgactgcgtgaagctgggcgacttcggcctgagcagatacatggaggacagcacctactacaaggccagcaagggcaagctgcccatcaagtggatggcccccgagagcatcaacttcagaagattcaccagcgccagcgacgtgtggatgttcggcgtgtgcatgtgggagatcctgatgcacggcgtgaagcccttccagggcgtgaagaacaacgacgtgatcggcagaatcgagaacggcgagagactgcccatgccccccaactgcccccccaccctgtacagcctgatgaccaagtgctgggcctacgaccccagcagaagacccagattcaccgagctgaaggcccagctgagcaccatcctggaggaggagaaggcccagcaggaggagagaatgagaatggagagcagaagacaggccaccgtgagctgggacagcggcggcagcgacgaggccccccccaagcccagcagacccggctaccccagccccagaagcagcgagggcttctaccccagcccccagcacatggtgcagaccaaccactaccaggtgagcggctaccccggcagccacggcatcaccgccatggccggcagcatctaccccggccaggccagcctgctggaccagaccgacagctggaaccacagaccccaggagatcgccatgtggcagcccaacgtggaggacagcaccgtgctggacctgagaggcatcggccaggtgctgcccacccacctgatggaggagagactgatcagacagcagcaggagatggaggaggaccagagatggctggagaaggaggagagattcctgaagcccgacgtgagactgagcagaggcagcatcgacagagaggacggcagcctgcagggccccatcggcaaccagcacatctaccagcccgtgggcaagcccgaccccgccgccccccccaagaagccccccagacccggcgcccccggccacctgggcagcctggccagcctgagcagccccgccgacagctacaacgagggcgtgaagcccctgagactgcagccccaggagatcagccccccccccaccgccaacctggacagaagcaacgacaaggtgtacgagaacgtgaccggcctggtgaaggccgtgatcgagatgagcagcaagatccagcccgccccccccgaggagtacgtgcccatggtgaaggaggtgggcctggccctgagaaccctgctggccaccgtggacgagaccatccccctgctgcccgccagcacccacagagagatcgagatggcccagaagctgctgaacagcgacctgggcgagctgatcaacaagatgaagctggcccagcagtacgtgatgaccagcctgcagcaggagtacaagaagcagatgctgaccgccgcccacgccctggccgtggacgccaagaacctgctggacgtgatcgaccaggccagactgaagatgctgggccagaccagaccccactag

SEQ ID NO: 308337 - DNA, 3024 bp, Artificial Sequence
  derived and/or modified sequence
aaggcagaatatgacaggtacttggcgtctagtaagatcatggccgccgcctaccttgaccccaaccttaaccacactcctaaggaatggaagtacgagctcagaatccgctatttacccaagggattcttaaatcagttcaccgaggataagcctactctcaacttcttttatcagcaggtgaagtcagattacatgttggaaatagccgatcaggtggaccaggagatcgctctgaagctggggtgtctcgagatccgccggagctactgggagatgagaggcaacgcactcgagaagaagagtaactacgaggtgttggaaaaagatgttggcctaaagcgcttcttccccaaaagcctgctagactcagtcaaagcaaagacgttgcgaaagctgatccaacagactttcagacaattcgccaatttgaacagagaggagtcaatcctgaagttttttgaaattctgagccccgtgtataggtttgacaaagagtgctttaagtgtgccctgggatcctcttggatcatttcagttgagttggccattggcccggaagaggggatctcatatttgacagataaaggctgcaacccaacccacttggcggatttcactcaggtgcagacaatccagtactcaaacagtgaggacaaagacagaaaagggatgctccagctgaagattgccggcgcgccggagcccctgaccgttacagccccttctcttaccattgccgagaatatggccgatctgatcgatgggtattgccgccttgttaatggaactagtcaatcatttatcattcggccacagaaagagggagagcgcgccttgcctagcatccctaagctggccaattctgagaagcaggggatgaggacgcacgcagtctcggttagtggagtgtctcattgccaacacaaggtgaagaaggcccgtcgtttccttcccctggtcttctgcagtcacgatccacctagtactgatgaaatcagtggcgacgagacggatgattatgccgaaattatcgatgaagaggacacatacacaatgccatccatcaagagctactgtattgatgtggctcgggactatgagattcagcgggaaagaattgagctgggacggtgcataggcgaaggccaatttggggatgtccaccagggtatctatatgtctcccgagaaccctgccctggctgtcgctattaaaacttgcaaaaattgcacaagcgacagcgtaagagaaaaattcctgcaggaagcgcttaccatgcggcaatttgatcaccctcacatcgtcaaactcatcggagttattacagagaatcccgtttggattataatggagctttgcactttgggagagctccgctcgttcctccaggtccgaaagtatagtttggatctggcctcattaatcctgtatgcctatcagctctctacggcactcgcatacctcgagtctaagcggttcgtacatagagacattgcggccaggaacgtgctcgtcagtagcaatgactgtgtgaaactaggcgacttcggcttgtctcgttacatggaggacagtacttactacaaggcctctaagggtaaactgcccataaagtggatggcacctgaaagcattaacttccggcggtttaccagcgcctcggacgtttggatgttcggggtctgcatgtgggaaatactcatgcatggggtgaagccatttcagggagtcaaaaacaacgacgtgatcggacgaattgaaaatggcgaaagactaccaatgccccccaattgccctcctaccctgtactcactcatgaccaagtgctgggcttatgacccatctcgtcggccaaggtttacagagcttaaagctcagttatctactattttggaggaagagaaagctcaacaggaggaacgaatgagaatggaaagcagacgtcaggcaactgtctcgtgggacagcggggggagtgatgaggccccaccaaagccaagccgccccgggtatccgtcccccagaagctcagaaggtttctacccaagtcctcaacacatggttcagacgaaccactatcaggtgtctgggtatcctggaagtcacggtattacggccatggccggcagtatctatcctggtcaggcatccctgctggatcaaaccgactcttggaatcatagacctcaggagatcgccatgtggcagcccaatgtcgaggatagtactgtcctcgacctgagaggtatcgggcaggtgcttccaactcacctgatggaggaaaggttgatccgacagcagcaggaaatggaagaggatcagaggtggttggagaaggaagaaagattcctgaagccggacgtgaggctgtcccggggcagcatcgaccgcgaggacgggtcactacagggacccataggcaatcagcatatttatcagcccgtgggaaagccggacccggctgctccgcccaagaaaccaccccgaccgggagcccccggacatctcggctctctggccagtctgtccagccctgccgactcgtacaacgagggtgttaagccactgcggttgcagccacaggaaatttcgcccccacctaccgcgaacttggatcgtagcaatgacaaggtatacgagaacgtgaccggattagttaaagcggttatcgaaatgagtagtaaaattcaaccagcaccgcctgaggaatatgtgcccatggtgaaagaggttggcctcgccctcaggacgctcctcgcaacagtggatgaaaccattcccctcttacccgccagcacccatcgtgaaatagaaatggctcagaaactgttgaactccgatttgggcgagctaattaataaaatgaagctggcccagcaatatgtcatgaccagcttgcaacaagaatacaaaaaacaaatgcttacagccgctcacgctctagccgtagatgctaagaatctgcttgacgtcattgatcaagcgcgcctaaaaatgctgggacagactaggccccattag

SEQ ID NO: 308338 - DNA, 3024 bp, Artificial Sequence
  derived and/or modified sequence
aaggccgagtatgaccgctacctggccagcagcaagatcatggccgccgcctacctggaccccaacctgaaccacacccccaaggagtggaagtatgagctgcgcatccgctacctgcccaagggcttcctgaaccagttcacagaggacaagcccaccctgaacttcttctaccagcaggtgaagagtgactacatgctggagattgctgaccaggtggaccaggagatcgccctgaagctgggctgcctggagatcagaagaagctactgggagatgagaggaaatgccctggagaagaagagcaactatgaggtgctggagaaggatgtgggcctgaagcgcttcttccccaagagcctgctggacagcgtgaaggccaagaccctgaggaagctgatccagcagaccttccggcagtttgccaacctgaaccgggaggagagcatcctgaagttctttgagatcctgagccctgtgtacagatttgacaaggagtgcttcaagtgtgccctgggcagctcctggatcatctctgtggagctggccatcggccctgaggagggcatctcctacctgacagacaagggctgcaaccccacccacctggccgacttcacccaggtgcagaccatccagtacagcaacagcgaggacaaggacaggaagggcatgctgcagctgaagattgctggggcccctgagcccctgactgtgacagcccccagcctgaccatcgccgagaacatggctgacctgattgatggctactgccgcctggtgaatggcaccagccagagcttcatcatccggccccagaaggagggggagcgggccctgcccagcatccccaagctggccaacagcgagaagcagggcatgaggacccatgctgtgtctgtgtctggagtgagccactgccagcacaaggtgaagaaggcccggcgcttcctgcccctggtgttctgcagccatgacccccccagcacagatgagatctctggagatgaaacagatgattatgcagagatcattgatgaggaggacacctacaccatgcccagcatcaagagctactgcattgatgtggcccgggactatgagatccagcgggagcgcatcgagctgggccgctgcatcggggagggccagtttggagatgtgcaccagggcatctacatgagcccagaaaatcctgccctggccgtggccatcaagacctgcaagaactgcaccagtgacagcgtgcgggagaagttcctgcaggaggccctgaccatgaggcagtttgaccacccccacatcgtgaagctgattggagtcatcacagagaaccctgtgtggatcatcatggagctgtgcaccctgggggagctgcgctccttcctgcaggtgaggaagtacagcctggacctggccagcctcatcctgtatgcctaccagctgagcacagccctggcctacctggagagcaagagatttgtgcaccgggacattgctgccagaaatgtgctggtgagcagcaatgactgtgtgaagctgggggactttggcctgagccgctacatggaggacagcacctactacaaggccagcaagggcaagctgcccatcaagtggatggcccctgagagcatcaacttccgccgcttcaccagcgccagtgatgtgtggatgtttggagtgtgcatgtgggagatcctgatgcacggcgtgaagcccttccagggcgtgaagaacaatgatgtgattggaagaattgaaaatggagagcggctgcccatgccacccaactgcccccccaccctgtacagcctgatgaccaagtgctgggcctatgaccccagcagaagaccccgcttcacagagctgaaggcccagctgagcaccatcctggaggaggagaaggcccagcaggaggagaggatgaggatggagagccggcggcaggccaccgtgtcctgggacagcggcggcagtgatgaggccccacccaagcccagccggcccggctaccccagccccaggagcagcgagggcttctaccccagcccccagcacatggtgcagaccaaccactaccaggtgtctggctacccaggcagccacggcatcacagccatggccggcagcatctacccaggccaggccagcctgctggaccagacagacagctggaaccaccggccccaggagatcgccatgtggcagcccaacgtggaggacagcacagtgctggacctgcggggcatcggccaggtgctgcccacccacctgatggaggagcggctcatccggcagcagcaggagatggaggaggaccagcgctggctggagaaggaggagcgcttcctgaagccagatgtgcggctgagccggggcagcattgacagagaagatggcagcctgcagggccccatcggcaaccagcacatctaccagcctgtgggcaagccagaccctgctgccccacccaagaagccacccaggcctggggcccctggccacctgggcagcctggccagcctgagcagccctgctgacagctacaatgaaggagtgaagcccctgcggctgcagccccaggagatcagccccccacccacagccaacctggacaggagcaatgacaaggtgtatgaaaatgtgacaggcctggtgaaggctgtgattgagatgagcagcaagatccagcctgcccctcctgaggagtatgtgcccatggtgaaggaggtgggcctggccctgcggaccctgctggccaccgtggatgagaccatccccctgctgcctgccagcacccaccgggagattgagatggcccagaagctgctgaacagcgacctgggggagctgatcaacaagatgaagctggcccagcagtatgtgatgaccagcctgcagcaggagtacaagaagcagatgctgacagctgcccacgccctggccgtggatgccaagaacctgctggatgtgattgaccaggcccggctgaagatgctgggccagacccggccccactag

SEQ ID NO: 308339 - DNA, 3024 bp, Artificial Sequence
  derived and/or modified sequence
aaggccgagtacgaccggtacctggccagcagcaagatcatggccgccgcatacctcgaccccaatctaaaccatactcctaaggagtggaagtacgaactgagaatccgatacctgcctaaaggatttctcaaccagtttacagaggataaaccgacactgaatttcttctatcagcaagtcaagagcgattatatgctggaaattgcggaccaggtggaccaggagatagcactgaagctcggttgtttagaaatccggaggtcctattgggagatgcgagggaatgctctggagaaaaaatcaaattatgaggtactagagaaggatgtggggttgaagcggttctttcctaaatctcttctggacagcgtgaaggctaaaactttaagaaaactcatccaacagacctttaggcaattcgccaacctaaatcgagaagagtccattctaaaatttttcgagatcctctccccggtctaccggtttgataaggagtgctttaagtgcgccttgggatcctcctggattattagcgtagaattagccattgggccggaagagggcatctcgtatctcaccgataaggggtgcaatcctacccatcttgccgactttacccaagtgcaaacaatccaatactcaaattcagaagacaaggaccgcaagggcatgctacagctgaagattgctggcgcacctgaacccctcaccgttacagcccccagcctgacgattgctgagaacatggctgacctcatcgacggatactgccggctggtaaatggcacttctcagtcatttataatccgacctcaaaaagaaggcgaaagagcactgccctctatccctaagctcgccaactcggagaaacagggcatgcgaacccacgcagtgtctgtgtccggtgtcagccactgccaacacaaagtcaagaaggcaagaaggttcctacccctcgtgttttgcagtcacgatccgccctccaccgacgagatttccggtgacgagaccgatgattatgccgagatcattgatgaggaggacacatacacaatgccatccattaaatcatactgcatcgatgttgctcgggactacgaaattcagagagagagaatcgagctcgggaggtgcataggcgagggccagtttggggacgtacatcagggtatttacatgtcacccgagaatcccgccttggccgtggccatcaagacatgcaaaaactgtaccagcgacagtgttcgggagaaattcctgcaggaggctcttactatgcgccaattcgaccacccccacatagtgaaattaataggggtcataaccgaaaaccccgtgtggatcataatggaattgtgcaccctcggagagctcaggtccttcttacaggttaggaaatactctttagacctcgcctccttgatcctgtatgcataccagttgtccaccgcgctcgcctacttggaatccaagcgattcgtgcaccgcgatattgcggcaagaaacgtactggtgtcatccaacgattgtgtgaagctcggggactttggcttgtcaaggtacatggaggattcaacgtattacaaggctagcaaagggaaactgccgattaagtggatggcgcctgaatctattaactttcgacgattcacatccgccagcgacgtgtggatgtttggagtgtgtatgtgggagatactgatgcatggcgtgaagccattccagggcgtgaagaataatgatgtcattgggcggatcgagaacggcgagcgtctaccaatgccgccaaattgccctcctacgctgtattccctgatgaccaaatgttgggcgtacgatccttctagaagaccaagattcaccgagctgaaggcccagttgagtaccatactggaggaggaaaaagctcagcaggaagagcggatgcggatggagtctcggcggcaggccaccgtgtcctgggactcaggagggagcgatgaggcccctccaaagccctctaggccggggtatccatcccctcggtcttcagaggggttctacccaagcccgcagcatatggtgcaaaccaatcattaccaagtctcagggtaccccggctcccatggcattaccgcaatggccggatcaatttacccaggccaggctagtctcctggatcagactgactcttggaatcacagaccccaggagatcgcaatgtggcaacctaatgtagaagattctactgtccttgatctccggggaatcggacaagttctgcctacccatctgatggaggagcgcttgattcgccagcagcaggaaatggaggaggatcagcggtggctcgagaaggaagagaggtttctgaaacctgacgttaggctaagcaggggctccattgacagggaagacggcagccttcaaggccctatcggcaatcagcatatttatcaaccagttgggaagcccgaccctgcagctcctccaaaaaaaccacctcgccccggggcgcccggtcacctgggaagcctggcatccttgtcatcccccgcggattcctacaacgagggtgttaagcccctgagactccagccgcaagagatcagtcctcctccaactgctaacctggacaggtctaacgataaagtctatgagaatgtgacaggattggtgaaagctgtcattgaaatgtcctctaagatccaacccgcccccccggaggagtatgtcccgatggtgaaggaagtgggcctagcactgaggaccctgctagcgaccgtggatgagacgatccctctgctccccgcatccacccaccgtgaaattgaaatggcccagaagctcctcaacagcgatctaggggagctcattaacaagatgaaactagcccagcagtacgtgatgacaagtctgcagcaggagtacaaaaaacagatgctaactgctgcccatgccttagccgtggacgctaagaacctcttggacgtgatcgaccaggccaggttaaaaatgctgggccagactagaccacactag

SEQ ID NO: 308340 - DNA, 3024 bp, Artificial Sequence
  derived and/or modified sequence
aaagctgaatatgatcggtatctggcatcaagtaagatcatggccgcagcatatctcgatccaaatttgaatcatacccccaaagaatggaagtacgaactgcgcatcagatatctgcctaaaggttttctcaaccagtttacagaagacaagcctactcttaacttcttttatcagcaggtgaaatcagattatatgctggaaattgctgaccaggtcgaccaagaaattgccctcaagttaggctgcctggagattcgccgaagttactgggagatgcggggaaacgccctggaaaagaaatccaactacgaggttttggagaaggatgtcggccttaaaagattctttcccaagtctctgttggatagtgtaaaggcaaagacgttgcgaaagctaatccagcaaacgtttaggcagttcgccaacctgaaccgggaggagtccatcctaaaattttttgagatattatcacccgtgtaccgttttgataaagagtgtttcaagtgcgccctgggatcctcctggataatctcggtggaactggctattggtcctgaagaaggaatctcctacctgaccgataagggttgcaaccctacccatctggctgacttcacgcaggtccagacgatccaatatagtaactcagaagacaaagataggaaaggaatgcttcagttgaagattgctggcgcacccgaacccctcaccgtgacagcaccttctctcactatagctgagaacatggccgatttgatcgatggttactgcagactggttaatggtaccagccaatcctttatcattagaccgcagaaagagggggaacgtgccctgccaagcattccaaaacttgctaactccgaaaagcaggggatgcggacccacgccgtctccgtgagtggggttagccactgccagcacaaggttaagaaggctcggaggtttctgcccctggttttttgttcccatgacccaccatctacagacgagatcagtggcgacgagactgatgactacgctgagatcatagacgaggaggatacatacacaatgccgtcaattaagagctattgcattgatgtggcccgagactatgagatccagcgcgagcgaattgagctgggaagatgcattggagagggtcagtttggagacgttcaccaggggatttatatgagtcctgagaatccagccctggctgtggcaattaaaacctgtaagaactgtacctccgactccgtacgggagaagtttttgcaggaggctctgactatgagacaatttgaccacccccacatcgtgaagctgattggagtcattactgaaaaccctgtttggattattatggagctctgcactttgggagagttgagatcattcttacaggtgcggaagtattccctggatctcgcgtcactgatactgtatgcatatcagctgtcaacagcccttgcctacttggagagtaagcggtttgtgcacagggacatcgccgcacgcaacgtgctggtgtctagtaacgactgtgtgaaactgggcgatttcggcctttctcgctacatggaggactcaacctattataaggcctccaaagggaaactccccattaaatggatggctcctgaaagcattaatttcagacggtttacatctgcgagcgatgtttggatgtttggcgtgtgcatgtgggagattctaatgcatggcgtaaaacccttccagggcgtaaagaataatgatgtgatcggcagaatcgaaaacggggagagattgcccatgcccccaaactgtcctcccacactgtatagtctgatgacaaagtgttgggcctatgatccaagcaggcgaccacggtttacagaactcaaagcccaactttccactattctcgaggaggagaaggcccaacaggaagagagaatgcggatggaaagtaggcgtcaggcgacggttagctgggactcaggcggatccgatgaggcacctcccaagccttcgcgtcccggataccccagcccacggtcctccgaaggattttatccttcgccccagcatatggtgcagacaaaccactaccaagtttctggctaccccggaagccatggcattactgcaatggcaggctcaatctatccaggacaggcctcacttctggatcaaacagattcctggaaccaccgaccccaagaaatcgcaatgtggcagcccaacgtagaagactcgacagttctggacctccgtggaattggccaggtgttgcccacgcatctcatggaggagcgactcattaggcaacagcaagagatggaagaggaccagaggtggcttgagaaggaggagcgttttcttaagcccgacgttagactgagtagaggctcgatagatagggaggatggatctctgcagggccctatcgggaatcagcacatttatcagccagtgggcaagcccgaccctgccgcacctcctaaaaaacccccaaggccaggggcacccggtcacttagggtccctcgcttccttaagttctcccgcagatagttacaatgaaggcgtaaagcccctgcggctccaaccacaggagatctctcccccaccaaccgccaatttagaccggtccaacgataaagtctacgaaaatgtgaccggcctcgtgaaagcagtgattgaaatgagttcaaaaatccagcccgctccgcctgaggagtacgttcctatggtgaaagaagtcggattagcattgcgcaccctattggccactgttgacgagacaatccctcttcttcccgcaagcacccacagggagatcgagatggcccaaaaattgctcaactccgatctcggcgagctgatcaataagatgaaactggcccagcagtatgtaatgaccagcctgcagcaggagtacaagaaacaaatgttgacagctgcccacgccctcgctgtcgacgccaaaaatctcctcgatgttatcgaccaagctagattaaagatgctggggcagaccagaccgcattag

SEQ ID NO: 308341 - DNA, 4088 bp, Artificial Sequence
  derived and/or modified sequence
aaagcagaatatgacagatacctagcatctagcaaaataatggcagctgcttaccttgaccccaacttgaatcacacaccaaaggagtggaaatatgaattgagaattcgttatttgccaaaaggatttctaaaccagtttactgaagataagccaactttgaatttcttctatcaacaggtgaagagcgattatatgttagagatagctgatcaagtggaccaggaaattgctttgaagttgggttgtctagaaatacggcgatcatactgggagatgcggggcaatgcactagaaaagaagtctaactatgaagtattagaaaaagatgttggtttaaagcgattttttcctaagagtttactggattctgtcaaggccaaaacactaagaaaactgatccaacaaacatttagacaatttgccaaccttaatagagaagaaagtattctgaaattctttgagatcctgtctccagtctacagatttgataaggaatgcttcaagtgtgctcttggttcaagctggattatttcagtggaactggcaatcggcccagaagaaggaatcagttacctaacggacaagggctgcaatcccacacatcttgctgacttcactcaagtgcaaaccattcagtattcaaacagtgaagacaaggacagaaaaggaatgctacaactaaaaatagcaggtgcacccgagcctctgacagtgacggcaccatccctaaccattgcggagaatatggctgacctaatagatgggtactgccggctggtgaatggaacctcgcagtcatttatcatcagacctcagaaagaaggtgaacgggctttgccatcaataccaaagttggccaacagcgaaaagcaaggcatgcggacacacgccgtctctgtgtcaggagtcagtcactgccaacataaagttaagaaagctaggcgctttctccctttggtcttctgttcccatgatcctccttctacggatgaaattagtggggacgaaacagatgattatgctgagattatagatgaagaagatacttacaccatgccctcaattaaaagttattgtattgatgtagccagggattatgagattcaaagagaaagaatagaacttggacgatgtattggagaaggccaatttggagatgtacatcaaggcatttatatgagtccagagaatccagctttggcggttgcaattaaaacatgtaaaaactgtacttcggacagcgtgagagagaaatttcttcaagaagccttaacaatgcgtcagtttgaccatcctcatattgtgaagctgattggagtcatcacagagaatcctgtctggataatcatggagctgtgcacacttggagagctgaggtcatttttgcaagtaaggaaatacagtttggatctagcatctttgatcctgtatgcctatcagcttagtacagctcttgcatatctagagagcaaaagatttgtacacagggacattgctgctcggaatgttctggtgtcctcaaatgattgtgtaaaattaggagactttggattatcccgatatatggaagatagtacttactacaaagcttccaaaggaaaattgcctattaaatggatggctccagagtcaatcaattttcgacgttttacctcagctagtgacgtatggatgtttggtgtgtgtatgtgggagatactgatgcatggtgtgaagccttttcaaggagtgaagaacaatgatgtaatcggtcgaattgaaaatggggaaagattaccaatgcctccaaattgtcctcctaccctctacagccttatgacgaaatgctgggcctatgaccccagcaggcggcccaggtttactgaacttaaagctcagctcagcacaatcctggaggaagagaaggctcagcaagaagagcgcatgaggatggagtccagaagacaggccacagtgtcctgggactccggagggtctgatgaagcaccgcccaagcccagcagaccgggttatcccagtccgaggtccagcgaaggattttatcccagcccacagcacatggtacaaaccaatcattaccaggtttctggctaccctggttcacatggaatcacagccatggctggcagcatctatccaggtcaggcatctcttttggaccaaacagattcatggaatcatagacctcaggagatagcaatgtggcagcccaatgtggaggactctacagtattggacctgcgagggattgggcaagtgttgccaacccatctgatggaagagcgtctaatccgacagcaacaggaaatggaagaagatcagcgctggctggaaaaagaggaaagatttctgaaacctgatgtgagactctctcgaggcagtattgacagggaggatggaagtcttcagggtccgattggaaaccaacatatatatcagcctgtgggtaaaccagatcctgcagctccaccaaagaaaccgcctcgccctggagctcccggtcatctgggaagccttgccagcctcagcagccctgctgacagctacaacgagggtgtcaagcctctgagacttcagccccaggaaatcagcccccctcctactgccaacctggaccggtcgaatgataaggtgtacgagaatgtgacgggcctggtgaaagctgtcatcgagatgtccagtaaaatccagccagccccaccagaggagtatgtccctatggtgaaggaagtcggcttggccctgaggacattattggccactgtggatgagaccattcccctcctaccagccagcacccaccgagagattgagatggcacagaagctattgaactctgacctgggtgagctcatcaacaagatgaaactggcccagcagtatgtcatgaccagcctccagcaagagtacaaaaagcaaatgctgactgctgctcacgccctggctgtggatgccaaaaacttactcgatgtcattgaccaagcaagactgaaaatgcttgggcagacgagaccacactgagcctcccctaggagcacgtcttgctaccctcttttgaagatgttctctagccttccaccagcagcgaggaattaaccctgtgtcctcagtcgccagcacttacagctccaacttttttgaatgaccatctggttgaaaaatctttctcatataagtttaaccacactttgatttgggttcattttttgttttgtttttttcaatcatgatattcagaaaaatccaggatccaaaatgtggcgtttttctaagaatgaaaattatatgtaagcttttaagcatcatgaagaacaatttatgttcacattaagatacgttctaaagggggatggccaaggggtgacatcttaattcctaaactaccttagctgcatagtggaagaggagagcatgaagcaaagaattccaggaaacccaagaggctgagaattcttttgtctaccatagaattattatccagactggaatttttgtttgttagaacacccttcagttgcaatatgctaatcccactttacaaagaatataaaagctatattttgaagacttgagttatttcagaaaaaactacagccctttttgtcttacctgccttttactttcgtgtggatatgtgaagcattgggtcgggaactagctgtagaacacaactaaaaactcatgtcttttttcacagaataatgtgccagttttttgtagcaatgttatttctcttggaagcagaaatgctttgtaccagagcacctccaaactgcattgaggagaagttccagaaccatcccctttttccatttttatataatttataaagaaagattaaagccatgttgactattttacagccactggagttaactaacccttccttgtatctgtcttcccaggagagaatgaagcaaaacaggaatttggttttcttttgatgtccagttacaccatccattctgttaattttgaaaaaatataccctccctttagtttgttgggggatataaattattctcaggaagaatataatgaactgtacagttactttgacctattaaaaaggtgttaccagtaaa

SEQ ID NO: 308342 - protein, 1584 aa, Artificial Sequence
  derived and/or modified sequence
MRGQAAAPGPVWILAPLLLLLLLLGRRARAAAGADAGPGPEPCATLVQGKFFGYFSAAAVFPANASRCSWTLRNPDPRRYTLYMKVAKAPVPCSGPGRVRTYQFDSFLESTRTYLGVESFDEVLRLCDPSAPLAFLQASKQFLQMRRQQPPQHDGLRPRAGPPGPTDDFSVEYLVVGNRNPSRAACQMLCRWLDACLAGSRSSHPCGIMQTPCACLGGEAGGPAAGPLAPRGDVCLRDAVAGGPENCLTSLTQDRGGHGATGGWKLWSLWGECTRDCGGGLQTRTRTCLPAPGVEGGGCEGVLEEGRQCNREACGPAGRTSSRSQSLRSTDARRREELGDELQQFGFPAPQTGDPAAEEWSPWSVCSSTCGEGWQTRTRFCVSSSYSTQCSGPLREQRLCNNSAVCPVHGAWDEWSPWSLCSSTCGRGFRDRTRTCRPPQFGGNPCEGPEKQTKFCNIALCPGRAVDGNWNEWSSWSACSASCSQGRQQRTRECNGPSYGGAECQGHWVETRDCFLQQCPVDGKWQAWASWGSCSVTCGAGSQRRERVCSGPFFGGAACQGPQDEYRQCGTQRCPEPHEICDEDNFGAVIWKETPAGEVAAVRCPRNATGLILRRCELDEEGIAYWEPPTYIRCVSIDYRNIQMMTREHLAKAQRGLPGEGVSEVIQTLVEISQDGTSYSGDLLSTIDVLRNMTEIFRRAYYSPTPGDVQNFVQILSNLLAEENRDKWEEAQLAGPNAKELFRLVEDFVDVIGFRMKDLRDAYQVTDNLVLSIHKLPASGATDISFPMKGWRATGDWAKVPEDRVTVSKSVFSTGLTEADEASVFVVGTVLYRNLGSFLALQRNTTVLNSKVISVTVKPPPRSLRTPLEIEFAHMYNGTTNQTCILWDETDVPSSSAPPQLGPWSWRGCRTVPLDALRTRCLCDRLSTFAILAQLSADANMEKATLPSVTLIVGCGVSSLTLLMLVIIYVSVWRYIRSERSVILINFCLSIISSNALILIGQTQTRNKVVCTLVAAFLHFFFLSSFCWVLTEAWQSYMAVTGHLRNRLIRKRFLCLGWGLPALVVAISVGFTKAKGYSTMNYCWLSLEGGLLYAFVGPAAAVVLVNMVIGILVFNKLVSKDGITDKKLKERAGASLWSSCVVLPLLALTWMSAVLAVTDRRSALFQILFAVFDSLEGFVIVMVHCILRREVQDAVKCRVVDRQEEGNGDSGGSFQNGHAQLMTDFEKDVDLACRSVLNKDIAACRTATITGTLKRPSLPEEEKLKLAHAKGPPTNFNSLPANVSKLHLHGSPRYPGGPLPDFPNHSLTLKRDKAPKSSFVGDGDIFKKLDSELSRAQEKALDTSYVILPTATATLRPKPKEEPKYSIHIDQMPQTRLIHLSTAPEASLPARSPPSRQPPSGGPPEAPPAQPPPPPPPPPPPPQQPLPPPPNLEPAPPSLGDPGEPAAHPGPSTGPSTKNENVATLSVSSLERRKSRYAELDFEKIMHTRKRHQDMFQDLNRKLQHAAEKDKEVLGPDSKPEKQQTPNKRPWESLRKAHGTPTWVKKELEPLQPSPLELRSVEWERSGATIPLVGQDIIDLQTEV

SEQ ID NO: 308343 - DNA, 4755 bp, Artificial Sequence
  derived and/or modified sequence
atgcggggccaggctgccgctccagggcccgtgtggattctcgctccccttctccttctactgctgctcctaggcagaagagcacgtgccgcagccggggctgacgcaggacccggccccgaaccctgtgccacattagttcagggtaaattttttggatacttttctgccgcagccgtgttccctgcaaatgcctcacggtgttcctggaccctgcgcaaccctgacccacgacggtataccctctacatgaaagtggcaaaggctcccgtgccgtgttcagggccagggagggttcgaacttatcaatttgatagctttctagaatctacacgtacatacctgggcgttgagtcattcgatgaggtgctgagactatgtgatccttccgccccactagctttcctgcaggcgagcaagcagtttttacaaatgcgccggcagcagccgccccagcacgatggactcaggccaagggctgggccacccgggcctactgatgatttcagtgtggagtacttagtcgtgggaaatcgaaatccctctagggcagcatgtcaaatgctctgtaggtggctcgacgcttgtcttgctggctcccgttcctcccatccttgcgggatcatgcagacaccctgcgcatgtcttggcggcgaggctggcggccccgctgccggacctctggcacctcggggggacgtctgcctccgcgacgccgtggccggaggtcccgaaaattgcctgactagcttaacccaagaccgcggcgggcatggagccaccggcggatggaagctttggagtctgtggggggaatgcaccagggattgcggcggtgggctgcagacaaggacaaggacatgcctgcccgctccaggcgtggaaggcggtgggtgcgagggtgtcttagaagaaggacgccaatgcaaccgggaagcatgtggtccggccggtaggaccagttcccgaagtcagtcactcagatcaacagatgctagacgaagagaggagctgggagacgagctacaacagtttggatttccagcaccccagacaggggacccggccgcggaagaatggtcgccttggagcgtgtgctcatccacttgcggcgagggctggcagactcggacccgtttctgcgtttcctcttcctactcaacacaatgttccgggcccctccgcgaacagaggctgtgcaataatagcgcagtctgtcctgtccatggggcgtgggacgagtggagcccgtggtccctctgttcatctacatgtggcagaggcttcagagataggacaagaacatgccgaccacctcagttcggtggtaacccttgcgaagggcctgagaagcagacaaaattttgtaacattgcattgtgtccaggcagagccgtggacggtaattggaatgagtggtcttcctggagtgcctgctcagcttcttgtagtcagggacgacagcagaggaccagggaatgcaacggcccatcttacggtggggcggagtgtcagggtcattgggtggagactagggattgtttcctgcagcagtgccccgtggacgggaagtggcaggcctgggcctcctggggcagctgtagcgtgacatgcggagctgggtctcaacggagggaaagagtgtgttccggcccctttttcggtggagccgcctgtcagggaccccaggatgaatatcgtcagtgcgggactcagagatgtccagaaccgcacgagatctgtgatgaggacaatttcggcgctgtcatttggaaggagacacctgcaggagaggtggctgcggtgcgttgccccagaaatgccaccggtctgatcttgagaagatgcgaattagatgaggaagggattgcttactgggagccaccaacttacattaggtgtgtttctatcgactaccggaacattcaaatgatgaccagagagcatctggctaaagcacagcggggcttacccggagaaggggtttctgaggtgattcagacgctcgttgagattagccaggacggcacatcatactcaggcgacctcctttctaccatcgatgtactgcgtaacatgacagaaatcttcaggagggcctactactctcctactcctggagatgtgcagaactttgttcagatactgagcaatctgttagctgaggagaacagagacaaatgggaggaggcccagttagccggccccaatgccaaggagctctttcggctcgtggaagacttcgtcgacgtgataggtttcagaatgaaagatctccgggatgcatatcaggtaacggataacctggtcctctctatccataaactgcccgcgtctggcgccacagatatatctttcccaatgaagggttggagggccactggtgactgggccaaagtcccagaggatcgcgtgaccgtgagcaaaagcgtgttcagcactgggctgactgaggccgatgaggcttccgtgttcgttgtcggcacagtgctgtacaggaacctagggtccttcctcgcgctgcagcgtaatactacggtgctgaactctaaagtgattagtgtcactgtaaagcctcccccgcggtcattacgaacccctctggagatcgagtttgctcatatgtataatggcaccacaaaccagacctgcattttatgggatgaaactgacgtgccctccagtagcgctccaccccagctagggccatggtcatggaggggctgtcgtacagttcctcttgatgccctgagaacaaggtgtctgtgtgaccgcctgagcacattcgcgatcctggcccaactgtcagccgatgccaacatggagaaagctaccctgccatcagtcactctcatcgttggttgtggcgttagcagtctgaccctgctgatgcttgtgatcatatatgttagtgtttggcgatatattagaagcgaacgatctgttatccttatcaatttctgcctttccattatctcaagtaatgcactgattctgattggccaaacacagactcggaacaaggtggtgtgtacactggttgctgcattccttcactttttctttctctcgtctttctgctgggtactcacagaggcttggcagtcatacatggcagtgaccgggcatctgagaaacagactcatccggaaaagattcctctgtctggggtgggggctgccagcgctcgttgttgcaattagtgtggggtttacaaaagctaaggggtactccacaatgaactactgttggctgtctctcgaaggtggattgctatatgcatttgtaggtccggcagctgcagtggtcctagtgaatatggtgatcggtatcctggtgtttaacaagctggttagcaaagacggaatcacagacaagaaattaaaggaaagggctggagcttccctgtggagctcgtgcgtcgtgcttcccctgctggctcttacgtggatgtcggctgttctagctgtcacagacagacgttccgccctgtttcagattttgtttgccgtctttgattctctggagggtttcgtgatcgtgatggtccactgcattctccgacgcgaagtgcaagatgccgtgaaatgccgcgtggtcgacaggcaggaagaggggaacggcgacagcgggggttccttccagaacggccacgcgcaactcatgacagacttcgaaaaggatgtcgacctggcatgccgcagtgttctcaataaagatatcgcggcctgccgcacagccactatcacagggaccttaaaaaggccaagcttgcctgaagaggaaaagctgaaactagcacatgctaagggaccacctaccaattttaattctctgcctgccaatgtgtccaaacttcacctgcatgggtcacctcgttatccaggcggtcctctgcctgacttccctaaccattctctgaccttaaagcgcgataaggcacccaagagttccttcgtcggggacggcgatattttcaagaagctggattctgagctgtctcgtgcacaggagaaagccctggatactagctacgtcatccttccaaccgccacagctaccctgcggccaaagcccaaagaagagcccaaatattccattcacatcgaccagatgccgcagacccggctgatccacctttccacggcccctgaagcttctttgcctgctcggagccccccctcccgccagccaccatccggagggccaccagaggcccctccggcccagccaccccccccccccccaccaccgccaccaccaccccagcagccacttccgccacctccaaacctagagcccgcacccccatccctgggcgacccaggggaaccagctgcacacccaggcccctccacaggccccagtaccaaaaacgaaaatgtcgccacgctctcagtgagctcgctcgagcgcagaaagtcccgatacgccgagctggatttcgagaagattatgcacacgcgcaaaaggcatcaggatatgttccaggacctcaatcgtaaactccagcacgccgcagagaaggataaagaagttcttgggcctgatagtaagccggagaaacagcagacccctaataaaaggccctgggagtctttacggaaagcgcatggcactcctacctgggtgaagaaagagctggaaccactgcaaccttcccctttggaattgcgaagcgttgagtgggaaaggtcgggtgctactatacccctggtgggccaggacatcatcgacctgcagaccgaagtgtag

SEQ ID NO: 308344 - DNA, 4755 bp, Artificial Sequence
  derived and/or modified sequence
atgagagggcaggccgccgcccccggaccagtgtggatcctggctcctctgctcctgttgctgctcctcctggggagaagggcgagagccgcagcaggagcggacgcaggtcccggacccgaaccctgcgccactttggtgcagggaaagttttttggttacttttcagctgctgccgtgttcccagccaatgcaagccggtgttcttggactctgcggaaccctgatccacggagatacactctgtacatgaaagtggccaaagctccagtgccttgcagtggaccaggccgggttcgaacttaccagtttgactccttcctggaatctaccagaacctacttaggcgtcgaaagtttcgacgaagtccttagactatgcgatccatccgctccccttgccttcctccaggcttccaagcagtttttacagatgcggcggcagcagcccccccagcatgatgggttgaggccccgggctggacctcccggccctaccgatgacttctcagttgaatacctagttgtcggaaatagaaatccttccagagcggcttgtcagatgctttgtagatggcttgacgcatgtctcgccgggagccgcagtagccatccttgcggtataatgcagacaccatgtgcatgcttaggcggggaagccgggggtccagccgccggacccctggcaccgagaggtgacgtttgtttacgcgacgcagttgccggaggacccgagaactgcctgacatctctgacccaggaccgcggcggccacggtgcaacgggaggatggaaactgtggtcactgtggggtgagtgcacacgggattgtggcgggggtctccagactagaaccagaacctgtctgcccgcacctggagttgagggtggcggctgtgagggagtgttagaggaaggacgtcagtgtaatagggaggcttgcgggccggcagggcggacatcatcccgatcgcagtccctgagatccacagacgctaggcgtagggaggagctgggggatgaactccagcaattcggatttcccgcaccacagacaggggatcctgctgcagaagagtggagtccgtggagtgtgtgttcctccacatgcggtgagggctggcagactagaacccgtttctgcgtgtcatctagttactctacacaatgcagcggccccttgagggaacagagactgtgcaataactctgctgtgtgcccagtccacggagcttgggacgagtggtctccctggagcctctgttcttccacctgcgggaggggatttcgcgatcgcacacgcacttgtagacccccccagttcggtggcaatccgtgtgaagggcctgagaagcagactaaattttgtaatatcgcactctgccccgggagggctgttgacgggaactggaatgagtggagctcctggtctgcatgcagcgcatcgtgcagccaggggaggcaacaaagaactagggagtgcaatggcccctcttatgggggagctgagtgtcagggacactgggttgaaacaagagattgcttcttacaacagtgtccagtcgatggcaaatggcaggcgtgggctagttggggctcttgttccgtcacctgtggcgctggcagccaacgccgagagagggtgtgtagcgggccattcttcggcggagccgcttgccaggggccccaagatgagtatcggcaatgtggaactcagcgatgccctgaaccgcatgaaatctgcgacgaggataacttcggcgctgtgatatggaaggaaactccagccggagaggtggccgcggtgcggtgtcctagaaacgccaccggcctgatactgaggcgctgcgagctggacgaagaaggtattgcctattgggaaccccctacctacattaggtgcgtgtctattgactatagaaacatccagatgatgacccgtgaacacctcgcaaaggcgcaacggggcctcccaggcgaaggtgtgtctgaggtaatccaaaccttggtagagatctcccaggacggtaccagttacagcggggatcttctgtccacaattgacgttcttaggaacatgacagaaattttcaggagggcctactattcaccgactcccggagatgtccagaattttgttcagattctcagcaacttgctagctgaggaaaatcgtgataaatgggaggaggcccagctggctggcccaaatgccaaagaattgtttaggttggtcgaggacttcgtggatgtcatcggattccggatgaaggatttgagggatgcataccaggttactgacaatctcgtcctgtctatacacaagttgccagcaagcggtgctacagatatttcctttccgatgaaggggtggagagccacaggcgattgggcgaaggtgcccgaggacagagtgacggtgagcaagtctgtgttcagcacagggctaactgaagctgatgaagcatccgtttttgtcgtggggacagtattatacaggaatctcggctcatttctagccttgcagcggaataccacagtccttaattcaaaagtcattagcgtgacagttaagccacccccacgtagcctgaggaccccactggagatcgagttcgctcatatgtataacgggacaacgaatcagacatgcatcctctgggatgagactgacgttccttcatcctctgcccccccccaactgggaccatggagttggcgagggtgtcggaccgttccactagatgcactgcgcactagatgcctgtgcgacaggctgagcaccttcgccattttggcacaactaagcgccgatgctaacatggaaaaggcaaccctgccatccgtgaccttgatcgtgggttgcggtgtaagttctttaactctgctaatgttggttattatctatgttagcgtgtggagatacattcgcagtgaacgcagtgttattctgattaatttttgcttgagcatcatatctagtaacgcacttatcctgatagggcagacccaaacgaggaacaaggtcgtgtgcaccttagtggccgcgtttctgcattttttcttcctgtcttccttttgctgggtgctcaccgaggcttggcagtcatatatggccgttactggacatctgagaaacaggcttatccggaaaaggttcttatgtctgggctgggggctgccggcattggtcgtggcaatcagcgtaggctttactaaggccaaaggttattcgaccatgaactattgttggctgtccctagaaggcggtctcctttatgcgttcgtggggccagcagctgcggttgttctggtcaacatggttattgggatcctggtgtttaataaattggtgagtaaagatggcataactgataagaaactaaaggagagagcaggcgcctcactgtggtctagctgcgttgtgctgcccctgctcgctctgacatggatgtcagccgttttggccgtaactgatagacgcagtgccctgtttcaaatcttgtttgctgtattcgattctctggagggctttgttatagtgatggtgcattgcattctccgtagagaggtccaggacgctgtaaagtgccgggtcgtggacagacaggaggagggtaacggcgatagcggaggaagttttcagaacgggcatgcccagttaatgacagattttgagaaggatgtcgatctcgcctgccggagcgtcctgaataaggatattgctgcctgtagaacggcaacaatcactggcaccctgaaaagaccttcactgccagaagaggagaagttgaagctggcccacgccaagggtccaccaaccaacttcaacagcttacctgcaaatgtgtctaaacttcaccttcatgggtcacccaggtatcctggcgggcccctgcccgactttcctaaccactctttaactttgaagcgggacaaggcccccaaaagctcgttcgttggagacggcgacatttttaagaaactggactccgagctgagtcgagcgcaagagaaagctctagatacatcctatgtgatactgccaactgcaaccgccacactgcggccgaaaccgaaggaggaacccaaatacagcattcatatcgaccagatgccacagacacggttaatacacctgagtactgctcccgaagcttctcttcctgctcgcagcccaccttccaggcagcctcctagcggaggtcccccagaggcccccccagcccagcctcctcctcctcctccccctccaccgccccctccgcagcagccactgccccccccacctaacctggagcccgctcccccctctctcggcgatcccggggagcctgctgcacaccctggccctagcacaggtccatcaactaaaaatgaaaacgttgccaccttatccgtgtcttccctagagagacggaaaagccgctatgcggagcttgacttcgaaaagatcatgcatacaaggaagaggcatcaggacatgtttcaggaccttaatcgcaagctgcagcacgccgctgagaaggacaaagaggtgctgggtcctgacagcaagcccgaaaaacaacaaacacctaataagcgcccttgggagtctctgcgcaaggcgcacggaacacccacttgggttaaaaaggagcttgagccattgcagccatcccctctggagctgcgtagtgtagaatgggagcgttcaggcgcgacaattccactggtgggacaagacataattgatttacagaccgaagtctag

SEQ ID NO: 308345 - DNA, 4755 bp, Artificial Sequence
  derived and/or modified sequence
atgaggggccaggccgccgcccctggccctgtgtggatcctggcccccctgctgctgctgctgctgctgctgggccggcgggcccgggctgctgctggagcagatgctggccctggccctgagccctgtgccaccctggtgcagggcaagttcttcggctacttctctgctgctgctgtgtttcctgccaatgccagccgctgctcctggaccctgagaaatccagacccccggcgctacaccctgtacatgaaggtggccaaggcccctgtgccctgcagcggccctggccgggtgaggacctaccagtttgacagcttcctggagagcaccaggacctacctgggcgtggagagctttgatgaggtgctgcggctgtgtgaccccagcgcccccctggccttcctgcaggccagcaagcagttcctgcagatgaggcggcagcagcccccccagcatgatggcctgcggccccgggccggccccccaggccccacagatgacttctctgtggagtacctggtggtgggcaacagaaaccccagccgggccgcctgccagatgctgtgccgctggctggatgcctgcctggccggcagccgcagcagccacccctgtggcatcatgcagaccccctgtgcctgcctgggcggggaggccggcggccctgctgctggccccctggcccccagaggagatgtgtgcctgagagatgctgtggccggcggccctgagaactgcctgaccagcctgacccaggaccggggcggccacggggccactggaggctggaagctgtggagcctgtggggcgagtgcacccgggactgtggcggcggcctgcagaccaggaccaggacctgcctgcctgcccctggggtggagggcggcggctgtgaaggagtgctggaggagggccggcagtgcaaccgggaggcctgtggccctgctggccgcaccagcagccgcagccagagcctgcggagcacagatgcccggcggcgggaggagctgggagatgagctgcagcagtttggcttccctgccccccagacaggagaccctgctgctgaggagtggagcccctggagcgtgtgcagcagcacctgtggggagggctggcagaccaggacccgcttctgtgtgagcagcagctacagcacccagtgcagcggccccctgcgggagcagaggctgtgcaacaacagcgctgtgtgccctgtgcatggagcctgggatgagtggagcccctggagcctgtgcagcagcacctgtggccggggcttccgggacaggaccaggacctgccggcccccccagtttggaggcaacccctgtgagggccctgagaagcagaccaagttctgcaacatcgccctgtgccccggccgggctgtggatggcaactggaatgagtggagctcctggagcgcctgcagcgccagctgcagccagggccggcagcagaggaccagagaatgtaatggccccagctatggaggagctgagtgccagggccactgggtggagacccgggactgcttcctgcagcagtgccctgtggatggcaagtggcaggcctgggcctcctggggcagctgcagcgtgacctgtggggccggcagccagaggcgggagcgggtgtgcagcggccccttcttcggcggggccgcctgccagggcccccaggatgagtaccggcagtgtggcacccagcgctgcccagagccccatgagatctgtgatgaggacaactttggagctgtgatctggaaggagaccccagctggggaggtggccgctgtgcgctgccccagaaatgccaccggcctcatcctgcggcgctgtgagctggatgaggagggcatcgcctactgggagccccccacctacatccgctgtgtgtccattgactacagaaacatccagatgatgacccgggagcacctggccaaggcccagaggggcctgcccggggagggcgtgtctgaggtgatccagaccctggtggagatcagccaggacggcaccagctacagcggggacctgctgagcaccattgatgtgctgaggaacatgacagagatcttccggcgggcctactacagccccaccccaggagatgtgcagaactttgtgcagatcctgagcaacctgctggccgaggagaacagagacaagtgggaggaggcccagctggccggccccaatgccaaggagctgttccggctggtggaggactttgtggatgtgattggcttcaggatgaaggacctgagagatgcctaccaggtgacagacaacctggtgctgagcatccacaagctgcctgccagcggggccacagacatctccttccccatgaagggctggagggccaccggggactgggccaaggtgcctgaggacagagtgacagtgtccaagagcgtcttcagcacaggcctgacagaagcagatgaggcctctgtgtttgtggtgggcaccgtgctgtacagaaacctgggcagcttcctggccctgcagaggaacaccaccgtgctgaacagcaaggtgatctctgtgacagtgaagcccccacccaggagcctgcggacccccctggagattgaatttgcccacatgtacaacggcaccaccaaccagacctgcatcctgtgggatgaaacagatgtgcccagcagcagcgccccaccccagctgggcccctggagctggaggggctgcaggacagtgcccctggatgccctgcggacccgctgcctgtgtgaccggctgagcacctttgccatcctggcccagctgtctgcagatgccaacatggagaaggccaccctgcccagcgtgaccctcatcgtgggctgcggcgtgagcagcctgaccctgctgatgctggtgatcatctacgtgtctgtgtggagatacatccgctctgagaggagcgtcatcctgatcaacttctgcctgagcatcatcagcagcaatgccctgatcctgattggccagacccagaccaggaacaaggtggtgtgcaccctggtggccgccttcctgcacttcttcttcctgagcagcttctgctgggtgctgacagaggcctggcagagctacatggctgtgacaggccacctgaggaacagactcatcaggaagcgcttcctgtgcctgggctggggcctgcctgccctggtggtggccatctctgtgggcttcaccaaggccaagggctacagcaccatgaactactgctggctgagcctggagggcggcctgctgtatgcctttgtgggccctgctgctgctgtggtgctggtgaacatggtgattggcatcctggtgttcaacaagctggtgtccaaggatggcatcacagacaagaagctgaaggagcgggccggggccagcctgtggagcagctgtgtggtgctgcccctgctggccctgacctggatgtctgctgtgctggccgtgacagaccggcgcagcgccctcttccagatcctgtttgctgtgtttgacagcctggagggcttcgtcatcgtgatggtgcactgcatcctgcggcgggaggtgcaggatgctgtgaagtgccgggtggtggaccggcaggaggagggcaatggagacagcggcggcagcttccagaatggccacgcccagctgatgacagactttgagaaggatgtggacctggcctgccgctctgtgctgaacaaggacattgctgcctgcaggacagccaccatcaccggcaccctgaagaggcccagcctgcctgaggaggagaagctgaagctggcccacgccaagggcccccccaccaacttcaacagcctgcctgccaacgtgtccaagctgcacctgcacggcagcccccgctacccaggcggccccctgcctgacttccccaaccacagcctgaccctgaagagggacaaggcccccaagagcagctttgtgggagatggagacatcttcaagaagctggacagcgagctgagccgggcccaggagaaggccctggacaccagctatgtgatcctgcccacagccacagccaccctgcggcccaagcccaaggaggagcccaagtacagcatccacatcgaccagatgccccagaccaggctcatccacctgagcacagcccctgaggccagcctgcctgcccggagcccccccagccggcagccccccagcggcggccccccagaggcccccccagcccagcccccacctcctcctcctcctcctcctcctccaccccagcagcccctgcccccaccacccaacctggagcccgccccacccagcctgggggaccccggggagcctgctgcccaccctggccccagcacaggccccagcaccaagaatgaaaatgtggccaccctgtctgtgagcagcctggagaggaggaagagccgctatgcagagctggactttgagaagatcatgcacaccaggaagaggcaccaggacatgttccaggacctgaacaggaagctgcagcacgccgctgagaaggacaaggaggtgctgggccctgacagcaagccagagaagcagcagacccccaacaagaggccctgggagagcctgaggaaggcccacggcacccccacctgggtgaagaaggagctggagcccctgcagcccagccccctggagctgcggtctgtggagtgggagaggtctggggccaccatccccctggtgggccaggacatcatcgacctgcagacagaggtgtag

SEQ ID NO: 308346 - DNA, 4755 bp, Artificial Sequence
  derived and/or modified sequence
atgcggggccaggccgccgcccccggccccgtgtggatcctggccccgctgcttcttttgctgttgttgttggggcgaagggcaagagcagccgccggagcggatgccgggcctggtcccgagccttgcgccaccctggtccaaggaaaattcttcggttatttttctgctgctgccgtctttcccgcaaacgccagcaggtgttcctggaccttgagaaaccccgaccctagaagatacactctgtacatgaaagtcgccaaggcacccgtcccctgtagtggccccggccgtgtccgaacatatcagtttgacagcttcctcgagagtactcgaacctacctgggagtggaaagcttcgatgaggtgctgagactgtgcgaccccagtgctcctcttgcttttctccaggcttccaagcagttcttacagatgcggcgccagcaacccccgcagcatgacgggctgagaccaagagcaggtccaccaggccccacagacgacttcagcgtcgagtacctagtcgtcggcaatagaaatccctctagggccgcctgccagatgctgtgccgctggctggacgcctgtttagctggcagcagatcttcccacccatgcgggattatgcaaacaccttgcgcctgtctcgggggagaggcgggaggaccggctgctggccctctagcacctcggggcgatgtgtgcttaagagacgccgttgctggcgggccagaaaactgtctcacctcgctgacgcaagatcgtggaggccacggagccactggagggtggaagctgtggtcactctggggagagtgcactcgggattgtggcggtggactgcaaacccggactcgcacatgcctccccgcacctggagtggagggcggtggatgtgaaggggtgcttgaagaggggaggcagtgtaatagagaagcctgcggccccgcggggaggacctcctctagaagtcagtccctcagatctaccgacgcccggagaagggaggaactgggcgatgagctgcagcagtttggatttcctgccccgcagaccggggaccccgctgccgaggaatggagtccatggtctgtctgttcttctacatgtggagaagggtggcagactaggactaggttttgtgttagtagcagctactcaacccagtgctctggcccactgcgggagcagagactctgtaataatagtgccgtttgccccgtgcacggtgcctgggacgaatggagcccctggtctctgtgcagtagcacatgcggccgaggtttccgcgaccgtacacgaacctgtcggcccccacaatttggaggcaatccatgcgagggccctgagaaacaaaccaagttttgcaatatcgccttatgtcccggccgcgccgtggatggaaactggaacgagtggtcctcatggtccgcctgctcagcgtcatgtagtcaagggcggcaacagagaacgcgagaatgcaatggaccctcatacggaggcgctgaatgccaggggcattgggtggagacccgagactgcttcttgcagcagtgccccgtggacgggaagtggcaggcctgggccagctggggctcttgctccgtgacctgcggcgccgggtcccagcgaagagagcgtgtttgctctggaccgttcttcggtggagcagcgtgtcaagggccacaagacgaatataggcagtgcggcacacagcgttgcccagagccccacgagatatgcgatgaagataactttggcgccgtgatttggaaagaaacacccgctggcgaggtggctgctgtaagatgccctaggaacgccactggccttatcctccgccgatgcgagctagacgaagagggaattgcatactgggaaccaccaacatatatcaggtgcgtgagcatcgactatcgcaacattcagatgatgacgcgcgaacacttggccaaagcccagagaggacttcctggcgaaggcgtctcagaagtcattcagacgttggtcgagatctctcaggatggaaccagctactcgggggatctgctgtcaacaattgacgtgctgcggaacatgaccgagattttccgaagagcgtattactcccccacccccggagacgtgcaaaactttgtgcagatactgagtaatttgctggccgaggaaaatagggacaaatgggaagaggcacaacttgctgggcccaatgccaaggaactgtttcgcctggtcgaagatttcgtggacgtcatcggtttcaggatgaaggacctgcgagatgcataccaagtcactgacaacctggtgctatccatccacaaactccccgccagtggagccaccgacatatcctttccaatgaaaggttggcgggccacaggcgactgggcgaaggtgccagaagatagagtgaccgtaagcaaaagcgtgtttagcacaggtctgactgaggccgacgaagcttccgttttcgtggtgggaactgtcctgtatcggaacttgggcagtttcttggctctgcagcgcaatactactgtactaaacagcaaggtgatcagcgtcacagttaaacctcccccccgatctctgcggacgccactggagatcgaattcgcccacatgtacaacggaaccacaaaccagacgtgtatcctctgggacgagaccgatgtgccgagctctagcgctccgcctcagttaggcccctggtcctggagaggttgtcggacagttccactcgacgccttacgcactaggtgcctctgcgatcgactgtctactttcgccatccttgcccagctcagtgcagacgccaatatggaaaaggcgacgctgccttccgtcacactgatcgtaggctgtggcgtgagttctcttacattgctgatgctggtcattatctacgtttccgtgtggcgttacatccgctctgagcgatccgttatcttaatcaatttttgcctgtctattatctcatccaacgctttgatacttatcggccagacgcagacccgtaacaaggtggtctgtacactggttgctgctttccttcactttttctttctgtcctctttttgctgggtgctgaccgaggcctggcagtcctatatggcagtcacaggccatctgcggaacaggttgatcaggaaacgatttctttgtctcggatggggattaccagccctggtggtggcaattagcgtggggttcactaaggctaaggggtacagcactatgaactactgttggttgtccctcgagggcggattattgtacgcgtttgttgggccagccgctgccgtcgttttggtgaacatggtgatcggcatactggtctttaataaactggtgtctaaggacgggattaccgataaaaagttgaaggagagggccggtgcctcactgtggagctcctgtgtcgtccttcccctgttagctcttacctggatgagcgcagtgttagccgttaccgaccgaaggagcgcactgtttcaaatactgtttgccgtttttgactctttggaggggttcgttatcgtgatggtgcactgtatccttcggcgagaggttcaggatgctgtaaaatgcagggtagtggataggcaggaggaggggaatggcgactccgggggctcatttcaaaatggacacgctcagctgatgactgactttgagaaagacgtcgacctcgcgtgccgaagcgttttgaacaaagacattgcagcgtgccggaccgctacaatcaccggaaccctaaagcgcccatccttgcctgaggaggaaaagttgaaactggcccatgcaaagggcccaccaaccaattttaactcgctacccgcgaacgtttcaaaactgcacctgcacggatctcccagatacccgggagggccactgcccgactttcctaaccatagtctgacgctgaagcgcgataaggcgccaaaaagcagcttcgtgggcgatggagatattttcaaaaaactggactctgagctctccagagctcaggagaaagccttggacaccagctacgtgattctccccaccgccactgccacactcaggccaaagcccaaagaggaacccaaatattctatccatatcgaccagatgccccagacccggctgatacacctgagcaccgcacctgaggcctcccttccagctcggtcgcctccctctcggcagcccccaagcggcggcccccctgaggcgccgcccgcgcagccccctccacctcctccccctccgcccccgcccccacagcagcctctaccccctccccccaatctggagcccgctccccctagcctgggcgaccctggagagccagccgcccaccccggtccaagcacgggaccaagcaccaagaatgagaatgtcgccactctctctgtcagctccctggagagacgcaagagccgttatgccgagcttgatttcgagaaaattatgcacaccaggaaacgccaccaggacatgttccaagatctgaatcggaagcttcagcatgcagcagaaaaagataaggaagttctaggaccagactctaagccagaaaagcagcagacacctaataagcgcccttgggagagcttgagaaaggctcatgggactcccacctgggtcaagaaggagctggaaccactgcaacccagtcccctggagctgaggagtgtggaatgggagcgctctggagccacgatacctttggtgggccaggatatcatagacctgcagactgaagtctag

SEQ ID NO: 308347 - DNA, 4755 bp, Artificial Sequence
  derived and/or modified sequence
atgcggggccaggccgccgcccccggccccgtgtggatcctggccccactccttctcctgctactgctcctcggacgcagagcgcgagctgccgcgggtgccgatgcaggacccggtcctgaaccctgcgctactcttgtccagggcaaattctttggctacttctccgcggctgctgtttttccagccaacgcttctcgctgttcttggaccttgaggaacccggatcctcgccgttacacattgtatatgaaggtagctaaggctcccgtgccttgtagcggaccagggcgagtccggacatatcaatttgattctttcctggagtccactcgtacctatctgggtgtggaaagtttcgatgaggtgctccgcctctgtgacccttccgctcctctggccttccttcaggccagcaagcagtttctgcaaatgcgaagacaacaacctccgcagcacgacgggctacgcccccgcgccggtccacctggaccaacagatgatttcagcgtggagtacctggtcgtgggtaacaggaacccttctagagctgcctgtcaaatgctatgtcggtggctcgatgcctgcctggccggctcccggtcatctcacccatgtggtataatgcaaactccttgtgcatgtcttggtggagaggcgggtggccctgcagcaggcccgctcgcaccccggggggacgtgtgcctgcgagacgcagtggccggcggtccagagaattgcctgacaagccttactcaggaccgaggaggtcacggcgccactggcgggtggaagttgtggtccctctggggtgagtgcacacgtgactgtggcggcggcctccagacccggacccggacctgtctgcctgcaccaggtgtggagggcggcgggtgcgaaggcgttctggaggaaggtagacagtgcaatagggaggcttgtgggccggcggggaggacatcgtcacgatctcaaagcctgaggtcaacagatgcacgaaggagggaggaactcggtgatgaactgcaacagttcggctttcctgctccgcaaaccggcgaccctgctgctgaagaatggtctccgtggtctgtctgttcctcaacctgtggtgaggggtggcagacacgcaccagattctgtgtgtcaagcagttactctacacagtgctccggcccgttgcgggagcagcgactctgtaataactctgcggtgtgcccggtccacggcgcgtgggatgagtggtctccctggagcctttgcagctctacatgtgggagggggtttagagatcgcaccagaacatgtcgtccacctcagtttgggggcaatccctgcgaaggtcctgagaaacagactaagttctgcaacatcgccctatgtccgggtcgtgccgtggatggcaattggaacgagtggtccagttggagcgcctgttcagctagctgtagtcagggacggcagcaacgcacccgcgagtgtaatggaccttcttacggcggggccgaatgccaaggccactgggtggagacccgagactgtttccttcaacagtgtcccgtggacggcaagtggcaggcttgggcgtcgtgggggagttgctcagtgacgtgcggcgcgggaagccaaagaagggagagagtttgctccggccccttcttcggaggagctgcctgccagggtcctcaggacgagtaccgacagtgcggtacccaaagatgtccagaaccacatgagatttgcgatgaggacaacttcggcgctgtgatctggaaggagaccccagccggcgaagtcgccgccgtcagatgtccccgcaacgccactggattaatcctgagaaggtgcgaactggacgaagagggaatcgcttactgggaaccgcccacctacatccggtgcgtgtccatcgactaccggaacatccagatgatgacaagggagcatctcgccaaagcccagcgtggcctcccgggagagggcgttagtgaagtgattcagactctggtggagatctcccaggatggtacctcttactccggcgatctactctctacgattgacgtgctgagaaatatgacggagatctttaggagagcatactactcgcccaccccgggcgacgtccagaactttgtccaaatcttgagcaaccttctggcggaggaaaatcgggacaaatgggaggaggctcaactcgctggaccgaatgcaaaggaactcttcaggctggtggaggattttgtcgacgtgataggattccggatgaaagatcttcgggacgcttatcaggtgaccgataatctcgtgctgagcatccacaagctgcccgcctctggagccaccgacatctcctttcctatgaaggggtggagagcaacaggggactgggccaaagtgcccgaggatcgcgtgaccgtaagcaagtccgtgtttagcaccggacttaccgaggctgacgaagcttccgtgtttgttgtcggaacagtgttatatcggaacctgggaagtttcctggccctacagagaaacaccacggttctgaatagcaaagtcatttcggtgacagtgaaacctcctccacgttctcttcgtacgcctctggagatcgaatttgcacacatgtataacggaaccaccaatcagacctgtattctctgggacgagacagatgttccttcatcatccgctccgccccagctgggcccatggagctggagaggttgccgaaccgtgcctctagacgctctaagaacgcgatgcctctgtgatcggctcagtacttttgcgatcttggcacagctgtcagccgacgcgaatatggagaaggctaccctccccagtgttaccctgattgtggggtgcggggttagcagtttgacactgctaatgttggtgataatttacgtgtccgtgtggcgttacatccgctcagagaggagtgtcattctgataaatttctgtctgtccatcatcagttccaatgctttgattcttatcggccaaactcagactcgcaacaaagtggtctgcacccttgtggctgcctttctccatttcttctttctgtcgtcattctgttgggtcctgaccgaggcctggcagtcctacatggctgtcaccggacatctgaggaatcgactgatacggaagagattcctctgcctcgggtggggcctgccagccctggtcgttgctatatctgtaggcttcaccaaagcgaaagggtactccactatgaactactgctggctctcactggaaggcggtctgctgtatgcttttgtggggcctgctgcagcggtggtcctcgtaaacatggtcatcggcatcttggtctttaataagctggtgtctaaagacgggattaccgacaaaaagctgaaggagcgggccggtgcttctctgtggtcctcctgtgtcgtcctgcctctcttagctcttacttggatgtctgccgtgctggctgtgacagatagacgaagcgctttgttccagattttgtttgcggtctttgacagtttagaaggatttgtcattgtgatggtgcattgtatcctcagaagagaagtccaggacgccgtcaaatgtagagtcgtggatcgacaagaagagggaaacggtgattctggtgggagtttccagaatggccatgcgcagcttatgacagacttcgagaaggatgtggatctggcctgcaggtcagtcttaaataaagacattgccgcctgtcgcactgcaacaatcaccgggacattgaagaggccaagcttgccagaggaggagaagctgaaactcgctcacgcaaaagggccgcccaccaattttaactcactgcccgccaacgtgagtaagctgcacttgcacgggtcccctcgctaccctggaggacccctgccagacttcccaaatcattccttgaccctcaaacgggataaggcacctaagtcaagttttgtgggagacggagatatctttaaaaagcttgacagcgaacttagtcgcgcccaagagaaagctctcgacacttcatacgtgattttaccaacggccacagcgacacttcgccctaaaccaaaggaggagccaaagtactcgatacatattgatcaaatgccccagacgcgacttatccatcttagcacggctcccgaggcaagtttgcctgccaggtccccacccagccgccagccacctagcggaggccctccggaggctccccctgctcagcctcccccccccccccccccacctcctccacctcctcagcaacctctacctcctccccccaacctcgagcccgcccccccatcactgggagaccctggagagcctgccgctcacccaggcccttctaccggcccttctacgaagaatgagaatgtagcgacactgtccgtgtcctcgctggaaaggagaaaaagccgctacgcggagctggacttcgagaagatcatgcatacccgcaagcggcaccaagatatgtttcaagatctgaaccgcaaactccagcacgccgccgaaaaagacaaagaggtcttgggaccagactccaaaccagagaagcaacagacccctaataaaaggccatgggagagcctacggaaggctcacggtacgcccacttgggtgaaaaaagaactggaacctctgcagccatctcctctagaattgcgctcggtcgaatgggagcgtagcggggcaaccatccccctcgtcggtcaagacattattgatttgcagactgaggtttag

SEQ ID NO: 308348 - DNA, 4755 bp, Artificial Sequence
  derived and/or modified sequence
atgagggggcaggcagctgcacctggacccgtgtggatcctggcacccttgctattactcttattattgctggggagacgcgctagggccgctgcaggcgcagatgccggtccgggacccgagccttgcgccactctggtacaagggaagttctttggttacttcagcgccgcagctgtttttcccgcaaatgcatctagatgttcatggactctcagaaatcccgacccaaggagatatactctgtacatgaaagtcgctaaggcccctgtgccatgcagcgggcctgggagagtgaggacatatcagtttgactcttttctggagtcgactcgcacttacctgggagtggagtctttcgacgaagtcttgcggttgtgtgacccatcagcgccattggcgttcttgcaagcgagtaagcaattccttcaaatgagaagacagcagcccccacagcatgatggcctgagaccaagggccggtccccctggaccgaccgatgactttagcgttgagtatctcgtcgtgggaaaccgcaacccgtcgcgggcagcctgccagatgttatgtcgttggctggatgcctgcctcgcaggttcgcggtcatctcacccgtgtggcatcatgcagaccccatgcgcctgtctgggaggcgaggctgggggtcctgccgctggtcccctggcacctcgaggcgacgtgtgtctgcgcgatgccgtggccggaggccctgagaattgcctcacatctctcacacaggatagaggcggtcacggggcaactggaggctggaaactctggtcgctttggggtgagtgtacccgcgattgcggaggcggactccagactaggacgcgaacctgtttacccgcacctggcgtggagggcggaggctgcgaaggagtactggaagagggcaggcaatgcaaccgggaggcatgtgggccagctgggcgtacgtctagccggagtcaatccctgaggtcaactgatgcgaggcgacgtgaggagctcggagatgagctccaacagttcggctttccggcaccacagacaggtgaccctgctgctgaggagtggtcaccctggagtgtttgctctagcacatgcggagagggttggcagacaagaacccggttttgcgtgagtagttcctactctacccagtgcagcggcccacttcgggagcagcggctctgcaataactcagccgtgtgtcccgtccacggtgcttgggatgagtggagtccttggtcactttgctcttctacatgtggtaggggcttccgggaccgcacccggacatgtagacctccacagttcggaggaaacccctgcgagggacctgagaagcagaccaagttttgcaacatcgccctgtgcccagggagagctgtcgacgggaactggaacgaatggagttcttggtccgcctgctccgcgagttgctcccagggcagacaacagaggacgagagagtgtaacggcccttcatacgggggagctgaatgtcaggggcattgggtggagactcgggactgctttttgcagcagtgtccagtcgacggcaagtggcaagcttgggcttcttgggggagctgctcagtgacctgcggggcaggctcccaacggcgagaaagagtatgctcaggcccttttttcggcggtgcagcgtgccagggtccacaagacgaatacaggcagtgcggaactcagagatgccccgaacctcacgagatctgcgacgaagataatttcggcgcagtaatttggaaggaaacccccgctggggaagtggccgctgtgagatgtcccagaaacgcgacaggtctcattttgcgcagatgtgagctggatgaagagggcatagcctattgggaaccacctacttacataaggtgtgtcagtatcgactacaggaatattcagatgatgactcgagaacatttggctaaggctcaacgtggcttgcctggcgagggggtgagtgaagtgatccagaccctggtggagatttcccaagacggcacatcatactctggcgatctcctctctacaattgacgtgttacgaaatatgaccgaaatattcaggcgggcttattatagccccacaccgggtgacgttcagaattttgtccaaatcctctccaatctgctagccgaagaaaaccgagacaaatgggaggaagcccaactggcaggcccaaatgccaaggagctatttcggttggtggaagattttgttgatgtgatcggttttcgcatgaaggacttacgcgacgcttatcaagtgaccgacaacctggtgctgagtattcacaaactgccggcttcgggagcgacagatataagctttccgatgaaagggtggagagcaaccggcgattgggctaaagttcccgaagatagggttaccgtgagcaagagcgtgtttagcacaggcctgaccgaagccgatgaggcctccgtgtttgtggttggcaccgtgctgtatcgaaatttggggtcatttttggccttgcagcgcaataccacagttctcaattcgaaagttatctctgtgactgtgaagccccctccacggtctcttcgcacccctttagaaatcgagttcgcccatatgtacaacggaactacaaaccaaacttgcatcctctgggacgagacggatgtgccctccagcagcgctcctccacagctgggcccatggtcttggcgagggtgccgaactgtgccgcttgacgccctccggaccaggtgcttgtgcgatcgtctcagcactttcgctatactggctcagctgtcagccgacgccaacatggagaaggccacactgccttccgtgacactcatcgtgggctgtggcgtgtcctctttgacgctgttaatgctagtgattatatatgtttccgtgtggcggtatattcgctctgagcgatcagtgatccttatcaatttttgcctgagtatcatctcatcaaatgctctgattctgattggacaaacacagacacgaaacaaagtggtgtgcacactggtggcagcatttttacacttcttctttttatcaagcttttgctgggtgctgacagaggcatggcaaagttatatggcggtgaccggccacttaagaaacaggctaatccgcaaacggttcctctgtctcggctggggacttcctgccctcgttgtcgcaatttccgtgggcttcaccaaagcaaaggggtattcaaccatgaactattgttggctgagtcttgaagggggtctgctctatgctttcgttgggccagccgctgccgtcgttctggtgaatatggtgatcggtatcctagtgtttaacaaattggtttctaaagatggtataactgacaagaagctgaaggaacgcgcaggtgcctcactgtggtcttcctgcgtcgtgctgcccctcctcgccctgacatggatgagcgccgtgttggccgtgaccgataggagatcagcactcttccagatcctgtttgctgtattcgatagccttgaagggtttgtgatcgtaatggtgcactgtattctgcggagagaggttcaggatgcggtaaaatgccgtgtggtggatcgccaggaggagggcaatggtgactctggcggaagctttcagaatggccatgcccaattgatgactgattttgaaaaggacgtggatctcgcttgcagaagtgttttgaacaaagacattgctgcttgtagaaccgctactattacgggcacattaaagaggccttcccttccggaggaggaaaagctcaaactcgcccatgctaagggtcccccaaccaatttcaatagtctccccgcaaacgttagcaaacttcatctccatggcagccctcggtatcctggcggacctctgcctgacttccctaatcatagcctcactcttaaaagggacaaggctcctaagtcatccttcgtcggggatggcgacatcttcaaaaaactcgactcggaactcagtagggctcaagagaaggcattagatacatcgtatgttattctgcctaccgccaccgccactctgcgacctaagccaaaagaagagcctaaatacagcatccacattgaccagatgccccagacccgtctgattcatttgtcgactgctccagaggccagtctcccagcccgatcacctcctagccggcaacctccaagtggaggtccaccagaggctcccccagctcagcccccacccccacctccaccaccgccacccccaccccagcaaccactgccccctcctcctaacctggagcccgcacccccttctctgggcgaccccggagagcctgcagctcacccaggcccatctactggaccctcgactaaaaacgaaaatgtggcaactcttagcgtctcctcgttggaacgccgtaagtcaagatacgccgaactcgactttgaaaaaataatgcacaccagaaaaaggcaccaggacatgttccaggaccttaaccgcaagttgcagcacgcagctgagaaagacaaggaggtgctgggccctgactcaaaacctgagaagcagcagaccccaaataagcggccatgggagtccctgaggaaggcacatgggaccccgacttgggtcaaaaaggaactcgagcccttgcaacctagccccctggaattgcggtctgtggaatgggagcgatctggcgctaccattcctctggtgggtcaggatattatagatctgcagaccgaagtttag

SEQ ID NO: 308349 - DNA, 4755 bp, Artificial Sequence
  derived and/or modified sequence
atgcgagggcaggctgcggctcctggtcccgtgtggattttggcccctcttctgctgctcttgctcctgctgggcaggcgagcgagagccgctgccggtgcagacgcaggacccggaccagagccatgcgccaccctggtgcagggaaagttcttcggctacttttcagccgcagctgtgtttcccgcaaacgccagcaggtgcagctggaccctgcgtaatcccgatccacgacgttatacactttatatgaaggttgcaaaggctccggtgccctgctcaggaccgggaagagtcaggacttatcagtttgattctttcctggaaagtacacggacttatctgggcgttgagagctttgacgaagtgctcaggctttgcgaccccagtgctccgctggcttttctgcaggctagcaaacaatttcttcagatgcgcaggcagcagccccctcagcacgacggcctgcgccctcgcgctgggccacccggtccgacagacgacttttctgtggagtacctggtagttggaaaccgcaacccctcccgcgcagcctgccagatgttgtgtcgctggttggatgcctgcctcgcgggtagccgttcttcccatccctgcggtataatgcagaccccctgtgcgtgtctcgggggagaagctggcggtcccgcagcaggacccctggcacctcggggagatgtgtgcctgcgtgatgctgtcgccggagggcctgagaactgtctgaccagcctgacccaagatcgcggaggccatggcgctaccggaggctggaaactgtggtcgctttggggggaatgcacgcgggactgcggcggtggcctccagaccagaaccaggacctgtctgcccgctcccggagtggaagggggtgggtgcgagggagtgctagaagagggcaggcagtgtaacagagaggcctgcgggcctgctggtcgaacaagctcccgctcacagagcttgagaagcaccgacgcacggcgacgggaagagctgggggacgaactccaacaattcgggtttcccgcacctcagacaggggatccagccgctgaggaatggtccccctggtctgtttgtagttcaacttgcggggaaggatggcagacgagaacccggttctgcgtttccagctcttactctactcaatgctccggcccacttcgcgaacagaggctttgtaacaattctgcagtgtgccctgtccacggcgcttgggacgagtggtctccgtggagcctttgctctagcacatgcggacgcggattccgcgaccgaactcgcacatgccggcctccgcagttcggcggaaatccttgtgaggggccagaaaaacagactaagttctgtaatatcgcactatgtccagggagagccgttgatggcaattggaatgagtggagctcctggtctgcctgtagtgccagctgcagccagggccgtcagcagcgcacacgtgaatgcaacggaccatcttatggtggcgctgagtgtcagggtcactgggtcgagacccgggactgctttctccaacagtgccccgtggacgggaagtggcaggcatgggccagttggggctcttgctccgtgacctgtggcgctggtagtcaaaggagggagcgagtgtgctcaggacccttttttggaggcgcagcatgccaggggccacaggacgagtataggcagtgcggcacacaaagatgcccggagccccacgagatttgcgacgaagataactttggcgcagtgatttggaaggaaacaccagccggtgaagtggctgccgtgcgctgtccacggaacgccaccggcctcattctgagacgttgtgagctcgatgaggagggcatcgcatactgggaaccccctacttacattcgctgcgtctctatcgactacagaaatattcagatgatgacccgcgagcacctcgcgaaggcccagaggggcctgcccggagaaggggtgtctgaggttatccaaacactagtggaaatcagccaggacggcactagctattctggggacctccttagtaccattgacgtcctgcgtaacatgacagagatatttaggcgggcttactacagtccgactcctggagacgttcagaatttcgtccagatcctgtcaaatcttcttgctgaagagaatagggataagtgggaagaggcccagctggctggcccaaatgccaaggagttattccgacttgttgaggattttgtggacgtaatagggttccggatgaaggacctgagagatgcctatcaagtaaccgataatctggtgctttcaatacataagctgccagcgtccggggctactgatatttcttttcctatgaaaggatggagagccacaggcgactgggcaaaggtgccggaggaccgtgtgactgtcagcaagagcgttttctcgacggggctgacagaggctgatgaagcaagtgtgtttgtagtgggcacagtgctctaccgcaacctcggttcatttctggcactacaacggaatacaacagtgctcaacagtaaggtaatctccgtgactgtcaaacctcctcctcgctccctgcgcacaccactggagatagaattcgcacatatgtataacggcacgactaatcagacatgcatcctgtgggacgagacggacgtgccaagtagctcggctccccctcaactcggaccctggtcatggcgcggttgtcggaccgtgccattggatgctctcaggacacggtgcctgtgcgaccggcttagtacattcgctattctggctcagttgtcggccgacgccaatatggagaaggcaactttacccagcgtgacgttaatcgtcgggtgcggcgtctcttccctaaccctgctgatgctcgtgattatctatgtgtcggtgtggcgctacatcaggtccgagagaagtgtgatcctcattaatttttgcctgagcattatttctagtaacgcccttatcctcatcgggcaaacccagaccaggaacaaggtggtgtgtacgctcgtggcagcttttctgcattttttcttcctatcgagcttctgctgggttcttaccgaggcctggcagagctacatggccgtgaccgggcacctccgcaaccggctgattaggaagcgcttcctatgcctcgggtggggactgccagccctcgttgtggctatttcagtgggattcacaaaggcgaagggctactcaaccatgaattattgttggctgtctctggaagggggtcttctgtacgctttcgtgggaccagcagctgcagtggtattggtcaatatggtcatcgggatcctggtgttcaacaagcttgtgagtaaagacggtataacggacaagaagctcaaggagagagctggcgcatctttgtggtcaagctgtgtggtcttacctcttttggccttaacctggatgagtgccgttctggcagtgaccgacaggcgatcagctctattccagatcctcttcgcagtgtttgacagcttggagggttttgtgattgtgatggtgcactgtatcttacgtcgcgaagtccaggatgcagtgaagtgccgtgtggtagatagacaggaggagggtaatggtgactcgggaggatccttccaaaatggacatgctcaacttatgactgactttgaaaaggacgtggatctcgcttgtcggagtgttctgaataaggatatcgccgcttgcaggactgcgaccataaccgggactcttaaaaggccttcattaccagaggaagaaaagcttaaattggcacatgcgaagggaccgccaacaaatttcaattcgctgcctgctaacgtaagtaagctgcatctccacggatccccccgttatccaggaggtcctctcccggacttccccaatcatagcctcacactgaagagagacaaagctcccaaatcatctttcgtgggagatggtgatatctttaagaaacttgatagcgagctttctcgagctcaggaaaaagctcttgatacaagctacgtgatcctccccactgctaccgcaacactgcggcctaagccaaaggaggagcctaaatactccatacacattgaccaaatgccacagacgcgactgatccacttgtctaccgcacccgaggctagcttgcccgctcgtagtccaccctcacgacagcccccaagcggcggtccacccgaagccccaccagcacaacctccaccccctcccccaccgcctccgcctccgcctcagcagcctctcccccctcctcctaacttagagcctgcaccaccctccctcggcgatcctggggaaccagctgcccatcccggaccaagtacgggccctagtactaaaaatgaaaacgttgcaaccctctctgtaagttccctggagaggcgaaaatccaggtatgctgagctcgacttcgaaaagatcatgcacacccgaaaaaggcatcaggacatgttccaggacctcaatcggaaactccagcacgcggcagagaaggataaagaagtcctgggaccagattcaaagccagagaaacagcagacaccaaataaacgtccatgggagagtcttcggaaagcccatggcacacccacttgggtgaagaaggaactggagcctcttcagccgagtcccctggaactccggtccgtcgagtgggagcgcagtggcgctacaattccccttgtggggcaggacataatcgatctgcaaacagaagtatag

SEQ ID NO: 308350 - DNA, 5506 bp, Artificial Sequence
  derived and/or modified sequence
ggactttagaagccgttgctgccctctctgtcacctgaagcggggccctctcccatcccacccttgccccgcctccctgcccccaccgggccggccctgcccgccgccggaccctggcatgtcaagacctggtccgcgcctgcctgcccagcccgcggaaccccggcggccccgcgagctaggatgaggggccaggccgccgccccgggccccgtctggatcctcgccccgctgctactgctgctgctgctgctgggacgccgcgcgcgggcggccgccggagcagacgcggggcccgggcccgagccgtgcgccacgctggtgcagggaaagttcttcggctacttctccgcggccgccgtgttcccggccaacgcctcgcgctgctcctggacgctacgcaacccggacccgcggcgctacactctctacatgaaggtggccaaggcgcccgtgccctgcagcggccccggccgcgtgcgcacctaccagttcgactccttcctcgagtccacgcgcacctacctgggcgtggagagcttcgacgaggtgctgcggctctgcgacccctccgcacccctggccttcctgcaggccagcaagcagttcctgcagatgcggcgccagcagccgccccagcacgacgggctccggccccgggccgggccgccgggccccaccgacgacttctccgtggagtacctggtggtggggaaccgcaaccccagccgtgccgcctgccagatgctgtgccgctggctggacgcgtgtctggccggtagtcgcagctcgcacccctgcgggatcatgcagaccccctgcgcctgcctgggcggcgaggcgggcggccctgccgcgggacccctggccccccgcggggatgtctgcttgagagatgcggtggctggtggccctgaaaactgcctcaccagcctgacccaggaccggggcgggcacggcgccacaggcggctggaagctgtggtccctgtggggcgaatgcacgcgggactgcgggggaggcctccagacgcggacgcgcacctgcctgcccgcgccgggcgtggagggcggcggctgcgagggggtgctggaggagggtcgccagtgcaaccgcgaggcctgcggccccgctgggcgcaccagctcccggagccagtccctgcggtccacagatgcccggcggcgcgaggagctgggggacgagctgcagcagtttgggttcccagccccccagaccggtgacccagcagccgaggagtggtccccgtggagcgtgtgctccagcacctgcggcgagggctggcagacccgcacgcgcttctgcgtgtcctcctcctacagcacgcagtgcagcggacccctgcgcgagcagcggctgtgcaacaactctgccgtgtgcccagtgcatggtgcctgggatgagtggtcgccctggagcctctgctccagcacctgtggccgtggctttcgggatcgcacgcgcacctgcaggcccccccagtttgggggcaacccctgtgagggccctgagaagcaaaccaagttctgcaacattgccctgtgccctggccgggcagtggatggaaactggaatgagtggtcgagctggagcgcctgctccgccagctgctcccagggccgacagcagcgcacgcgtgaatgcaacgggccttcctacgggggtgcggagtgccagggccactgggtggagacccgagactgcttcctgcagcagtgcccagtggatggcaagtggcaggcctgggcgtcatggggcagttgcagcgtcacgtgtggggctggcagccagcgacgggagcgtgtctgctctgggcccttcttcgggggagcagcctgccagggcccccaggatgagtaccggcagtgcggcacccagcggtgtcccgagccccatgagatctgtgatgaggacaactttggtgctgtgatctggaaggagaccccagcgggagaggtggctgctgtccggtgtccccgcaacgccacaggactcatcctgcgacggtgtgagctggacgaggaaggcatcgcctactgggagccccccacctacatccgctgtgtttccattgactacagaaacatccagatgatgacccgggagcacctggccaaggctcagcgagggctgcctggggagggggtctcggaggtcatccagacactggtggagatctctcaggacgggaccagctacagtggggacctgctgtccaccatcgatgtcctgaggaacatgacagagattttccggagagcgtactacagccccacccctggggacgtacagaactttgtccagatccttagcaacctgttggcagaggagaatcgggacaagtgggaggaggcccagctggcgggccccaacgccaaggagctgttccggctggtggaggactttgtggacgtcatcggcttccgcatgaaggacctgagggatgcataccaggtgacagacaacctggttctcagcatccataagctcccagccagcggagccactgacatcagcttccccatgaagggctggcgggccacgggtgactgggccaaggtgccagaggacagggtcactgtgtccaagagtgtcttctccacggggctgacagaggccgatgaagcatccgtgtttgtggtgggcaccgtgctctacaggaacctgggcagcttcctggccctgcagaggaacacgaccgtcctgaattctaaggtgatctccgtgactgtgaaacccccgcctcgctccctgcgcacacccttggagatcgagtttgcccacatgtataatggcaccaccaaccagacctgtatcctgtgggatgagacggatgtaccctcctcctccgcccccccgcagctcgggccctggtcgtggcgcggctgccgcacggtgcccctcgacgccctccggacgcgctgcctctgtgaccggctctccaccttcgccatcttagcccagctcagcgccgacgcgaacatggagaaggcgactctgccgtcggtgacgctcatcgtgggctgtggcgtgtcctctctcaccctgctcatgctggtcatcatctacgtgtccgtgtggaggtacattcgctcagagcgttctgtcatcctcatcaacttctgcctgtccatcatctcctccaatgccctcatcctcatcgggcagacccagacccgcaacaaggtggtgtgcacgctggtggccgccttcctgcacttcttcttcctgtcctccttctgctgggtgctcaccgaggcctggcagtcctacatggcggtgacgggccacctccggaaccgcctcatccgcaagcgcttcctctgcctgggctgggggctccctgcactggttgtggccatttctgtgggattcaccaaggccaaagggtacagcaccatgaactactgctggctctccctggaggggggactgctctatgccttcgtgggacctgccgctgccgttgtgctggtgaacatggtcattgggatcctggtgttcaacaagctcgtgtccaaagacggcatcacggacaagaagctgaaggagcgggcaggggcctccctgtggagctcctgcgtggtgctgccgctgctggcgctgacctggatgtcggctgtgctcgccgtcaccgaccgccgctccgccctcttccagatcctcttcgctgtcttcgactcgctggagggcttcgtcatcgtcatggtgcactgtatcctccgtagagaggtccaggacgctgtgaaatgccgtgtggttgaccggcaggaggagggcaacggggactcagggggctccttccagaacggccacgcccagctcatgaccgacttcgagaaggacgtggatctggcctgtagatcagtgctgaacaaggacatcgcggcctgccgcactgccaccatcacgggcacactgaagcggccgtctctgcccgaggaggagaagctgaagctggcccatgccaaggggccgcccaccaatttcaacagcctgccggccaacgtgtccaagctgcacctgcacggctcaccccgctatcccggcgggcccctgcccgacttccccaaccactcactgaccctcaagagggacaaggcgcccaagtcctccttcgtcggtgacggggacatcttcaagaagctggactcggagctgagccgggcccaggagaaggctctggacacgagctacgtgatcctgcccacggccacggccacgctgcggcccaagcccaaggaggagcccaagtacagcatccacattgaccagatgccgcagacccgcctcatccacctcagcacggcccccgaggccagcctccccgcccgcagcccgccctcccgccagccccccagcggcgggccccccgaggcaccccctgcccagcccccaccgcctccgcccccaccgccaccacctccccagcagcccctgcccccaccgcccaatctggagccggcaccccccagcctgggggatcccggggagcctgccgcccatccgggacccagcacggggcccagcaccaagaacgagaatgtcgccaccttgtctgtgagctccctggagcggcggaagtcgcggtatgcagaactggactttgagaagatcatgcacacccggaagcggcaccaagacatgttccaggacctgaaccggaagctgcagcacgcagcggagaaggacaaggaggtgctggggccggacagcaagccggaaaagcagcagacgcccaacaagaggccctgggagagcctccggaaagcccacgggacgcccacgtgggtgaagaaggagctggagccgctgcagccgtcgccgctggagcttcgcagcgtggagtgggagaggtcgggcgccacgatcccgctggtgggccaggacatcatcgacctccagaccgaggtctgagcgggtgggcggcggccacgcactgggccacggaggagggatgctgctccgcccgctcctgccgcagacgggcacagacacgctcgcgggcagcgggccaggcccgcaccccggcctcagggcgctcagacggcggccaggcacagggcccgcagtgctgggaccagagccagatgcaggacaggaggcggcccggccagcgggcacagggcaccagaggccgaaggtgcctcagactccgccctcctcgggccgaggcccagcgggcagatgggcggacggctgtggaccgtggacaggcccagcgcggccagcgtcccagggtacccgcctgagctcctgctgcggaggagctgcctgcttggcccggccggcctggcaccgttttttaaacacccccatccctcgggaagcagccagctccccacaccttccagggccctaggcccctcctagacccaggtggagggcacagccctccgaccctcatggcccccaggggcaggactgagtcccctccaggaagaagcaggggggaatctattttttctctccttttcttttcttc

SEQ ID NO: 308351 - DNA, 6241 bp, Artificial Sequence
  derived and/or modified sequence
gatgtaatccgtaatgcagtctctggctcccgattcgggatccagtttcagagagcgagagattggggagcgccggcagccgggtggggggaagcagctctcgcctctctcctcctccttctcctcgtcctcggcctcctcctcctccccgcgccgccccgcccccggctcggcttggctcgcccccccccccccctcgccaggaaggggaaaaaaggcgagaagagccgggcaggcgagaggagcggagcggcggcggcggccggagagggagcggcgggcgcaggcggcggcggcgggcgcggcgttggcggcggccccggcggagcgagcgcggagccggagagccgggagcacaggcggccgcgccgcgtcctggcccggcccgggcccgcgcgccagcatcgtccgcagcgcgggcatccggaccctccgggcgcccggggggctccagcaggcgcgggggaacgggagggggcctgcgtgcgccggcgggtgctctccagggggcgtcccggcgaggcccagagcgggccgggggcggcggcggctggaggagccccccccacctccggtcgggcgcccggctcagccgccggcgacgcgaggcgctcgcggggatttgcaactcgccggatcgagtcctcgccggcggggccgctgctgctggggaagctgctgctggtggccacaggctggcaccagggccctggactttagaagccgttgctgccctctctgtcacctgaagcggggccctctcccatcccacccttgccccgcctccctgcccccaccgggccggccctgcccgccgccggaccctggcatgtcaagacctggtccgcgcctgcctgcccagcccgcggaaccccggcggccccgcgagctaggatgaggggccaggccgccgccccgggccccgtctggatcctcgccccgctgctactgctgctgctgctgctgggacgccgcgcgcgggcggccgccggagcagacgcggggcccgggcccgagccgtgcgccacgctggtgcagggaaagttcttcggctacttctccgcggccgccgtgttcccggccaacgcctcgcgctgctcctggacgctacgcaacccggacccgcggcgctacactctctacatgaaggtggccaaggcgcccgtgccctgcagcggccccggccgcgtgcgcacctaccagttcgactccttcctcgagtccacgcgcacctacctgggcgtggagagcttcgacgaggtgctgcggctctgcgacccctccgcacccctggccttcctgcaggccagcaagcagttcctgcagatgcggcgccagcagccgccccagcacgacgggctccggccccgggccgggccgccgggccccaccgacgacttctccgtggagtacctggtggtggggaaccgcaaccccagccgtgccgcctgccagatgctgtgccgctggctggacgcgtgtctggccggtagtcgcagctcgcacccctgcgggatcatgcagaccccctgcgcctgcctgggcggcgaggcgggcggccctgccgcgggacccctggccccccgcggggatgtctgcttgagagatgcggtggctggtggccctgaaaactgcctcaccagcctgacccaggaccggggcgggcacggcgccacaggcggctggaagctgtggtccctgtggggcgaatgcacgcgggactgcgggggaggcctccagacgcggacgcgcacctgcctgcccgcgccgggcgtggagggcggcggctgcgagggggtgctggaggagggtcgccagtgcaaccgcgaggcctgcggccccgctgggcgcaccagctcccggagccagtccctgcggtccacagatgcccggcggcgcgaggagctgggggacgagctgcagcagtttgggttcccagccccccagaccggtgacccagcagccgaggagtggtccccgtggagcgtgtgctccagcacctgcggcgagggctggcagacccgcacgcgcttctgcgtgtcctcctcctacagcacgcagtgcagcggacccctgcgcgagcagcggctgtgcaacaactctgccgtgtgcccagtgcatggtgcctgggatgagtggtcgccctggagcctctgctccagcacctgtggccgtggctttcgggatcgcacgcgcacctgcaggcccccccagtttgggggcaacccctgtgagggccctgagaagcaaaccaagttctgcaacattgccctgtgccctggccgggcagtggatggaaactggaatgagtggtcgagctggagcgcctgctccgccagctgctcccagggccgacagcagcgcacgcgtgaatgcaacgggccttcctacgggggtgcggagtgccagggccactgggtggagacccgagactgcttcctgcagcagtgcccagtggatggcaagtggcaggcctgggcgtcatggggcagttgcagcgtcacgtgtggggctggcagccagcgacgggagcgtgtctgctctgggcccttcttcgggggagcagcctgccagggcccccaggatgagtaccggcagtgcggcacccagcggtgtcccgagccccatgagatctgtgatgaggacaactttggtgctgtgatctggaaggagaccccagcgggagaggtggctgctgtccggtgtccccgcaacgccacaggactcatcctgcgacggtgtgagctggacgaggaaggcatcgcctactgggagccccccacctacatccgctgtgtttccattgactacagaaacatccagatgatgacccgggagcacctggccaaggctcagcgagggctgcctggggagggggtctcggaggtcatccagacactggtggagatctctcaggacgggaccagctacagtggggacctgctgtccaccatcgatgtcctgaggaacatgacagagattttccggagagcgtactacagccccacccctggggacgtacagaactttgtccagatccttagcaacctgttggcagaggagaatcgggacaagtgggaggaggcccagctggcgggccccaacgccaaggagctgttccggctggtggaggactttgtggacgtcatcggcttccgcatgaaggacctgagggatgcataccaggtgacagacaacctggttctcagcatccataagctcccagccagcggagccactgacatcagcttccccatgaagggctggcgggccacgggtgactgggccaaggtgccagaggacagggtcactgtgtccaagagtgtcttctccacggggctgacagaggccgatgaagcatccgtgtttgtggtgggcaccgtgctctacaggaacctgggcagcttcctggccctgcagaggaacacgaccgtcctgaattctaaggtgatctccgtgactgtgaaacccccgcctcgctccctgcgcacacccttggagatcgagtttgcccacatgtataatggcaccaccaaccagacctgtatcctgtgggatgagacggatgtaccctcctcctccgcccccccgcagctcgggccctggtcgtggcgcggctgccgcacggtgcccctcgacgccctccggacgcgctgcctctgtgaccggctctccaccttcgccatcttagcccagctcagcgccgacgcgaacatggagaaggcgactctgccgtcggtgacgctcatcgtgggctgtggcgtgtcctctctcaccctgctcatgctggtcatcatctacgtgtccgtgtggaggtacattcgctcagagcgttctgtcatcctcatcaacttctgcctgtccatcatctcctccaatgccctcatcctcatcgggcagacccagacccgcaacaaggtggtgtgcacgctggtggccgccttcctgcacttcttcttcctgtcctccttctgctgggtgctcaccgaggcctggcagtcctacatggcggtgacgggccacctccggaaccgcctcatccgcaagcgcttcctctgcctgggctgggggctccctgcactggttgtggccatttctgtgggattcaccaaggccaaagggtacagcaccatgaactactgctggctctccctggaggggggactgctctatgccttcgtgggacctgccgctgccgttgtgctggtgaacatggtcattgggatcctggtgttcaacaagctcgtgtccaaagacggcatcacggacaagaagctgaaggagcgggcaggggcctccctgtggagctcctgcgtggtgctgccgctgctggcgctgacctggatgtcggctgtgctcgccgtcaccgaccgccgctccgccctcttccagatcctcttcgctgtcttcgactcgctggagggcttcgtcatcgtcatggtgcactgtatcctccgtagagaggtccaggacgctgtgaaatgccgtgtggttgaccggcaggaggagggcaacggggactcagggggctccttccagaacggccacgcccagctcatgaccgacttcgagaaggacgtggatctggcctgtagatcagtgctgaacaaggacatcgcggcctgccgcactgccaccatcacgggcacactgaagcggccgtctctgcccgaggaggagaagctgaagctggcccatgccaaggggccgcccaccaatttcaacagcctgccggccaacgtgtccaagctgcacctgcacggctcaccccgctatcccggcgggcccctgcccgacttccccaaccactcactgaccctcaagagggacaaggcgcccaagtcctccttcgtcggtgacggggacatcttcaagaagctggactcggagctgagccgggcccaggagaaggctctggacacgagctacgtgatcctgcccacggccacggccacgctgcggcccaagcccaaggaggagcccaagtacagcatccacattgaccagatgccgcagacccgcctcatccacctcagcacggcccccgaggccagcctccccgcccgcagcccgccctcccgccagccccccagcggcgggccccccgaggcaccccctgcccagcccccaccgcctccgcccccaccgccaccacctccccagcagcccctgcccccaccgcccaatctggagccggcaccccccagcctgggggatcccggggagcctgccgcccatccgggacccagcacggggcccagcaccaagaacgagaatgtcgccaccttgtctgtgagctccctggagcggcggaagtcgcggtatgcagaactggactttgagaagatcatgcacacccggaagcggcaccaagacatgttccaggacctgaaccggaagctgcagcacgcagcggagaaggacaaggaggtgctggggccggacagcaagccggaaaagcagcagacgcccaacaagaggccctgggagagcctccggaaagcccacgggacgcccacgtgggtgaagaaggagctggagccgctgcagccgtcgccgctggagcttcgcagcgtggagtgggagaggtcgggcgccacgatcccgctggtgggccaggacatcatcgacctccagaccgaggtctgagcgggtgggcggcggccacgcactgggccacggaggagggatgctgctccgcccgctcctgccgcagacgggcacagacacgctcgcgggcagcgggccaggcccgcaccccggcctcagggcgctcagacggcggccaggcacagggcccgcagtgctgggaccagagccagatgcaggacaggaggcggcccggccagcgggcacagggcaccagaggccgaaggtgcctcagactccgccctcctcgggccgaggcccagcgggcagatgggcggacggctgtggaccgtggacaggcccagcgcggccagcgtcccagggtacccgcctgagctcctgctgcggaggagctgcctgcttggcccggccggcctggcaccgttttttaaacacccccatccctcgggaagcagccagctccccacaccttccagggccctaggcccctcctagacccaggtggagggcacagccctccgaccctcatggcccccaggggcaggactgagtcccctccaggaagaagcaggggggaatctattttttctctccttttcttttcttcaataaaaagaattaaaaacccatc

SEQ ID NO: 308352 - DNA, 4755 bp, Artificial Sequence
  derived and/or modified sequence
atgagaggccaggccgccgcccccggccccgtgtggatcctggcccccctgctgctgctgctgctgctgctgggcagaagagccagagccgccgccggcgccgacgccggccccggccccgagccctgcgccaccctggtgcagggcaagttcttcggctacttcagcgccgccgccgtgttccccgccaacgccagcagatgcagctggaccctgagaaaccccgaccccagaagatacaccctgtacatgaaggtggccaaggcccccgtgccctgcagcggccccggcagagtgagaacctaccagttcgacagcttcctggagagcaccagaacctacctgggcgtggagagcttcgacgaggtgctgagactgtgcgaccccagcgcccccctggccttcctgcaggccagcaagcagttcctgcagatgagaagacagcagcccccccagcacgacggcctgagacccagagccggcccccccggccccaccgacgacttcagcgtggagtacctggtggtgggcaacagaaaccccagcagagccgcctgccagatgctgtgcagatggctggacgcctgcctggccggcagcagaagcagccacccctgcggcatcatgcagaccccctgcgcctgcctgggcggcgaggccggcggccccgccgccggccccctggcccccagaggcgacgtgtgcctgagagacgccgtggccggcggccccgagaactgcctgaccagcctgacccaggacagaggcggccacggcgccaccggcggctggaagctgtggagcctgtggggcgagtgcaccagagactgcggcggcggcctgcagaccagaaccagaacctgcctgcccgcccccggcgtggagggcggcggctgcgagggcgtgctggaggagggcagacagtgcaacagagaggcctgcggccccgccggcagaaccagcagcagaagccagagcctgagaagcaccgacgccagaagaagagaggagctgggcgacgagctgcagcagttcggcttccccgccccccagaccggcgaccccgccgccgaggagtggagcccctggagcgtgtgcagcagcacctgcggcgagggctggcagaccagaaccagattctgcgtgagcagcagctacagcacccagtgcagcggccccctgagagagcagagactgtgcaacaacagcgccgtgtgccccgtgcacggcgcctgggacgagtggagcccctggagcctgtgcagcagcacctgcggcagaggcttcagagacagaaccagaacctgcagacccccccagttcggcggcaacccctgcgagggccccgagaagcagaccaagttctgcaacatcgccctgtgccccggcagagccgtggacggcaactggaacgagtggagcagctggagcgcctgcagcgccagctgcagccagggcagacagcagagaaccagagagtgcaacggccccagctacggcggcgccgagtgccagggccactgggtggagaccagagactgcttcctgcagcagtgccccgtggacggcaagtggcaggcctgggccagctggggcagctgcagcgtgacctgcggcgccggcagccagagaagagagagagtgtgcagcggccccttcttcggcggcgccgcctgccagggcccccaggacgagtacagacagtgcggcacccagagatgccccgagccccacgagatctgcgacgaggacaacttcggcgccgtgatctggaaggagacccccgccggcgaggtggccgccgtgagatgccccagaaacgccaccggcctgatcctgagaagatgcgagctggacgaggagggcatcgcctactgggagccccccacctacatcagatgcgtgagcatcgactacagaaacatccagatgatgaccagagagcacctggccaaggcccagagaggcctgcccggcgagggcgtgagcgaggtgatccagaccctggtggagatcagccaggacggcaccagctacagcggcgacctgctgagcaccatcgacgtgctgagaaacatgaccgagatcttcagaagagcctactacagccccacccccggcgacgtgcagaacttcgtgcagatcctgagcaacctgctggccgaggagaacagagacaagtgggaggaggcccagctggccggccccaacgccaaggagctgttcagactggtggaggacttcgtggacgtgatcggcttcagaatgaaggacctgagagacgcctaccaggtgaccgacaacctggtgctgagcatccacaagctgcccgccagcggcgccaccgacatcagcttccccatgaagggctggagagccaccggcgactgggccaaggtgcccgaggacagagtgaccgtgagcaagagcgtgttcagcaccggcctgaccgaggccgacgaggccagcgtgttcgtggtgggcaccgtgctgtacagaaacctgggcagcttcctggccctgcagagaaacaccaccgtgctgaacagcaaggtgatcagcgtgaccgtgaagcccccccccagaagcctgagaacccccctggagatcgagttcgcccacatgtacaacggcaccaccaaccagacctgcatcctgtgggacgagaccgacgtgcccagcagcagcgcccccccccagctgggcccctggagctggagaggctgcagaaccgtgcccctggacgccctgagaaccagatgcctgtgcgacagactgagcaccttcgccatcctggcccagctgagcgccgacgccaacatggagaaggccaccctgcccagcgtgaccctgatcgtgggctgcggcgtgagcagcctgaccctgctgatgctggtgatcatctacgtgagcgtgtggagatacatcagaagcgagagaagcgtgatcctgatcaacttctgcctgagcatcatcagcagcaacgccctgatcctgatcggccagacccagaccagaaacaaggtggtgtgcaccctggtggccgccttcctgcacttcttcttcctgagcagcttctgctgggtgctgaccgaggcctggcagagctacatggccgtgaccggccacctgagaaacagactgatcagaaagagattcctgtgcctgggctggggcctgcccgccctggtggtggccatcagcgtgggcttcaccaaggccaagggctacagcaccatgaactactgctggctgagcctggagggcggcctgctgtacgccttcgtgggccccgccgccgccgtggtgctggtgaacatggtgatcggcatcctggtgttcaacaagctggtgagcaaggacggcatcaccgacaagaagctgaaggagagagccggcgccagcctgtggagcagctgcgtggtgctgcccctgctggccctgacctggatgagcgccgtgctggccgtgaccgacagaagaagcgccctgttccagatcctgttcgccgtgttcgacagcctggagggcttcgtgatcgtgatggtgcactgcatcctgagaagagaggtgcaggacgccgtgaagtgcagagtggtggacagacaggaggagggcaacggcgacagcggcggcagcttccagaacggccacgcccagctgatgaccgacttcgagaaggacgtggacctggcctgcagaagcgtgctgaacaaggacatcgccgcctgcagaaccgccaccatcaccggcaccctgaagagacccagcctgcccgaggaggagaagctgaagctggcccacgccaagggcccccccaccaacttcaacagcctgcccgccaacgtgagcaagctgcacctgcacggcagccccagataccccggcggccccctgcccgacttccccaaccacagcctgaccctgaagagagacaaggcccccaagagcagcttcgtgggcgacggcgacatcttcaagaagctggacagcgagctgagcagagcccaggagaaggccctggacaccagctacgtgatcctgcccaccgccaccgccaccctgagacccaagcccaaggaggagcccaagtacagcatccacatcgaccagatgccccagaccagactgatccacctgagcaccgcccccgaggccagcctgcccgccagaagcccccccagcagacagccccccagcggcggcccccccgaggccccccccgcccagcccccccccccccccccccccccccccccccccccccagcagcccctgccccccccccccaacctggagcccgccccccccagcctgggcgaccccggcgagcccgccgcccaccccggccccagcaccggccccagcaccaagaacgagaacgtggccaccctgagcgtgagcagcctggagagaagaaagagcagatacgccgagctggacttcgagaagatcatgcacaccagaaagagacaccaggacatgttccaggacctgaacagaaagctgcagcacgccgccgagaaggacaaggaggtgctgggccccgacagcaagcccgagaagcagcagacccccaacaagagaccctgggagagcctgagaaaggcccacggcacccccacctgggtgaagaaggagctggagcccctgcagcccagccccctggagctgagaagcgtggagtgggagagaagcggcgccaccatccccctggtgggccaggacatcatcgacctgcagaccgaggtgtag

SEQ ID NO: 308353 - DNA, 189 bp, Artificial Sequence
  derived and/or modified sequence
atgctgcaggtggtgcaggagggcaaccccgcccccttcatcatcaatacagttaaaaggggaaggcgagacagggagagacagcgcacaccctgggcccctcaccctctgggcttccaaggcagaaggtacatctatgagagccctaaccatcgaggaaaggacagcagctttttggctcagaagtag

SEQ ID NO: 308354 - DNA, 366 bp, Artificial Sequence
  derived and/or modified sequence
atgatcgacagccccagaaaggagggcgccctgagcccccccctgggcggctggagactgggcgacagaagatgcgccggcggcaagagaaccgagagaagaacccccgagaagctgtggggcatcagaggcgagaaggagggcgtgaagagagagggcagactgagcagaggcggcggcgccggcgccggcgccggcgccggcggcgtgaccgcccccagaccccccctgcccgccctgcacagcgccgcccccggcctgccccccccccccccccccccccccccccccccccccctgccccccccccccggcgtggccggctgcggccagaacagaagccccaacagagccgccggcgagtag

SEQ ID NO: 308355 - DNA, 366 bp, Artificial Sequence
  derived and/or modified sequence
atgatcgattcacctagaaaagagggagccctcagtccccctttaggcggctggcgcctaggagacagacggtgcgccggcggcaagagaactgagcggagaactcctgagaagctgtggggcatccgcggcgaaaaggaaggcgtgaagagggaaggccgactgtctcgcggcggcggtgcaggagcaggagcaggcgctggtggagtgaccgccccccgcccccccttgcccgctctccattccgcggcgcccggcctgcctcctccgccacccccccctcctccaccgcctccacttcctccaccacccggggtagccggctgcggccagaatcggtcgcccaatagagctgccggggagtag

SEQ ID NO: 308356 - DNA, 366 bp, Artificial Sequence
  derived and/or modified sequence
atgattgacagccccaggaaggagggcgccctgagcccccccctgggcggctggaggctgggggacagaagatgtgccggcggcaagaggacagaaagaaggaccccagagaagctgtggggcatccggggggagaaggagggcgtgaagcgggagggccgcctgagccggggcggcggggccggggccggggccggggccggcggcgtgacagcccccaggcctcccctgcctgccctgcacagcgctgcccctggcctgcccccacctcctcctcctcctcctcctcctccacccctgcccccacctcctggggtggccggctgcggccagaacagaagccccaacagagctgctggggagtag

SEQ ID NO: 308357 - DNA, 366 bp, Artificial Sequence
  derived and/or modified sequence
atgatcgacagcccccggaaggagggcgccctgagcccccccctgggcggctggcggctcggcgaccgtagatgcgcaggagggaagagaacggagcggaggacacccgagaaactatggggaatcagaggtgagaaggaaggggtgaaacgagagggccggttaagccgtgggggaggggccggcgctggtgccggtgccggcggtgtcactgctccaagacccccactgccagccctgcattcggcggctcccggtctccccccgcccccacctccaccccccccgccaccaccgctgccccctcccccaggcgtggccggatgcggccagaaccggtcacccaaccgggctgctggggagtag

SEQ ID NO: 308358 - protein, 1130 aa, Artificial Sequence
  derived and/or modified sequence
MCKCCNLFSPNQSELLSHVSEKHMEEGVNVDEIIIPLRPLSTPEPPNSSKTGDEFLVMKRKRGRPKGSTKKSSTEEELAENIVSPTEDSPLAPEEGNSLPPSSLECSKCCRKFSNTRQLRKHICIIVLNLGEEEGEAGNESDLELEKKCKEDDREKASKRPRSQKTEKVQKISGKEARQLSGAKKPIISVVLTAHEAIPGATKIVPVEAGPPETGATNSETTSADLVPRRGYQEYAIQQTPYEQPMKSSRLGPTQLKIFTCEYCNKVFKFKHSLQAHLRIHTNEKPYKCPQCSYASAIKANLNVHLRKHTGEKFACDYCSFTCLSKGHLKVHIERVHKKIKQHCRFCKKKYSDVKNLIKHIRDAHDPQDKKVKEALDELCLMTREGKRQLLYDCHICERKFKNELVEEEFALQGVNALKEEACPGDTQLEEGRKEPEAPGEMPAPAVHLASPQAESTALPPCELETTVVSSSDLHSQEVVSDDFLLKNDTSSAEAHAAPEKPPDMQHRSSVQTQGEVITLLLSKAQSAGSDQESHGAQSPLGEGQNMAVLSAGDPDPSRCLRSNPAEASDLLPPVAGGGDTITHQPDSCKAAPEHRSGITAFMKVLNSLQKKQMNTSLCERIRKVYGDLECEYCGKLFWYQVHFDMHVRTHTREHLYYCSQCHYSSITKNCLKRHVIQKHSNILLKCPTDGCDYSTPDKYKLQAHLKVHTALDKRSYSCPVCEKSFSEDRLIKSHIKTNHPEVSMSTISEVLGRRVQLKGLIGKRAMKCPYCDFYFMKNGSDLQRHIWAHEGVKPFKCSLCEYATRSKSNLKAHMNRHSTEKTHLCDMCGKKFKSKGTLKSHKLLHTADGKQFKCTVCDYTAAQKPQLLRHMEQHVSFKPFRCAHCHYSCNISGSLKRHYNRKHPNEEYANVGTGELAAEVLIQQGGLKCPVCSFVYGTKWEFNRHLKNKHGLKVVEIDGDPKWETATEAPEEPSTQYLHITEAEEDVQGTQAAVAALQDLRYTSESGDRLDPTAVNILQQIIELGAETHDATALASVVAMAPGTVTVVKQVTEEEPSSNHTVMIQETVQQASVELAEQHHLVVSSDDVEGIETVTVYTQGGEASEFIVYVQEAMQPVEEQAVEQPAQEL

SEQ ID NO: 308359 - DNA, 519 bp, Artificial Sequence
  derived and/or modified sequence
atgtacctggacaacagcagcatcgaggaggccagcggcgtgtaccccatcgacgacgacgactacgccagcgccagcggcagcggcgccgacgaggacgtggagagccccgagctgaccaccagcagacccctgcccaagatcctgctgaccagcgccgcccccaaggtggagaccaccaccctgaacatccagaacaagatccccgcccagaccaagagccccgaggagaccgacaaggagaaggtgcacctgagcgacagcgagagaaagatggaccccgccgaggaggacaccaacgtgtacaccgagaagcacagcgacagcctgttcaagagaaccgaggtgctggccgccgtgatcgccggcggcgtgatcggcttcctgttcgccatcttcctgatcctgctgctggtgtacagaatgagaaagaaggacgagggcagctacgacctgggcgagagaaagcccagcagcgccgcctaccagaaggcccccaccaaggagttctacgcctag

SEQ ID NO: 308360 - DNA, 519 bp, Artificial Sequence
  derived and/or modified sequence
atgtacctcgacaactcctccattgaagaggcctccggcgtgtaccctattgacgacgacgattacgcctctgcctccggaagtggagccgacgaggatgtggagagtcctgagcttaccacaagtagacccctgcctaaaattctgctgaccagcgccgcacctaaggtggaaaccaccactttgaacatccaaaataaaatccctgcacagaccaaaagtcccgaagaaacggacaaggaaaaggtccatctgagtgacagcgagagaaagatggaccccgccgaggaagatacaaatgtgtatacagaaaagcatagtgattccctgttcaagagaacagaggtcctggcggccgtaatcgctgggggggtgatcggattcctgttcgccatcttcttgatactgctactcgtgtatagaatgcggaagaaggatgaaggttcttacgatttgggtgagcggaagccgtcctccgcagcctatcaaaaggcccctacgaaggaattttatgcgtag

SEQ ID NO: 308361 - DNA, 519 bp, Artificial Sequence
  derived and/or modified sequence
atgtaccttgataactcctcaatcgaagaggcttccggtgtttaccccatcgatgacgatgattatgcctccgcaagcggatcaggcgccgatgaggatgttgagtccccagagctgacaacctccaggccgctgccaaaaattctactgacttcagccgctcctaaggtcgagaccaccacacttaacatccagaacaaaattccagctcagacaaagtctccggaggagacggacaaggaaaaggtgcacctcagcgactccgaaaggaagatggacccggccgaggaggacacaaacgtttacaccgaaaaacattccgactctttatttaaacgcacagaggtgttggctgcagtgatcgcaggcggggttataggattcctattcgctattttcctgatattgcttctcgtctatcgaatgaggaagaaagacgaagggtcttacgaccttggcgagcgcaagccctcgtctgcggcataccagaaggcccctacaaaggaattctatgcctag

SEQ ID NO: 308362 - DNA, 519 bp, Artificial Sequence
  derived and/or modified sequence
atgtacctggacaacagcagcattgaggaggccagcggcgtgtaccccattgatgatgatgattatgccagcgccagcggcagcggggctgatgaagatgtggagagccctgagctgaccaccagccggcccctgcccaagatcctgctgaccagcgctgcccccaaggtggagaccaccaccctgaacatccagaacaagatcccagcccagaccaagagccctgaggagacagacaaggagaaggtgcacctgagtgacagcgagaggaagatggaccctgctgaggaggacaccaacgtgtacacagagaagcacagcgacagcctcttcaagaggacagaggtgctggccgctgtgattgctgggggcgtcatcggcttcctgtttgccatcttcctgatcctgctgctggtgtacaggatgaggaagaaggatgagggcagctatgacctgggggagaggaagcccagcagcgctgcctaccagaaggcccccaccaaggagttctacgcctag

SEQ ID NO: 308363 - DNA, 519 bp, Artificial Sequence
  derived and/or modified sequence
atgtacctggacaacagcagcatcgaggaggccagcggcgtgtaccctatcgatgacgacgactacgcctcagcatctggctcaggagcggacgaggacgttgagtcccccgaactcaccacgtccagaccactgcctaaaatcttgcttacaagcgccgcacctaaggtggagaccacgacactgaatattcagaataaaatcccagcacaaaccaagtccccggaggaaactgacaaggaaaaggtccacctctccgacagtgaacggaagatggatcccgcagaggaggacaccaacgtgtacacagagaagcatagtgactccctgtttaaaagaacagaggtgctcgcagcggtgatcgcaggtggagtaattggatttttatttgctatcttcctcatactcctattggtgtaccgtatgaggaagaaagatgaaggcagctacgacctcggggaaagaaagccttcatcggctgcatatcagaaggctcccaccaaggagttctatgcgtag

SEQ ID NO: 308364 - DNA, 519 bp, Artificial Sequence
  derived and/or modified sequence
atgtacctggacaacagcagcatcgaggaggccagcggcgtgtaccctattgatgatgacgattacgcaagtgcctcaggtagtggggcggatgaagatgtggagagccccgagttgaccacctctcggcccttgccaaaaatcctcttgaccagcgcggctcccaaggtagaaaccacgacgttgaatattcaaaataagatccccgcccagactaaaagcccggaggagacagacaaggaaaaggtgcacctcagtgacagtgaacggaaaatggacccagcagaggaagatacaaatgtctacactgaaaaacattccgattccttgtttaaacggaccgaggtcttagccgccgtgatagcaggtggcgtcattggctttctgttcgcaatctttctcatcttgctgctggtgtatcgcatgaggaagaaggatgaaggatcttacgacttgggcgaacgcaagccctcctccgctgcctaccaaaaggcacctacaaaggaattctatgcctag

SEQ ID NO: 308365 - DNA, 519 bp, Artificial Sequence
  derived and/or modified sequence
atgtatctggacaattcctccatcgaggaagctagcggggtgtatcccatcgacgacgacgattacgccagtgcatctgggagtggcgcagatgaggatgtggagtctcctgagttaaccacaagcaggcccctccccaagatactgctgacgtcggccgctcccaaggttgaaaccacaaccctgaacattcaaaacaagatccctgcccaaacgaagtccccagaggagacggacaaagagaaggtccacctgtccgacagcgaaaggaaaatggatccagccgaggaagacacaaacgtgtacacagagaagcattcagacagtctttttaagcgcactgaggtactcgcagccgtgattgcaggcggtgtgattggcttcctgttcgcaattttcctgatccttcttctggtgtaccgaatgagaaagaaagatgagggatcatacgatttaggggaaagaaagccatcctcagcggcatatcagaaggctccaaccaaggagttttatgcctag

SEQ ID NO: 308366 - DNA, 519 bp, Artificial Sequence
  derived and/or modified sequence
atgtatctggacaactctagtatcgaggaagcttcaggggtgtaccctattgatgatgacgattatgcctccgcctccggctcaggggcagacgaggacgttgagtcccccgagctgaccacgagtagacctcttccaaaaattctgctgacgtcagcagcccctaaggtcgagacaaccactctgaatatccaaaacaaaatccccgcacagactaaatctccagaggagaccgataaagagaaagtgcatctgagcgatagtgaacgaaaaatggacccagccgaggaggacactaatgtttatacagagaagcactccgactctctgttcaaacgtaccgaagtgctagcggcagtaattgccggtggcgtcattggattccttttcgcgatcttcttaatcttgcttctagtctatcgaatgcgcaagaaagacgagggctcctatgatcttggggagcgcaagccatcctctgcagcctaccagaaggctcccactaaggagttctacgcatag

SEQ ID NO: 308367 - protein, 131 aa, Artificial Sequence
  derived and/or modified sequence
MTPLLTLILVVLMGLPLAQALDCHVCAYNGDNCFNPMRCPAMVAYCMTTRTSAAEAIWCHQCTGFGGCSHGSRCLRDSTHCVTTATRVLSNTEDLPLVTKMCHIGCPDIPSLGLGPYVSIACCQTSLCNHD

SEQ ID NO: 308368 - DNA, 396 bp, Artificial Sequence
  derived and/or modified sequence
atgacgcccctactcactctgattttagttgtgctgatggggctgccgctggctcaggccctagactgccacgtgtgcgcttacaatggagataattgttttaatcccatgaggtgtcctgccatggtcgcctattgtatgacaaccaggaccagcgccgcagaggcaatctggtgccatcagtgcacaggcttcggcggttgtagccatggatccaggtgcctgagggatagcacccattgcgttaccaccgctacaagagtgctgagcaacaccgaagatctgcctcttgtcactaaaatgtgtcacatcggctgtccggacatccctagtctcggactgggaccttacgtttccatcgcctgttgccagacatccctctgcaaccatgattag

SEQ ID NO: 308369 - DNA, 396 bp, Artificial Sequence
  derived and/or modified sequence
atgacccccctgctgaccctcatcctggtggtgctgatgggcctgcccctggcccaggccctggactgccacgtgtgtgcctacaatggagacaactgcttcaaccccatgcgctgcccagccatggtggcctactgcatgaccaccaggaccagcgctgctgaggccatctggtgccaccagtgcaccggctttggaggctgcagccacggcagccgctgcctgcgggacagcacccactgtgtgaccacagccaccagggtgctgagcaacacagaggacctgcccctggtgaccaagatgtgccacatcggctgcccagacatccccagcctgggcctgggcccctacgtgtccatcgcctgctgccagaccagcctgtgcaaccacgactag

SEQ ID NO: 308370 - DNA, 1291 bp, Artificial Sequence
  derived and/or modified sequence
tttagggtagaagaaaaggttttatttttctttctcacattggaaaaaatgaaaactttcggacccatgaaattttattacattttgccaaaaacagaaccaataacataagtattcaaagttatgtaaagataattatttaatatgaacattatgatggtgagagggaccacggagcaaggggctgccttgcaggcctgccttccagctttgctacagggaccagaagcgggagctgagcgcaggggaggcaggcggaggccatgggcagcgaggcgggtgcgccaaagggcgccagttccggagctgctgggcctgggctgcaggagggcggagctggggccgcaaggctggtgccggccgacaaacgacgcggcgcgggcgagtgggcggaggcggctgcggggaaggctgggctgccgcgggacgcggtgaagatagcctgcggagtgtccgggctgaacacggttgcagcactcccagtagaccaggagctccgggaggcagggccggccccacgtcctctgcgcaccaccctgagttggatcctctgtgcgccacctgagttggatccagggctagctgctgttgacctccccactcccacgctgccctcctgcctgcagccatgacgcccctgctcaccctgatcctggtggtcctcatgggcttacctctggcccaggccttggactgccacgtgtgtgcctacaacggagacaactgcttcaaccccatgcgctgcccggctatggttgcctactgcatgaccacgcgcacctctgcagccgaagccatatggtgtcaccagtgcacgggcttcggagggtgctcccatggatccagatgcctgagggactccacccactgtgtcaccactgccacccgggtcctcagcaacaccgaggatttgcctctggtcaccaagatgtgccacataggctgccccgatatccccagcctgggcctgggcccctacgtatccatcgcttgctgccagaccagcctctgcaaccatgactgacggctgccctcctccaggcccccggacgctcagcccccacagcccccacagcctggcgccagggctcacagctgcccctccctcgagactggccagcccacctctcccggcctctgcagccaccgtccagcaccgcttgtcctagggaagtcctgcgtggagtcttgcctcaatctgctgccgtccaagcctggggcccatcgtgcctgccgccccttcaggtcccgacctccccacaataaaatgtgattggatcgtgtggtacaa

SEQ ID NO: 308371 - DNA, 396 bp, Artificial Sequence
  derived and/or modified sequence
atgacccccctgctgaccctgatcctggtggtgctgatgggcctgccactagcgcaggcattagactgtcacgtttgtgcgtacaacggggacaattgcttcaacccaatgcggtgtccagccatggtggcctactgcatgacaacccgcacgagtgccgctgaagccatttggtgccatcagtgcactggttttggcggctgctcacacggctccagatgccttcgtgattctacccactgtgtcacaactgctactcgcgttctgtccaacaccgaggacctcccacttgtgactaagatgtgccacattggctgtcctgatatacctagcctcggactcggtccctacgtgtccattgcctgctgtcagacttcgctgtgcaatcacgattag

SEQ ID NO: 308372 - DNA, 396 bp, Artificial Sequence
  derived and/or modified sequence
atgacacctctgctcacactcattctcgtcgtccttatgggattaccactggcccaggccttggattgtcacgtgtgtgcatacaatggagacaactgctttaatccgatgcgatgtcctgcaatggtggcctactgcatgacaacacggacaagtgccgcagaggccatctggtgtcatcaatgcactggattcggaggctgctcgcatggaagcagatgtctgcgcgactccactcattgtgttacgacggcaaccagagtcctcagcaataccgaggatcttccgctcgtgaccaaaatgtgtcatattggatgccctgacataccatcattgggcctgggcccatacgtgtcgattgcctgctgccagactagcctgtgcaatcatgactag

SEQ ID NO: 308373 - DNA, 396 bp, Artificial Sequence
  derived and/or modified sequence
atgacccccctgctgaccctgatcctggtggtgctgatgggcctgcccctggcccaggccctggactgccacgtgtgcgcctacaacggcgacaactgcttcaaccccatgagatgccccgccatggtggcctactgcatgaccaccagaaccagcgccgccgaggccatctggtgccaccagtgcaccggcttcggcggctgcagccacggcagcagatgcctgagagacagcacccactgcgtgaccaccgccaccagagtgctgagcaacaccgaggacctgcccctggtgaccaagatgtgccacatcggctgccccgacatccccagcctgggcctgggcccctacgtgagcatcgcctgctgccagaccagcctgtgcaaccacgactag

SEQ ID NO: 308374 - protein, 479 aa, Artificial Sequence
  derived and/or modified sequence
MLRRKGTNISETSLIGTAACTSTSSQNDPEVIIVGAGVLGSALAAVLSRDGRKVTVIERDLKEPDRIVGEFLQPGGYHVLKDLGLGDTVEGLDAQVVNGYMIHDQESKSEVQIPYPLSENNQVQSGRAFHHGRFIMSLRKAAMAEPNAKFIEGVVLQLLEEDDVVMGVQYKDKETGDIKELHAPLTVVADGLFSKFRKSLVSNKVSVSSHFVGFLMKNAPQFKANHAELILANPSPVLIYQISSSETRVLVDIRGEMPRNLREYMVEKIYPQIPDHLKEPFLEATDNSHLRSMPASFLPPSSVKKRGVLLLGDAYNMRHPLTGGGMTVAFKDIKLWRKLLKGIPDLYDDAAIFEAKKSFYWARKTSHSFVVNILAQALYELFSATDDSLHQLRKACFLYFKLGGECVAGPVGLLSVLSPNPLVLIGHFFAVAIYAVYFCFKSEPWITKPRALLSSGAVLYKACSVIFPLIYSEMKYMVH

SEQ ID NO: 308375 - protein, 379 aa, Artificial Sequence
  derived and/or modified sequence
MIHDQESKSEVQIPYPLSENNQVQSGRAFHHGRFIMSLRKAAMAEPNAKFIEGVVLQLLEEDDVVMGVQYKDKETGDIKELHAPLTVVADGLFSKFRKSLVSNKVSVSSHFVGFLMKNAPQFKANHAELILANPSPVLIYQISSSETRVLVDIRGEMPRNLREYMVEKIYPQIPDHLKEPFLEATDNSHLRSMPASFLPPSSVKKRGVLLLGDAYNMRHPLTGGGMTVAFKDIKLWRKLLKGIPDLYDDAAIFEAKKSFYWARKTSHSFVVNILAQALYELFSATDDSLHQLRKACFLYFKLGGECVAGPVGLLSVLSPNPLVLIGHFFAVAIYAVYFCFKSEPWITKPRALLSSGAVLYKACSVIFPLIYSEMKYMVH

SEQ ID NO: 308376 - DNA, 1440 bp, Artificial Sequence
  derived and/or modified sequence
atgctgagaagaaagggcaccaacatcagcgagaccagcctgatcggcaccgccgcctgcaccagcaccagcagccagaacgaccccgaggtgatcatcgtgggcgccggcgtgctgggcagcgccctggccgccgtgctgagcagagacggcagaaaggtgaccgtgatcgagagagacctgaaggagcccgacagaatcgtgggcgagttcctgcagcccggcggctaccacgtgctgaaggacctgggcctgggcgacaccgtggagggcctggacgcccaggtggtgaacggctacatgatccacgaccaggagagcaagagcgaggtgcagatcccctaccccctgagcgagaacaaccaggtgcagagcggcagagccttccaccacggcagattcatcatgagcctgagaaaggccgccatggccgagcccaacgccaagttcatcgagggcgtggtgctgcagctgctggaggaggacgacgtggtgatgggcgtgcagtacaaggacaaggagaccggcgacatcaaggagctgcacgcccccctgaccgtggtggccgacggcctgttcagcaagttcagaaagagcctggtgagcaacaaggtgagcgtgagcagccacttcgtgggcttcctgatgaagaacgccccccagttcaaggccaaccacgccgagctgatcctggccaaccccagccccgtgctgatctaccagatcagcagcagcgagaccagagtgctggtggacatcagaggcgagatgcccagaaacctgagagagtacatggtggagaagatctacccccagatccccgaccacctgaaggagcccttcctggaggccaccgacaacagccacctgagaagcatgcccgccagcttcctgccccccagcagcgtgaagaagagaggcgtgctgctgctgggcgacgcctacaacatgagacaccccctgaccggcggcggcatgaccgtggccttcaaggacatcaagctgtggagaaagctgctgaagggcatccccgacctgtacgacgacgccgccatcttcgaggccaagaagagcttctactgggccagaaagaccagccacagcttcgtggtgaacatcctggcccaggccctgtacgagctgttcagcgccaccgacgacagcctgcaccagctgagaaaggcctgcttcctgtacttcaagctgggcggcgagtgcgtggccggccccgtgggcctgctgagcgtgctgagccccaaccccctggtgctgatcggccacttcttcgccgtggccatctacgccgtgtacttctgcttcaagagcgagccctggatcaccaagcccagagccctgctgagcagcggcgccgtgctgtacaaggcctgcagcgtgatcttccccctgatctacagcgagatgaagtacatggtgcactag

SEQ ID NO: 308377 - DNA, 1140 bp, Artificial Sequence
  derived and/or modified sequence
atgatccacgaccaggagagcaagagcgaggtgcagatcccctaccccctgagcgagaacaaccaggtgcagagcggcagagccttccaccacggcagattcatcatgagcctgagaaaggccgccatggccgagcccaacgccaagttcatcgagggcgtggtgctgcagctgctggaggaggacgacgtggtgatgggcgtgcagtacaaggacaaggagaccggcgacatcaaggagctgcacgcccccctgaccgtggtggccgacggcctgttcagcaagttcagaaagagcctggtgagcaacaaggtgagcgtgagcagccacttcgtgggcttcctgatgaagaacgccccccagttcaaggccaaccacgccgagctgatcctggccaaccccagccccgtgctgatctaccagatcagcagcagcgagaccagagtgctggtggacatcagaggcgagatgcccagaaacctgagagagtacatggtggagaagatctacccccagatccccgaccacctgaaggagcccttcctggaggccaccgacaacagccacctgagaagcatgcccgccagcttcctgccccccagcagcgtgaagaagagaggcgtgctgctgctgggcgacgcctacaacatgagacaccccctgaccggcggcggcatgaccgtggccttcaaggacatcaagctgtggagaaagctgctgaagggcatccccgacctgtacgacgacgccgccatcttcgaggccaagaagagcttctactgggccagaaagaccagccacagcttcgtggtgaacatcctggcccaggccctgtacgagctgttcagcgccaccgacgacagcctgcaccagctgagaaaggcctgcttcctgtacttcaagctgggcggcgagtgcgtggccggccccgtgggcctgctgagcgtgctgagccccaaccccctggtgctgatcggccacttcttcgccgtggccatctacgccgtgtacttctgcttcaagagcgagccctggatcaccaagcccagagccctgctgagcagcggcgccgtgctgtacaaggcctgcagcgtgatcttccccctgatctacagcgagatgaagtacatggtgcactag

SEQ ID NO: 308378 - DNA, 1440 bp, Artificial Sequence
  derived and/or modified sequence
atgttaaggcgcaaggggaccaatatctccgagacatcacttatcgggaccgcagcctgcacatctacttcatctcagaacgaccccgaagtaatcatcgtcggagcgggcgttctcggctcagccctggcggccgttctgtccagagacgggcggaaggtgacggtcattgagagagatcttaaagagcctgaccgaattgtgggcgagtttctgcaacccggagggtaccatgtgctaaaggacctcggacttggcgatacagtggagggcctggatgctcaagtggttaacggttatatgattcacgaccaagaaagtaagagcgaagtgcagattccctatcccctgtctgaaaataaccaagtgcaaagtggccgagcttttcatcatggtagattcataatgagtctccggaaggcggcaatggcagaaccaaacgcaaagttcatagagggggtggtactccagctcctcgaggaagacgacgttgtcatgggtgtgcaatacaaagacaaagaaaccggagacataaaggagctgcatgcgccactgacagtggtggctgatggtctattcagcaagttccgtaagtccttagtgtcaaataaagtgagtgtctcctcccactttgtggggttcctgatgaaaaacgccccccagtttaaagccaatcatgcagagcttatcctcgccaacccctcacccgtcctgatatatcagatctcctcgtccgaaacccgggttttggtggatatccggggcgaaatgcctagaaatctcagggaatatatggttgaaaaaatctatcctcagatacctgatcacctgaaggaaccttttctcgaagccactgacaatagccacttacggtctatgcctgcctcctttctgccacccagtagcgtgaaaaagcgaggggtgctgcttctgggtgacgcctacaacatgaggcatcctttgaccggcggtggcatgacagtagccttcaaagacataaagctctggcggaagctgctgaagggtatccccgacttgtatgatgatgccgccatattcgaagctaagaaatcgttctactgggctcgcaaaaccagtcacagctttgtcgtaaacatccttgcccaggccctgtatgagctcttctcagccacagatgactccttgcatcagctgagaaaggcatgtttcttgtacttcaagctgggcggagagtgtgtcgcaggcccggtggggctgctctctgtgctgtccccaaacccgttagtgttaattggccacttcttcgccgtcgcaatctacgcggtatacttctgttttaaaagtgagccctggataactaagccacgagcactgctgtcctctggtgcggtgctgtataaggcttgctctgtgatattcccactgatctatagtgaaatgaagtacatggtgcactag

SEQ ID NO: 308379 - DNA, 1140 bp, Artificial Sequence
  derived and/or modified sequence
atgattcacgatcaggagtcgaaatctgaggttcagatcccttaccctctgtccgaaaataaccaagtccagagcggtagagcgttccaccatggccggttcataatgtcgctgcggaaagccgccatggctgaaccgaatgctaagtttatcgagggagtggttctacagttgttggaggaggatgacgtcgttatgggggttcagtacaaggacaaagaaaccggcgatataaaggagctgcatgcaccgttaaccgtcgtggcggacggcctcttttccaaatttcgcaaatccctggtgtccaataaagtttcggtatcaagtcatttcgtgggatttctgatgaaaaacgctccccagttcaaagctaaccatgctgaactgatcttagcgaatccttctcccgtgttgatttatcagatctcctctagcgaaaccagagtgctggtggatatcagaggcgagatgcctagaaacctccgggaatatatggtagagaagatctatccacaaatccctgaccaccttaaggaaccctttcttgaggcaaccgacaatagtcatcttcgctccatgccagcaagcttcctccccccttcctcagtgaagaaacggggcgtgttacttctgggcgacgcctataacatgaggcaccctctgacagggggcggcatgaccgtggcattcaaggacataaagctgtggagaaagcttctgaaggggatcccagatttatacgatgacgctgccatcttcgaagcgaagaaatctttctactgggcccgcaagacaagtcacagttttgtggtcaatatactggcacaggctctgtacgagctatttagtgccaccgacgattctctgcatcagcttagaaaggcctgttttctgtacttcaaactcggaggggagtgcgtcgctggtcctgttggtctgctttccgtactgagtccgaatccattagtcctgattggccatttctttgcggtcgccatatatgcggtatacttctgcttcaaaagcgaaccctggatcacaaagcccagggccctcttgtcgagtggcgccgtgttatacaaggcctgctccgtcatcttccctctgatttactctgagatgaaatatatggtgcactag

SEQ ID NO: 308380 - DNA, 1440 bp, Artificial Sequence
  derived and/or modified sequence
atgctgcggaggaagggcaccaacatcagcgagaccagcctgattggaacagctgcctgcaccagcaccagcagccagaatgaccctgaggtgatcatcgtgggcgctggggtgctgggcagcgccctggccgctgtgctgagcagagatggcaggaaggtgacagtgattgagcgggacctgaaggagccagacagaattgtgggggagttcctgcagcccggcggctaccacgtgctgaaggacctgggcctgggggacacagtggagggcctggatgcccaggtggtgaatggctacatgattcatgaccaggagagcaagtctgaggtgcagatcccctaccccctgtctgagaacaaccaggtgcagagcggccgggccttccaccacggccgcttcatcatgagcctgaggaaggccgccatggccgagcccaatgccaagttcattgaaggagtggtgctgcagctgctggaggaggatgatgtggtgatgggcgtgcagtacaaggacaaggagactggagacatcaaggagctgcacgcccccctgactgtggtggctgatggcctcttcagcaagttcaggaagagcctggtgagcaacaaggtgtctgtgagcagccactttgtgggcttcctgatgaagaatgccccccagttcaaggccaaccacgccgagctgatcctggccaaccccagccctgtgctgatctaccagatcagcagcagcgagaccagggtgctggtggacatccggggggagatgcccaggaacctgcgggagtacatggtggagaagatctacccccagatcccagaccacctgaaggagcccttcctggaggccacagacaacagccacctgcgctccatgcctgccagcttcctgccccccagctctgtgaagaagaggggcgtgctgctgctgggagatgcctacaacatgaggcaccccctgaccggcggcggcatgacagtggccttcaaggacatcaagctgtggaggaagctgctgaagggcatcccagacctgtatgatgatgctgccatctttgaggccaagaagagcttctactgggccaggaagaccagccacagctttgtggtgaacatcctggcccaggccctgtatgagctgttcagcgccacagatgacagcctgcaccagctgaggaaggcctgcttcctgtacttcaagctgggcggagaatgtgtggccggccctgtgggcctgctgtctgtgctgagccccaaccccctggtgctgattggccacttctttgctgtggccatctatgctgtgtacttctgcttcaagtctgagccctggatcaccaagccccgggccctgctgagcagtggagctgtgctgtacaaggcctgcagcgtcatcttccccctcatctacagcgagatgaagtacatggtgcactag

SEQ ID NO: 308381 - DNA, 1140 bp, Artificial Sequence
  derived and/or modified sequence
atgattcatgaccaggagagcaagtctgaggtgcagatcccctaccccctgtctgagaacaaccaggtgcagagcggccgggccttccaccacggccgcttcatcatgagcctgaggaaggccgccatggccgagcccaatgccaagttcattgaaggagtggtgctgcagctgctggaggaggatgatgtggtgatgggcgtgcagtacaaggacaaggagactggagacatcaaggagctgcacgcccccctgactgtggtggctgatggcctcttcagcaagttcaggaagagcctggtgagcaacaaggtgtctgtgagcagccactttgtgggcttcctgatgaagaatgccccccagttcaaggccaaccacgccgagctgatcctggccaaccccagccctgtgctgatctaccagatcagcagcagcgagaccagggtgctggtggacatccggggggagatgcccaggaacctgcgggagtacatggtggagaagatctacccccagatcccagaccacctgaaggagcccttcctggaggccacagacaacagccacctgcgctccatgcctgccagcttcctgccccccagctctgtgaagaagaggggcgtgctgctgctgggagatgcctacaacatgaggcaccccctgaccggcggcggcatgacagtggccttcaaggacatcaagctgtggaggaagctgctgaagggcatcccagacctgtatgatgatgctgccatctttgaggccaagaagagcttctactgggccaggaagaccagccacagctttgtggtgaacatcctggcccaggccctgtatgagctgttcagcgccacagatgacagcctgcaccagctgaggaaggcctgcttcctgtacttcaagctgggcggagaatgtgtggccggccctgtgggcctgctgtctgtgctgagccccaaccccctggtgctgattggccacttctttgctgtggccatctatgctgtgtacttctgcttcaagtctgagccctggatcaccaagccccgggccctgctgagcagtggagctgtgctgtacaaggcctgcagcgtcatcttccccctcatctacagcgagatgaagtacatggtgcactag

SEQ ID NO: 308382 - DNA, 1440 bp, Artificial Sequence
  derived and/or modified sequence
atgctgcggcggaagggcaccaacatcagcgagaccagcctgatcggcacggctgcctgcacttccacgagtagccagaatgatcctgaggtaatcattgtgggagctggggttctcggcagcgccttagccgccgttctgtcacgggacgggagaaaagtgactgtcatagagagagacctgaaagaacctgatcggattgtaggggaatttctgcaacctgggggctaccatgtgttaaaagacctcgggctcggtgatacagtggagggactggatgcccaggtcgtcaatggttacatgatacacgaccaggagagcaagagcgaggtccagattccttatcccctctctgaaaataatcaggtgcagtcaggacgcgcatttcaccacggacggttcatcatgagcttgcgcaaagcagccatggcggagccgaatgcaaagtttatcgagggggtggtgctccagttactggaggaggacgatgtcgtcatgggcgtgcaatacaaggacaaggaaaccggcgatataaaagagcttcacgcaccactaaccgtcgtggctgacggcctgtttagtaaatttcgtaagagcctcgtgagcaacaaggtgagcgtttccagtcattttgtggggttcttgatgaaaaacgcccctcagtttaaagccaaccatgctgagctcattctagccaatccatctcctgtcctgatttaccagatctcatcctccgagactcgggttcttgtggacatccgcggtgaaatgccacggaatttgcgcgagtacatggtggaaaagatttacccacaaatcccggaccatcttaaagagccattcctggaggctactgacaactcccacctgcgaagcatgcccgcaagcttcctcccaccatccagcgtgaaaaagaggggagtccttcttctcggcgacgcctacaacatgcgacacccccttaccgggggagggatgaccgtggctttcaaggatatcaaactgtggcgcaaactccttaagggcattcctgacctctacgatgacgctgccattttcgaagccaaaaagagtttttactgggctaggaaaacttcccattcctttgtggttaatattctggcccaagctctatacgaactgttctccgcgaccgatgattctttacaccagctcaggaaagcttgctttctgtactttaaattgggaggagagtgtgtagccggccccgttgggctgctgtcagtgctgagtccgaatccactagtgcttattggacacttcttcgcggtggctatctatgccgtgtacttttgtttcaagtcagagccctggattacaaagccacgggccctgctgtccagcggggcggtcctgtacaaggcctgctcagtcattttcccgcttatttactctgagatgaaatatatggtacattag

SEQ ID NO: 308383 - DNA, 1140 bp, Artificial Sequence
  derived and/or modified sequence
atgatccacgaccaggagagcaagagcgaggtgcagatcccctacccactatcagaaaacaaccaggtgcagtctggcagagcctttcaccacggccggttcatcatgtctcttcgcaaggctgctatggccgaaccgaacgcaaagtttattgaaggggtggtcctccaactcctggaggaagacgacgtggtaatgggggtgcagtacaaggacaaggaaacaggagatatcaaagaactgcacgctcctctgacagtggtcgccgacggccttttctctaaattcaggaagagcctcgtgagtaataaagtctccgtcagctcacactttgtgggtttcctcatgaaaaacgctccccagttcaaggccaatcacgccgaattaatattggcaaacccttctcctgtgctgatttaccagatttcttctagcgagactcgggtcctcgtcgatatacgtggggaaatgcctaggaacttaagggagtacatggtggagaagatctatccacagatacccgaccatctgaaggagccatttttggaggctaccgacaactcacacctgcgcagcatgccagcctcttttctgcctccctctagcgttaaaaagaggggagtgttactgctcggagatgcctacaatatgcggcatcctctgacagggggcgggatgacagtcgcatttaaggacatcaaactctggcgtaaacttctcaagggaatacccgacctgtacgacgatgccgccatctttgaggccaagaagtccttctattgggcaagaaaaacctcgcactcatttgtcgttaatatacttgcccaagctttatacgagcttttttcagcgactgacgatagcctgcaccagctgagaaaggcatgtttcttatatttcaagctgggtggagaatgtgtggctggtcctgtgggtctgttatccgtgttatcccccaacccactcgtactcataggccacttttttgcggtagctatttacgccgtgtatttctgtttcaaatcagagccctggattacgaagcctagagctctactttcgtccggagcagtgctctacaaggcttgcagcgtgatctttccacttatctactctgaaatgaagtatatggtccactag

SEQ ID NO: 308384 - DNA, 1440 bp, Artificial Sequence
  derived and/or modified sequence
atgctgaggaggaagggcacaaacatttccgagacctcactgatcggtactgcggcttgtacttccactagctcccagaacgacccagaagttatcattgtaggtgcaggggtgttgggcagcgccctggcagcggtgctgagccgcgacgggaggaaagtcaccgtgatagagcgtgatttaaaagagcctgataggatcgtcggagagtttctgcagccgggaggctatcacgtgctgaaagacttgggcctcggggatactgtggaggggttggatgcccaagttgtgaacggttacatgatccacgatcaggagagtaaatccgaagtccaaatcccctatcccttgagtgagaataatcaggtccagtctggtagggcctttcatcatgggagattcataatgtccttaagaaaggcagccatggccgaacctaacgcaaagttcatagagggagttgtgctgcagctgcttgaagaagatgacgtggtgatgggcgtccagtacaaagacaaagaaacgggggacataaaagaactgcacgcacccctgacggtcgtagccgacggcctgttctctaagtttcgaaagtcactcgtgtcaaacaaagtttccgttagtagccattttgtggggtttcttatgaaaaatgcacctcaatttaaagctaaccacgcagagcttattcttgctaacccaagtcccgttctgatctatcaaatatcaagcagcgaaactagagtcctggtcgacatccgaggcgagatgccacgtaatctacgcgagtacatggtggagaagatatatcctcaaattcctgaccacctgaaagagcctttcctcgaggcaacagacaactcccatctgcggtctatgccagcatctttcctccctccttcatcggtcaagaagcggggagtgctgcttctgggtgacgcatataacatgaggcacccccttacaggaggcggtatgacagtcgcattcaaagacattaagttgtggcgtaaactcctcaaaggtatcccagatctgtacgatgatgcagccatattcgaagcaaaaaagtcattctattgggcacgcaaaacctcccactcttttgttgtcaatatacttgcacaggccttgtacgaactgttctcagccactgacgactcactgcaccagttaaggaaggcctgctttttatactttaagcttggtggcgaatgcgtagcgggtccagtcggcctgctatctgttttatcccccaaccctctcgtcctgatcggccacttctttgccgttgcgatttatgctgtctacttttgtttcaaaagcgagccttggatcacaaagcctcgcgcactcctctccagcggtgctgtgctgtacaaagcttgctcggtgattttccctctcatatactccgagatgaagtacatggtccattag

SEQ ID NO: 308385 - DNA, 1140 bp, Artificial Sequence
  derived and/or modified sequence
atgatccacgaccaagaatccaaatctgaggtgcaaataccttaccctctcagcgagaacaaccaagtgcaatcgggtagggcattccatcacggccgtttcatcatgtccctacgcaaagcagccatggccgagcccaatgcgaaattcattgaaggggtggtgctgcagctgttagaagaggacgatgtagtgatgggcgtgcaatacaaggacaaagagacaggggacattaaagaactgcacgctccactgacggtggtggcagacggccttttcagcaaattccggaagtctctggtctcgaataaggtcagcgtgtcatctcactttgtcggcttcttgatgaagaatgccccacaatttaaggcgaaccatgccgaattgatcctggctaatccatcacctgtcctaatatatcagatcagttcttccgagacacgcgtccttgtagacatacgcggagaaatgccgaggaatcttagagagtatatggtggaaaaaatctacccgcagatccccgaccatctcaaagagccatttctggaagccaccgataattcccatctgcgcagcatgccagcgagttttctcccaccgagcagcgtgaagaaaaggggtgtacttttgctcggagacgcctacaatatgcgccacccccttactggcggaggcatgaccgtagcctttaaagacattaaactgtggaggaaactgctgaagggcatcccagacctctacgacgacgcagccatttttgaagccaaaaagagtttctattgggcacgtaagacatcccatagttttgtggtcaatatccttgcgcaggccctgtatgagttattcagcgcgactgatgattccctgcaccagttacgtaaagcctgcttcttgtacttcaaactaggcggagaatgcgtcgctggtccggtgggacttttgagtgtcctgtcaccaaatcccctggtgttgatagggcacttcttcgccgtcgcaatatatgccgtttacttctgcttcaagagtgaaccgtggattacaaaacccagggccctgctgagctcaggagccgtactttataaggcctgtagtgtgatatttcctctgatttactctgagatgaagtacatggttcactag

SEQ ID NO: 308386 - DNA, 1799 bp, Artificial Sequence
  derived and/or modified sequence
gataatctccgccttgaccggtgccaccaaagaagccttggaaccatgtggacttttctgggcattgccactttcacctatttttataagaagttcggggacttcatcactttggccaacagggaggtcctgttgtgcgtgctggtgttcctctcgctgggcctggtgctctcctaccgctgtcgccaccgaaacgggggtctcctcgggcgccagcagagcggctcccagttcgccctcttctcggaatgacccagagatggaagaaaggtgacagtcattgagagagacttaaaagagcctgacagaatagttggagaattcctgcagccgggtggttatcatgttctcaaagaccttggtcttggagatacagtggaaggtcttgatgcccaggttgtaaatggttacatgattcatgatcaggaaagcaaatcagaggttcagattccttaccctctgtcagaaaacaatcaagtgcagagtggaagagctttccatcacggaagattcatcatgagtctccggaaagcagctatggcagagcccaatgcaaagtttattgaaggtgttgtgttacagttattagaggaagatgatgttgtgatgggagttcagtacaaggataaagagactggagatatcaaggaactccatgctccactgactgttgttgcagatgggcttttctccaagttcaggaaaagcctggtctccaataaagtttctgtatcatctcattttgttggctttcttatgaagaatgcaccacagtttaaagcaaatcatgctgaacttattttagctaacccgagtccagttctcatctaccagatttcatccagtgaaactcgagtacttgttgacattagaggagaaatgccaaggaatttaagagaatacatggttgaaaaaatttacccacaaatacctgatcacctgaaagaaccattcttagaagccactgacaattctcatctgaggtccatgccagcaagcttccttcctccttcatcagtgaagaaacgaggtgttcttcttttgggagacgcatataatatgaggcatccacttactggtggaggaatgactgttgcttttaaagatataaaactatggagaaaactgctaaagggtatccctgacctttatgatgatgcagctattttcgaggccaaaaaatcattttactgggcaagaaaaacatctcattcctttgtcgtgaatatccttgctcaggctctttatgaattattttctgccacagatgattccctgcatcaactaagaaaagcctgttttctttatttcaaacttggtggcgaatgtgttgcgggtcctgttgggctgctttctgtattgtctcctaaccctctagttttaattggacacttctttgctgttgcaatctatgccgtgtatttttgctttaagtcagaaccttggattacaaaacctcgagcccttctcagtagtggtgctgtattgtacaaagcgtgttctgtaatatttcctctaatttactcagaaatgaagtatatggttcattaagcttaaaggggaaccatttgtgaatgaatatttggaacttaccaagtcctaagagacttttggaagaggatatatatagcatagtaccataccacttataaagtggaaactcttggaccaagatttggattaatttgtttttgaagttttttgtatataaatatgtaaatacatgctttaatttgcaatttaaaatgaaggggttaaataagttagacatttaaaagaaatgattgttaccataaatt

SEQ ID NO: 308387 - protein, 519 aa, Artificial Sequence
  derived and/or modified sequence
MLQLMDSGITICLRNGAASVFKKKEWSTQGEENKQDSKLKKLSEDSLTKQPEEVFDVLEKLGEGSYGSVFKAIHKESGQVVAIKQVPVESDLQEIIKEISIMQQCDSPYVVKYYGSYFKNTDLWIVMEYCGAGSVSDIIRLRNKTLIEDEIATILKSTLKGLEYLHFMRKIHRDIKAGNILLNTEGHAKLADFGVAGQLTDTMAKRNTVIGTPFWMAPEVIQEIGYNCVADIWSLGITSIEMAEGKPPYADIHPMRAIFMIPTNPPPTFRKPELWSDDFTDFVKKCLVKNPEQRATATQLLQHPFIKNAKPVSILRDLITEAMEIKAKRHEEQQRELEEEEENSDEDELDSHTMVKTSVESVGTMRATSTMSEGAQTMIEHNSTMLESDLGTMVINSEDEEEEDGTMKRNATSPQVQRPSFMDYFDKQDFKNKSHENCNQNMHEPFPMSKNVFPDNWKVPQDGDFDFLKNLSLEELQMRLKALDPMMEREIEELRQRYTAKRQPILDAMDAKKRRQQNF

SEQ ID NO: 308388 - DNA, 1560 bp, Artificial Sequence
  derived and/or modified sequence
atgctgcagctgatggacagcggcatcaccatctgcctgagaaacggcgccgccagcgtgttcaagaagaaggagtggagcacccagggcgaggagaacaagcaggacagcaagctgaagaagctgagcgaggacagcctgaccaagcagcccgaggaggtgttcgacgtgctggagaagctgggcgagggcagctacggcagcgtgttcaaggccatccacaaggagagcggccaggtggtggccatcaagcaggtgcccgtggagagcgacctgcaggagatcatcaaggagatcagcatcatgcagcagtgcgacagcccctacgtggtgaagtactacggcagctacttcaagaacaccgacctgtggatcgtgatggagtactgcggcgccggcagcgtgagcgacatcatcagactgagaaacaagaccctgatcgaggacgagatcgccaccatcctgaagagcaccctgaagggcctggagtacctgcacttcatgagaaagatccacagagacatcaaggccggcaacatcctgctgaacaccgagggccacgccaagctggccgacttcggcgtggccggccagctgaccgacaccatggccaagagaaacaccgtgatcggcacccccttctggatggcccccgaggtgatccaggagatcggctacaactgcgtggccgacatctggagcctgggcatcaccagcatcgagatggccgagggcaagcccccctacgccgacatccaccccatgagagccatcttcatgatccccaccaaccccccccccaccttcagaaagcccgagctgtggagcgacgacttcaccgacttcgtgaagaagtgcctggtgaagaaccccgagcagagagccaccgccacccagctgctgcagcaccccttcatcaagaacgccaagcccgtgagcatcctgagagacctgatcaccgaggccatggagatcaaggccaagagacacgaggagcagcagagagagctggaggaggaggaggagaacagcgacgaggacgagctggacagccacaccatggtgaagaccagcgtggagagcgtgggcaccatgagagccaccagcaccatgagcgagggcgcccagaccatgatcgagcacaacagcaccatgctggagagcgacctgggcaccatggtgatcaacagcgaggacgaggaggaggaggacggcaccatgaagagaaacgccaccagcccccaggtgcagagacccagcttcatggactacttcgacaagcaggacttcaagaacaagagccacgagaactgcaaccagaacatgcacgagcccttccccatgagcaagaacgtgttccccgacaactggaaggtgccccaggacggcgacttcgacttcctgaagaacctgagcctggaggagctgcagatgagactgaaggccctggaccccatgatggagagagagatcgaggagctgagacagagatacaccgccaagagacagcccatcctggacgccatggacgccaagaagagaagacagcagaacttctag

SEQ ID NO: 308389 - DNA, 1560 bp, Artificial Sequence
  derived and/or modified sequence
atgctgcagctgatggactctggcattaccatatgccttaggaacggagctgccagcgtattcaaaaagaaggagtggtctacacagggggaagagaataagcaagactccaagctaaagaaactgtccgaggattcgttgacaaagcagccagaagaagtgtttgatgtgttagaaaagttgggcgagggtagttacggaagcgttttcaaggccattcacaaggagagcggtcaggtcgtggccatcaaacaagtgcccgtggaatctgatctgcaggaaattataaaggagatatccattatgcagcagtgtgacagtccatacgtggtgaagtactacggcagctatttcaagaacacggacctgtggattgtgatggaatactgtggggccgggtccgtgagtgacatcatcagacttaggaacaagacactaatcgaggacgagatcgcaaccatcttgaaaagcacactgaagggtctcgaatatctgcattttatgcggaagatccatcgtgacataaaagccggaaatatcctacttaacaccgaaggacacgctaagcttgcagacttcggggttgctgggcaactgacagacactatggccaaacggaacacagttatcggtacccctttctggatggcccctgaggtgatccaagaaatcggctataattgtgtggcggatatctggagcctgggaattacctctatcgagatggccgaggggaagcccccttatgctgatatccatcccatgcgggccattttcatgatcccgacaaacccgccaccgaccttccggaagccggagctatggtctgatgactttaccgatttcgtgaaaaaatgtttagttaaaaacccagaacaacgcgcaactgcaactcagctcctgcagcacccttttattaaaaacgccaagcctgtctcgattctgcgtgatcttataactgaggccatggagatcaaggccaaaagacacgaagaacaacagcgcgagctcgaagaggaggaagagaactctgatgaagatgaactcgacagtcatactatggtcaagacatctgttgaatctgtgggcactatgagggctacatctacgatgtctgaaggggcccagactatgattgagcataactcaacgatgttggaatccgacctgggcaccatggtgattaatagcgaggatgaagaagaggaggatggaacaatgaaaagaaatgccaccagtccacaggtccaacggccatccttcatggactattttgacaagcaggactttaagaacaagtctcatgagaattgtaatcaaaacatgcatgagcccttccccatgagcaaaaatgtgtttccagacaactggaaagtgccccaagacggagacttcgattttctcaagaatttgagtctagaggagctgcagatgaggctgaaagccttagaccctatgatggaacgcgaaatagaagagctgcgccagagatatacagcgaagaggcaacctatcttggacgctatggacgccaagaaacgcagacagcagaatttctag

SEQ ID NO: 308390 - DNA, 1560 bp, Artificial Sequence
  derived and/or modified sequence
atgctgcagctgatggattctggcatcaccatctgcctgagaaatggagctgcctctgtgttcaagaagaaggagtggagcacccagggcgaggagaacaagcaggacagcaagctgaagaagctgtctgaggacagcctgaccaagcagcctgaggaggtgtttgatgtgctggagaagctgggggagggcagctatggcagcgtcttcaaggccatccacaaggagagcggccaggtggtggccatcaagcaggtgcctgtggagagtgacctgcaggagatcatcaaggagatcagcatcatgcagcagtgtgacagcccctacgtggtgaagtactacggcagctacttcaagaacacagacctgtggatcgtgatggagtactgtggggccggctctgtgtctgacatcatccggctgaggaacaagaccctgattgaagatgaaattgccaccatcctgaagagcaccctgaagggcctggagtacctgcacttcatgaggaagatccaccgggacatcaaggccggcaacatcctgctgaacacagagggccacgccaagctggccgactttggagtggccggccagctgacagacaccatggccaagaggaacacagtcatcggcacccccttctggatggcccctgaggtgatccaggagatcggctacaactgtgtggccgacatctggagcctgggcatcaccagcattgagatggccgagggcaagccaccctatgctgacatccaccccatgagggccatcttcatgatccccaccaaccccccacccaccttcaggaagccagagctgtggagcgatgacttcacagactttgtgaagaagtgcctggtgaagaaccctgagcagagggccacagccacccagctgctgcagcaccccttcatcaagaatgccaagcctgtgtccatcctgcgggacctgatcacagaggccatggagatcaaggccaagagacatgaggagcagcagcgggagctggaggaggaggaggagaacagtgatgaagatgagctggacagccacaccatggtgaagacctctgtggagagcgtgggcaccatgagggccaccagcaccatgtctgagggcgcccagaccatgattgagcacaacagcaccatgctggagagtgacctgggcaccatggtgatcaacagtgaagatgaggaggaggaggatggcaccatgaagagaaatgccaccagcccccaggtgcagaggcccagcttcatggactactttgacaagcaggacttcaagaacaagagccatgagaactgcaaccagaacatgcatgagcccttccccatgagcaagaatgtgtttcctgacaactggaaggtgccccaggatggagactttgacttcctgaagaacctgagcctggaggagctgcagatgaggctgaaggccctggaccccatgatggagcgggagattgaggagctgcggcagcgctacacagccaagaggcagcccatcctggatgccatggatgccaagaagaggcggcagcagaacttctag

SEQ ID NO: 308391 - DNA, 1560 bp, Artificial Sequence
  derived and/or modified sequence
atgctgcagctgatggacagcggcatcaccatctgcctgcggaacggggcagcatccgtgttcaagaagaaggagtggtccacccagggcgaggaaaacaaacaagactccaagctcaaaaaactttctgaagattccctcaccaagcagccggaggaggtttttgatgtgttagagaaactgggggaaggctcctacgggagcgtcttcaaggccattcacaaggagagcggccaggtcgtcgccattaagcaagtgccggtcgagtctgaccttcaggagatcattaaagagatttccattatgcaacagtgtgactcaccctatgtggtgaagtattacggatcgtatttcaagaatacagacctttggattgtcatggaatattgcggcgcgggttcggtctcggacatcattcggctccgaaacaaaactttaatcgaggacgagatcgccaccatcctgaaatccactctgaagggcctggagtacctccactttatgcgaaaaatccacagggatattaaggccggcaatattctgctcaatacggaggggcacgccaagctcgctgactttggtgtcgccggacagctgactgacacaatggccaagcgtaacacagtcatcggaacccccttctggatggcacccgaggtgatacaagaaatcggctacaattgcgttgccgacatctggtctctcggcatcacgagtatcgagatggcagaggggaagccgccatatgctgacatacatccaatgagagccattttcatgattcccacgaatccgccaccaacattcaggaagcctgaactgtggagcgacgatttcactgacttcgtcaagaagtgtctagttaaaaacccagaacagagggctacagcaactcaactcttgcagcatcccttcatcaaaaatgctaagccagttagcattttgagagacctgattaccgaggcgatggaaattaaagccaaacgtcacgaagagcagcagcgggaacttgaggaggaggaagagaactcggatgaagatgaactggattcacacacaatggtcaagacctccgtggagtccgtgggaaccatgcgagccactagcaccatgtccgagggcgctcaaactatgatcgagcataacagtactatgctcgaaagtgacctgggtactatggtgatcaacagcgaagacgaagaggaggaggatgggactatgaagcgaaacgctacttcacctcaggtccagcgcccctcatttatggattacttcgataaacaggacttcaagaacaagtctcatgaaaactgcaaccagaacatgcacgagcccttccccatgtcaaaaaacgtgttcccagacaattggaaagtgcctcaggatggtgattttgatttcctcaaaaatctgagcttagaagagctgcagatgaggcttaaagcccttgaccctatgatggaaagggagattgaggagctgcggcagaggtatactgccaaaaggcaaccaatcctggacgccatggacgccaagaaaagacgccaacagaacttctag

SEQ ID NO: 308392 - DNA, 1560 bp, Artificial Sequence
  derived and/or modified sequence
atgctgcagctgatggattcaggaataacgatctgtctgaggaatggtgcagcatctgtgttcaaaaagaaagaatggagcactcagggtgaagaaaacaagcaagatagtaaattgaagaagctgtctgaggactccctaaccaagcagcctgaggaagtgttcgacgtgctcgagaagctgggggaaggctcttatggttcagtgttcaaggccattcataaggagtctgggcaggttgtggccattaaacaagttcccgtagagtcagatctccaggaaattattaaggagatctcgattatgcaacagtgcgatagtccatacgtagtgaagtactatggctcttacttcaagaacaccgatctgtggatagttatggagtactgtggtgctggttcagtgagcgacataatccgcttgagaaataagactttgattgaggatgagatcgctacgattctaaagtccactctcaagggactagagtacctccacttcatgcgcaagatccaccgggatatcaaagcgggaaacattctccttaacacagaggggcatgcaaaactggcggattttggtgtagctggccagttgaccgatacaatggcgaagcgtaacacggtgatcggcaccccattctggatggctcccgaagtgatccaagaaatcggttataactgtgtcgccgatatttggtctctgggaattacttcaattgagatggccgagggtaagcctccctatgccgacatccaccccatgcgcgctatattcatgattcccacgaatccccctcctacgttcaggaaacccgaactgtggagcgatgatttcaccgatttcgtcaagaagtgtttggtgaagaacccagagcagagggctaccgccacgcagttgttacagcatcccttcatcaaaaatgcaaagcccgtatcgattctgagggatctcattaccgaggctatggaaattaaggcaaagaggcacgaagagcagcagcgtgaactcgaagaggaggaggagaactcagacgaggacgaactggattcccacaccatggtgaagacaagtgtcgaatctgtggggactatgagggcaactagtactatgagcgaaggggctcagacaatgatcgagcataactctacaatgcttgaatcagacctgggtaccatggtcatcaactcggaagacgaggaagaggaggacggcacgatgaaaaggaatgccacatcaccgcaggtacagagaccaagcttcatggactacttcgataagcaggattttaagaacaagtcacacgagaattgtaaccagaacatgcatgaaccattccccatgagtaagaatgttttccccgacaattggaaggttccccaagacggtgactttgatttcctgaaaaaccttagtttagaggaactccagatgcgcctaaaggcactcgacccgatgatggaaagggaaatcgaagagctcagacagaggtacaccgccaaacgacaacctatcctggatgctatggatgccaaaaagcgtcgccagcagaacttttag

SEQ ID NO: 308393 - DNA, 3107 bp, Artificial Sequence
  derived and/or modified sequence
gtgcagaaccgtttggttttcccgaggggtaggcagaatttccaaccccacgagctgctccctctttccgcaaacctcctaaccccggggtttttccataaatgtgtttacttcgtccacgccagcctgcgaagttccaaaatggagtctgggccacgccggcgttctgggcacgactacggtctcttgaaaagatttggaattgaccatgtagataatctctgagagcagttcttaaagtgtaatccagaaccggtggaacttgctagaaacgcatattcttcggaccccctccaaatctgctgaatctgagattgtggaggccattcaatgtcccttcttcaggaatttggaaaaaggatggagagatctctctgagctagactcttcagtggaggaaatgttacaactcatggacagtggcattaccatctgccttaggaacggagcagcctctgtcttcaagaaaaaagaatggagcacacaaggagaagaaaacaagcaagacagtaaactaaaaaagctgagtgaagacagtttgactaagcagcctgaagaagtttttgatgtattagagaagcttggagaagggtcttatggaagtgtatttaaagcaatacacaaggaatccggtcaagttgtcgcaattaaacaagtacctgttgaatcagatcttcaggaaataatcaaagaaatttccataatgcagcaatgtgacagcccatatgttgtaaagtactatggcagttattttaagaatacagacctctggattgttatggagtactgtggcgctggctctgtctcagacataattagattacgaaacaagacattaatagaagatgaaattgcaaccattcttaaatctacattgaaaggactagaatatttgcactttatgagaaaaatacacagagatataaaagctggaaatattctcctcaatacagaaggacatgcaaaattggcagattttggagtggctggtcagttaacagatacaatggcaaaacgcaatactgtaataggaactccattttggatggctcctgaggtgattcaagaaataggctataactgtgtggccgacatctggtcccttggcattacttctatagaaatggctgaaggaaaacctccttatgctgatatacatccaatgagggctatttttatgattcccacaaatccaccaccaacattcagaaagccagaactttggtccgatgatttcaccgattttgttaaaaagtgtttggtgaagaatcctgagcagagagctactgcaacacaacttttacagcatccttttatcaagaatgccaaacctgtatcaatattaagagacctgatcacagaagctatggagatcaaagctaaaagacatgaggaacagcaacgagaattggaagaggaagaagaaaattcggatgaagatgagctggattcccacaccatggtgaagactagtgtggagagtgtgggcaccatgcgggccacaagcacgatgagtgaaggggcccagaccatgattgaacataatagcacgatgttggaatccgacttggggaccatggtgataaacagtgaggatgaggaagaagaagatggaactatgaaaagaaatgcaacctcaccacaagtacaaagaccatctttcatggactactttgataagcaagacttcaagaataagagtcacgaaaactgtaatcagaacatgcatgaacccttccctatgtccaaaaacgtttttcctgataactggaaagttcctcaagatggagactttgactttttgaaaaatctaagtttagaagaactacagatgcggttaaaagcactggaccccatgatggaacgggagatagaagaacttcgtcagagatacactgcgaaaagacagcccattctggatgcgatggatgcaaagaaaagaaggcagcaaaacttttgagtctaatttcctctctgtttttaactattctggagaccaagaaaccactaggaattgaaggaatatttggatatttttaatcctaagattttgccctacaattaggcagaggtcaaaaagtgacaatggtacatgcccaggtaaattcccaaaaggcagaattgacagttgtatctgctgtgcattcactctaagatgaggagaacaaaagaagtgtattctcttgttctgtcagctgcataccagtaataaaactgttatgaaatggattttcaaggtctctaaaccttgaaaatccaaagctattgttgcattgtacagcactgaagggctttatgttacaatattctttattcctatctagtatactaggctatttattgtatccccttaggtaaacttatttatttatgctattttgctttgtttcattttttaaggacaagatcaggatagctttggtgaaggtagggtcatattaatatgatgataatgtgcaaccaatttatactttctgcagggagctatggggtacattccttgatttccaggatagtttttcaaataggaaagcaataatggcagtagttctcaaatgggctaggccttttttatattgaagcaataattccatttttaccctttgaaattttgtttttttgatttttgatgtttggtacaaatagaactatatatatttaggtaaaatagatctatcgtgtttaaaaccaaagaaatcaatggaacccttgcacaaaaaagtgtgataaatatttttaaataaaaacttaatacaaatgtaatttgttaatattgtttcatgttttatgtgtagatctaatagctgaactgattcaaactgtaataagctcatcaatttcatttctatgaaaatgtgctctgttgtcacaggatgtttctgttgattttattcatttcctgggaattggtaaacatcatgttcctgatgataacccagtagcaaaaacatttgtactgagtggtacaagccttggggactgaaaaaaaaaagattaaaaccattaaaaagaaactcatttttacgctgaatgaacatttatatgattgcattgggaccagtcatttcctaagctacatatggccatcttgacagtgttttttcttt

SEQ ID NO: 308394 - protein, 398 aa, Artificial Sequence
  derived and/or modified sequence
MENETVSELNQTQLQPRAVVALEYQVVTILLVLIICGLGIVGNIMVVLVVMRTKHMRTPTNCYLVSLAVADLMVLVAAGLPNITDSIYGSWVYGYVGCLCITYLQYLGINASSCSITAFTIERYIAICHPIKAQFLCTFSRAKKIIIFVWAFTSLYCMLWFFLLDLNISTYKDAIVISCGYKISRNYYSPIYLMDFGVFYVVPMILATVLYGFIARILFLNPIPSDPKENSKTWKNDSTHQNTNLNVNTSNRCFNSTVSSRKQVTKMLAVVVILFALLWMPYRTLVVVNSFLSSPFQENWFLLFCRICIYLNSAINPVIYNLMSQKFRAAFRKLCNCKQKPTEKPANYSVALNYSVIKESDHFSTELDDITVTDTYLSATKVSFDDTCLASEVSFSQS

SEQ ID NO: 308395 - DNA, 1197 bp, Artificial Sequence
  derived and/or modified sequence
atggagaacgagaccgtgagcgagctgaaccagacccagctgcagcccagagccgtggtggccctggagtaccaggtggtgaccatcctgctggtgctgatcatctgcggcctgggcatcgtgggcaacatcatggtggtgctggtggtgatgagaaccaagcacatgagaacccccaccaactgctacctggtgagcctggccgtggccgacctgatggtgctggtggccgccggcctgcccaacatcaccgacagcatctacggcagctgggtgtacggctacgtgggctgcctgtgcatcacctacctgcagtacctgggcatcaacgccagcagctgcagcatcaccgccttcaccatcgagagatacatcgccatctgccaccccatcaaggcccagttcctgtgcaccttcagcagagccaagaagatcatcatcttcgtgtgggccttcaccagcctgtactgcatgctgtggttcttcctgctggacctgaacatcagcacctacaaggacgccatcgtgatcagctgcggctacaagatcagcagaaactactacagccccatctacctgatggacttcggcgtgttctacgtggtgcccatgatcctggccaccgtgctgtacggcttcatcgccagaatcctgttcctgaaccccatccccagcgaccccaaggagaacagcaagacctggaagaacgacagcacccaccagaacaccaacctgaacgtgaacaccagcaacagatgcttcaacagcaccgtgagcagcagaaagcaggtgaccaagatgctggccgtggtggtgatcctgttcgccctgctgtggatgccctacagaaccctggtggtggtgaacagcttcctgagcagccccttccaggagaactggttcctgctgttctgcagaatctgcatctacctgaacagcgccatcaaccccgtgatctacaacctgatgagccagaagttcagagccgccttcagaaagctgtgcaactgcaagcagaagcccaccgagaagcccgccaactacagcgtggccctgaactacagcgtgatcaaggagagcgaccacttcagcaccgagctggacgacatcaccgtgaccgacacctacctgagcgccaccaaggtgagcttcgacgacacctgcctggccagcgaggtgagcttcagccagagctag

SEQ ID NO: 308396 - DNA, 1197 bp, Artificial Sequence
  derived and/or modified sequence
atggaaaacgagaccgtaagcgaactcaaccaaacccaactccagccccgggcggtggtcgccctcgagtaccaggtggtgaccatcctcctcgtgctgatcatttgtggcctgggaattgttggtaacatcatggtcgtgctggtggttatgcgtacaaagcacatgcggacacctaccaactgctacctggttagcctggcggtagccgatctgatggtcctcgtggctgccgggctcccaaatattaccgactcgatctatggatcatgggtgtatgggtacgtgggctgtttatgcattacatacctccagtaccttgggatcaacgcttcttcatgctctattacagcatttacaatcgaacgttacattgccatttgtcaccccattaaggcccaatttttgtgtacttttagcagggctaaaaaaataataattttcgtttgggcctttacttctttgtactgtatgctgtggttttttcttctcgacttgaacataagtacatacaaggatgccatcgtgattagctgtggctataagatctcaagaaattattatagtccgatttacctgatggactttggtgtattttatgtagtgcccatgatcctggcaactgttctgtacggctttatagcaagaattttgttcctgaaccctataccgagcgatccaaaagagaacagcaagacatggaagaacgactccacccaccagaataccaacctgaatgtaaatacaagcaacaggtgctttaattctacagtcagctcaagaaaacaggtaaccaagatgctggccgtagttgtaattctgtttgcattgctctggatgccctatcggactctggtggtagttaactcctttctctcttctccctttcaggaaaactggtttctcctcttttgccggatttgcatttatctgaactccgctatcaatccagtgatctacaacctaatgtcacagaagttcagggctgcctttcgcaagttgtgtaattgcaagcagaagcctacagagaaaccggcgaactacagcgttgcccttaattacagcgtaataaaagagagtgaccacttctccaccgagcttgacgacatcactgtgacggatacctatctttccgctactaaagtgagctttgacgacacgtgcctggcatctgaagtgagcttcagccagagctag

SEQ ID NO: 308397 - DNA, 1197 bp, Artificial Sequence
  derived and/or modified sequence
atggaaaacgaaacagtgtcagaacttaatcagacgcagctgcagcctcgtgccgtggttgctctcgaatatcaagttgtgaccatccttctagtgctgattatctgcgggctcggaatcgtggggaatattatggttgtgctagtggtgatgcggactaaacatatgagaacccctaccaactgttaccttgtctctctggctgtggctgacctgatggttctggttgctgcaggtctacctaacattaccgattccatttatggctcgtgggtgtacggatacgttggttgcctttgtattacctatctccaatacttaggcattaacgccagttcgtgctctatcaccgccttcaccatcgagaggtatatcgccatttgtcatcccatcaaggcccagtttctctgcaccttttcacgagccaagaagatcattatttttgtgtgggcgtttacgtctctgtattgcatgctgtggtttttcctgctcgacttgaacatcagcacatataaggacgccattgtaatcagctgcgggtacaaaatctctcgtaattactacagccctatataccttatggattttggggtgttttacgtggtgcctatgatactcgccaccgttctatacggctttatcgcccggattcttttcctgaaccctatcccgtccgatcccaaggaaaacagtaagacttggaaaaatgactccacccaccaaaatacaaacctgaacgttaatacctcaaacaggtgtttcaattcaactgtctcatccaggaaacaggtcaccaagatgttggcagtagttgtgatattatttgctctgctgtggatgccataccgtacactagtggtggtgaattccttcctatcatctccctttcaggaaaactggttcctcttattctgccgaatttgcatatatctgaattccgcaatcaaccccgtgatatataatctcatgtctcaaaagtttcgagcggcttttaggaaattgtgcaactgtaaacagaaaccgaccgagaagcccgccaactactctgtggccctcaactacagcgtgattaaggagagcgaccacttctcaacagagctcgacgacatcacggtgacagatacttatttatcagccaccaaagtgtcgtttgacgacacctgtctcgcctccgaggtgtcctttagccagtcatag

SEQ ID NO: 308398 - DNA, 1197 bp, Artificial Sequence
  derived and/or modified sequence
atggagaatgaaacagtgtctgagctgaaccagacccagctgcagcccagggctgtggtggccctggagtaccaggtggtgaccatcctgctggtgctgatcatctgtggcctgggcatcgtgggcaacatcatggtggtgctggtggtgatgaggaccaagcacatgaggacccccaccaactgctacctggtgtccctggccgtggccgacctgatggtgctggtggccgccggcctgcccaacatcacagacagcatctacggctcctgggtgtatggctacgtgggctgcctgtgcatcacctacctgcagtacctgggcatcaatgccagcagctgcagcatcacagccttcaccatcgagcgctacatcgccatctgccaccccatcaaggcccagttcctgtgcaccttcagccgggccaagaagatcatcatctttgtgtgggccttcaccagcctgtactgcatgctgtggttcttcctgctggacctgaacatcagcacctacaaggatgccatcgtcatcagctgtggctacaagatcagcaggaactactacagccccatctacctgatggactttggagtcttctacgtggtgcccatgatcctggccaccgtgctgtatggcttcatcgcccgcatcctcttcctgaaccccatccccagcgaccccaaggagaacagcaagacctggaagaatgacagcacccaccagaacaccaacctgaatgtgaacaccagcaaccgctgcttcaacagcacagtgagcagcaggaagcaggtgaccaagatgctggccgtggtggtgatcctgtttgccctgctgtggatgccctaccgcaccctggtggtggtgaacagcttcctgagcagccccttccaggagaactggttcctgctcttctgccgcatctgcatctacctgaacagcgccatcaaccctgtgatctacaacctgatgagccagaagttccgggccgccttcaggaagctgtgcaactgcaagcagaagcccacagagaagccagccaactacagcgtggccctgaactacagcgtcatcaaggagagtgaccacttcagcacagagctggatgacatcaccgtgacagacacctacctgagcgccaccaaggtgtcctttgatgacacctgcctggccagcgaggtgtccttcagccagagctag

SEQ ID NO: 308399 - DNA, 1197 bp, Artificial Sequence
  derived and/or modified sequence
atggagaacgagaccgtgagcgagctgaaccagacccagctgcagcctcgggccgttgtcgccctggaatatcaggtggtcaccattctgctagtactgattatctgcggacttggcattgtggggaatatcatggtagtgctggtcgttatgaggactaagcacatgaggactccaaccaactgttacctggtgagcctcgccgtcgcagatctcatggtcttggttgccgccggactccctaatataactgacagtatctatggatcttgggtctacggctatgtgggttgcctatgtattacatacttgcagtacctcggcattaatgccagctcttgtagtatcacagcgttcaccattgaaaggtacatcgccatctgtcacccaatcaaagcacaatttctatgcaccttctcccgcgcaaagaagatcattatctttgtgtgggcctttacctctctttactgtatgctgtggttctttctgcttgacttaaacataagcacatataaggatgcgattgtgatttcgtgtggctataagatctctcgcaactattatagtccaatttacctgatggacttcggagttttttatgtggtgcccatgattcttgctacagtgctgtacggctttattgctcgtatcctttttcttaatcccattccaagtgaccccaaagagaacagcaagacatggaaaaacgactctacccatcagaacactaatctgaacgtgaacacctccaatcgatgtttcaatagcactgtgtcaagccgcaagcaggttaccaaaatgttggcggttgtagtcatcctctttgctctcttgtggatgccatatcgtaccctggtagtggttaacagtttcctaagctctcctttccaggaaaattggtttctgcttttttgcagaatctgcatttatctgaacagtgctatcaacccagtcatttacaatctgatgtcccagaaattccgggccgccttccgcaagctgtgtaattgcaagcagaagccaacagagaaacccgcaaattattccgtggcacttaactacagcgtgatcaaagagagcgatcattttagtacagagctggatgatataacagtaacggacacatatttaagcgcaactaaggtttcttttgacgatacatgtctagcttccgaggtgtcgtttagccaaagctag

SEQ ID NO: 308400 - DNA, 1197 bp, Artificial Sequence
  derived and/or modified sequence
atggagaacgagaccgtgagcgagctgaaccagacccagctgcagccccgcgcagttgtcgcattagaatatcaggttgttacaatcctgctggttctgataatttgcggcctcggcatcgttggcaatattatggtggtcctagtcgtgatgcggactaagcacatgcgtacccccaccaactgttatttagtgtcattggctgtagccgatcttatggttttggtagccgcgggtctgcctaatatcaccgacagtatttacggatcttgggtatacggatacgtcggatgcctgtgtatcacttatctccagtatctgggcattaacgcaagttcctgcagcattacggcttttaccattgagagatacatagcaatatgccatccaataaaagcacagttcctctgcacctttagtcgagcaaaaaaaatcataatttttgtctgggcttttacttctttatattgcatgctgtggttctttttgttagatctgaatatatctacatacaaagatgcaattgtgattagttgcggctacaagatctcaagaaattactatagcccgatttatctgatggacttcggggtgttctatgtcgttccgatgatcctggcaacggttctgtatggattcatcgccaggattctgttcctgaacccgatcccgagcgaccctaaggaaaattcaaaaacgtggaagaacgacagcacccaccagaacacaaatcttaatgtgaatacaagtaatcggtgtttcaactctaccgtgtcttccaggaagcaagtgacaaagatgctggccgtggtcgtgatcctgttcgcactcctgtggatgccgtatagaacactcgttgtggtaaactccttcttatcttcaccatttcaggagaactggtttcttctcttctgccgaatctgtatctatcttaactctgccattaacccagtgatctacaaccttatgtctcagaagttcagagccgcatttagaaaactgtgcaattgcaagcagaagcctacagagaaaccagcgaattactccgtggcactcaattatagcgtgataaaggaatctgatcatttctcgaccgagctagacgacatcaccgtaaccgatacatacctgagcgctaccaaagttagttttgatgacacctgtctcgcgtccgaggtatccttctcccagtcctag

SEQ ID NO: 308401 - DNA, 1197 bp, Artificial Sequence
  derived and/or modified sequence
atggaaaatgaaacggtgtcagaactgaaccagacccaactccagcccagggctgttgtggccctggagtaccaggtggtgactatcctgctggttctgattatctgcggactgggaattgtgggaaatatcatggtcgtcctggtggtgatgaggaccaagcacatgagaacccccaccaactgctacctcgtgtccctagccgtcgccgacctaatggtgctggtagctgcgggactcccaaacattacggactcaatttacggctcatgggtgtatggatacgtggggtgcctgtgtattacttaccttcaatatctaggaataaacgcatccagctgcagtattactgcctttaccatcgaacgctatatcgccatttgccacccaatcaaagcacaattcctctgtactttcagtcgggcaaaaaagatcatcatattcgtgtgggcctttacaagtctttattgtatgttatggtttttcctgctggatctaaacatctctacctataaagacgctattgtgatcagttgcgggtataaaatcagtaggaactactactcccctatctacctgatggattttggtgttttttacgttgtccccatgattctggctacagtattgtacggcttcatagcccgtatactgttcttgaaccctatccccagcgatcccaaggaaaatagtaaaacatggaaaaatgatagtactcatcaaaataccaacctgaacgtgaacacttctaaccgttgcttcaattcaactgtgagcagcagaaaacaggtgactaagatgctggccgttgtcgtcatactttttgcactgctctggatgccttataggaccctggtggtggtaaacagttttttatcttcacctttccaggagaattggtttttactcttttgcaggatctgcatttatttaaattcagccatcaatccagtcatttacaacctcatgtcacagaagttcagagctgcctttagaaaactgtgcaactgcaaacagaaacccacagagaaacccgctaattactccgtggcattgaattacagcgttatcaaagagtccgatcatttttcaactgaattggacgacattacagtgactgatacatacttgtcagcaacaaaggtgtcgttcgacgacacatgtctggcatctgaggtgtctttcagtcagagctag

SEQ ID NO: 308402 - DNA, 1197 bp, Artificial Sequence
  derived and/or modified sequence
atggagaacgagaccgtttcggagctcaaccagactcaactacagccacgtgcagtggttgctctggaatatcaggtggtgacaattttgctggtgttaattatttgcggacttggtatagtaggcaatataatggtggtgctggtggtaatgaggacaaagcacatgaggacccctacaaattgctatctggtaagtctggccgtggcggatctgatggtgctggtggccgctggcctacccaatattacagactcgatttacggaagttgggtgtatgggtatgtcggctgcctctgtataacttatctgcaatacctgggcattaacgctagcagctgcagcatcacagctttcacgatcgaaaggtacatagccatctgccatccaattaaggctcagtttttgtgcacattctcaagagcaaagaagattattatctttgtgtgggcatttacaagtctgtattgcatgctctggttctttctgctcgacctgaatattagcacctacaaagatgcgattgttatcagctgtggctataaaatctcaaggaattattacagcccaatctacttaatggatttcggtgtgttttatgtagtgcccatgatccttgccactgtgctctatggattcatagcaagaatccttttcttgaatcctatcccctccgaccctaaggagaattctaagacatggaaaaacgattcaactcaccagaatacaaacctaaatgtgaatactagtaaccgctgctttaattccacggtgtcttcaaggaagcaggtgactaagatgctggctgtagtcgtgatcctcttcgccctgctgtggatgccttacaggactcttgtggttgtcaattcattcctcagctcgcccttccaggaaaactggtttttgctgttttgccgcatctgcatatatctgaacagtgccatcaatcctgtgatttataatctgatgtcgcagaagttcagggccgcattccggaaattatgcaactgtaaacagaagcctactgaaaagcccgctaattactcggtcgctctcaactactccgtcatcaaagagagtgaccatttttcaaccgagctagacgacattaccgtcaccgatacatatctgtccgcaaccaaggtgtcattcgatgatacgtgcctcgccagcgaggtgagcttttcacagagttag

SEQ ID NO: 308403 - DNA, 1415 bp, Artificial Sequence
  derived and/or modified sequence
gggggatggaactgctgcaataaaggtgggcgctggaaagaagatgttttgagaagtcagtgtttccgagaaactttaagcttctaaagatggaaaacgagacagtcagtgaactgaaccaaacacagcttcagccacgagcagtggtggccttagaataccaggtggtcaccatcttacttgtactcattatttgtggcctgggcattgtaggcaacatcatggtagtcctggttgtcatgagaaccaagcacatgaggacccccacaaactgctacctggtgagcctggcagtagctgatctcatggtcttggtggccgcaggcctccccaacataacagacagtatctacggttcctgggtctatggctatgttggatgcctctgcattacttacctccagtatttgggaattaatgcatcctcttgttcaataacagcctttaccattgagaggtacatagcaatctgtcaccccatcaaagcccagtttctctgcacattttccagagccaaaaagattatcatctttgtctgggctttcacatctctttactgtatgctctggttcttcttgctggatctcaatattagcacctacaaagatgctattgtgatatcctgtggctacaagatctccaggaattactactcacctatttacctaatggactttggtgtcttttatgttgtgccaatgatcctggctaccgtcctctatggattcatagctagaatccttttcttaaatcccattccttcagatcctaaagaaaactctaagacatggaaaaatgattcaacccatcagaacacaaatctgaatgtaaatacctctaatagatgtttcaacagcacagtatcttcaaggaagcaggtcaccaagatgctggcagtggttgtaattctgtttgcccttttatggatgccctacaggactctagtggttgtcaactcatttctctccagtcctttccaagaaaattggtttttgctcttttgcagaatttgcatttatctcaacagtgccatcaacccggtgatttacaatctcatgtcccagaaattccgtgcagccttcagaaagctctgcaactgcaagcagaagccaacagagaaacctgctaactacagtgtggccctaaattacagcgtcatcaaggagtcagaccatttcagcacagagcttgatgatatcactgtcactgacacttacctgtctgccacaaaagtgtcttttgatgacacctgcttggcttctgaggtatcctttagccaaagttgattcatgaattagaagaaaatggatgacaaagaaaatgagaatctgtgcagtcatcaacaaaagggagaacatggccaatagtcatatgtgaagacagagcagatcagtctttgtcaatgctctaacaaa

SEQ ID NO: 308404 - DNA, 1660 bp, Artificial Sequence
  derived and/or modified sequence
tgttctcattaggggacgatctatgatttgacagcctcactgctgctgctcctgctgctgcttctgcttctgccgcggctgtatggtttgtcattagttggaaagggctgtgagggtttggagaaactgcagttttaaagactgagcactgctaagtggtctccctctcaaatagagtagacaagattttctgcaagattagaaacttggaactattaccacttcatctacccagaaaatcaggcagcgctacagaggataagggggatggaactgctgcaataaaggtgggcgctggaaagaagatgttttgagaagtcagtgtttccgagaaactttaagcttctaaagatggaaaacgagacagtcagtgaactgaaccaaacacagcttcagccacgagcagtggtggccttagaataccaggtggtcaccatcttacttgtactcattatttgtggcctgggcattgtaggcaacatcatggtagtcctggttgtcatgagaaccaagcacatgaggacccccacaaactgctacctggtgagcctggcagtagctgatctcatggtcttggtggccgcaggcctccccaacataacagacagtatctacggttcctgggtctatggctatgttggatgcctctgcattacttacctccagtatttgggaattaatgcatcctcttgttcaataacagcctttaccattgagaggtacatagcaatctgtcaccccatcaaagcccagtttctctgcacattttccagagccaaaaagattatcatctttgtctgggctttcacatctctttactgtatgctctggttcttcttgctggatctcaatattagcacctacaaagatgctattgtgatatcctgtggctacaagatctccaggaattactactcacctatttacctaatggactttggtgtcttttatgttgtgccaatgatcctggctaccgtcctctatggattcatagctagaatccttttcttaaatcccattccttcagatcctaaagaaaactctaagacatggaaaaatgattcaacccatcagaacacaaatctgaatgtaaatacctctaatagatgtttcaacagcacagtatcttcaaggaagcaggtcaccaagatgctggcagtggttgtaattctgtttgcccttttatggatgccctacaggactctagtggttgtcaactcatttctctccagtcctttccaagaaaattggtttttgctcttttgcagaatttgcatttatctcaacagtgccatcaacccggtgatttacaatctcatgtcccagaaattccgtgcagccttcagaaagctctgcaactgcaagcagaagccaacagagaaacctgctaactacagtgtggccctaaattacagcgtcatcaaggagtcagaccatttcagcacagagcttgatgatatcactgtcactgacacttacctgtctgccacaaaagtgtcttttgatgacacctgcttggcttctgaggtatcctttagccaaagttgattcatgaattagaagaaaatggatgacaaagaaaatgagaatctgtgcagtcatcaacaaaagggagaacatggccaatagtcatatgtgaagacagagcagatcagtcttt

SEQ ID NO: 308405 - protein, 1294 aa, Artificial Sequence
  derived and/or modified sequence
MPYEVNAGYDFTNMVRKKNPPLRNVASEGEGQILEPIGTESKVSGKNKEFSADQMSENTDQSDAAELNHKEEHSLHVQDPSSSSKKDLKSAVLSEKAGFNYESPSKGGNFPSFPHDEVTDRNMLAFSSPAAGGVCEPLKSPQRAEADDPQDMACTPSGDSLETKEDQKMSPKATEETGQAQSGQANCQGLSPVSVASKNPQVPSDGGVRLNKSKTDLLVNDNPDPAPLSPELQDFKCNICGYGYYGNDPTDLIKHFRKYHLGLHNRTRQDAELDSKILALHNMVQFSHSKDFQKVNRSVFSGVLQDINSSRPVLLNGTYDVQVTSGGTFIGIGRKTPDCQGNTKYFRCKFCNFTYMGNSSTELEQHFLQTHPNKIKASLPSSEVAKPSEKNSNKSIPALQSSDSGDLGKWQDKITVKAGDDTPVGYSVPIKPLDSSRQNGTEATSYYWCKFCSFSCESSSSLKLLEHYGKQHGAVQSGGLNPELNDKLSRGSVINQNDLAKSSEGETMTKTDKSSSGAKKKDFSSKGAEDNMVTSYNCQFCDFRYSKSHGPDVIVVGPLLRHYQQLHNIHKCTIKHCPFCPRGLCSPEKHLGEITYPFACRKSNCSHCALLLLHLSPGAAGSSRVKHQCHQCSFTTPDVDVLLFHYESVHESQASDVKQEANHLQGSDGQQSVKESKEHSCTKCDFITQVEEEISRHYRRAHSCYKCRQCSFTAADTQSLLEHFNTVHCQEQDITTANGEEDGHAISTIKEEPKIDFRVYNLLTPDSKMGEPVSESVVKREKLEEKDGLKEKVWTESSSDDLRNVTWRGADILRGSPSYTQASLGLLTPVSGTQEQTKTLRDSPNVEAAHLARPIYGLAVETKGFLQGAPAGGEKSGALPQQYPASGENKSKDESQSLLRRRRGSGVFCANCLTTKTSLWRKNANGGYVCNACGLYQKLHSTPRPLNIIKQNNGEQIIRRRTRKRLNPEALQAEQLNKQQRGSNEEQVNGSPLERRSEDHLTESHQREIPLPSLSKYEAQGSLTKSHSAQQPVLVSQTLDIHKRMQPLHIQIKSPQESTGDPGNSSSVSEGKGSSERGSPIEKYMRPAKHPNYSPPGSPIEKYQYPLFGLPFVHNDFQSEADWLRFWSKYKLSVPGNPHYLSHVPGLPNPCQNYVPYPTFNLPPHFSAVGSDNDIPLDLAIKHSRPGPTANGASKEKTKAPPNVKNEGPLNVVKTEKVDRSTQDELSTKCVHCGIVFLDEVMYALHMSCHGDSGPFQCSICQHLCTDKYDFTTHIQRGLHRNNAQVEKNGKPKE

SEQ ID NO: 308406 - DNA, 9990 bp, Artificial Sequence
  derived and/or modified sequence
aatagtgttggtgtcttgaaactgacgtaatgcgcggagactgaggtcctgacaagcgataacatttctgataaagacccgatcttactgcaatctctagcgtcctcttttttggtgctgctggtttctccagacctcgcgtcctctcgattgctctctcgccttcctatttcttttttttttttttaaacaaaaaacaacaccccctcccctctcccacccggcaccgggcacatccttgctctatttcctttctctttctctctctctctctctctctctcttttttaataagggtgggggagggaaaggggggggaggcaggaaagacctttttctctcccccccgcaataatccaagatcaactctgcaaacaacagaagacggttcatggctttggccgccgcgccaccatctttcgggctgccgagggtgttcttgacgattaatcaacagatgtacagatcagctctcaaaatgtcttctgtgtcttctgagcgtcttctaagacaattgcattagcctcctgctagttgactaatagaattaataattgtaaaaagcactctaaagccacatgccttatgaagtcaatgctgggtatgattttacaaatatggtccggaaaaagaacccccctctgagaaacgttgcaagtgaaggcgagggccagatcctggagcctataggtacagaaagcaaggtatctggaaagaacaaagaattttctgcagatcagatgtcagaaaatacggatcagagtgatgctgcagaactaaatcataaggaggaacatagcttgcatgttcaagatccatcttctagcagtaagaaggacttgaaaagcgcagttctgagtgagaaggctggcttcaattatgaaagccccagtaagggaggaaactttccctcctttccgcatgatgaggtgacagacagaaatatgttggctttctcatctccagctgctgggggagtctgtgagcccttgaagtctccgcaaagagcagaggcagatgaccctcaagatatggcctgcaccccctcaggggactcactggagacaaaggaagatcagaagatgtcaccaaaggctacagaggaaacagggcaagcacagagtggtcaagccaattgtcaaggtttgagcccagtttcagtggcctcaaaaaacccacaagtgccttcagatgggggtgtaagactgaataaatccaaaactgacttactggtgaatgacaacccagacccggcacctctgtctccagagcttcaggactttaaatgcaatatctgtggatatggttactacggcaacgaccccacagatctgattaagcacttccgaaagtatcacttaggactgcataaccgcaccaggcaagatgctgagctggacagcaaaatcttggcccttcataacatggtgcagttcagccattccaaagacttccagaaggtcaaccgttctgtgttttctggtgtgctgcaggacatcaattcttcaaggcctgttttactaaatgggacctatgatgtgcaggtgacttcaggtggaacattcattggcattggacggaaaacaccagattgccaagggaacaccaagtatttccgctgtaaattctgcaatttcacttatatgggcaactcatccaccgaattagaacaacattttcttcagactcacccaaacaaaataaaagcttctctcccctcctctgaggttgcaaaaccttcagagaaaaactctaacaagtccatccctgcacttcaatccagtgattctggagacttgggaaaatggcaggacaagataacagtcaaagcaggagatgacactcctgttgggtactcagtgcccataaagcccctcgattcctctagacaaaatggtacagaggccaccagttactactggtgtaaattttgtagtttcagctgtgagtcatctagctcacttaaactgctagaacattatggcaagcagcacggagcagtgcagtcaggcggccttaatccagagttaaatgataagctttccaggggctctgtcattaatcagaatgatctagccaaaagttcagaaggagagacaatgaccaagacagacaagagctcgagtggggctaaaaagaaggacttctccagcaagggagccgaggataatatggtaacgagctataattgtcagttctgtgacttccgatattccaaaagccatggccctgatgtaattgtagtggggccacttctccgtcattatcaacagctccataacattcacaagtgtaccattaaacactgtccattctgtcccagaggactttgcagcccagaaaagcaccttggagaaattacttatccgtttgcttgtagaaaaagtaattgttcccactgtgcactcttgcttctgcacttgtctcctggggcggctggaagctcgcgagtcaaacatcagtgccatcagtgttcattcaccacccctgacgtagatgtactcctctttcactatgaaagtgtgcatgagtcccaagcatcggatgtcaaacaagaagcaaatcacctgcaaggatcggatgggcagcagtctgtcaaggaaagcaaagaacactcatgtaccaaatgtgattttattacccaagtggaagaagagatttcccgacactacaggagagcacacagctgctacaaatgccgtcagtgcagttttacagctgccgatactcagtcactactggagcacttcaacactgttcactgccaggaacaggacatcactacagccaacggcgaagaggacggtcatgccatatccaccatcaaagaggagcccaaaattgacttcagggtctacaatctgctaactccagactctaaaatgggagagccagtttctgagagtgtggtgaagagagagaagctggaagagaaggacgggctcaaagagaaagtttggaccgagagttccagtgatgaccttcgcaatgtgacttggagaggggcagacatcctgcgggggagtccgtcatacacccaagcaagcctggggctgctgacgcctgtgtctggcacccaagagcagacaaagactctaagggatagtcccaatgtggaggccgcccatctggcgcgacctatttatggcttggctgtggaaaccaagggattcctgcagggggcgccagctggcggagagaagtctggggccctcccccagcagtatcctgcatcgggagaaaacaagtccaaggatgaatcccagtccctgttacggaggcgtagaggctccggtgttttttgtgccaattgcctgaccacaaagacctctctctggcgaaagaatgcaaatggcggatatgtatgcaacgcgtgtggcctctaccagaagcttcactcgactcccaggcctttaaacatcattaaacaaaacaacggtgagcagattattaggaggagaacaagaaagcgccttaacccagaggcacttcaggctgagcagctcaacaaacagcagaggggcagcaatgaggagcaagtcaatggaagcccgttagagaggaggtcagaagatcatctaactgaaagtcaccagagagaaattccactccccagcctaagtaaatacgaagcccagggttcattgactaaaagccattctgctcagcagccagtcctggtcagccaaactctggatattcacaaaaggatgcaacctttgcacattcagataaaaagtcctcaggaaagtactggagatccaggaaatagttcatccgtatctgaagggaaaggaagttctgagagaggcagtcctatagaaaagtacatgagacctgcgaaacacccaaattattcaccaccaggcagccctattgaaaagtaccagtacccactttttggacttccctttgtacataatgacttccagagtgaagctgattggctgcggttctggagtaaatataagctctccgttcctgggaatccgcactacttgagtcacgtgcctggcctaccaaatccttgccaaaactatgtgccttatcccaccttcaatctgcctcctcatttttcagctgttggatcagacaatgacattcctctagatttggcgatcaagcattccagacctgggccaactgcaaacggtgcctccaaggagaaaacgaaggcaccaccaaatgtaaaaaatgaaggtcccttgaatgtagtaaaaacagagaaagttgatagaagtactcaagatgaactttcaacaaaatgtgtgcactgtggcattgtctttctggatgaagtgatgtatgctttgcatatgagttgccatggtgacagtggacctttccagtgcagcatatgccagcatctttgcacggacaaatatgacttcacaacacatatccagaggggcctgcataggaacaatgcacaagtggaaaaaaatggaaaacctaaagagtaaaaccttagcacttagcacaattaaatagaaataggttttcttgatgggaattcaatagcttgtaatgtcttatgaagacctattaaaaaaatacttcatagagcctgccttatccaacatgaaattcccttcttttgttattctttcttttgatgagtaggttaccaagattaaaaagtgagataaatggtcaatgagaaagaatggaagatggtaaacaatcactttttaaaacctgttaagtcaaaaccatcttggctaatatgtactggggaaataatccataagagatatcaccagactagaattaatatatttataaagaaagagaccaaaactgtctagaatttgaaagggtttacatattattatactaaagcagtactggactggccattggaccatttgttccaaaacccataaattgttgcctaaatttataatgatcatgaaaccctaggcagaggaggagaaattgaaggtccagggcaatgaaagaaaaatggcgccctctcaatttagtcttctctcattggccatgtttcagattttgacctagaaatgcgagctgtggttaggcttggttagagtgcagcaagcaacatgacagatggtggcacgctgtttttacccagccctgcctgtacatacacatgcacaccctctctgatatttttgtcctttagatgttcaaatactcagtagtccttttgtttgcggtttagattcattttgtccacacatgtacccattttaaaaaacaatgtcctcgatgcttctgtagtgatttcattttagccaggtatttctttcttgtgtgtgatgaaccagtatggatttgcttttctaagcctcctgttggttactaatctcacttggcacattataactaaaggaatcccctcaattcaaaagcatagatggatacaaatgtcagaccgtgggtttaatttgtttagaacacatggcatttcttcacaaggtaacctgctgtatttatttattttcttttggttaaatataatttccaaactttgtggtcaggcagcgtctaaggttacgttaccacagactgacagttggtatatgtaccagccaatcccttcattaaatgtatacagatttagttaagtagcattaaataggattcttagaagtatgtcctcatagaacttttaatacttaaggctttgtaaaaactatccatgaagggaaagctcctcagcataactgctcagggaaatagggctaaataactgaacattaaataattggttaaaggtgctgttagtcgagcctcaatgcttgctacaaggatgtatgtacaaggactgactttaataatttgcattatattgtcccaaccagtagtttattttttgccacggagatgtagaagatattacaagctactggatgcactgtcagattaacttatttcattaaagaagttgggagaacaaataggaaaaaaaaaacttatttttctagtaaatattaatgtattacatttcaaataatggtgcctgacatattgaataattattttctacagtgtacgtatgcaacaaagatattccatcatgcattagagtcagttctggctctgcctagctgtttacatttgcaaatgtagcaaacaaggtaatgaagcaactatttctattgcagtagatatccttttgtgtgtgtgtgtgtgcattaaagttgtaaacggtaacatgaaacaaatgaaagttcttgctataatggtatggaaaacaagaaggaaatgaaaatatttttatgcctacttaggaaaaaaagggtagcacttattcattccaagtacttttttttttttaatttttaagctcttaactcacattgttatgcttaagatgataaacatatatcctctttttattgctttgtctatgtttcatatgaaacatttcagaaattattttgataagtgttgctggaatctgcaacgctgatttttttttgcattctgtagtcgcatttgcactccatttttacattaattcgcagttgctttgtatcattgttttgtttgggttttgtttctttttcacagtgccgggtcttcgtttcttaaagttggatggcaggtagagttcaaccagttcgtgactgttgtagcgaatgaagttaaaaaaatgtctttctgatgttgtgttgtcattttcatttttgcatttttttgtttgcatattaaaaaaagagaaaagagaaagcaagagacagaaatcaggactaagtcctctgcttcagtttcattgttaacgggccttattctgatctcacctgtcgcgtagctctaatattcacataaactgaaataaagaagtggaatgaggagctttgacattcaaattatgtgatgtaatttatcttccttaggaattttgatggatgcatctcaaaatgtatagccagacttgagaggtgacaattaaagatctaaaaaagagaggagattcccccaaacaacaatatttaattttcttagtaaaaagaataacagaatgcatcgtggcaatccttaagcaacattatctatgtggactgcttaaatcagcaaaacaccagaagtttggttaacttgggcaatatgacaagtattactttttgggcaaaactactcattaagcaatttctctagtgtgtcggacacaaataggttctttatttttggcatgtatgcctttttattttcattcaattttttttttttctcagacagacatagtagtatcaactagcattggaaaatacatatcactattcttggaatatttatggtcagtctactttttagtaaaatatttttggatagcgttgacacgatagatcttattccatacttctttattattgataattttattttcattttttgctttcattattatacatattttggtggagaagaggttgggcttttttgaaagagacaaaaatttattataacactaaacactccttttttgacatattaaagcctttattccatctctcaagatatattataaaatttatttttttaatttaagatttctgaattattttatcttaaattgtgattttaaacgagctattatggtacggaactttttttaatgaggaatttcatgatgatttaggaattttctctcttggaaaaggcttcccctgtgatgaaaatgatgtgccagctaaaattgtgtgccatttaaaaactgaaaatattttaaaattatttgtctatattctaaattgagctttggatcaaactttaggccaggaccagctcatgcgttctcattcttccttttctcactctttctctcatcactcacctctgtattcattctgttgtttgggatagaaaaatcataaagagccaacccatctcagaacgttgtggattgagagagacactacatgactccaagtatatgagaaaaggacagagctctaattgataactctgtagttcaaaaggaaaagagtatgcccaattctctctacatgacatattgagattttttttaatcaacttttaagatagtgatgttctgttctaaactgttctgttttagtgaaggtagatttttataaaacaagcatggggattcttttctaaggtaatattaatgagaagggaaaaaagtatctttaacagctctttgttgaagcctgtggtagcacattatgtttataattgcacatgtgcacataatctattatgatccaatgcaaatacagctccaaaaatattaaatgtatatatattttaaaatgcctgaggaaatacatttttcttaataaactgaagagtctcagtatggctattaaaataattattagcctcctgttgtgtggctgcaaaacatcacaaagtgaccggtcttgagacctgtgaactgctgccctgtttagtaaataaaattaatgcatttctagagggggaatatctgccatccagtggtggaaatgtggagtaaagaagctggtggtctgcttctgtgctgtatgccagccttttgccttaagttgagaggaggtcaactttagctactgtctttggtttgagagccatggcaaaaaaaaaaaaagaaaaaaagatcaagtcgtctttggtgagccagtaaggtgaaagcttgctgactgtccaaggcacaagagaaaattgaggaattgaaatgcaacctgagtatcaaactaaatattctaatcaaaggtaggtactgttaggtggaattctatcagcaggcaactgcaaatgagaagaagatagaaggacgcccgtcgggactttggagggcattgttattttcccaaagaaagacggccaagggcagaggcatggattctttgcagagcacttccttttggtttttcagtactgtttcatagacagtgggctcacatgttcctgatagtgctgcagttgcttagaaagcatcccagttaattgcagtaattagaacttctggaatatgctagggcagaagtatgtcaagtatgtcacatgaagaaaatgtgaaattcaagagtaatccacacgtgagaaactagacaatgtacattcatgtgttctcttgaaaggaaagggagagctgtaagcttcactctgtcctacaccggagaaaagcaggaataactttaccgtggaaataatgtttagcttttatcagagaaaattgtccttctagagcatagagtcccaaaactcaattctggttttcccctgttttttttttttttttttttcccaacatatgaactgcagcatatcactttttctttttgtgcctcaggttcctcacctgtaaaattgaaaaatatatgtattaataatattattaataataataatggtaatgtagtacttgtttgtaaagcactttgagatccttggttgaaaggcaccataggagtgccaagtattattatgtggccaagggggttatttaaactgtcagttcccaaaggccaggaaaggttggggtcatttttcttaaagacgagctgtaaatatcaactaggcagccaatagtgttgactatgaagatgcaaaactattactaggctgataaaatcatagtttcttaatggctaccaataaggcaaatatcacaataataaacgccaaattccttagggcggactatttgacaaccacatggaaaactttgggggaggcatgaggggggaacatctcaaaatgccaatgtaaaatttaacttacagcaatattcaccagcagaaaatgtctttcatatggaatgatttcatgttgctaagaaaaagaattcaatttgtagtcctgatttgaatactagaatgttggctataatagttctgttcttacaacacatgaaattttttcgttttattttattttgttttcatagtgcatgttcatttctactcacaaacatgttcttggtgtatttcttatgcaaacaatcttcaggcagcaaagatgtctgttacatctaaacttgaataataaagttttaccaccagttacaca

SEQ ID NO: 308407 - DNA, 3885 bp, Artificial Sequence
  derived and/or modified sequence
atgccctacgaggtgaacgccggctacgacttcaccaacatggtgagaaagaagaacccccccctgagaaacgtggccagcgagggcgagggccagatcctggagcccatcggcaccgagagcaaggtgagcggcaagaacaaggagttcagcgccgaccagatgagcgagaacaccgaccagagcgacgccgccgagctgaaccacaaggaggagcacagcctgcacgtgcaggaccccagcagcagcagcaagaaggacctgaagagcgccgtgctgagcgagaaggccggcttcaactacgagagccccagcaagggcggcaacttccccagcttcccccacgacgaggtgaccgacagaaacatgctggccttcagcagccccgccgccggcggcgtgtgcgagcccctgaagagcccccagagagccgaggccgacgacccccaggacatggcctgcacccccagcggcgacagcctggagaccaaggaggaccagaagatgagccccaaggccaccgaggagaccggccaggcccagagcggccaggccaactgccagggcctgagccccgtgagcgtggccagcaagaacccccaggtgcccagcgacggcggcgtgagactgaacaagagcaagaccgacctgctggtgaacgacaaccccgaccccgcccccctgagccccgagctgcaggacttcaagtgcaacatctgcggctacggctactacggcaacgaccccaccgacctgatcaagcacttcagaaagtaccacctgggcctgcacaacagaaccagacaggacgccgagctggacagcaagatcctggccctgcacaacatggtgcagttcagccacagcaaggacttccagaaggtgaacagaagcgtgttcagcggcgtgctgcaggacatcaacagcagcagacccgtgctgctgaacggcacctacgacgtgcaggtgaccagcggcggcaccttcatcggcatcggcagaaagacccccgactgccagggcaacaccaagtacttcagatgcaagttctgcaacttcacctacatgggcaacagcagcaccgagctggagcagcacttcctgcagacccaccccaacaagatcaaggccagcctgcccagcagcgaggtggccaagcccagcgagaagaacagcaacaagagcatccccgccctgcagagcagcgacagcggcgacctgggcaagtggcaggacaagatcaccgtgaaggccggcgacgacacccccgtgggctacagcgtgcccatcaagcccctggacagcagcagacagaacggcaccgaggccaccagctactactggtgcaagttctgcagcttcagctgcgagagcagcagcagcctgaagctgctggagcactacggcaagcagcacggcgccgtgcagagcggcggcctgaaccccgagctgaacgacaagctgagcagaggcagcgtgatcaaccagaacgacctggccaagagcagcgagggcgagaccatgaccaagaccgacaagagcagcagcggcgccaagaagaaggacttcagcagcaagggcgccgaggacaacatggtgaccagctacaactgccagttctgcgacttcagatacagcaagagccacggccccgacgtgatcgtggtgggccccctgctgagacactaccagcagctgcacaacatccacaagtgcaccatcaagcactgccccttctgccccagaggcctgtgcagccccgagaagcacctgggcgagatcacctaccccttcgcctgcagaaagagcaactgcagccactgcgccctgctgctgctgcacctgagccccggcgccgccggcagcagcagagtgaagcaccagtgccaccagtgcagcttcaccacccccgacgtggacgtgctgctgttccactacgagagcgtgcacgagagccaggccagcgacgtgaagcaggaggccaaccacctgcagggcagcgacggccagcagagcgtgaaggagagcaaggagcacagctgcaccaagtgcgacttcatcacccaggtggaggaggagatcagcagacactacagaagagcccacagctgctacaagtgcagacagtgcagcttcaccgccgccgacacccagagcctgctggagcacttcaacaccgtgcactgccaggagcaggacatcaccaccgccaacggcgaggaggacggccacgccatcagcaccatcaaggaggagcccaagatcgacttcagagtgtacaacctgctgacccccgacagcaagatgggcgagcccgtgagcgagagcgtggtgaagagagagaagctggaggagaaggacggcctgaaggagaaggtgtggaccgagagcagcagcgacgacctgagaaacgtgacctggagaggcgccgacatcctgagaggcagccccagctacacccaggccagcctgggcctgctgacccccgtgagcggcacccaggagcagaccaagaccctgagagacagccccaacgtggaggccgcccacctggccagacccatctacggcctggccgtggagaccaagggcttcctgcagggcgcccccgccggcggcgagaagagcggcgccctgccccagcagtaccccgccagcggcgagaacaagagcaaggacgagagccagagcctgctgagaagaagaagaggcagcggcgtgttctgcgccaactgcctgaccaccaagaccagcctgtggagaaagaacgccaacggcggctacgtgtgcaacgcctgcggcctgtaccagaagctgcacagcacccccagacccctgaacatcatcaagcagaacaacggcgagcagatcatcagaagaagaaccagaaagagactgaaccccgaggccctgcaggccgagcagctgaacaagcagcagagaggcagcaacgaggagcaggtgaacggcagccccctggagagaagaagcgaggaccacctgaccgagagccaccagagagagatccccctgcccagcctgagcaagtacgaggcccagggcagcctgaccaagagccacagcgcccagcagcccgtgctggtgagccagaccctggacatccacaagagaatgcagcccctgcacatccagatcaagagcccccaggagagcaccggcgaccccggcaacagcagcagcgtgagcgagggcaagggcagcagcgagagaggcagccccatcgagaagtacatgagacccgccaagcaccccaactacagcccccccggcagccccatcgagaagtaccagtaccccctgttcggcctgcccttcgtgcacaacgacttccagagcgaggccgactggctgagattctggagcaagtacaagctgagcgtgcccggcaacccccactacctgagccacgtgcccggcctgcccaacccctgccagaactacgtgccctaccccaccttcaacctgcccccccacttcagcgccgtgggcagcgacaacgacatccccctggacctggccatcaagcacagcagacccggccccaccgccaacggcgccagcaaggagaagaccaaggccccccccaacgtgaagaacgagggccccctgaacgtggtgaagaccgagaaggtggacagaagcacccaggacgagctgagcaccaagtgcgtgcactgcggcatcgtgttcctggacgaggtgatgtacgccctgcacatgagctgccacggcgacagcggccccttccagtgcagcatctgccagcacctgtgcaccgacaagtacgacttcaccacccacatccagagaggcctgcacagaaacaacgcccaggtggagaagaacggcaagcccaaggagtag

SEQ ID NO: 308408 - DNA, 3885 bp, Artificial Sequence
  derived and/or modified sequence
atgccatacgaggttaatgctggctatgatttcacaaacatggttagaaagaaaaaccctcctcttcggaatgtggctagcgagggggaggggcagattttggagcctataggcaccgagagcaaggtttctggaaaaaataaggaattctcagccgaccagatgtcagagaataccgaccaatcagatgcagcagaactgaaccataaagaggaacacagcctgcacgtccaagaccctagctccagctccaaaaaggatctcaaaagtgccgtgctgagcgagaaagccggtttcaactatgagtccccctccaaaggggggaacttccctagttttcctcacgacgaagtcaccgatcgcaacatgctggccttctcctcgccagcagctgggggtgtttgtgaacctctgaagtcacctcagagagcagaggccgatgatcctcaggatatggcttgcacgccgagcggcgattctctggagacgaaggaggaccagaaaatgtcacccaaggccaccgaagagaccggccaggcccaatccggacaggcaaattgtcagggtctgagtcccgtctcagtagctagcaaaaatccccaggtgccatctgacggcggagtaagattaaataaatccaaaactgacctgctggtgaacgataaccctgacccagcccctctgtcacctgaacttcaggatttcaagtgcaatatttgtggatatgggtattatggcaacgacccgactgacctgattaagcatttccgcaagtaccacctgggtctgcataataggaccagacaggacgcagagcttgattcaaagattttggctctgcataacatggtgcaattttctcatagcaaggatttccagaaagtgaatagaagcgtcttctctggcgtcctccaggatattaacagctccaggcccgttttgctgaacggaacttacgacgtgcaggtcacgtcaggtggaacgttcataggcatcgggcgtaagactccggattgtcagggaaatacaaagtacttccgatgcaaattctgtaattttacatatatgggaaattcgagcactgagctagaacagcatttccttcagacgcacccgaacaaaattaaagccagtttgcccagctctgaagtcgctaaaccttccgagaagaatagtaataaatcaatacctgctctccaatcctctgattcaggggacttaggtaagtggcaggataagattaccgtgaaggcaggagatgacacacccgtcgggtactccgtcccaataaaacctctcgattctagtcgacagaatggtacagaagctactagctattattggtgcaagttttgttctttttcctgcgagtcgtcatctagtttgaagctacttgagcactacggcaaacagcacggtgccgttcagtccggaggtctcaatccagaactgaatgacaaacttagtagaggctctgtgataaatcagaacgatcttgctaagtcgagtgagggagagacgatgacaaagacggacaagtcctcaagcggagcaaaaaagaaagattttagcagcaagggggcagaggacaatatggtgacatcctacaattgccagttttgtgactttcggtatagcaagagccacggacccgacgtaatcgtggtaggtccacttcttcgacattatcagcagctccacaatatccacaagtgtacgataaaacattgccctttttgtcctcgcggactgtgttctccagaaaagcacctgggggagatcacctaccccttcgcctgtcgcaaatccaattgttctcactgcgccttgttgctgctgcacctcagccccggggccgcaggaagcagtagagtgaagcaccagtgtcatcaatgcagttttaccacacctgatgtggacgtgctactatttcattacgagtccgtccatgagagtcaggcatctgacgtgaagcaagaagctaaccatctgcagggcagtgacgggcagcagagtgtcaaggagtcaaaggagcactcatgtaccaaatgtgacttcatcacacaggtggaagaggaaattagtcgccactataggcgggcccacagctgttacaagtgtagacaatgttccttcacagccgcagatacccagagccttctggagcactttaatacagtgcattgccaggaacaggatatcacaactgccaacggagaggaggatgggcacgccatttcaacgattaaggaagagcctaagattgactttcgggtatacaatctgctgactcccgattcaaaaatgggagagcccgtctctgagagcgtagtgaagcgggaaaaactcgaagagaaagacggcctcaaggagaaagtttggactgagagcagtagcgacgacttgcgtaacgtgacatggcggggagcagacattcttcgtggttccccttcctacacacaggccagtttagggctgctgaccccagtctctggcacccaagaacaaaccaaaacactgcgcgattctcctaatgtagaggccgcccacctcgcacggcctatttacgggctcgccgttgaaaccaagggctttcttcagggcgccccggcaggcggagagaagtcgggcgccctccctcaacaatatccagcatccggagaaaataagtctaaggatgagtcccagtccctgctgaggcgacgtagggggagtggagttttttgcgcaaactgcctaaccacaaaaacctccttgtggcgcaagaacgccaacggcgggtatgtctgcaacgcatgcggtctctaccagaagcttcattctaccccacgcccacttaacattattaagcagaacaacggggaacagatcattcgccggcggactaggaaaagactgaaccctgaagcactgcaggccgaacaactgaataagcaacaaaggggttctaacgaagagcaggtcaacgggtctccactggagcgccgatccgaggatcacctgaccgagtcccatcagagggaaatccctttgccttccctctccaaatatgaagcccagggctccttaactaaaagccactctgcacagcagcccgtgctggtgtcacagaccctagacatccacaaacgcatgcaacccctgcatatccaaataaagagtccccaggaaagcacgggggatcctggtaactcatctagcgtctccgaggggaaggggagctctgagcgcggatcaccgattgagaagtacatgcgccctgctaaacaccccaattacagtccccccggatcccccatcgagaaatatcaatatcccttgtttggattgcctttcgtccataatgattttcagtcagaggccgattggcttcgattttggtcaaaatacaagttgtcagtgccagggaatccccactacttgtctcatgtcccggggctgcctaacccttgccaaaactacgtgccgtacccgaccttcaacctgccgccacatttcagcgcagtggggagtgacaatgatatcccactggacctggccataaagcacagcaggcctggaccaacagccaatggcgcctctaaggagaaaacaaaggctccccctaatgtgaagaatgagggaccacttaatgtggttaagacggaaaaggtggaccgttccacacaggacgaactgagcaccaagtgtgtgcattgtggcatcgtgtttctggacgaggttatgtatgctctacacatgagctgccatggggactctggacccttccaatgctccatttgccagcacttatgcacagataaatacgatttcacaacccatattcaaagagggctgcatagaaacaacgcgcaggttgaaaagaacgggaaaccaaaggagtag

SEQ ID NO: 308409 - DNA, 3885 bp, Artificial Sequence
  derived and/or modified sequence
atgccctatgaggtgaatgccggctatgacttcaccaacatggtgaggaagaagaacccccccctgagaaatgtggccagcgagggggagggccagatcctggagcccatcggcacagagagcaaggtgtctgggaagaacaaggagttctctgctgaccagatgtctgaaaatacagaccagagtgatgctgctgagctgaaccacaaggaggagcacagcctgcacgtgcaggaccccagcagcagcagcaagaaggacctgaagtctgctgtgctgtctgagaaggccggcttcaactatgagagccccagcaagggcggcaacttccccagcttcccccatgatgaggtgacagacaggaacatgctggccttcagcagccctgctgctggaggagtgtgtgagcccctgaagagcccccagagagctgaggctgatgacccccaggacatggcctgcaccccatctggggacagcctggagaccaaggaggaccagaagatgagccccaaggccacagaggagaccggccaggcccagagcggccaggccaactgccagggcctgagccctgtgtctgtggccagcaagaacccccaggtgcccagtgatggaggagtgcggctgaacaagagcaagacagacctgctggtgaatgacaacccagaccctgcccccctgagccctgagctgcaggacttcaagtgcaacatctgtggctacggctactatggaaatgaccccacagacctgatcaagcacttcaggaagtaccacctgggcctgcacaacagaacccggcaggatgctgagctggacagcaagatcctggccctgcacaacatggtgcagttcagccacagcaaggacttccagaaggtgaacagaagtgtcttctctggagtgctgcaggacatcaacagcagcaggcctgtgctgctgaatggcacctatgatgtgcaggtgaccagcggcggcaccttcatcggcatcggcaggaagaccccagactgccagggcaacaccaagtacttccgctgcaagttctgcaacttcacctacatgggcaacagcagcacagagctggagcagcacttcctgcagacccaccccaacaagatcaaggccagcctgcccagcagcgaggtggccaagcccagcgagaagaacagcaacaagagcatcccagccctgcagagcagtgacagcggggacctgggcaagtggcaggacaagatcaccgtgaaggctggagatgacacccctgtgggctacagcgtgcccatcaagcccctggacagcagccggcagaatggaacagaggccaccagctactactggtgcaagttctgcagcttcagctgtgagagcagcagcagcctgaagctgctggagcactacggcaagcagcacggggctgtgcagagcggcggcctgaaccctgagctgaatgacaagctgagccggggcagcgtcatcaaccagaatgacctggccaagagcagcgagggggagaccatgaccaagacagacaagagcagcagcggggccaagaagaaggacttcagcagcaaaggagctgaggacaacatggtgaccagctacaactgccagttctgtgacttccgctacagcaagagccacggcccagatgtgattgtggtgggccccctgctgcggcactaccagcagctgcacaacatccacaagtgcaccatcaagcactgccccttctgcccccggggcctgtgcagccctgagaagcacctgggggagatcacctacccctttgcctgcaggaagagcaactgcagccactgtgccctgctgctgctgcacctgagccctggagctgctggcagcagccgggtgaagcaccagtgccaccagtgcagcttcaccaccccagatgtggatgtgctgctcttccactatgagagcgtgcatgagagccaggccagtgatgtgaagcaggaggccaaccacctgcagggcagtgatggccagcagagcgtgaaggagagcaaggagcacagctgcaccaagtgtgacttcatcacccaggtggaggaggagatcagccgccactacagaagagcccacagctgctacaagtgccggcagtgcagcttcaccgctgctgacacccagagcctgctggagcacttcaacacagtgcactgccaggagcaggacatcaccacagccaacggggaggaggatggccacgccatcagcaccatcaaggaggagcccaagattgacttccgggtgtacaacctgctgaccccagacagcaagatgggagagcctgtgtctgagagcgtggtgaagcgggagaagctggaggagaaggatggcctgaaggagaaggtgtggacagagagcagcagtgatgacctgagaaatgtgacctggagaggagctgacatcctgcggggcagccccagctacacccaggccagcctgggcctgctgacccctgtgtctggcacccaggagcagaccaagaccctgcgggacagccccaacgtggaggccgcccacctggcccggcccatctacggcctggccgtggagaccaagggcttcctgcagggcgccccagctggaggagagaagagcggggccctgccccagcagtacccagccagcggggagaacaagagcaaggatgagagccagagcctgctgcggcggcggcggggcagcggggtcttctgtgccaactgcctgaccaccaagaccagcctgtggaggaagaatgccaatggaggctacgtgtgcaatgcctgtggcctgtaccagaagctgcacagcaccccccggcccctgaacatcatcaagcagaacaatggagagcagatcatcagaagaaggaccaggaagaggctgaaccctgaggccctgcaggccgagcagctgaacaagcagcagaggggcagcaatgaggagcaggtgaatggcagccccctggagaggagaagtgaggaccacctgacagagagccaccagcgggagatccccctgcccagcctgagcaaatatgaggcccagggcagcctgaccaagagccacagcgcccagcagcctgtgctggtgtcccagaccctggacatccacaagaggatgcagcccctgcacatccagatcaagagcccccaggagagcactggagaccccggcaacagcagctctgtgtctgagggcaagggcagcagcgagcggggcagccccatcgagaagtacatgaggcctgccaagcaccccaactacagccccccaggcagccccatcgagaagtaccagtaccccctgtttggcctgccctttgtgcacaatgacttccagagcgaggccgactggctgcgcttctggagcaagtacaagctgtctgtgcccggcaacccccactacctgagccacgtgcccggcctgcccaacccctgccagaactacgtgccctaccccaccttcaacctgcccccccacttctctgctgtgggcagtgacaatgacatccccctggacctggccatcaagcacagccggcccggccccacagccaatggagccagcaaggagaagaccaaggcccccccaaatgtgaagaatgaaggccccctgaatgtggtgaagacagagaaggtggacaggagcacccaggatgagctgagcaccaagtgtgtgcactgcggcatcgtgttcctggatgaggtgatgtatgccctgcacatgagctgccacggggacagcggccccttccagtgcagcatctgccagcacctgtgcacagacaagtatgacttcaccacccacatccagaggggcctgcacagaaataatgcccaggtggagaagaatggcaagcccaaggagtag

SEQ ID NO: 308410 - DNA, 3885 bp, Artificial Sequence
  derived and/or modified sequence
atgccctacgaggtgaacgccggctacgacttcaccaacatggtgaggaagaagaatccccccctccgaaacgtggcctccgagggcgagggccaaatcctcgagccaatcggaaccgagtcgaaggtgtctgggaaaaataaggagttttcagccgatcaaatgagtgagaatacggaccagagcgatgctgccgagttaaaccataaggaagaacacagcctgcacgttcaggatccatcaagtagttccaaaaaagatttgaaaagtgctgtgctctcagagaaggccgggttcaattatgaaagcccctccaaaggggggaattttcctagctttccacacgatgaggttacagaccggaatatgttagcctttagtagtcccgctgcgggtggagtgtgtgaacctctcaagtcgcctcagcgagctgaagcagacgacccccaggatatggcttgcacaccctcaggagactcactcgaaacgaaggaagatcaaaaaatgagtcctaaggcaaccgaggaaacagggcaagctcagtccggccaggccaattgtcagggcctgtcacccgtctcggtagctagcaagaatcctcaggtgcccagtgatgggggcgtaaggctgaataagtcaaaaacagacctgcttgtgaacgataacccagatcctgctcctctttctccagaacttcaggacttcaagtgcaacatttgcgggtacggttactacggcaacgaccccaccgatctgataaaacatttccggaagtatcatctaggactgcacaacaggacaagacaagatgccgagctagacagcaagatcctggccctgcacaatatggtccagtttagccattccaaggatttccaaaaagtgaacagatcagtctttagcggagttctgcaggatattaactcttcaagaccggtactccttaatggaacatacgatgtgcaggtgacatcaggcggtacatttattgggataggcagaaagacacctgattgccagggaaataccaaatatttccgctgcaaattttgcaattttacctatatggggaacagctccaccgagttagaacaacactttctgcagactcaccctaataagatcaaggccagtttgccttctagcgaagttgccaaaccttcagagaagaattcaaataagagtatacctgccctgcagtccagtgactctggggatctcgggaagtggcaggacaaaattaccgtcaaagcaggagatgataccccggtgggttactccgtacctatcaagcctctggactcatcgagacagaatggcactgaggctactagctactactggtgtaagttctgcagcttttcttgtgagtcatcctcaagtctaaaattgctggaacactatgggaaacagcacggagccgtccagtccggcggcctgaaccctgaactgaatgataagctgtcacgaggctcagtgatcaaccagaatgaccttgccaagtcttctgaaggcgaaacaatgacaaaaaccgacaagtcctctagcggggctaaaaagaaggatttctcttccaaaggagcggaagataatatggtgaccagttacaattgccagttttgcgactttagatacagcaagtctcatgggcccgatgtgatagtggtggggcctttgcttagacactaccagcagcttcacaatatacacaaatgcacgattaaacactgtccattctgtccccgaggactgtgttctccggaaaagcatcttggcgaaatcacctatccctttgcctgtagaaagtcaaattgctctcactgcgccctattacttctgcatctctctccgggcgccgccggctcctcacgagttaaacatcagtgtcatcagtgctccttcactaccccagacgtagatgttctcctttttcactatgaaagcgtgcatgagtctcaggcatcagacgttaagcaggaagctaatcaccttcaaggttcagacgggcagcagtctgtgaaagagtctaaggagcactcatgcactaaatgcgactttattacccaggtcgaggaagagataagtcgtcattaccggagagcacatagttgctataagtgtagacagtgttccttcactgctgctgacactcagagcctccttgaacactttaacaccgtgcactgccaggaacaggatataactaccgcaaatggcgaagaggatggacatgcaataagtaccattaaagaagagcctaaaatagattttcgcgtatataatctccttacgcctgattcgaaaatgggggagcccgtgtctgagtctgttgtcaagcgggagaagttagaggaaaaggacgggcttaaggagaaagtgtggacagaaagttccagcgatgatctgcgcaatgtaacttggcgaggtgctgacatcctgagaggctcacccagctatactcaggcctccctgggtctgctcaccccagtttctggaactcaggagcagacaaagactctcagggactctcctaatgtcgaagcggcccacctcgctcggccgatttacggcctggccgttgaaacaaaaggcttcttgcagggggcacctgctggcggtgagaaaagtggagccctgccccagcagtacccagcttccggcgagaacaagagcaaggatgagtcccaaagcctgcttcgcagacggcgcggctctggggtgttttgcgcaaattgcctgactacaaagaccagcctttggagaaagaatgccaatggcggatacgtatgcaatgcctgtgggctgtatcagaagctgcattctactccgaggccactgaatattatcaagcagaacaatggcgagcagattattagaagacgaacaaggaaacgattaaatcctgaagctctgcaggctgagcagctgaataaacagcaacgaggatccaacgaagagcaggtcaacggaagtcccctcgaacgacggtcggaggaccacctcaccgaatcccaccagcgcgaaatccccctgccctctctgagtaaatacgaggcccagggcagccttacaaaatcccactctgcccagcaacctgtgctggtgtcccagaccctcgacatccataagcggatgcagccgctgcatatccagatcaaaagcccacaagaatctacaggggatcccggaaatagctcatccgtgtctgagggtaagggtagttccgagagaggttcccccatcgagaagtacatgaggccagctaagcatccaaactattcaccacccggcagtcccattgaaaaatatcaatacccattgttcggtctcccttttgtacacaatgattttcagtcagaagctgattggctcaggttctggtcgaagtataagctgagcgtgccaggtaacccgcattacctcagccacgtgcccgggcttcctaatccttgtcaaaattacgttccctatcccacctttaatctgcccccccatttctctgcagtgggatctgataatgatataccactcgatctggctatcaagcattcaaggccggggcctacagctaatggagcatccaaagaaaagaccaaagctcccccaaatgttaagaacgaagggcccctcaatgtggttaagactgaaaaagtggatcggagcacccaggatgagctgtcaaccaaatgcgtccattgtggaatcgtttttttggacgaggtgatgtacgccctccatatgagctgccacggggatagcgggccctttcagtgttccatctgccagcatctgtgcaccgacaagtatgactttaccactcacattcagagggggttgcatagaaataatgcacaagtcgaaaagaacggcaagcctaaggaatag

SEQ ID NO: 308411 - DNA, 3885 bp, Artificial Sequence
  derived and/or modified sequence
atgccttatgaagtgaacgccggttatgactttaccaacatggtgcgcaaaaagaatcctcccctccgtaatgtggctagcgagggagaaggccaaattctcgaacccatcggtacggagagtaaggtttccgggaaaaacaaggaatttagcgctgatcagatgtcagagaacaccgaccagagcgatgctgctgagctgaatcacaaggaagagcattcactgcatgttcaggacccttcgtcctccagtaagaaagacctgaagagcgccgtgttaagtgaaaaggctggattcaactacgagtcaccctccaagggcggaaatttcccaagtttcccccacgacgaagtgactgacagaaacatgctggccttctcttctccggctgcgggaggcgtgtgcgaaccactaaagtcacctcagcgggctgaggccgacgacccccaagacatggcttgcactccatctggagatagtctggaaactaaagaagatcagaaaatgagccctaaggccactgaagaaaccggccaggcccagagcggacaggcaaactgccagggactgagccctgtgagcgtggcctccaagaatcctcaagtgccatcagacggtggagtccgtttgaacaagtctaagacagacctcttggtaaacgataatcctgatccagcacccttatctcctgaactccaggacttcaagtgcaacatttgcggttacggttactatggaaacgaccctacagatctgatcaagcactttcggaagtaccatctgggtttacataacagaacccggcaggacgccgaactggatagcaaaatacttgctttgcataatatggtgcaattcagccactcaaaggacttccagaaggttaaccgcagtgtattttcaggtgttctccaagatataaactcctcccggccagtactcctcaacggtacatatgacgtccaggttacaagcggcggaactttcattgggattggcaggaaaacgcctgattgtcagggcaacaccaaatattttcggtgcaagttttgtaactttacatatatgggtaacagctccactgaactcgaacaacactttctccagacccatccaaataagatcaaggccagtcttccttcctcggaggttgcaaaacccagtgagaagaactctaataaatctatcccagctcttcaatccagtgacagcggagacctcggcaagtggcaggataagattacagtgaaggctggggatgatacccctgtcgggtacagcgtgcccattaaaccactggactcgtccaggcagaacggaacagaggccacctcatactattggtgcaaattctgcagtttcagctgcgagtcttctagctcattaaagcttctggagcactacggaaaacagcacggggcagtacaatcaggtgggctcaatcctgaactaaatgacaaattgtcacggggatcggttataaatcagaatgacctcgctaaaagctcagagggcgaaactatgaccaagactgacaagagttctagcggcgctaaaaaaaaagatttttcttccaaaggtgctgaagacaatatggtgacatcctacaattgccagttttgtgactttcggtatagcaagtcccatggcccagatgtcattgtggtgggccctctgctcagacactatcagcagctccacaatattcacaagtgtaccattaaacactgcccattttgccctcgcggactctgttcccccgagaaacatctgggcgagatcacatatccatttgcctgtagaaaaagcaattgtagtcattgtgctctgcttttactgcatctctctccaggagcagctggttcttccagggtgaagcatcagtgccaccagtgttcatttactactccggacgtggacgtcctgctttttcactatgaatccgtgcacgaatcccaagcttccgacgtcaaacaggaggctaaccacctccaaggcagcgacggccaacagtctgtcaaagagagtaaggaacactcctgtacaaaatgtgactttattacccaagtagaagaggaaatctctaggcactaccgacgggctcactcatgctacaagtgcaggcagtgtagttttactgcggctgatacccagagtcttctggagcattttaatacagtacattgccaggaacaagatattactacagccaatggtgaagaagacggtcacgcgatcagcaccattaaggaggagcccaagatagacttcagagtttataatctcttgacaccagatagcaaaatgggcgaacccgtgagcgaaagcgtggttaaacgggagaagcttgaagagaaggatggcttgaaagaaaaggtctggacagagtcaagttccgacgatctgcgaaacgtaacttggcgaggagctgatattttaaggggatcccccagctacacacaggcctccctcggcctgttaacaccagtgagcgggactcaggagcagacaaaaacacttcgggacagcccaaacgttgaggccgcacacctagcaaggccgatctacggcctcgccgtggagacgaagggcttcctgcagggagctcccgctggcggagaaaagagcggggctcttccccaacagtaccccgcttctggcgagaacaaatccaaggatgagagtcagagtctgctgcgccgtcgcagagggtccggcgtcttttgtgccaattgcctgacaactaaaacgtccctgtggaggaagaacgcgaacgggggttatgtgtgtaacgcctgtggactctaccaaaagctgcactcgacccccagacccctcaacatcatcaagcagaacaacggcgagcagattatcaggcgcaggactagaaagcgcttgaaccccgaggcattgcaggccgaacaattgaataagcaacaacgtggaagtaatgaagagcaagtgaacggttccccactagagagaagaagtgaggatcatctgacagaaagccaccaaagggaaattccccttccctcattgagcaagtatgaagcacaggggtcgctgacaaaaagccacagcgcgcagcagcccgttctggtgtcacagacccttgatatccataagcgcatgcagcccctgcacatccaaataaagtctccccaggagagcacgggggatcctggtaacagcagtagcgtctccgaagggaagggctcctcagaaaggggttctcctatcgaaaaatacatgagacctgccaagcatcccaactactctccacccggtagcccgattgaaaaataccaatacccactgtttggcttgcctttcgtgcataatgattttcagtctgaggccgactggctgaggttctggagcaagtacaagctcagcgtacccggtaacccccactacttgtcccatgtgccagggctcccaaacccgtgtcagaactacgttccgtacccgaccttcaatttgccgcctcacttttcggccgttggatcagataacgatatacccctagatctggcgatcaagcactctcgccctgggcctaccgctaacggcgcttctaaggaaaaaacaaaggccccaccgaacgtcaaaaacgaaggtcccctcaacgtggtgaaaaccgagaaggtcgaccgatcaacccaggacgaactctcgacaaaatgtgtccactgcggcattgtattccttgacgaggtcatgtatgcgctgcatatgtcctgtcacggagattcaggcccattccagtgttctatatgtcaacacttgtgtaccgacaaatatgattttaccacccatatccagcgaggtttgcaccgcaataacgcccaggtggagaagaatggaaagcccaaggagtag

SEQ ID NO: 308412 - DNA, 9990 bp, Artificial Sequence
  derived and/or modified sequence
aatagtgttggtgtcttgaaactgacgtaatgcgcggagactgaggtcctgacaagcgataacatttctgataaagacccgatcttactgcaatctctagcgtcctcttttttggtgctgctggtttctccagacctcgcgtcctctcgattgctctctcgccttcctatttcttttttttttttttaaacaaaaaacaacaccccctcccctctcccacccggcaccgggcacatccttgctctatttcctttctctttctctctctctctctctctctctcttttttaataagggtgggggagggaaaggggggggaggcaggaaagacctttttctctcccccccgcaataatccaagatcaactctgcaaacaacagaagacggttcatggctttggccgccgcgccaccatctttcgggctgccgagggtgttcttgacgattaatcaacagatgtacagatcagctctcaaaatgtcttctgtgtcttctgagcgtcttctaagacaattgcattagcctcctgctagttgactaatagaattaataattgtaaaaagcactctaaagccacatgccttatgaagtcaatgctgggtatgattttacaaatatggtccggaaaaagaacccccctctgagaaacgttgcaagtgaaggcgagggccagatcctggagcctataggtacagaaagcaaggtatctggaaagaacaaagaattttctgcagatcagatgtcagaaaatacggatcagagtgatgctgcagaactaaatcataaggaggaacatagcttgcatgttcaagatccatcttctagcagtaagaaggacttgaaaagcgcagttctgagtgagaaggctggcttcaattatgaaagccccagtaagggaggaaactttccctcctttccgcatgatgaggtgacagacagaaatatgttggctttctcatctccagctgctgggggagtctgtgagcccttgaagtctccgcaaagagcagaggcagatgaccctcaagatatggcctgcaccccctcaggggactcactggagacaaaggaagatcagaagatgtcaccaaaggctacagaggaaacagggcaagcacagagtggtcaagccaattgtcaaggtttgagcccagtttcagtggcctcaaaaaacccacaagtgccttcagatgggggtgtaagactgaataaatccaaaactgacttactggtgaatgacaacccagacccggcacctctgtctccagagcttcaggactttaaatgcaatatctgtggatatggttactacggcaacgaccccacagatctgattaagcacttccgaaagtatcacttaggactgcataaccgcaccaggcaagatgctgagctggacagcaaaatcttggcccttcataacatggtgcagttcagccattccaaagacttccagaaggtcaaccgttctgtgttttctggtgtgctgcaggacatcaattcttcaaggcctgttttactaaatgggacctatgatgtgcaggtgacttcaggtggaacattcattggcattggacggaaaacaccagattgccaagggaacaccaagtatttccgctgtaaattctgcaatttcacttatatgggcaactcatccaccgaattagaacaacattttcttcagactcacccaaacaaaataaaagcttctctcccctcctctgaggttgcaaaaccttcagagaaaaactctaacaagtccatccctgcacttcaatccagtgattctggagacttgggaaaatggcaggacaagataacagtcaaagcaggagatgacactcctgttgggtactcagtgcccataaagcccctcgattcctctagacaaaatggtacagaggccaccagttactactggtgtaaattttgtagtttcagctgtgagtcatctagctcacttaaactgctagaacattatggcaagcagcacggagcagtgcagtcaggcggccttaatccagagttaaatgataagctttccaggggctctgtcattaatcagaatgatctagccaaaagttcagaaggagagacaatgaccaagacagacaagagctcgagtggggctaaaaagaaggacttctccagcaagggagccgaggataatatggtaacgagctataattgtcagttctgtgacttccgatattccaaaagccatggccctgatgtaattgtagtggggccacttctccgtcattatcaacagctccataacattcacaagtgtaccattaaacactgtccattctgtcccagaggactttgcagcccagaaaagcaccttggagaaattacttatccgtttgcttgtagaaaaagtaattgttcccactgtgcactcttgcttctgcacttgtctcctggggcggctggaagctcgcgagtcaaacatcagtgccatcagtgttcattcaccacccctgacgtagatgtactcctctttcactatgaaagtgtgcatgagtcccaagcatcggatgtcaaacaagaagcaaatcacctgcaaggatcggatgggcagcagtctgtcaaggaaagcaaagaacactcatgtaccaaatgtgattttattacccaagtggaagaagagatttcccgacactacaggagagcacacagctgctacaaatgccgtcagtgcagttttacagctgccgatactcagtcactactggagcacttcaacactgttcactgccaggaacaggacatcactacagccaacggcgaagaggacggtcatgccatatccaccatcaaagaggagcccaaaattgacttcagggtctacaatctgctaactccagactctaaaatgggagagccagtttctgagagtgtggtgaagagagagaagctggaagagaaggacgggctcaaagagaaagtttggaccgagagttccagtgatgaccttcgcaatgtgacttggagaggggcagacatcctgcgggggagtccgtcatacacccaagcaagcctggggctgctgacgcctgtgtctggcacccaagagcagacaaagactctaagggatagtcccaatgtggaggccgcccatctggcgcgacctatttatggcttggctgtggaaaccaagggattcctgcagggggcgccagctggcggagagaagtctggggccctcccccagcagtatcctgcatcgggagaaaacaagtccaaggatgaatcccagtccctgttacggaggcgtagaggctccggtgttttttgtgccaattgcctgaccacaaagacctctctctggcgaaagaatgcaaatggcggatatgtatgcaacgcgtgtggcctctaccagaagcttcactcgactcccaggcctttaaacatcattaaacaaaacaacggtgagcagattattaggaggagaacaagaaagcgccttaacccagaggcacttcaggctgagcagctcaacaaacagcagaggggcagcaatgaggagcaagtcaatggaagcccgttagagaggaggtcagaagatcatctaactgaaagtcaccagagagaaattccactccccagcctaagtaaatacgaagcccagggttcattgactaaaagccattctgctcagcagccagtcctggtcagccaaactctggatattcacaaaaggatgcaacctttgcacattcagataaaaagtcctcaggaaagtactggagatccaggaaatagttcatccgtatctgaagggaaaggaagttctgagagaggcagtcctatagaaaagtacatgagacctgcgaaacacccaaattattcaccaccaggcagccctattgaaaagtaccagtacccactttttggacttccctttgtacataatgacttccagagtgaagctgattggctgcggttctggagtaaatataagctctccgttcctgggaatccgcactacttgagtcacgtgcctggcctaccaaatccttgccaaaactatgtgccttatcccaccttcaatctgcctcctcatttttcagctgttggatcagacaatgacattcctctagatttggcgatcaagcattccagacctgggccaactgcaaacggtgcctccaaggagaaaacgaaggcaccaccaaatgtaaaaaatgaaggtcccttgaatgtagtaaaaacagagaaagttgatagaagtactcaagatgaactttcaacaaaatgtgtgcactgtggcattgtctttctggatgaagtgatgtatgctttgcatatgagttgccatggtgacagtggacctttccagtgcagcatatgccagcatctttgcacggacaaatatgacttcacaacacatatccagaggggcctgcataggaacaatgcacaagtggaaaaaaatggaaaacctaaagagtaaaaccttagcacttagcacaattaaatagaaataggttttcttgatgggaattcaatagcttgtaatgtcttatgaagacctattaaaaaaatacttcatagagcctgccttatccaacatgaaattcccttcttttgttattctttcttttgatgagtaggttaccaagattaaaaagtgagataaatggtcaatgagaaagaatggaagatggtaaacaatcactttttaaaacctgttaagtcaaaaccatcttggctaatatgtactggggaaataatccataagagatatcaccagactagaattaatatatttataaagaaagagaccaaaactgtctagaatttgaaagggtttacatattattatactaaagcagtactggactggccattggaccatttgttccaaaacccataaattgttgcctaaatttataatgatcatgaaaccctaggcagaggaggagaaattgaaggtccagggcaatgaaagaaaaatggcgccctctcaatttagtcttctctcattggccatgtttcagattttgacctagaaatgcgagctgtggttaggcttggttagagtgcagcaagcaacatgacagatggtggcacgctgtttttacccagccctgcctgtacatacacatgcacaccctctctgatatttttgtcctttagatgttcaaatactcagtagtccttttgtttgcggtttagattcattttgtccacacatgtacccattttaaaaaacaatgtcctcgatgcttctgtagtgatttcattttagccaggtatttctttcttgtgtgtgatgaaccagtatggatttgcttttctaagcctcctgttggttactaatctcacttggcacattataactaaaggaatcccctcaattcaaaagcatagatggatacaaatgtcagaccgtgggtttaatttgtttagaacacatggcatttcttcacaaggtaacctgctgtatttatttattttcttttggttaaatataatttccaaactttgtggtcaggcagcgtctaaggttacgttaccacagactgacagttggtatatgtaccagccaatcccttcattaaatgtatacagatttagttaagtagcattaaataggattcttagaagtatgtcctcatagaacttttaatacttaaggctttgtaaaaactatccatgaagggaaagctcctcagcataactgctcagggaaatagggctaaataactgaacattaaataattggttaaaggtgctgttagtcgagcctcaatgcttgctacaaggatgtatgtacaaggactgactttaataatttgcattatattgtcccaaccagtagtttattttttgccacggagatgtagaagatattacaagctactggatgcactgtcagattaacttatttcattaaagaagttgggagaacaaataggaaaaaaaaaacttatttttctagtaaatattaatgtattacatttcaaataatggtgcctgacatattgaataattattttctacagtgtacgtatgcaacaaagatattccatcatgcattagagtcagttctggctctgcctagctgtttacatttgcaaatgtagcaaacaaggtaatgaagcaactatttctattgcagtagatatccttttgtgtgtgtgtgtgtgcattaaagttgtaaacggtaacatgaaacaaatgaaagttcttgctataatggtatggaaaacaagaaggaaatgaaaatatttttatgcctacttaggaaaaaaagggtagcacttattcattccaagtacttttttttttttaatttttaagctcttaactcacattgttatgcttaagatgataaacatatatcctctttttattgctttgtctatgtttcatatgaaacatttcagaaattattttgataagtgttgctggaatctgcaacgctgatttttttttgcattctgtagtcgcatttgcactccatttttacattaattcgcagttgctttgtatcattgttttgtttgggttttgtttctttttcacagtgccgggtcttcgtttcttaaagttggatggcaggtagagttcaaccagttcgtgactgttgtagcgaatgaagttaaaaaaatgtctttctgatgttgtgttgtcattttcatttttgcatttttttgtttgcatattaaaaaaagagaaaagagaaagcaagagacagaaatcaggactaagtcctctgcttcagtttcattgttaacgggccttattctgatctcacctgtcgcgtagctctaatattcacataaactgaaataaagaagtggaatgaggagctttgacattcaaattatgtgatgtaatttatcttccttaggaattttgatggatgcatctcaaaatgtatagccagacttgagaggtgacaattaaagatctaaaaaagagaggagattcccccaaacaacaatatttaattttcttagtaaaaagaataacagaatgcatcgtggcaatccttaagcaacattatctatgtggactgcttaaatcagcaaaacaccagaagtttggttaacttgggcaatatgacaagtattactttttgggcaaaactactcattaagcaatttctctagtgtgtcggacacaaataggttctttatttttggcatgtatgcctttttattttcattcaattttttttttttctcagacagacatagtagtatcgactagcattggaaaatacatatcactattcttggaatatttatggtcagtctactttttagtaaaatatttttggatagcgttgacacgatagatcttattccatacttctttattattgataattttattttcattttttgctttcattattatacatattttggtggagaagaggttgggcttttttgaaagagacaaaaatttattataacactaaacactccttttttgacatattaaagcctttattccatctctcaagatatattataaaatttatttttttaatttaagatttctgaattattttatcttaaattgtgattttaaacgagctattatggtacggaactttttttaatgaggaatttcatgatgatttaggaattttctctcttggaaaaggcttcccctgtgatgaaaatgatgtgccagctaaaattgtgtgccatttaaaaactgaaaatattttaaaattatttgtctatattctaaattgagctttggatcaaactttaggccaggaccagctcatgcgttctcattcttccttttctcactctttctctcatcactcacctctgtattcattctgttgtttgggatagaaaaatcataaagagccaacccatctcagaacgttgtggattgagagagacactacatgactccaagtatatgagaaaaggacagagctctaattgataactctgtagttcaaaaggaaaagagtatgcccaattctctctacatgacatattgagattttttttaatcaacttttaagatagtgatgttctgttctaaactgttctgttttagtgaaggtagatttttataaaacaagcatggggattcttttctaaggtaatattaatgagaagggaaaaaagtatctttaacagctctttgttgaagcctgtggtagcacattatgtttataattgcacatgtgcacataatctattatgatccaatgcaaatacagctccaaaaatattaaatgtatatatattttaaaatgcctgaggaaatacatttttcttaataaactgaagagtctcagtatggctattaaaataattattagcctcctgttgtgtggctgcaaaacatcacaaagtgaccggtcttgagacctgtgaactgctgccctgtttagtaaataaaattaatgcatttctagagggggaatatctgccatccagtggtggaaatgtggagtaaagaagctggtggtctgcttctgtgctgtatgccagccttttgccttaagttgagaggaggtcaactttagctactgtctttggtttgagagccatggcaaaaaaaaaaaaagaaaaaaagatcaagtcgtctttggtgagccagtaaggtgaaagcttgctgactgtccaaggcacaagagaaaattgaggaattgaaatgcaacctgagtatcaaactaaatattctaatcaaaggtaggtactgttaggtggaattctatcagcaggcaactgcaaatgagaagaagatagaaggacgcccgtcgggactttggagggcattgttattttcccaaagaaagacggccaagggcagaggcatggattctttgcagagcacttccttttggtttttcagtactgtttcatagacagtgggctcacatgttcctgatagtgctgcagttgcttagaaagcatcccagttaattgcagtaattagaacttctggaatatgctagggcagaagtatgtcaagtatgtcacatgaagaaaatgtgaaattcaagagtaatccacacgtgagaaactagacaatgtacattcatgtgttctcttgaaaggaaagggagagctgtaagcttcactctgtcctacaccggagaaaagcaggaataactttaccgtggaaataatgtttagcttttatcagagaaaattgtccttctagagcatagagtcccaaaactcaattctggttttcccctgttttttttttttttttttttcccaacatataaactgcagcatatcactttttctttttgtgcctcaggttcctcacctgtaaaattgaaaaatatatgtattaataatattattaataataataatggtaatgtagtacttgtttgtaaagcactttgagatccttggttgaaaggcaccataggagtgccaagtattattatgtggccaagggggttatttaaactgtcagttcccaaaggccaggaaaggttggggtcatttttcttaaagacgagctgtaaatatcaactaggcagccaatagtgttgactatgaagatgcaaaactattactaggctgataaaatcatagtttcttaatggctaccaataaggcaaatatcacaataataaacgccaaattccttagggcggactatttgacaaccacatggaaaactttgggggaggcatgaggggggaacatctcaaaatgccaatgtaaaatttaacttacagcaatattcaccagcagaaaatgtctttcatatggaatgatttcatgttgctaagaaaaagaattcaatttgtagtcctgatttgaatactagaatgttggctataatagttctgttcttacaacacatgaaattttttcgttttattttattttgttttcatagtgcatgttcatttctactcacaaacatgttcttggtgtatttcttatgcaaacaatcttcaggcagcaaagatgtctgttacatctaaacttgaataataaagttttaccaccagttacaca

SEQ ID NO: 308413 - protein, 1281 aa, Artificial Sequence
  derived and/or modified sequence
MVRKKNPPLRNVASEGEGQILEPIGTESKVSGKNKEFSADQMSENTDQSDAAELNHKEEHSLHVQDPSSSSKKDLKSAVLSEKAGFNYESPSKGGNFPSFPHDEVTDRNMLAFSSPAAGGVCEPLKSPQRAEADDPQDMACTPSGDSLETKEDQKMSPKATEETGQAQSGQANCQGLSPVSVASKNPQVPSDGGVRLNKSKTDLLVNDNPDPAPLSPELQDFKCNICGYGYYGNDPTDLIKHFRKYHLGLHNRTRQDAELDSKILALHNMVQFSHSKDFQKVNRSVFSGVLQDINSSRPVLLNGTYDVQVTSGGTFIGIGRKTPDCQGNTKYFRCKFCNFTYMGNSSTELEQHFLQTHPNKIKASLPSSEVAKPSEKNSNKSIPALQSSDSGDLGKWQDKITVKAGDDTPVGYSVPIKPLDSSRQNGTEATSYYWCKFCSFSCESSSSLKLLEHYGKQHGAVQSGGLNPELNDKLSRGSVINQNDLAKSSEGETMTKTDKSSSGAKKKDFSSKGAEDNMVTSYNCQFCDFRYSKSHGPDVIVVGPLLRHYQQLHNIHKCTIKHCPFCPRGLCSPEKHLGEITYPFACRKSNCSHCALLLLHLSPGAAGSSRVKHQCHQCSFTTPDVDVLLFHYESVHESQASDVKQEANHLQGSDGQQSVKESKEHSCTKCDFITQVEEEISRHYRRAHSCYKCRQCSFTAADTQSLLEHFNTVHCQEQDITTANGEEDGHAISTIKEEPKIDFRVYNLLTPDSKMGEPVSESVVKREKLEEKDGLKEKVWTESSSDDLRNVTWRGADILRGSPSYTQASLGLLTPVSGTQEQTKTLRDSPNVEAAHLARPIYGLAVETKGFLQGAPAGGEKSGALPQQYPASGENKSKDESQSLLRRRRGSGVFCANCLTTKTSLWRKNANGGYVCNACGLYQKLHSTPRPLNIIKQNNGEQIIRRRTRKRLNPEALQAEQLNKQQRGSNEEQVNGSPLERRSEDHLTESHQREIPLPSLSKYEAQGSLTKSHSAQQPVLVSQTLDIHKRMQPLHIQIKSPQESTGDPGNSSSVSEGKGSSERGSPIEKYMRPAKHPNYSPPGSPIEKYQYPLFGLPFVHNDFQSEADWLRFWSKYKLSVPGNPHYLSHVPGLPNPCQNYVPYPTFNLPPHFSAVGSDNDIPLDLAIKHSRPGPTANGASKEKTKAPPNVKNEGPLNVVKTEKVDRSTQDELSTKCVHCGIVFLDEVMYALHMSCHGDSGPFQCSICQHLCTDKYDFTTHIQRGLHRNNAQVEKNGKPKE

SEQ ID NO: 308414 - DNA, 5480 bp, Artificial Sequence
  derived and/or modified sequence
ggggagggaaaggggggggaggcaggaaagacctttttctctcccccccgcaataatccaagatcaactctgcaaacaacagaagacggttcatggctttggccgccgcgccaccatctttcgggctgccgagggtgttcttgacgattaatcaacagatatggtccggaaaaagaacccccctctgagaaacgttgcaagtgaaggcgagggccagatcctggagcctataggtacagaaagcaaggtatctggaaagaacaaagaattttctgcagatcagatgtcagaaaatacggatcagagtgatgctgcagaactaaatcataaggaggaacatagcttgcatgttcaagatccatcttctagcagtaagaaggacttgaaaagcgcagttctgagtgagaaggctggcttcaattatgaaagccccagtaagggaggaaactttccctcctttccgcatgatgaggtgacagacagaaatatgttggctttctcatctccagctgctgggggagtctgtgagcccttgaagtctccgcaaagagcagaggcagatgaccctcaagatatggcctgcaccccctcaggggactcactggagacaaaggaagatcagaagatgtcaccaaaggctacagaggaaacagggcaagcacagagtggtcaagccaattgtcaaggtttgagcccagtttcagtggcctcaaaaaacccacaagtgccttcagatgggggtgtaagactgaataaatccaaaactgacttactggtgaatgacaacccagacccggcacctctgtctccagagcttcaggactttaaatgcaatatctgtggatatggttactacggcaacgaccccacagatctgattaagcacttccgaaagtatcacttaggactgcataaccgcaccaggcaagatgctgagctggacagcaaaatcttggcccttcataacatggtgcagttcagccattccaaagacttccagaaggtcaaccgttctgtgttttctggtgtgctgcaggacatcaattcttcaaggcctgttttactaaatgggacctatgatgtgcaggtgacttcaggtggaacattcattggcattggacggaaaacaccagattgccaagggaacaccaagtatttccgctgtaaattctgcaatttcacttatatgggcaactcatccaccgaattagaacaacattttcttcagactcacccaaacaaaataaaagcttctctcccctcctctgaggttgcaaaaccttcagagaaaaactctaacaagtccatccctgcacttcaatccagtgattctggagacttgggaaaatggcaggacaagataacagtcaaagcaggagatgacactcctgttgggtactcagtgcccataaagcccctcgattcctctagacaaaatggtacagaggccaccagttactactggtgtaaattttgtagtttcagctgtgagtcatctagctcacttaaactgctagaacattatggcaagcagcacggagcagtgcagtcaggcggccttaatccagagttaaatgataagctttccaggggctctgtcattaatcagaatgatctagccaaaagttcagaaggagagacaatgaccaagacagacaagagctcgagtggggctaaaaagaaggacttctccagcaagggagccgaggataatatggtaacgagctataattgtcagttctgtgacttccgatattccaaaagccatggccctgatgtaattgtagtggggccacttctccgtcattatcaacagctccataacattcacaagtgtaccattaaacactgtccattctgtcccagaggactttgcagcccagaaaagcaccttggagaaattacttatccgtttgcttgtagaaaaagtaattgttcccactgtgcactcttgcttctgcacttgtctcctggggcggctggaagctcgcgagtcaaacatcagtgccatcagtgttcattcaccacccctgacgtagatgtactcctctttcactatgaaagtgtgcatgagtcccaagcatcggatgtcaaacaagaagcaaatcacctgcaaggatcggatgggcagcagtctgtcaaggaaagcaaagaacactcatgtaccaaatgtgattttattacccaagtggaagaagagatttcccgacactacaggagagcacacagctgctacaaatgccgtcagtgcagttttacagctgccgatactcagtcactactggagcacttcaacactgttcactgccaggaacaggacatcactacagccaacggcgaagaggacggtcatgccatatccaccatcaaagaggagcccaaaattgacttcagggtctacaatctgctaactccagactctaaaatgggagagccagtttctgagagtgtggtgaagagagagaagctggaagagaaggacgggctcaaagagaaagtttggaccgagagttccagtgatgaccttcgcaatgtgacttggagaggggcagacatcctgcgggggagtccgtcatacacccaagcaagcctggggctgctgacgcctgtgtctggcacccaagagcagacaaagactctaagggatagtcccaatgtggaggccgcccatctggcgcgacctatttatggcttggctgtggaaaccaagggattcctgcagggggcgccagctggcggagagaagtctggggccctcccccagcagtatcctgcatcgggagaaaacaagtccaaggatgaatcccagtccctgttacggaggcgtagaggctccggtgttttttgtgccaattgcctgaccacaaagacctctctctggcgaaagaatgcaaatggcggatatgtatgcaacgcgtgtggcctctaccagaagcttcactcgactcccaggcctttaaacatcattaaacaaaacaacggtgagcagattattaggaggagaacaagaaagcgccttaacccagaggcacttcaggctgagcagctcaacaaacagcagaggggcagcaatgaggagcaagtcaatggaagcccgttagagaggaggtcagaagatcatctaactgaaagtcaccagagagaaattccactccccagcctaagtaaatacgaagcccagggttcattgactaaaagccattctgctcagcagccagtcctggtcagccaaactctggatattcacaaaaggatgcaacctttgcacattcagataaaaagtcctcaggaaagtactggagatccaggaaatagttcatccgtatctgaagggaaaggaagttctgagagaggcagtcctatagaaaagtacatgagacctgcgaaacacccaaattattcaccaccaggcagccctattgaaaagtaccagtacccactttttggacttccctttgtacataatgacttccagagtgaagctgattggctgcggttctggagtaaatataagctctccgttcctgggaatccgcactacttgagtcacgtgcctggcctaccaaatccttgccaaaactatgtgccttatcccaccttcaatctgcctcctcatttttcagctgttggatcagacaatgacattcctctagatttggcgatcaagcattccagacctgggccaactgcaaacggtgcctccaaggagaaaacgaaggcaccaccaaatgtaaaaaatgaaggtcccttgaatgtagtaaaaacagagaaagttgatagaagtactcaagatgaactttcaacaaaatgtgtgcactgtggcattgtctttctggatgaagtgatgtatgctttgcatatgagttgccatggtgacagtggacctttccagtgcagcatatgccagcatctttgcacggacaaatatgacttcacaacacatatccagaggggcctgcataggaacaatgcacaagtggaaaaaaatggaaaacctaaagagtaaaaccttagcacttagcacaattaaatagaaataggttttcttgatgggaattcaatagcttgtaatgtcttatgaagacctattaaaaaaatacttcatagagcctgccttatccaacatgaaattcccttcttttgttattctttcttttgatgagtaggttaccaagattaaaaagtgagataaatggtcaatgagaaagaatggaagatggtaaacaatcactttttaaaacctgttaagtcaaaaccatcttggctaatatgtactggggaaataatccataagagatatcaccagactagaattaatatatttataaagaaagagaccaaaactgtctagaatttgaaagggtttacatattattatactaaagcagtactggactggccattggaccatttgttccaaaacccataaattgttgcctaaatttataatgatcatgaaaccctaggcagaggaggagaaattgaaggtccagggcaatgaaagaaaaatggcgccctctcaatttagtcttctctcattggccatgtttcagattttgacctagaaatgcgagctgtggttaggcttggttagagtgcagcaagcaacatgacagatggtggcacgctgtttttacccagccctgcctgtacatacacatgcacaccctctctgatatttttgtcctttagatgttcaaatactcagtagtccttttgtttgcggtttagattcattttgtccacacatgtacccattttaaaaaacaatgtcctcgatgcttctgtagtgatttcattttagccaggtatttctttcttgtgtgtgatgaaccagtatggatttgcttttctaagcctcctgttggttactaatctcacttggcacattataactaaaggaatcccctcaattcaaaagcatagatggatacaaatgtcagaccgtgggtttaatttgtttagaacacatggcatttcttcacaaggtaacctgctgtatttatttattttcttttggttaaatataatttccaaactttgtggtcaggcagcgtctaaggttacgttaccacagactgacagttggtatatgtaccagccaatcccttcattaaatgtatacagatttagttaagtagcattaaataggattcttagaagtatgtcctcatagaacttttaatacttaaggctttgtaaaaactatccatgaagggaaagctcctcagcataactgctcagggaaatagggctaaataactgaacattaaataattggttaaaggtgctgttagtcgagcctcaatgcttgctacaaggatgtatgtacaaggactgactttaataatttgcattatattgtcccaaccagtagtttattttttgccacggagatgtagaagatattacaagctactggatgcactgtcagattaacttatttcattaaagaagttgggagaacaaataggaaaaaa

SEQ ID NO: 308415 - DNA, 3846 bp, Artificial Sequence
  derived and/or modified sequence
atggtacgcaaaaagaaccccccgcttcgtaatgtggcgtctgaaggtgaaggtcagatcctcgagcccatcggtaccgagagcaaagtgtctggaaagaacaaggagttctcagcagaccagatgagcgaaaacaccgatcagagcgatgctgccgagttgaatcacaaggaagaacactctttgcacgtgcaagacccaagttccagcagcaagaaagatctcaagtctgctgtcctttctgagaaggctgggtttaattacgagtcccctagtaagggcgggaacttcccaagctttccacacgatgaggtgaccgaccgcaatatgctagcattttcctcaccggccgctgggggcgtgtgtgaacctctaaagagcccccaaagggcagaagccgatgatcctcaggatatggcctgtacccccagcggagatagcttagaaacgaaggaggaccagaaaatgtctcccaaagctacggaggagactggccaggcccaatcaggacaggcaaattgccagggactgagccctgttagtgtggcatccaagaacccacaagtcccatccgatggaggggttagattgaacaagtctaaaacagatctgttggtgaacgacaaccctgatcctgcacccctgtccccagaactgcaagatttcaagtgtaacatctgtggctatggctactatggaaatgacccgacagacctgatcaagcacttcagaaaatatcatctcggcttacacaaccgcacgcggcaagatgccgagttagactctaagatcctggcgctccacaatatggtgcagttctcccacagcaaagatttccagaaggtgaaccgcagcgttttttctggggtgctgcaagacatcaacagttcccgacccgtcttactgaatggtacctacgacgtgcaggtcacgtcgggtggtacattcataggcataggcagaaaaacgcccgactgccagggcaatactaaatacttccggtgtaaattctgcaactttacatacatgggcaattcgtctactgagctggagcagcacttcctgcaaacccaccctaataaaataaaagccagtctgccatcttcagaggttgcgaagccgtcggagaaaaactcaaacaagtcaatccccgcgctacagtcctccgatagtggggacctaggcaagtggcaggacaaaataactgttaaagcaggcgatgatacacccgttggttacagcgtccctattaaaccactcgacagcagtcgacagaatggaaccgaggcaaccagttactattggtgcaagttctgctccttcagctgtgagagtagctcatctcttaagcttctggaacactacggtaagcagcatggagccgtgcagtcaggggggctgaatcctgagctgaacgacaagttatctagaggctctgtgatcaatcaaaatgatctcgctaagagttctgaaggagagacaatgaccaagacagataagtcaagcagcggggctaagaaaaaagatttcagcagtaaaggggcagaggataacatggttactagctacaactgccagttttgtgattttaggtactcgaagagtcatgggcccgacgttattgtcgttggcccccttcttcgccactaccagcagcttcacaatattcacaagtgcacaatcaaacactgccccttttgtcctcgcggcctgtgctcacctgaaaaacatttaggggagattacatacccatttgcctgccgaaagagcaactgttctcattgcgctctgctcctgttgcatctctcgcccggcgccgccggctcgtcccgtgtgaaacaccagtgtcatcagtgctccttcaccacacctgacgttgatgtccttctgttccattacgaaagcgtgcatgagtcccaggcgagtgacgttaagcaggaggcaaaccatctccaaggatccgatggacagcaatcagtgaaagaaagcaaggaacacagttgtaccaagtgcgactttattacacaggtggaagaagagatttcacgccattacagacgagcacactcctgttataagtgtcgacagtgttctttcacggcagcggatacccagtcactgttggagcactttaataccgttcattgccaggaacaggatattaccaccgcaaacggggaagaagacgggcatgccatttcaacgatcaaggaggaacctaaaatagactttagagtgtacaacctgctcaccccagattccaagatgggagagcccgtatcagagagcgtcgtcaaacgagagaaactggaagaaaaggacggactgaaggaaaaagtgtggactgagtcatctagcgatgaccttaggaacgtgacctggaggggcgccgatattttgagaggcagcccttcatatacacaggcgagtctggggctcttgacccctgttagtggcacgcaggagcagacaaagaccctgcgggacagcccaaacgttgaggccgcccacttggctaggccgatatatggactcgccgtcgagaccaagggatttctacaaggagcccccgccggtggcgaaaagagcggagcattacctcagcaatacccggcgtctggcgagaacaagtccaaagacgagagtcagagcttgctgcgcaggagaagggggagtggtgtattctgcgcaaactgtctaacaaccaaaaccagcctttggcgtaaaaacgctaatggcgggtacgtgtgcaatgcatgcggtctgtaccagaagttgcattccacaccccgacctctcaatattatcaaacagaataatggagagcaaataattaggcgtcggacaaggaaacggctcaatcccgaagctctacaagccgaacagctcaacaaacagcagcgcggcagtaacgaggagcaggtgaacggatctccattggagcgtaggtccgaggaccaccttactgaatcccaccagcgagagatcccgctgccatccctgtcgaagtacgaggcccagggtagcctgaccaaaagtcactccgcacagcaacctgttttagtttcccagaccctagacatccataaacggatgcaaccactgcacatccagattaaatcgccacaagaatctaccggcgaccccggtaactcatcatccgtatctgaaggaaaaggtagctccgaacgcggtagccctatcgagaaatacatgcggcctgctaagcaccccaactattctccacctggcagcccaatcgaaaagtaccagtaccccttattcgggctgccttttgtacacaatgactttcaatcagaagcggactggctccgattttggtctaaatacaagctctcggttccaggaaatccacattacctgtcccatgtccccggcctgcccaatccctgtcagaattatgtgccctaccctacttttaatctgccaccccatttttccgcggtaggtagcgataacgatattcccctcgacctcgccatcaaacacagcaggcccggaccgacagctaacggagcgagcaaggagaagacaaaggctccacccaatgtcaaaaacgaaggacccctgaacgtggttaaaaccgaaaaggtggaccggtccacgcaggacgagttgagtacaaagtgcgtccactgcgggatcgttttcttggatgaggtgatgtacgccctccatatgagctgccacggcgactccggaccattccaatgttctatatgccaacacctgtgcactgataaatacgattttaccactcacatccagcgtggcctgcacagaaataatgcccaagtggagaaaaatggaaaacccaaagagtag

SEQ ID NO: 308416 - DNA, 3846 bp, Artificial Sequence
  derived and/or modified sequence
atggtgaggaagaagaacccccccctgagaaatgtggccagcgagggggagggccagatcctggagcccatcggcacagagagcaaggtgtctgggaagaacaaggagttctctgctgaccagatgtctgagaacacagaccagagtgatgctgctgagctgaaccacaaggaggagcacagcctgcacgtgcaggaccccagcagcagcagcaagaaggacctgaagtctgctgtgctgtctgagaaggccggcttcaactatgagagccccagcaaaggaggcaacttccccagcttcccccatgatgaggtgacagacaggaacatgctggccttcagcagccctgctgctgggggcgtgtgtgagcccctgaagagcccccagagagctgaggctgatgacccccaggacatggcctgcacccccagcggggacagcctggagaccaaggaggaccagaagatgagccccaaggccacagaggagaccggccaggcccagagcggccaggccaactgccagggcctgagccctgtgtctgtggccagcaagaacccccaggtgcccagtgatggcggcgtgcggctgaacaagagcaagacagacctgctggtgaatgacaacccagaccctgcccccctgagccctgagctgcaggacttcaagtgcaacatctgtggctacggctactatggaaatgaccccacagacctgatcaagcacttcaggaagtaccacctgggcctgcacaacagaacccggcaggatgctgagctggacagcaagatcctggccctgcacaacatggtgcagttcagccacagcaaggacttccagaaggtgaacagatctgtgttcagcggcgtgctgcaggacatcaacagcagcaggcctgtgctgctgaatggcacctatgatgtgcaggtgaccagcggcggcaccttcatcggcattggaaggaagaccccagactgccagggcaacaccaagtacttccgctgcaagttctgcaacttcacctacatgggcaacagcagcacagagctggagcagcacttcctgcagacccaccccaacaagatcaaggccagcctgcccagcagcgaggtggccaagcccagcgagaagaacagcaacaagagcatcccagccctgcagagcagtgacagcggggacctgggcaagtggcaggacaagatcaccgtgaaggctggagatgacacccctgtgggctacagcgtgcccatcaagcccctggacagcagccggcagaatggaacagaggccaccagctactactggtgcaagttctgcagcttcagctgtgagagcagcagcagcctgaagctgctggagcactacggcaagcagcacggggctgtgcagagcggcggcctgaaccctgagctgaatgacaagctgagccggggcagcgtcatcaaccagaatgacctggccaagagcagcgagggggagaccatgaccaagacagacaagagcagcagcggggccaagaagaaggacttcagcagcaaaggagctgaggacaacatggtgaccagctacaactgccagttctgtgacttccgctacagcaagagccacggcccagatgtgattgtggtgggccccctgctgcggcactaccagcagctgcacaacatccacaagtgcaccatcaagcactgccccttctgcccccggggcctgtgcagccctgagaagcacctgggggagatcacctacccctttgcctgcaggaagagcaactgcagccactgtgccctgctgctgctgcacctgagccctggagctgctggcagcagccgggtgaagcaccagtgccaccagtgcagcttcaccaccccagatgtggatgtgctgctcttccactatgaatctgtgcatgagagccaggccagtgatgtgaagcaggaggccaaccacctgcagggcagtgatggccagcagagcgtgaaggagagcaaggagcacagctgcaccaagtgtgacttcatcacccaggtggaggaggagatcagccgccactaccgccgggcccacagctgctacaagtgccggcagtgcagcttcaccgctgctgacacccagagcctgctggagcacttcaacacagtgcactgccaggagcaggacatcaccacagccaatggagaggaggatggccacgccatcagcaccatcaaggaggagcccaagattgacttccgggtgtacaacctgctgaccccagacagcaagatgggagagcctgtgtctgagagcgtggtgaagcgggagaagctggaggagaaggatggcctgaaggagaaggtgtggacagagagcagcagtgatgacctgagaaatgtgacctggagaggagctgacatcctgcggggcagccccagctacacccaggccagcctgggcctgctgacccctgtgtctggcacccaggagcagaccaagaccctgcgggacagccccaacgtggaggccgcccacctggcccggcccatctacggcctggccgtggagaccaagggcttcctgcagggcgccccagctggaggagagaagagcggggccctgccccagcagtacccagccagcggggagaacaagagcaaggatgagagccagagcctgctgcggaggagaagaggcagcggggtcttctgtgccaactgcctgaccaccaagaccagcctgtggaggaagaatgccaacggcggctacgtgtgcaatgcctgtggcctgtaccagaagctgcacagcaccccccggcccctgaacatcatcaagcagaacaacggggagcagatcatcagaagaaggaccaggaagaggctgaaccctgaggccctgcaggccgagcagctgaacaagcagcagaggggcagcaatgaggagcaggtgaatggcagccccctggagcggcgctctgaggaccacctgacagagagccaccagcgggagatccccctgcccagcctgagcaaatatgaggcccagggcagcctgaccaagagccacagcgcccagcagcctgtgctggtgtcccagaccctggacatccacaagaggatgcagcccctgcacatccagatcaagagcccccaggagagcactggagaccccggcaacagcagctctgtgtctgagggcaagggcagcagcgagcggggcagccccatcgagaagtacatgaggcctgccaagcaccccaactacagccccccaggcagccccatcgagaagtaccagtaccccctgtttggcctgccctttgtgcacaatgacttccagagcgaggccgactggctgcgcttctggagcaagtacaagctgtctgtgcccggcaacccccactacctgagccacgtgcccggcctgcccaacccctgccagaactacgtgccctaccccaccttcaacctgcccccccacttctctgctgtgggcagtgacaatgacatccccctggacctggccatcaagcacagcaggcctggccccacagccaacggggccagcaaggagaagaccaaggccccacccaacgtgaagaatgaaggccccctgaatgtggtgaagacagagaaggtggacaggagcacccaggatgagctgagcaccaagtgtgtgcactgcggcatcgtgttcctggatgaggtgatgtatgccctgcacatgagctgccacggggacagcggccccttccagtgcagcatctgccagcacctgtgcacagacaagtatgacttcaccacccacatccagaggggcctgcacaggaacaatgcccaggtggagaagaatggcaagcccaaggagtag

SEQ ID NO: 308417 - DNA, 3846 bp, Artificial Sequence
  derived and/or modified sequence
atggtgcggaagaagaacccccccctgcggaacgtggccagcgagggcgagggccagattctggaacccatcggaaccgaatccaaagtctctggcaagaataaggagttttctgccgatcagatgtctgagaacacagatcagtcggacgcagccgagttgaaccacaaggaggagcactcactgcatgtccaggacccatcctcaagcagcaaaaaggatttaaagtcggcagtgttatcagaaaaagctggctttaactatgaaagcccgagtaagggtggcaactttccttccttcccacacgacgaagtgactgaccgcaatatgcttgcgttttcaagcccggctgctggcggtgtgtgcgagcccttgaaaagcccccagcgagctgaagccgatgatccacaggacatggcttgcactcctagtggagattccctcgaaaccaaggaggaccagaagatgtcccctaaagcaacggaagagactggccaggcccagtccggtcaggctaactgtcaggggcttagtccagtgtcagtagcctccaaaaaccctcaagttcctagtgacggcggtgtgcggctaaacaaatcaaagacagatcttctcgtgaacgataacccagaccccgcccctctctcccccgagttgcaagacttcaaatgcaacatctgcggctacggatactacggaaacgatccgacggacctcatcaaacactttcgaaaatatcatcttggtttgcacaaccgcacccggcaagacgctgagctggactcaaaaatactcgcattgcataacatggtgcagttttctcactccaaagatttccagaaggtgaatcggagtgtgtttagcggggtcctgcaggacattaactcctcccgcccggtcctcctgaatggcacctacgatgtccaggtcacctcagggggaacatttataggcattggcagaaagacccctgactgccaaggtaatacaaagtacttccggtgtaagttctgcaattttacctacatgggaaattccagcaccgagctggagcagcacttcctacagacacatccaaacaagattaaggcctccttgcctagtagcgaagtggccaagccatccgagaaaaacagcaacaaatctatccctgcgcttcagagtagtgatagtggcgacctcggcaaatggcaggataaaatcacagtgaaggctggcgatgatacacccgtggggtactcagtgcccataaaaccactcgacagcagtcggcagaatggtacagaggcgacctcttactactggtgtaaattttgctccttctcctgcgagagttctagctcactcaagctgcttgagcactatggcaaacagcacggggctgtgcaaagtgggggccttaatccagagctgaacgataagttgtcaagggggtcagtgatcaaccaaaacgacctggcaaaaagcagtgaaggcgagaccatgacaaaaaccgataagtcttccagtggggctaagaaaaaggacttctcatcaaaaggtgccgaggacaatatggttactagctacaattgccagttctgcgattttcgatactcaaagagccatggtcctgacgtcatagtagttggtcctctcctgcgccattatcagcagcttcacaatatacataaatgcaccatcaagcactgccctttttgtccaagagggctgtgttctccagagaagcacctgggagaaataacctacccgttcgcctgtagaaaatctaattgctcccactgcgccctgttactgctgcacctgagccccggcgcggctggatcttctagggttaagcaccagtgccatcaatgttcatttacaactccggacgtggacgtcctgctcttccactacgagagcgtgcacgagtcacaggcatcagatgtgaaacaagaagccaaccatctgcaagggtctgacgggcagcagagcgtgaaggagagtaaggaacacagttgcaccaaatgcgacttcatcacgcaagtggaggaggaaattagccgtcattatagacgggctcacagctgttataagtgtcgacagtgttcatttacagctgcagacactcagtccctgctggaacacttcaacaccgtgcactgccaggagcaggacattaccacggcgaacggagaagaagacggtcacgcaatttcgactatcaaggaggagcccaagatcgactttcgcgtttacaacctgctgaccccggacagcaagatgggcgaacctgtctctgaatccgttgtcaaacgagagaaactggaggagaaggacggcctgaaagagaaggtctggacggaaagctcatcggacgatttgagaaatgtgacatggagaggcgccgatatcttgaggggttccccttcatacacccaggcctcattaggccttcttactccggtgagcgggacgcaagagcagacgaaaacccttcgcgatagtcctaacgtggaggccgctcatctcgctcggcctatttatggactggccgtggagacaaaggggttcttgcagggcgccccagctggtggcgaaaagtctggagcactgccacaacaataccccgcctctggtgagaacaaatccaaagacgagagtcaatctctgcttcgtcgccgtaggggctctggggtgttctgtgctaactgcttaacgacaaagaccagcctgtggcggaaaaacgcaaacggaggatacgtgtgcaacgcatgtggactctatcagaagctccacagcacccccagacctcttaatattatcaagcagaacaatggagagcagatcatacggcgtagaacaagaaagcgcctcaatccagaggctctgcaggctgaacaattgaataagcaacagcgcggatcaaacgaagaacaagtaaatggcagtcccctggaacgtaggagcgaggaccatctcaccgagtcacatcagcgagagatcccattgccatcactgtctaaatatgaggcacaggggtccctgaccaagtcccattctgctcagcagccagtactggtgtcacagacgttagacatccacaagcgcatgcagcctctgcatattcagatcaagagcccacaggaatctacaggcgaccccggcaactcaagctcggtctccgagggcaagggatcttcagaacggggaagcccaatcgagaagtacatgaggcccgccaaacatccaaattacagcccccctgggagccccatcgaaaaataccagtacccattgttcggactaccctttgtgcataacgattttcagtccgaagcagattggctgcggttttggagcaagtataaactgtccgtgccgggcaacccccattaccttagccacgtacccgggctgcccaacccatgccaaaattacgtgccatatcctacattcaatctcccaccccattttagcgctgtgggaagcgataacgatattccgctggatctggccatcaagcattccagacctggaccaaccgccaatggggctagcaaggaaaagaccaaggctccaccgaacgtgaaaaacgagggacccctaaatgtggttaaaacagaaaaggttgaccgatccacccaggacgaactgtcaaccaagtgcgtgcactgtggcatcgtattcttggatgaggtcatgtatgccctccatatgtcttgtcatggggattccggcccatttcaatgttccatttgtcagcacctgtgcactgataaatacgatttcactacacacattcagcggggactgcatcgcaataacgcccaggtcgaaaagaacggcaaacctaaagaatag

SEQ ID NO: 308418 - DNA, 3846 bp, Artificial Sequence
  derived and/or modified sequence
atggtgcggaagaagaacccacccctgcgcaatgtggcttcagaaggtgaggggcagatcctggaaccgattgggactgagtctaaagtgtccggaaaaaataaggaattcagcgctgatcagatgagcgagaacacagaccagtctgatgctgcggaactaaaccacaaggaggaacactccctccacgtgcaggatccctccagctcaagcaagaaggacctcaagtcagctgtcctttcggaaaaggcaggattcaactatgaatccccgtctaagggcggtaacttcccatcattcccacacgatgaggtgactgacagaaacatgcttgcattctcatctccggctgctgggggagtctgcgagccactaaagtcacctcagcgggcagaagcggacgacccacaagatatggcatgcacgccatcaggggactcccttgaaaccaaagaggaccagaagatgtctccgaaagccactgaggagaccgggcaggcccagagtggacaggcaaattgtcaaggtcttagcccagtgagcgttgcttctaaaaacccgcaggtgcccagtgacggcggagttcgcctgaacaaaagtaaaacggacctgttggttaacgataatccagacccagcccctttgtcacctgaactccaagatttcaagtgtaatatttgcggttacgggtactatggcaatgacccgacagatcttatcaaacactttcgtaaataccacctgggcctgcacaatcgtacccggcaagatgcagaactggactctaagatcctcgccttgcataatatggtgcagtttagtcatagtaaggacttccagaaggtcaaccgcagcgtttttagcggggtgttacaagatatcaattcttctaggcctgttctgctaaacggtacttacgatgttcaggtcacttccgggggtaccttcattgggatcggacggaagactcctgattgccaaggaaacacaaagtacttcagatgcaagttctgtaattttacttacatgggcaactcctcgacagagctggaacagcattttctgcaaacccacccaaacaagatcaaagcctctctcccctcttcagaggttgccaaaccatctgaaaagaatagcaataagtcaattccagcactccaatcatctgacagcggagatctcggcaaatggcaggacaagattacagtaaaagccggagacgacactcccgtgggatattcagttcccattaagccgctcgatagtagcaggcagaatggcacagaggccacaagttattactggtgtaagttttgctcctttagctgcgagtctagctcttctctcaagctgttggagcattacggcaagcaacatggcgctgtacagagtgggggactgaatcctgagctgaatgacaaactgagcagaggctcagtgattaaccagaacgacttggcgaagagctccgagggagagactatgactaagaccgacaaatctagctcaggcgctaaaaaaaaagacttttcttcaaaaggtgcagaagacaacatggttaccagttataactgccagttttgtgacttcaggtactctaagtcgcacgggcctgacgtgatcgtggttggccctctgctgcgccactaccagcagctccacaacatccacaagtgtacgattaaacactgtcctttctgcccaaggggcctgtgctccccagagaagcacctgggagaaattacttaccccttcgcctgccgcaagagtaactgcagtcactgtgccttactcctccttcacctgtctcccggagcagcagggtcctcccgcgtgaagcatcagtgccatcagtgctctttcaccacaccagacgtcgatgtcctgttatttcactacgaatcagtgcacgagtctcaggccagtgatgtgaaacaggaagccaatcatttacagggatccgacggccagcagagtgtcaaagagtctaaagagcattcttgtacaaaatgcgacttcatcacacaggtggaggaggagatttcccgacattacaggagagcccattcttgttataagtgccgccagtgcagctttaccgcggctgatacacagagtctgttagagcattttaacactgtgcattgtcaggagcaggacatcaccacagccaatggagaggaagacggccacgcaatatccacaatcaaggaggaaccaaagatagacttccgggtctacaacctcctaacacctgactctaagatgggcgagcctgtctcagagtctgttgtgaagagggaaaaattggaagaaaaagatgggctaaaagaaaaagtgtggacagagtcttcgagcgacgacctgcgcaacgtcacctggagaggcgcagacattctgcgtgggtctccgtcatatactcaggcctctttgggcttgttgacccctgtgtccggtacccaggagcaaactaagactctgcgtgatagcccaaacgtggaggcagcacatttagccagacccatttacggcctggctgtagagacaaaggggttcctgcagggggctcccgcagggggagaaaaatctggggcactcccgcagcaatatccagcctccggggagaataaatccaaggatgaatcccagtccttactgcgcaggcgcaggggaagcggagtgttttgtgcgaactgcctgacaactaaaacatctctatggagaaaaaatgctaatgggggatacgtatgcaacgcctgcggactctatcaaaaactccactcgactcctcgcccactgaacattatcaagcagaataacggcgagcaaataatacggagaagaaccagaaaacgattaaatcctgaggcactgcaggcagagcagctgaacaaacagcagcgtggtagtaacgaagagcaggtgaacggctcccccctggagaggcgctctgaagatcacttgacagagtcacaccaaagggagatcccactgccatcactgtccaagtatgaggcgcaaggaagcttaaccaagtcccactccgcacagcagcctgtcctcgtgtctcagacattggatattcacaaaagaatgcagcccctccatattcagatcaagagtccacaggaaagcaccggagatcccggaaattccagctcagtaagcgaaggcaagggtagttccgagcggggaagtcccattgagaagtacatgcgcccagccaaacaccctaattattcaccgcctggaagcccgatagagaaatatcagtacccgctttttgggctgccctttgttcacaacgacttccagtccgaggctgattggctgaggttttggagcaagtataaactgagtgtccccggaaaccctcattacctcagccatgtgcctggtctacccaacccttgccagaattacgttccctaccctacatttaacctgcctccccacttctccgcggttggtagcgataacgatatccccttggatctggctattaagcactccaggccgggtccgaccgccaacggtgctagcaaggagaagactaaggcacctcccaatgtgaaaaacgaggggcctctgaacgtggtaaagaccgaaaaggtggacaggagcactcaggacgaactgtccacaaaatgcgtgcactgtgggattgtgttcctcgacgaggtcatgtatgccttacacatgtcttgccacggcgattctggtccttttcagtgttccatatgtcaacacctgtgtaccgacaaatatgatttcacaacacatatccagcgcggactgcataggaataatgcacaggtggagaagaatggcaaacctaaagagtag

SEQ ID NO: 308419 - DNA, 3846 bp, Artificial Sequence
  derived and/or modified sequence
atggtgagaaagaagaacccccccctgagaaacgtggccagcgagggcgagggccagatcctggagcccatcggcaccgagagcaaggtgagcggcaagaacaaggagttcagcgccgaccagatgagcgagaacaccgaccagagcgacgccgccgagctgaaccacaaggaggagcacagcctgcacgtgcaggaccccagcagcagcagcaagaaggacctgaagagcgccgtgctgagcgagaaggccggcttcaactacgagagccccagcaagggcggcaacttccccagcttcccccacgacgaggtgaccgacagaaacatgctggccttcagcagccccgccgccggcggcgtgtgcgagcccctgaagagcccccagagagccgaggccgacgacccccaggacatggcctgcacccccagcggcgacagcctggagaccaaggaggaccagaagatgagccccaaggccaccgaggagaccggccaggcccagagcggccaggccaactgccagggcctgagccccgtgagcgtggccagcaagaacccccaggtgcccagcgacggcggcgtgagactgaacaagagcaagaccgacctgctggtgaacgacaaccccgaccccgcccccctgagccccgagctgcaggacttcaagtgcaacatctgcggctacggctactacggcaacgaccccaccgacctgatcaagcacttcagaaagtaccacctgggcctgcacaacagaaccagacaggacgccgagctggacagcaagatcctggccctgcacaacatggtgcagttcagccacagcaaggacttccagaaggtgaacagaagcgtgttcagcggcgtgctgcaggacatcaacagcagcagacccgtgctgctgaacggcacctacgacgtgcaggtgaccagcggcggcaccttcatcggcatcggcagaaagacccccgactgccagggcaacaccaagtacttcagatgcaagttctgcaacttcacctacatgggcaacagcagcaccgagctggagcagcacttcctgcagacccaccccaacaagatcaaggccagcctgcccagcagcgaggtggccaagcccagcgagaagaacagcaacaagagcatccccgccctgcagagcagcgacagcggcgacctgggcaagtggcaggacaagatcaccgtgaaggccggcgacgacacccccgtgggctacagcgtgcccatcaagcccctggacagcagcagacagaacggcaccgaggccaccagctactactggtgcaagttctgcagcttcagctgcgagagcagcagcagcctgaagctgctggagcactacggcaagcagcacggcgccgtgcagagcggcggcctgaaccccgagctgaacgacaagctgagcagaggcagcgtgatcaaccagaacgacctggccaagagcagcgagggcgagaccatgaccaagaccgacaagagcagcagcggcgccaagaagaaggacttcagcagcaagggcgccgaggacaacatggtgaccagctacaactgccagttctgcgacttcagatacagcaagagccacggccccgacgtgatcgtggtgggccccctgctgagacactaccagcagctgcacaacatccacaagtgcaccatcaagcactgccccttctgccccagaggcctgtgcagccccgagaagcacctgggcgagatcacctaccccttcgcctgcagaaagagcaactgcagccactgcgccctgctgctgctgcacctgagccccggcgccgccggcagcagcagagtgaagcaccagtgccaccagtgcagcttcaccacccccgacgtggacgtgctgctgttccactacgagagcgtgcacgagagccaggccagcgacgtgaagcaggaggccaaccacctgcagggcagcgacggccagcagagcgtgaaggagagcaaggagcacagctgcaccaagtgcgacttcatcacccaggtggaggaggagatcagcagacactacagaagagcccacagctgctacaagtgcagacagtgcagcttcaccgccgccgacacccagagcctgctggagcacttcaacaccgtgcactgccaggagcaggacatcaccaccgccaacggcgaggaggacggccacgccatcagcaccatcaaggaggagcccaagatcgacttcagagtgtacaacctgctgacccccgacagcaagatgggcgagcccgtgagcgagagcgtggtgaagagagagaagctggaggagaaggacggcctgaaggagaaggtgtggaccgagagcagcagcgacgacctgagaaacgtgacctggagaggcgccgacatcctgagaggcagccccagctacacccaggccagcctgggcctgctgacccccgtgagcggcacccaggagcagaccaagaccctgagagacagccccaacgtggaggccgcccacctggccagacccatctacggcctggccgtggagaccaagggcttcctgcagggcgcccccgccggcggcgagaagagcggcgccctgccccagcagtaccccgccagcggcgagaacaagagcaaggacgagagccagagcctgctgagaagaagaagaggcagcggcgtgttctgcgccaactgcctgaccaccaagaccagcctgtggagaaagaacgccaacggcggctacgtgtgcaacgcctgcggcctgtaccagaagctgcacagcacccccagacccctgaacatcatcaagcagaacaacggcgagcagatcatcagaagaagaaccagaaagagactgaaccccgaggccctgcaggccgagcagctgaacaagcagcagagaggcagcaacgaggagcaggtgaacggcagccccctggagagaagaagcgaggaccacctgaccgagagccaccagagagagatccccctgcccagcctgagcaagtacgaggcccagggcagcctgaccaagagccacagcgcccagcagcccgtgctggtgagccagaccctggacatccacaagagaatgcagcccctgcacatccagatcaagagcccccaggagagcaccggcgaccccggcaacagcagcagcgtgagcgagggcaagggcagcagcgagagaggcagccccatcgagaagtacatgagacccgccaagcaccccaactacagcccccccggcagccccatcgagaagtaccagtaccccctgttcggcctgcccttcgtgcacaacgacttccagagcgaggccgactggctgagattctggagcaagtacaagctgagcgtgcccggcaacccccactacctgagccacgtgcccggcctgcccaacccctgccagaactacgtgccctaccccaccttcaacctgcccccccacttcagcgccgtgggcagcgacaacgacatccccctggacctggccatcaagcacagcagacccggccccaccgccaacggcgccagcaaggagaagaccaaggccccccccaacgtgaagaacgagggccccctgaacgtggtgaagaccgagaaggtggacagaagcacccaggacgagctgagcaccaagtgcgtgcactgcggcatcgtgttcctggacgaggtgatgtacgccctgcacatgagctgccacggcgacagcggccccttccagtgcagcatctgccagcacctgtgcaccgacaagtacgacttcaccacccacatccagagaggcctgcacagaaacaacgcccaggtggagaagaacggcaagcccaaggagtag

SEQ ID NO: 308420 - DNA, 672 bp, Artificial Sequence
  derived and/or modified sequence
atgtggatctgtccaggcggagggggcggaggtgggggagggggcgacagagaggatgcacggccgcccctgtgctgtgggagatgttggaggtccggatgcgccgcaagaccccctagaatggtctctatcggactgcgcggagcagtgaggggcgctagagggtgccacctcggaagaccctttagtccaagcgtgctattatgtgttgggcggcccgggtctgccgctggggcagaaaggggacacagtcttggctcccaagagttcggtcatcgcagaggaccattgccctggtgtcctgcaaatagacggggatcgccaccatcggcaccccggggccctgggcctcttactcgactcttgggaagacgggaggctgggagtaagagccaaaaactattatttcggagcgctcgggtgcagggcgggggtcagttttgcccttccggcagcgcttttctgggcgttgaaagggaacctactgcagggttgggcggagcagaacgccgtaatgctcgattctggaggggggagagaggccagggtcggcaagccaagcgaccggcaccctcccagcctgcctccccgctgcctgggggaggcacttgggccggctgtgttgggctggtctggatgggcaccggcttttgtggcgcccccgaattttag

SEQ ID NO: 308421 - DNA, 79 bp, Artificial Sequence
  derived and/or modified sequence
actcgagtggaattgactgtaacaaaatggaaagtaacggattggaatcgaatggaacggaatggaatggaatggacat

SEQ ID NO: 308422 - protein, 697 aa, Artificial Sequence
  derived and/or modified sequence
MGFLGCWCVSFQEVVTFGDVAVHFSREEWQCLDPGQRALYREVMLENHSSVAGLAGFLVFKPELISRLEQGEEPWVLDLQGAEGTEAPRTSKTDSTIRTENEQACEDMDILKSESYGTVVRISPQDFPQNPGFGDVSDSEVWLDSHLGSPGLKVTGFTFQNNCLNEETVVPKTFTKDAPQGCKELGSSGLDCQPLESQGESAEGMSQRCEECGKGIRATSDIALHWEINTQKISRCQECQKKLSDCLQGKHTNNCHGEKPYECAECGKVFRLCSQLNQHQRIHTGEKPFKCTECGKAFRLSSKLIQHQRIHTGEKPYRCEECGKAFGQSSSLIHHQRIHTGERPYGCRECGKAFSQQSQLVRHQRTHTGERPYPCKECGKAFSQSSTLAQHQRMHTGEKAQILKASDSPSLVAHQRIHAVEKPFKCDECGKAFRWISRLSQHQLIHTGEKPYKCNKCTKAFGCSSRLIRHQRTHTGEKPFKCDECGKGFVQGSHLIQHQRIHTGEKPYVCNDCGKAFSQSSSLIYHQRIHKGEKPYECLQCGKAFSMSTQLTIHQRVHTGERPYKCNECGKAFSQNSTLFQHQIIHAGVKPYECSECGKAFSRSSYLIEHQRIHTRAQWFYEYGNALEGSTFVSRKKVNTIKKLHQCEDCEKIFRWRSHLIIHQRIHTGEKPYKCNDCGKAFNRSSRLTQHQKIHMG

SEQ ID NO: 308423 - DNA, 2094 bp, Artificial Sequence
  derived and/or modified sequence
atgggcttcctgggctgctggtgcgtgagcttccaggaggtggtgaccttcggcgacgtggccgtgcacttcagcagagaggagtggcagtgcctggaccccggccagagagccctgtacagagaggtgatgctggagaaccacagcagcgtggccggcctggccggcttcctggtgttcaagcccgagctgatcagcagactggagcagggcgaggagccctgggtgctggacctgcagggcgccgagggcaccgaggcccccagaaccagcaagaccgacagcaccatcagaaccgagaacgagcaggcctgcgaggacatggacatcctgaagagcgagagctacggcaccgtggtgagaatcagcccccaggacttcccccagaaccccggcttcggcgacgtgagcgacagcgaggtgtggctggacagccacctgggcagccccggcctgaaggtgaccggcttcaccttccagaacaactgcctgaacgaggagaccgtggtgcccaagaccttcaccaaggacgccccccagggctgcaaggagctgggcagcagcggcctggactgccagcccctggagagccagggcgagagcgccgagggcatgagccagagatgcgaggagtgcggcaagggcatcagagccaccagcgacatcgccctgcactgggagatcaacacccagaagatcagcagatgccaggagtgccagaagaagctgagcgactgcctgcagggcaagcacaccaacaactgccacggcgagaagccctacgagtgcgccgagtgcggcaaggtgttcagactgtgcagccagctgaaccagcaccagagaatccacaccggcgagaagcccttcaagtgcaccgagtgcggcaaggccttcagactgagcagcaagctgatccagcaccagagaatccacaccggcgagaagccctacagatgcgaggagtgcggcaaggccttcggccagagcagcagcctgatccaccaccagagaatccacaccggcgagagaccctacggctgcagagagtgcggcaaggccttcagccagcagagccagctggtgagacaccagagaacccacaccggcgagagaccctacccctgcaaggagtgcggcaaggccttcagccagagcagcaccctggcccagcaccagagaatgcacaccggcgagaaggcccagatcctgaaggccagcgacagccccagcctggtggcccaccagagaatccacgccgtggagaagcccttcaagtgcgacgagtgcggcaaggccttcagatggatcagcagactgagccagcaccagctgatccacaccggcgagaagccctacaagtgcaacaagtgcaccaaggccttcggctgcagcagcagactgatcagacaccagagaacccacaccggcgagaagcccttcaagtgcgacgagtgcggcaagggcttcgtgcagggcagccacctgatccagcaccagagaatccacaccggcgagaagccctacgtgtgcaacgactgcggcaaggccttcagccagagcagcagcctgatctaccaccagagaatccacaagggcgagaagccctacgagtgcctgcagtgcggcaaggccttcagcatgagcacccagctgaccatccaccagagagtgcacaccggcgagagaccctacaagtgcaacgagtgcggcaaggccttcagccagaacagcaccctgttccagcaccagatcatccacgccggcgtgaagccctacgagtgcagcgagtgcggcaaggccttcagcagaagcagctacctgatcgagcaccagagaatccacaccagagcccagtggttctacgagtacggcaacgccctggagggcagcaccttcgtgagcagaaagaaggtgaacaccatcaagaagctgcaccagtgcgaggactgcgagaagatcttcagatggagaagccacctgatcatccaccagagaatccacaccggcgagaagccctacaagtgcaacgactgcggcaaggccttcaacagaagcagcagactgacccagcaccagaagatccacatgggctag

SEQ ID NO: 308424 - DNA, 2094 bp, Artificial Sequence
  derived and/or modified sequence
atgggcttcctgggctgctggtgtgtctcatttcaggaggtcgtgacattcggagatgtggctgtgcacttctcccgggaggagtggcaatgcctagatccggggcaacgtgctctgtatcgtgaggtcatgcttgaaaatcattccagtgttgccgggttggccgggttcctcgtgtttaaaccagagttaatcagtcgattggagcagggggaagaaccctgggttctggacctgcaaggggccgaaggtaccgaagcgccacgcacctcaaaaactgatagtacgatacgcacggaaaatgagcaggcatgcgaagacatggacatcctgaaatctgaaagctacggtaccgtggtccgcatctctccacaggattttccacaaaatcctggcttcggagatgtgtctgatagtgaggtgtggctggactcccacctggggtcaccagggctgaaggtcacaggctttacatttcaaaacaattgcctaaatgaggagaccgtggtccctaaaacatttaccaaggacgccccccagggatgcaaggagttaggcagtagcgggctggactgccagcccctggaatcccagggcgagtcggccgagggcatgagtcaacgatgtgaagagtgtggtaagggcatcagagcaactagtgacatcgcattacattgggaaatcaacacccaaaagattagcagatgccaggagtgtcagaaaaaactatcagattgcttgcagggcaagcacaccaataattgtcacggcgagaaaccgtacgaatgcgccgagtgtgggaaagtctttagactatgctcccaattgaaccagcaccagaggattcacaccggcgagaagcccttcaagtgcaccgagtgtggaaaagcgtttcgactcagctccaagctgatccaacatcagcgcattcatacaggtgagaagccgtaccgatgcgaagagtgtgggaaggcatttggtcagagtagctcccttatccatcaccagaggatacacactggcgagcgaccatacgggtgcagagaatgcgggaaggccttttctcaacagtcccaactagtgcggcatcaacggacccacacaggggagcggccctatccctgcaaggagtgcggaaaggcctttagtcagtcatcaaccttggcacagcaccagcggatgcatacaggcgaaaaggctcagatactgaaagcatccgattctccaagtttagtggcccaccagagaattcacgctgtggagaaacctttcaaatgcgacgaatgtggaaaggccttccgatggattagtcgattgtctcagcatcagctgatccacaccggcgagaagccctacaaatgtaacaagtgcacgaaggcgttcggttgcagctcaaggcttatcagacaccagcgtacccataccggtgagaaaccattcaaatgcgacgagtgcggaaagggttttgtgcagggtagccatcttatccagcaccagcgtatacacacaggcgaaaaaccatacgtatgtaacgattgtggcaaggccttctcgcagtcctctagtctgatttatcaccaaagaatccataaaggggagaaaccgtatgagtgcctccagtgcggtaaggcctttagcatgtccacacagctgactatccaccagcgggtgcacaccggcgaaaggccatataagtgtaacgagtgtggaaaagccttctcacagaatagcaccctctttcaacaccagatcattcacgcaggcgtgaagccttacgagtgctctgaatgcggcaaagccttctcacgaagctcatacttaatcgaacatcagagaatccatacaagggcccagtggttttacgaatacggcaacgccctcgaggggtctacttttgttagccgcaagaaggtaaatactatcaagaagctgcaccagtgcgaagattgtgagaagatcttcaggtggcggtctcacctgataattcaccaacgcatccataccggggaaaagccctataaatgtaatgactgtggcaaggctttcaacaggagcagtagactgacacagcaccagaaaatccatatggggtag

SEQ ID NO: 308425 - DNA, 2094 bp, Artificial Sequence
  derived and/or modified sequence
atgggcttcctgggctgctggtgtgtgtccttccaggaggtggtgacctttggagatgtggccgtgcacttcagccgggaggagtggcagtgcctggaccccggccagagggccctgtaccgggaggtgatgctggagaaccacagctctgtggccggcctggccggcttcctggtgttcaagccagagctgatcagccggctggagcagggcgaggagccctgggtgctggacctgcagggcgctgagggcacagaggcccccaggaccagcaagacagacagcaccatcagaacagaaaatgagcaggcctgtgaggacatggacatcctgaagtctgagagctatggcaccgtggtgcgcatcagcccccaggacttcccccagaaccctggctttggagatgtgtctgattctgaggtgtggctggacagccacctgggcagccctggcctgaaggtgacaggcttcaccttccagaacaactgcctgaatgaggagaccgtggtgcccaagaccttcaccaaggatgccccccagggctgcaaggagctgggcagcagcggcctggactgccagcccctggagagccagggcgagagcgctgagggcatgagccagagatgtgaagaatgtgggaagggcatccgggccaccagtgacatcgccctgcactgggagatcaacacccagaagatcagccgctgccaggagtgccagaagaagctgagtgactgcctgcagggcaagcacaccaacaactgccacggggagaagccctatgaatgtgctgaatgtgggaaggtgttccggctgtgcagccagctgaaccagcaccagaggatccacactggagagaagcccttcaagtgcacagaatgtgggaaggccttccggctgagcagcaagctgatccagcaccagaggatccacactggagagaagccctaccgctgtgaagaatgtgggaaggccttcggccagagcagcagcctcatccaccaccagaggatccacactggagagcggccctacggctgcagagaatgtgggaaggccttcagccagcagagccagctggtgcgccaccagaggacccacactggagagcggccctacccctgcaaggaatgtgggaaggccttcagccagagcagcaccctggcccagcaccagaggatgcacactggagagaaggcccagatcctgaaggccagtgacagccccagcctggtggcccaccagagaattcatgctgtggagaagcccttcaagtgtgatgaatgtgggaaggccttccgctggatcagccggctgagccagcaccagctgatccacactggagagaagccctacaagtgcaacaagtgcaccaaggccttcggctgcagcagccgcctcatccgccaccagaggacccacactggagagaagcccttcaagtgtgatgaatgtgggaaaggatttgtgcagggcagccacctgatccagcaccagaggatccacactggagagaagccctacgtgtgcaatgactgtgggaaggccttcagccagagcagcagcctcatctaccaccagaggatccacaagggggagaagccctatgaatgtctgcagtgtgggaaggccttctccatgagcacccagctgaccatccaccagagggtgcacactggagagcggccctacaagtgcaatgaatgtgggaaggccttcagccagaacagcaccctcttccagcaccagatcatccatgctggggtgaagccctatgaatgttctgaatgtgggaaggccttcagccgcagcagctacctgattgagcaccagaggatccacacccgggcccagtggttctatgaatatggaaatgccctggagggcagcacctttgtgtccaggaagaaggtgaacaccatcaagaagctgcaccagtgtgaggactgtgagaagatcttccgctggaggagccacctgatcatccaccagaggatccacactggagagaagccctacaagtgcaatgactgtgggaaggccttcaacagaagcagccggctgacccagcaccagaagatccacatgggctag

SEQ ID NO: 308426 - DNA, 2094 bp, Artificial Sequence
  derived and/or modified sequence
atgggcttcctgggctgctggtgcgtgagcttccaggaggtggtgacctttggggacgtcgccgttcacttctcaagagaggaatggcaatgcctggatcccggtcagagggccctttatagagaagtgatgttagaaaatcactcctctgtcgcaggattggcagggtttctggtgttcaagcctgaattgatcagccggctggagcagggtgaagagccttgggtgcttgatcttcagggggccgagggcaccgaggcaccaaggacgtccaagacagattcaactattcggactgagaacgaacaggcgtgcgaagatatggatatactgaaatcagagtcttatgggactgtcgtcaggatctcgccacaagattttccccagaatccgggcttcggcgatgttagtgacagcgaagtatggttggatagtcacttgggaagtcccggcttgaaggtcaccgggtttacctttcaaaacaattgcctgaacgaggagaccgtggtgccgaaaactttcacaaaagatgccccacaaggctgcaaggagttgggatcctcgggtctggattgtcagcccctggaaagtcaaggggagtctgcggaaggaatgtcccaaaggtgcgaggaatgtggcaaaggtatccgcgccacctccgacatcgcactgcactgggagattaacacgcaaaaaatctcgcgttgccaagaatgtcaaaagaaactttctgactgcttacaaggaaaacacaccaacaactgccacggcgaaaagccttatgaatgcgctgagtgtggaaaggtgttcaggttgtgttcccagctgaatcagcatcagcgcatccataccggggaaaagcctttcaaatgtactgagtgcgggaaggcctttcggctgtcttcgaagctgatccagcatcagcgaattcatactggagaaaaaccataccgttgtgaagaatgcggaaaggcatttggccaaagctcttctctgattcaccaccagcggattcataccggcgagaggccctatggatgtcgcgaatgcggcaaggctttcagtcagcagtctcaactggtccgtcaccagcgcacccacacaggcgagcggccatatccctgcaaggagtgtggtaaggccttcagtcaatccagtaccctggctcagcaccagcggatgcacactggtgaaaaggcacagatcctgaaggcatctgatagccccagtctggtggcccatcaacgaatccacgcagtcgaaaagccatttaagtgtgacgaatgtggtaaggccttcagatggatatcccggttatcccagcaccagctcatccacaccggcgagaaaccatacaagtgtaacaaatgcaccaaagccttcgggtgcagctcccgactcattcgtcaccagcgcactcatacaggggagaaaccattcaagtgtgatgaatgcggcaaaggcttcgtccaggggtcgcaccttatccagcaccaaaggatacacacaggcgaaaagccctacgtctgcaatgactgtggaaaggccttctctcagtcctcatcactcatctaccaccagaggatccacaaaggcgagaagccctacgagtgtctccagtgtgggaaggccttttcaatgtccacccagctgactatccaccagagggtacacacaggagagagaccatataaatgcaacgagtgcggcaaggctttttcacaaaactctaccctattccagcatcaaattatccacgcaggggtaaagccctatgagtgcagtgaatgcggaaaagctttctcccgcagttcataccttattgaacatcagcggattcacaccagggcccagtggttttacgagtatggaaacgctctggaaggcagcaccttcgtatctcgtaaaaaggttaacaccatcaagaaactgcaccagtgcgaggactgtgaaaaaatctttcgatggagaagtcaccttattattcatcagagaatccatactggtgagaaaccatacaaatgtaacgactgcgggaaggcttttaaccgttctagtagactgacacagcaccagaaaatccacatgggatag

SEQ ID NO: 308427 - DNA, 2094 bp, Artificial Sequence
  derived and/or modified sequence
atgggttttctcgggtgctggtgcgtatccttccaggaggtggtgaccttcggcgacgtggcagtgcactttagccgcgaggaatggcagtgcctcgatccgggacagcgggctttgtatagggaagtcatgcttgagaaccattcatcagtggctggcctcgccggtttcctggtgtttaaacccgagctcatttcacggctcgagcaaggggaggaaccttgggtgctggatctgcagggtgcggagggaacggaagcacccagaacatcgaagaccgactccacaataaggactgagaatgaacaggcctgtgaagacatggatatactcaaaagcgaaagttacgggaccgtggtcaggattagtccacaggactttccacaaaatccaggctttggcgacgtgagcgactccgaggtttggctggactctcaccttgggagccctggcttgaaggtcaccgggttcacctttcagaataactgcctgaacgaagagactgtggtgcccaaaacattcactaaggatgccccacagggatgtaaagagctcggcagctccggcctggattgccagcccctcgaatctcagggcgagtctgccgaggggatgtcacagagatgcgaagagtgtgggaagggcattcgagccaccagcgatattgcccttcactgggaaatcaatacgcagaagattagtcgttgccaggaatgtcagaaaaagctgagcgattgcctccagggcaaacacaccaataactgtcatggtgagaagccgtatgagtgtgccgagtgcggaaaggtgttcagactgtgtagccagctcaaccagcatcagcgcattcacactggagagaagccatttaagtgcacagagtgcggtaaggctttccggttgtcttctaagctaatacaacaccagcgcatacatactggagagaaaccctaccggtgcgaggagtgcggaaaagctttcgggcagtcatcctccctgatccaccaccagcggatccacaccggcgaacggccttatggatgccgagaatgtggaaaggcctttagtcagcagtcacagctcgtgcgccatcaaaggacccacacaggagagcggccatatccctgtaaagagtgcggaaaagctttttctcagtccagtacactggcccagcatcagcgaatgcacactggggaaaaggcgcagatactcaaggctagcgattctccatcactggtggcacatcagcggatccatgcagtagagaaaccgttcaaatgcgatgagtgcggaaaggcatttcgctggatatcccggttgtcccaacaccagttaatccacacaggcgaaaagccttacaagtgcaacaaatgcacgaaggctttcggctgttccagcagactgatccgacaccaaagaacccataccggtgagaagcccttcaaatgcgatgagtgcggcaagggcttcgtgcagggctcccacttgatccagcatcagcgaatccataccggggaaaaaccttacgtgtgtaacgattgcggaaaggccttctctcaatcctcctcactgatctatcaccagaggatccacaagggagaaaaaccctacgagtgtctgcaatgtggaaaagccttcagcatgtccacacaactgacaattcaccagcgggtgcacactggcgagcggccatacaagtgtaacgaatgtggcaaagctttcagccagaattctacactcttccagcaccagataatccacgctggtgtgaagccttatgaatgttctgaatgcgggaaggcatttagccgatcatcataccttatcgaacaccagaggatccatacgcgagctcagtggttttacgaatacggcaatgctttagaaggctccactttcgtgtcccgcaaaaaggtcaataccatcaaaaagctccatcagtgcgaagactgcgagaaaatcttccgctggcggagtcacctgatcattcaccagcgcattcacactggtgagaagccatacaagtgtaatgactgcgggaaggcctttaaccggtcatctcgtctgacccagcaccagaaaatccacatgggatag

SEQ ID NO: 308428 - DNA, 2242 bp, Artificial Sequence
  derived and/or modified sequence
cgtttccggcggcgtcgcgcgtttgcgagcctcgggtggtcctcagggagggtctctcggccagaacacgtggatgcccacccaccactgagcctcatgggattcctggggtgctggtgtgtgtcctttcaggaggtggtaacatttggcgatgtggctgtgcacttctctcgggaggagtggcagtgtctggaccctggccagagggccctctacagggaagtgatgctggagaaccacagcagtgtggctggactagcaggattcctggttttcaagcctgagctgatctctcggctggagcagggagaagagccatgggtcctcgacctgcagggagcagaggggacagaggcaccaaggacctccaagacagattctacgattaggactgaaaatgagcaggcctgtgaggacatggacatcctaaaatcagaatcctatgggacagtggtcagaatctccccacaggactttcctcagaatcctggctttggagacgtttctgattctgaggtctggttagacagtcatctgggcagtcccgggctgaaagtgacaggctttaccttccaaaataactgtttgaatgaggagactgtggttcccaagaccttcaccaaggacgcaccccagggatgtaaggagctgggaagcagcggcctggattgtcagcctcttgaaagtcagggagagagtgcggaagggatgtcccagagatgcgaggagtgtggcaaaggcatcagagccacttcagatatcgctctgcattgggaaattaatacacagaaaattagcagatgtcaagaatgccaaaaaaagttatctgactgcttgcaggggaaacatacaaataactgccatggagagaagccgtacgaatgtgcagagtgtgggaaagtcttcaggctctgctcgcagcttaatcagcatcagagaatccacacgggagagaaaccctttaaatgcactgagtgtggaaaagccttccgcctgagctcaaaacttattcagcatcaaagaatccacactggggagaagccctacagatgtgaggaatgtggaaaagcttttggtcagagctcaagcctcatccaccatcagagaatccacacaggagagaggccctatggttgtcgtgagtgtgggaaagccttcagccagcagtcgcagctggttagacaccagagaactcacactggggagaggccctacccttgcaaggagtgtgggaaggccttcagccagagctccaccctagcccagcatcaaaggatgcatactggggagaaagctcaaattctaaaagcctcagacagtccaagccttgttgcacatcagagaattcacgctgtagagaaaccatttaagtgtgatgagtgtgggaaagcttttaggtggatctctcgcctgagtcagcatcagctgattcacactggagagaagccttataaatgcaacaagtgtacaaaagcctttggttgtagttcacggcttattcgccatcagagaactcacactggagaaaaaccatttaaatgtgatgagtgtggcaaaggctttgttcagggctcacaccttattcagcatcagcgaatccacactggagagaaaccctatgtgtgtaatgactgtggaaaagccttcagtcagagttccagccttatttaccatcagagaatccataaaggagagaagccctacgaatgcctccaatgcggaaaagccttcagtatgagcacacagcttacaatacatcaaagggttcacactggagagaggccctataaatgtaatgaatgtgggaaagccttcagtcaaaactcaacccttttccaacaccagataattcatgcaggggtgaagccctatgagtgcagtgagtgtggaaaagccttcagccggagctcatatcttattgaacaccagagaatacacactagggcccagtggttttacgaatatgggaatgccctggaagggtccacctttgtgagccgtaaaaaggttaatactataaagaaactgcatcagtgtgaagactgtgagaagatatttaggtggcgttcacacctaattatacaccagagaattcacaccggggagaagccttataaatgcaatgactgtggcaaagcttttaatcgtagctcaaggcttacccagcatcaaaaaattcacatgggatagaccacttacatataaatgtgtatatatgtgaataaacctatagccttaactt

SEQ ID NO: 308429 - protein, 686 aa, Artificial Sequence
  derived and/or modified sequence
MEVVTFGDVAVHFSREEWQCLDPGQRALYREVMLENHSSVAGLAGFLVFKPELISRLEQGEEPWVLDLQGAEGTEAPRTSKTDSTIRTENEQACEDMDILKSESYGTVVRISPQDFPQNPGFGDVSDSEVWLDSHLGSPGLKVTGFTFQNNCLNEETVVPKTFTKDAPQGCKELGSSGLDCQPLESQGESAEGMSQRCEECGKGIRATSDIALHWEINTQKISRCQECQKKLSDCLQGKHTNNCHGEKPYECAECGKVFRLCSQLNQHQRIHTGEKPFKCTECGKAFRLSSKLIQHQRIHTGEKPYRCEECGKAFGQSSSLIHHQRIHTGERPYGCRECGKAFSQQSQLVRHQRTHTGERPYPCKECGKAFSQSSTLAQHQRMHTGEKAQILKASDSPSLVAHQRIHAVEKPFKCDECGKAFRWISRLSQHQLIHTGEKPYKCNKCTKAFGCSSRLIRHQRTHTGEKPFKCDECGKGFVQGSHLIQHQRIHTGEKPYVCNDCGKAFSQSSSLIYHQRIHKGEKPYECLQCGKAFSMSTQLTIHQRVHTGERPYKCNECGKAFSQNSTLFQHQIIHAGVKPYECSECGKAFSRSSYLIEHQRIHTRAQWFYEYGNALEGSTFVSRKKVNTIKKLHQCEDCEKIFRWRSHLIIHQRIHTGEKPYKCNDCGKAFNRSSRLTQHQKIHMG

SEQ ID NO: 308430 - protein, 590 aa, Artificial Sequence
  derived and/or modified sequence
MDILKSESYGTVVRISPQDFPQNPGFGDVSDSEVWLDSHLGSPGLKVTGFTFQNNCLNEETVVPKTFTKDAPQGCKELGSSGLDCQPLESQGESAEGMSQRCEECGKGIRATSDIALHWEINTQKISRCQECQKKLSDCLQGKHTNNCHGEKPYECAECGKVFRLCSQLNQHQRIHTGEKPFKCTECGKAFRLSSKLIQHQRIHTGEKPYRCEECGKAFGQSSSLIHHQRIHTGERPYGCRECGKAFSQQSQLVRHQRTHTGERPYPCKECGKAFSQSSTLAQHQRMHTGEKAQILKASDSPSLVAHQRIHAVEKPFKCDECGKAFRWISRLSQHQLIHTGEKPYKCNKCTKAFGCSSRLIRHQRTHTGEKPFKCDECGKGFVQGSHLIQHQRIHTGEKPYVCNDCGKAFSQSSSLIYHQRIHKGEKPYECLQCGKAFSMSTQLTIHQRVHTGERPYKCNECGKAFSQNSTLFQHQIIHAGVKPYECSECGKAFSRSSYLIEHQRIHTRAQWFYEYGNALEGSTFVSRKKVNTIKKLHQCEDCEKIFRWRSHLIIHQRIHTGEKPYKCNDCGKAFNRSSRLTQHQKIHMG

SEQ ID NO: 308431 - DNA, 2265 bp, Artificial Sequence
  derived and/or modified sequence
cggaagtttgcggggcggggcggacgcgggtggccaaggcccgtttccggcggcgtcgcgcgtttgcgagcctcgggtggtcctcagggagggtctctcggccagaacacgtggatgcccacccaccactgagcctcatggaggtggtaacatttggcgatgtggctgtgcacttctctcgggaggagtggcagtgtctggaccctggccagagggccctctacagggaagtgatgctggagaaccacagcagtgtggctggactagcaggattcctggttttcaagcctgagctgatctctcggctggagcagggagaagagccatgggtcctcgacctgcagggagcagaggggacagaggcaccaaggacctccaagacagattctacgattaggactgaaaatgagcaggcctgtgaggacatggacatcctaaaatcagaatcctatgggacagtggtcagaatctccccacaggactttcctcagaatcctggctttggagacgtttctgattctgaggtctggttagacagtcatctgggcagtcccgggctgaaagtgacaggctttaccttccaaaataactgtttgaatgaggagactgtggttcccaagaccttcaccaaggacgcaccccagggatgtaaggagctgggaagcagcggcctggattgtcagcctcttgaaagtcagggagagagtgcggaagggatgtcccagagatgcgaggagtgtggcaaaggcatcagagccacttcagatatcgctctgcattgggaaattaatacacagaaaattagcagatgtcaagaatgccaaaaaaagttatctgactgcttgcaggggaaacatacaaataactgccatggagagaagccgtacgaatgtgcagagtgtgggaaagtcttcaggctctgctcgcagcttaatcagcatcagagaatccacacgggagagaaaccctttaaatgcactgagtgtggaaaagccttccgcctgagctcaaaacttattcagcatcaaagaatccacactggggagaagccctacagatgtgaggaatgtggaaaagcttttggtcagagctcaagcctcatccaccatcagagaatccacacaggagagaggccctatggttgtcgtgagtgtgggaaagccttcagccagcagtcgcagctggttagacaccagagaactcacactggggagaggccctacccttgcaaggagtgtgggaaggccttcagccagagctccaccctagcccagcatcaaaggatgcatactggggagaaagctcaaattctaaaagcctcagacagtccaagccttgttgcacatcagagaattcacgctgtagagaaaccatttaagtgtgatgagtgtgggaaagcttttaggtggatctctcgcctgagtcagcatcagctgattcacactggagagaagccttataaatgcaacaagtgtacaaaagcctttggttgtagttcacggcttattcgccatcagagaactcacactggagaaaaaccatttaaatgtgatgagtgtggcaaaggctttgttcagggctcacaccttattcagcatcagcgaatccacactggagagaaaccctatgtgtgtaatgactgtggaaaagccttcagtcagagttccagccttatttaccatcagagaatccataaaggagagaagccctacgaatgcctccaatgcggaaaagccttcagtatgagcacacagcttacaatacatcaaagggttcacactggagagaggccctataaatgtaatgaatgtgggaaagccttcagtcaaaactcaacccttttccaacaccagataattcatgcaggggtgaagccctatgagtgcagtgagtgtggaaaagccttcagccggagctcatatcttattgaacaccagagaatacacactagggcccagtggttttacgaatatgggaatgccctggaagggtccacctttgtgagccgtaaaaaggttaatactataaagaaactgcatcagtgtgaagactgtgagaagatatttaggtggcgttcacacctaattatacaccagagaattcacaccggggagaagccttataaatgcaatgactgtggcaaagcttttaatcgtagctcaaggcttacccagcatcaaaaaattcacatgggatagaccacttacatataaatgtgtatatatgtgaataaacctatagccttaacttaaaaaaaaaaaaaaa

SEQ ID NO: 308432 - DNA, 2061 bp, Artificial Sequence
  derived and/or modified sequence
atggaggtggtgaccttcggcgacgtggccgtgcacttcagcagagaggagtggcagtgcctggaccccggccagagagccctgtacagagaggtgatgctggagaaccacagcagcgtggccggcctggccggcttcctggtgttcaagcccgagctgatcagcagactggagcagggcgaggagccctgggtgctggacctgcagggcgccgagggcaccgaggcccccagaaccagcaagaccgacagcaccatcagaaccgagaacgagcaggcctgcgaggacatggacatcctgaagagcgagagctacggcaccgtggtgagaatcagcccccaggacttcccccagaaccccggcttcggcgacgtgagcgacagcgaggtgtggctggacagccacctgggcagccccggcctgaaggtgaccggcttcaccttccagaacaactgcctgaacgaggagaccgtggtgcccaagaccttcaccaaggacgccccccagggctgcaaggagctgggcagcagcggcctggactgccagcccctggagagccagggcgagagcgccgagggcatgagccagagatgcgaggagtgcggcaagggcatcagagccaccagcgacatcgccctgcactgggagatcaacacccagaagatcagcagatgccaggagtgccagaagaagctgagcgactgcctgcagggcaagcacaccaacaactgccacggcgagaagccctacgagtgcgccgagtgcggcaaggtgttcagactgtgcagccagctgaaccagcaccagagaatccacaccggcgagaagcccttcaagtgcaccgagtgcggcaaggccttcagactgagcagcaagctgatccagcaccagagaatccacaccggcgagaagccctacagatgcgaggagtgcggcaaggccttcggccagagcagcagcctgatccaccaccagagaatccacaccggcgagagaccctacggctgcagagagtgcggcaaggccttcagccagcagagccagctggtgagacaccagagaacccacaccggcgagagaccctacccctgcaaggagtgcggcaaggccttcagccagagcagcaccctggcccagcaccagagaatgcacaccggcgagaaggcccagatcctgaaggccagcgacagccccagcctggtggcccaccagagaatccacgccgtggagaagcccttcaagtgcgacgagtgcggcaaggccttcagatggatcagcagactgagccagcaccagctgatccacaccggcgagaagccctacaagtgcaacaagtgcaccaaggccttcggctgcagcagcagactgatcagacaccagagaacccacaccggcgagaagcccttcaagtgcgacgagtgcggcaagggcttcgtgcagggcagccacctgatccagcaccagagaatccacaccggcgagaagccctacgtgtgcaacgactgcggcaaggccttcagccagagcagcagcctgatctaccaccagagaatccacaagggcgagaagccctacgagtgcctgcagtgcggcaaggccttcagcatgagcacccagctgaccatccaccagagagtgcacaccggcgagagaccctacaagtgcaacgagtgcggcaaggccttcagccagaacagcaccctgttccagcaccagatcatccacgccggcgtgaagccctacgagtgcagcgagtgcggcaaggccttcagcagaagcagctacctgatcgagcaccagagaatccacaccagagcccagtggttctacgagtacggcaacgccctggagggcagcaccttcgtgagcagaaagaaggtgaacaccatcaagaagctgcaccagtgcgaggactgcgagaagatcttcagatggagaagccacctgatcatccaccagagaatccacaccggcgagaagccctacaagtgcaacgactgcggcaaggccttcaacagaagcagcagactgacccagcaccagaagatccacatgggctag

SEQ ID NO: 308433 - DNA, 2061 bp, Artificial Sequence
  derived and/or modified sequence
atggaagtggttacttttggcgacgtggccgtgcattttagcagagaggagtggcagtgcctggaccctggccaacgcgccctgtatcgggaggttatgctggagaaccatagcagcgttgctgggctggcagggtttctcgttttcaagcctgagcttatcagccgcctagagcagggggaagagccttgggtgttagatctgcagggcgccgaggggaccgaggcgccccgtacttccaagacagacagtacaattcgtacagagaacgaacaggcctgtgaggacatggatattttaaaaagtgagtcttacggaacggtagtgcgaatctctccccaggacttccctcagaatcccgggtttggggacgtatcagacagcgaggtttggcttgattctcacctcggcagtcccggtctaaaagtgacggggttcactttccagaataactgcttgaatgaggagacggtggtgccaaagactttcaccaaggacgcccctcaaggctgtaaggagctcggtagctcaggactggattgccagcctcttgagagtcagggtgaaagcgcagaaggaatgtcgcaacgctgtgaagagtgtgggaaagggatccgcgccacctccgacatcgctttgcattgggagatcaatacgcagaaaatctcaagatgccaagaatgtcagaaaaagcttagcgactgcttgcaaggtaagcatacaaataactgccacggtgagaaaccttatgaatgcgccgagtgcgggaaggttttcagactctgctcccagctgaaccagcatcaacgcatccatacaggcgaaaagccttttaaatgtacagaatgcgggaaagcttttcgactgtcttctaagctcatccagcaccagcgaatccataccggagaaaaaccctaccgctgtgaagagtgcggcaaggcattcggacaatcttcaagtcttattcaccaccaacgaattcacaccggggagcggccctacggctgtagagaatgtggcaaagcctttagccagcaaagtcagttggtccgccatcagcgaacccacaccggagagaggccttacccctgtaaagaatgcggaaaagcattcagccagagctcaacattagcccagcaccagcgtatgcatactggcgagaaggcacagattcttaaggcctccgattcgcccagtctcgtggcccaccagaggatccacgcggtcgagaagccctttaaatgcgacgaatgtggcaaggctttcagatggatttcccgcctctcacagcatcaactgattcacactggggagaaaccttataaatgcaataagtgtacgaaggccttcggctgctcttcacgtctgatcagacaccaacggacacacactggcgagaaaccctttaagtgtgatgagtgtggaaaagggttcgtgcaaggcagccacctgatccagcaccagcgcatacatacgggggagaagccatacgtatgtaacgactgtggaaaagccttcagtcagtcttcatctcttatctaccaccagaggatacacaaaggcgagaaaccttacgagtgtctgcaatgcgggaaagcattcagcatgtccacccagctgaccatccatcagagagtgcacacgggggaacgaccatacaaatgcaacgaatgcgggaaggccttcagtcaaaacagtacactgtttcagcaccaaattattcacgctggcgtcaagccatacgagtgctctgaatgtggtaaggctttcagtcggagctcttacctgattgagcatcagcggatccatactcgagctcagtggttctatgagtatggtaatgctctggagggttctacgttcgtttctcgcaagaaggtgaacaccataaagaagctgcatcagtgtgaagattgcgaaaaaatctttcggtggcgatctcacctaattattcaccaacgtatccatacgggtgagaaaccttataagtgtaacgattgcgggaaggcattcaatagaagtagtcggttaacacaacaccagaagatccatatgggctag

SEQ ID NO: 308434 - DNA, 2061 bp, Artificial Sequence
  derived and/or modified sequence
atggaagttgtgacattcggcgacgtcgccgtgcatttttccagggaagaatggcagtgtctggatccaggccagagggctctctaccgggaggtgatgctagagaatcattcttctgttgccggcctcgccggattcctagtgtttaaacccgaactgatttctagattggaacagggagaggagccttgggttctggatctgcagggagctgaaggcacagaagcgccccgaacatcgaagacagacagtaccattcgtacagaaaatgaacaggcctgcgaagacatggacatcctgaaaagcgaatcatatggaaccgtggtgagaatcagcccacaggattttcctcagaaccccggatttggggatgtgagtgattctgaggtctggcttgactcccacttgggcagtccagggctaaaggtgacgggattcacctttcagaacaattgtctcaatgaagagacagtcgtacctaaaactttcaccaaagatgctccacagggctgtaaagagctaggcagtagcggattggattgccagcctttagagtctcagggcgaatcagcggaaggcatgtctcaaagatgcgaggagtgtggaaaagggatcagggccacctcggatattgcactgcattgggagatcaacacccagaaaatctctcggtgccaggaatgccaaaagaaactgtcagattgtctgcaagggaagcatactaataattgccatggcgagaaaccctacgagtgcgctgaatgcggaaaggtgtttagactttgcagtcagctcaaccaacatcagagaatacacaccggcgaaaaaccatttaagtgtacggaatgcggtaaggccttccgtttgagctcaaagctcatacagcatcagagaatccacaccggggaaaagccctataggtgtgaagagtgcgggaaagcctttgggcagtcctcttccctgatccaccatcaacggatacacacaggtgagaggccttatggttgtagggagtgtggtaaggccttctcacagcagagccagttagtgaggcatcagaggacccacactggagagcgaccctacccctgtaaagagtgtggcaaagcattcagccagtcctctactttagcacagcaccagagaatgcacacgggcgaaaaggcccagattttgaaagcatcagactcaccgagcctggtggctcatcaacgcatccatgccgtggagaagccttttaagtgtgacgaatgcggcaaggcctttcggtggatttcccgtttgtctcagcatcaactcatccataccggagagaagccctataagtgcaacaaatgcaccaaggcttttgggtgctctagccggctgatccgacaccagagaacccataccggcgagaagccatttaaatgtgatgaatgtggcaaggggttcgtgcagggatcccatctcattcagcaccagcgtatccacactggggagaagccttatgtgtgtaatgactgcgggaaggcattcagccagtcctcaagtctcatataccaccagcgaattcacaagggagagaagccatacgaatgtctccagtgtggcaaggcatttagcatgagtacacagctcactatccatcagagagtacacacgggagaacgcccatacaagtgcaatgagtgtgggaaggcatttagtcagaacagtacattgttccagcatcagatcattcacgctggggtgaagccctacgagtgcagcgagtgtggcaaggccttcagtcggtcctcctaccttattgaacatcaacggatccacacccgggcccagtggttttatgagtacggaaacgccctcgagggctccacgttcgtaagcagaaaaaaagtcaacacgataaagaagctgcaccagtgtgaggactgcgaaaagatctttaggtggaggtctcatctgattatccaccagagaatccataccggagaaaagccctataagtgcaatgactgcggcaaagcctttaatcgtagctccaggctgacccagcatcagaagattcacatgggctag

SEQ ID NO: 308435 - DNA, 2061 bp, Artificial Sequence
  derived and/or modified sequence
atggaggtggtgacctttggagatgtggccgtgcacttcagccgggaggagtggcagtgcctggaccccggccagagggccctgtaccgggaggtgatgctggagaaccacagctctgtggccggcctggccggcttcctggtgttcaagccagagctgatcagccggctggagcagggcgaggagccctgggtgctggacctgcagggcgctgagggcacagaggcccccaggaccagcaagacagacagcaccatcagaacagaaaatgagcaggcctgtgaggacatggacatcctgaagtctgagagctatggaacagtggtgcgcatcagcccccaggacttcccccagaaccctggctttggagatgtgtctgacagcgaggtgtggctggacagccacctgggcagccctggcctgaaggtgacaggcttcaccttccagaacaactgcctgaatgaggagaccgtggtgcccaagaccttcaccaaggatgccccccagggctgcaaggagctgggcagcagcggcctggactgccagcccctggagagccagggcgagagcgctgagggcatgagccagagatgtgaggagtgtgggaagggcatccgggccaccagtgacatcgccctgcactgggagatcaacacccagaagatcagccgctgccaggagtgccagaagaagctgagtgactgcctgcagggcaagcacaccaacaactgccacggggagaagccctatgaatgtgccgagtgtgggaaggtgttccggctgtgcagccagctgaaccagcaccagaggatccacactggagagaagcccttcaagtgcacagaatgtgggaaggccttccggctgagcagcaagctgatccagcaccagaggatccacactggagagaagccctaccgctgtgaggagtgtgggaaggccttcggccagagcagcagcctcatccaccaccagaggatccacactggagagcggccctacggctgccgggagtgtgggaaggccttcagccagcagagccagctggtgcgccaccagaggacccacactggagagcggccctacccctgcaaggaatgtgggaaggccttcagccagagcagcaccctggcccagcaccagaggatgcacactggagagaaggcccagatcctgaaggccagtgacagccccagcctggtggcccaccagagaattcatgctgtggagaagcccttcaagtgtgatgaatgtgggaaggccttccgctggatcagccggctgagccagcaccagctgatccacactggagagaagccctacaagtgcaacaagtgcaccaaggccttcggctgcagcagccgcctcatccgccaccagaggacccacactggagagaagcccttcaagtgtgatgaatgtgggaagggctttgtgcagggcagccacctgatccagcaccagaggatccacactggagagaagccctacgtgtgcaatgactgtgggaaggccttcagccagagcagcagcctcatctaccaccagaggatccacaagggggagaagccctatgagtgcctgcagtgtgggaaggccttctccatgagcacccagctgaccatccaccagagggtgcacactggagagcggccctacaagtgcaatgaatgtgggaaggccttcagccagaacagcaccctcttccagcaccagatcatccacgccggcgtgaagccctatgagtgcagtgaatgtgggaaggccttcagccgcagcagctacctgattgagcaccagaggatccacacccgggcccagtggttctatgaatatggaaatgccctggagggcagcacctttgtgtccaggaagaaggtgaacaccatcaagaagctgcaccagtgtgaggactgtgagaagatcttccgctggaggagccacctgatcatccaccagaggatccacactggagagaagccctacaagtgcaatgactgtgggaaggccttcaacagaagcagccggctgacccagcaccagaagatccacatgggctag

SEQ ID NO: 308436 - DNA, 2061 bp, Artificial Sequence
  derived and/or modified sequence
atggaggtggtgaccttcggcgacgtggccgtgcacttcagccgggaggagtggcagtgcctggatcctggccagagagctttgtaccgcgaagtgatgctggaaaaccactccagtgtggccggcttggcaggctttctggttttcaagccagagctgatatctcggctggagcagggggaagagccatgggtgctcgatctgcaaggggcggagggcaccgaagcacctcgcactagcaaaactgacagcaccatccgcacggagaacgaacaagcctgtgaagacatggacatattgaaatcagagtcttacggcacagtggtgcggatatcccctcaggactttccccaaaaccccgggttcggagacgtgtcagattccgaagtgtggctggatagccatctcggatcacccggtctgaaggttaccggtttcacgtttcaaaacaactgtctcaatgaggagaccgtcgtacctaaaactttcaccaaagacgccccacagggatgcaaagagttgggaagctcaggactcgactgccagcccctcgaatcccagggagaaagtgctgagggcatgtcacaaaggtgcgaggaatgcggcaaaggaattcgagctacaagtgacatagccttgcattgggagattaacacacagaagatctctcgatgccaggagtgccaaaaaaagctgtccgattgcttgcagggtaaacacacaaataattgtcacggagagaaaccatacgagtgcgcggaatgtggtaaggtgttcaggttgtgctcccagctcaatcagcaccagcgaatccatactggggaaaaaccttttaagtgtactgaatgcggcaaggctttcaggctgagctcgaagctgattcagcaccagcgcatacataccggggaaaagccataccggtgcgaggagtgtgggaaggccttcggacagtcctcctctctgattcatcatcagcgtatccacacaggggaacgtccctatggctgtcgggagtgtgggaaagcctttagccagcagtcccagttggtcagacatcaacggacacacactggggagcgcccttatccatgcaaagagtgcggaaaagcctttagccagtcctctactctggctcaacatcagcggatgcacactggcgaaaaagctcagattctgaaggcatcagactccccgtcactcgtggcccatcaaagaatccatgccgtggaaaagccgttcaaatgcgacgaatgcggaaaagccttccgttggatctccagattatcccagcatcagctcatccacaccggcgaaaagccatacaagtgtaataaatgcaccaaggctttcggatgttctagtcgactcatcagacatcagcgaactcataccggcgaaaagccgtttaagtgtgacgaatgcggaaagggtttcgtgcagggatcccaccttattcagcatcagaggatccacacaggtgaaaagccatacgtctgcaatgactgcgggaaagccttcagccagtcttcgagcctaatttatcaccagaggattcacaagggcgagaaaccgtacgagtgtttgcaatgtggtaaggcgtttagcatgtcgactcaactgacaatccaccaacgcgtgcataccggcgagagaccttacaagtgtaatgaatgtggcaaagccttctcccagaattcgactcttttccagcatcagatcatccatgccggagtgaaaccatatgagtgttctgagtgcggaaaagcttttagccgatctagttacctgattgaacatcaaagaatacacacacgtgcgcagtggttttacgaatatgggaatgccctcgaaggaagtacctttgttagccgcaagaaggtcaatacaattaagaagctgcaccagtgcgaggactgtgagaagatattccgctggcggagccacctcatcatccaccagcgcattcacaccggtgagaaaccatataaatgcaacgattgcggaaaagccttcaatcgcagctcacgtttaacacagcaccagaagatccacatgggatag

SEQ ID NO: 308437 - DNA, 2061 bp, Artificial Sequence
  derived and/or modified sequence
atggaggtggtgaccttcggcgacgtggccgtgcacttcagccgggaggagtggcagtgcctggatcctggccagagagcattatacagggaagtcatgctcgaaaatcatagctccgtcgctgggctggccgggtttctggtgttcaaaccagagctcatctctagattagagcaaggcgaggagccatgggtccttgatctgcagggagctgaggggaccgaggcgcctcggaccagtaagaccgattccacaattcgcacagagaatgagcaggcctgcgaagacatggatatcctcaagtcagaatcttacggaaccgtggtgcgcataagtccacaggacttcccgcagaatcctggcttcggagatgttagtgattccgaggtttggttggattcccatctcggcagtccaggactgaaagtgacaggttttaccttccaaaacaactgcctgaatgaggagacagtcgtgcctaaaacctttacgaaagacgctccccaggggtgcaaggagctcggcagctctggcttagactgtcagccattagaaagccaaggtgagagcgcagagggcatgtcacagcgctgtgaggagtgcgggaagggcattagggctacatcagacatcgctctgcattgggagatcaatacccaaaaaatttcaaggtgccaggaatgtcagaagaagctttcggactgccttcagggcaaacacacgaataactgtcacggcgagaagccttatgaatgcgcggagtgtggcaaggtgtttcgactttgttcacagctgaaccagcatcagcgaatccacacaggcgagaagccttttaagtgcacggaatgtggaaaggcatttaggctgtccagtaagctgatccagcatcagagaattcacaccggtgagaaaccatatcgctgtgaagagtgtggaaaggcgtttggacagtcctcttcgttgatccaccaccaacgcattcacaccggcgagcgaccctacggctgtagagaatgcggcaaggctttttcccagcagagccagttggtacggcatcagagaacccataccggcgagagaccctacccatgcaaggagtgcgggaaggccttctcccagagctccacgttggcccaacatcagaggatgcacaccggcgagaaggcccagattctgaaagcctccgatagcccttcactcgttgctcaccaacggatccacgctgtcgaaaagcctttcaagtgtgatgaatgcggcaaagccttccggtggatctcaagactgtcccaacatcaattgatccacacaggagagaagccatataaatgtaacaaatgcacaaaagccttcggatgctcttcgcgtctcatacgccaccagcggacgcacacgggagagaagccatttaagtgcgatgagtgtgggaaagggttcgtccagggtagccaccttatccagcatcagcggatacacaccggagagaaaccgtatgtgtgtaatgactgtgggaaagctttttcccagagttcttcgctgatctaccaccagcgaatccacaagggtgagaagccctatgagtgcttacagtgcgggaaggcctttagtatgagtactcaattgacaattcaccagcgggttcatacaggagagcgtccttataagtgcaacgaatgcggtaaggccttctcccagaactcaacgctttttcagcaccaaattattcacgccggcgtgaaaccatatgaatgcagtgaatgtgggaaagccttttccagatcaagctacctaatcgaacaccaaaggatccacacacgggctcagtggttctatgaatatggcaacgcactggaagggtctactttcgtgtcacggaaaaaagttaatacgataaagaaactccaccagtgcgaagactgtgagaaaatatttcgatggcgatcccaccttataattcatcagcggattcatactggcgagaagccatacaagtgcaacgattgtggcaaggcctttaatcgttcttcgaggctcacacagcatcagaagatacacatgggatag

SEQ ID NO: 308438 - DNA, 2061 bp, Artificial Sequence
  derived and/or modified sequence
atggaagtagtcacattcggcgatgttgctgttcacttttctagagaggagtggcagtgcctggatcccggacagagggctctctatagagaggtaatgctggagaaccactcctctgtggccggtttagccggtttcctcgtatttaaacctgagctcatttcgaggcttgagcagggagaggaaccatgggtcctggatctgcagggtgcagagggcactgaggcccctcggacatcaaagacagacagtacaatccgcactgaaaacgagcaggcatgcgaggacatggatatcctgaagagtgagtcctacggcactgtggttaggatcagtccccaggatttcccacagaacccgggatttggcgacgtgagtgacagcgaagtgtggctagacagtcacttaggctcaccgggtttgaaggtcactggattcacattccagaataactgcctcaatgaggaaaccgtggtcccaaagaccttcaccaaagacgctccccagggatgcaaggagctggggtcctctggcctggattgccagccactcgagtcccagggcgagagtgccgaaggtatgagccaacggtgtgaggaatgtggtaaaggaataagagcaactagcgacatcgccctgcattgggaaatcaatacccaaaagatctccagatgtcaggaatgccagaaaaagctgtctgactgcctccaaggcaagcataccaataattgtcatggggagaaaccttacgagtgtgctgagtgtggcaaagtgtttaggctatgctcgcagctgaatcagcaccagagaattcatactggcgaaaaaccttttaagtgcacagaatgcggaaaggcatttcgcctgtcctccaagctgattcagcatcaaaggattcacaccggcgaaaagccctaccgttgtgaagaatgcggcaaggccttcggccagtctagctcattgatccaccatcagaggatccatactggggaacgaccctacggctgtcgcgaatgtggtaaggcattctcacaacaatcacagctggtgcgccatcagagaacgcacactggcgagcgaccatatccatgcaaagagtgtggtaaggcattttcccagtccagtaccttggctcagcaccagcggatgcataccggcgaaaaggcacaaatcttaaaagcaagtgattcaccatcactggtggcccaccagaggatccacgccgtggaaaaaccttttaagtgcgacgagtgtggaaaggcatttcgctggatttcgagattgagccagcatcagctgattcacacaggtgaaaagccttataagtgcaataagtgtaccaaggcctttggatgctcttcgaggttgattagacaccagcggactcacactggcgagaagccctttaagtgcgacgaatgtggtaagggatttgtccagggaagccatttaattcagcatcagcgtatccataccggtgaaaagccttacgtttgtaacgattgcgggaaggccttctcgcagtctagttctctcatctatcaccagcggatccataagggagaaaagccttacgagtgcctacagtgtgggaaagccttctcgatgtctacacagctcacgattcaccagcgcgtccacacaggggagagaccttataagtgtaatgagtgtggcaaggccttttcacagaactccaccctcttccaacaccaaatcatccatgcaggggtgaaaccttacgagtgcagcgagtgtggcaaagctttttcacgcagtagctatttaatcgaacatcagaggatccatacgcgggcacagtggttttacgaatacggtaatgctctcgaagggtccactttcgttagccggaagaaggtgaacactatcaagaagctccatcagtgtgaggactgcgagaaaatcttccgctggcgaagccatctcatcattcatcaaaggatacatacaggtgaaaagccttataagtgtaatgattgtggtaaagcgtttaatcgtagttccagattaactcaacatcagaagatccatatgggatag

SEQ ID NO: 308439 - DNA, 2061 bp, Artificial Sequence
  derived and/or modified sequence
atggaggtggtgaccttcggagatgtcgcagtacactttagtcgggaggaatggcagtgtcttgatccaggccagagggcactgtaccgggaagtcatgctggaaaaccacagctcagtcgccggactggctgggtttctcgtttttaaaccagagttaataagtcgattggaacaaggcgaggagccctgggttttagacttgcagggcgctgaggggactgaggccccaaggacttctaaaacagactccactattcgcacagagaacgaacaggcttgcgaggacatggatattctcaagtccgaatcatacggcactgttgttcgaatatctccacaagactttccccagaatcccggatttggagatgtgagcgatagcgaagtctggctggacagtcacttgggttctcccggactcaaggtgacaggctttacttttcagaataactgcctcaatgaggagacagtggtgcctaaaaccttcaccaaggatgcgccacagggttgtaaggagctcggtagcagtggattggattgtcagcccctggagtcccagggagagagcgccgaaggaatgagccagagatgtgaggaatgtggaaaagggataagagcgacctccgatatcgccctgcattgggaaatcaatacccagaagatttccagatgccaagaatgccagaagaagctgtctgactgcttacagggtaaacacaccaacaactgccacggtgaaaagccttacgagtgcgcagagtgtggaaaggtttttagactgtgctcacaactgaatcagcatcaaagaatacacacaggcgagaagcccttcaagtgtacggaatgcggcaaggccttcagactttcaagcaagcttatccaacatcaaagaattcacactggtgaaaagccataccggtgtgaagaatgtggcaaagcattcggacagagctcatccctgatccaccaccagaggattcacaccggcgagcgcccatacggatgcagggaatgcggaaaggccttcagccagcagtctcaactagtgaggcatcagcgaacacatacaggggaacgaccctatccgtgtaaagagtgtggcaaagccttcagccaaagcagcacattggcccaacatcaaagaatgcacaccggggaaaaggctcagatactcaaagcatcagattcaccttccctggtggcacaccaacgaattcacgccgtggagaagccttttaagtgcgacgagtgtgggaaagcttttagatggatctctcgtctctctcagcaccagcttatccatacaggcgaaaagccctataagtgtaataagtgcacaaaagcctttgggtgttcatccaggcttattaggcatcagcggactcatactggagaaaagccttttaagtgcgacgagtgtggcaagggtttcgtccaggggagtcacttaatccagcatcagagaattcatacaggggaaaagccatatgtgtgtaacgattgtggcaaagcgttcagccagtcaagtagcttgatatatcaccagcgcatccataaaggagagaagccgtatgaatgcctccagtgcggcaaagcgttctccatgagcacccagttgacgattcaccagagagtccacacaggggagcgcccttataagtgtaatgagtgtggtaaagcctttagccagaacagcactctttttcagcaccagattattcatgcaggggtcaagccttacgaatgcagcgagtgtgggaaggctttctcaagatctagctacctgattgagcaccagcggatccacacacgggcacagtggttttatgaatatggaaacgcattggaggggtcaaccttcgtgtctaggaagaaggtgaatactatcaaaaagttgcatcagtgtgaagactgtgaaaagatctttaggtggcgaagtcatttgatcatccaccagcgcatccacaccggcgaaaagccatataagtgcaacgattgcggcaaggcattcaaccggtccagccgtctcacacaacatcaaaagatccacatggggtag

SEQ ID NO: 308440 - DNA, 2250 bp, Artificial Sequence
  derived and/or modified sequence
cggaagtttgcggggcggggcggacgcgggtggccaaggcccgtttccggcggcgtcgcgcgtttgcgagcctcgggtggtcctcagggagggtctctcggccagaacacgtggatgcccacccaccactgagcctcatggaggtggtaacatttggcgatgtggctgtgcacttctctcgggaggagtggcagtgtctggaccctggccagagggccctctacagggaagtgatgctggagaaccacagcagtgtggctggactagcaggattcctggttttcaagcctgagctgatctctcggctggagcagggagaagagccatgggtcctcgacctgcagggagcagaggggacagaggcaccaaggacctccaagacagattctacgattaggactgaaaatgagcaggcctgtgaggacatggacatcctaaaatcagaatcctatgggacagtggtcagaatctccccacaggactttcctcagaatcctggctttggagacgtttctgattctgaggtctggttagacagtcatctgggcagtcccgggctgaaagtgacaggctttaccttccaaaataactgtttgaatgaggagactgtggttcccaagaccttcaccaaggacgcaccccagggatgtaaggagctgggaagcagcggcctggattgtcagcctcttgaaagtcagggagagagtgcggaagggatgtcccagagatgcgaggagtgtggcaaaggcatcagagccacttcagatatcgctctgcattgggaaattaatacacagaaaattagcagatgtcaagaatgccaaaaaaagttatctgactgcttgcaggggaaacatacaaataactgccatggagagaagccgtacgaatgtgcagagtgtgggaaagtcttcaggctctgctcgcagcttaatcagcatcagagaatccacacgggagagaaaccctttaaatgcactgagtgtggaaaagccttccgcctgagctcaaaacttattcagcatcaaagaatccacactggggagaagccctacagatgtgaggaatgtggaaaagcttttggtcagagctcaagcctcatccaccatcagagaatccacacaggagagaggccctatggttgtcgtgagtgtgggaaagccttcagccagcagtcgcagctggttagacaccagagaactcacactggggagaggccctacccttgcaaggagtgtgggaaggccttcagccagagctccaccctagcccagcatcaaaggatgcatactggggagaaagctcaaattctaaaagcctcagacagtccaagccttgttgcacatcagagaattcacgctgtagagaaaccatttaagtgtgatgagtgtgggaaagcttttaggtggatctctcgcctgagtcagcatcagctgattcacactggagagaagccttataaatgcaacaagtgtacaaaagcctttggttgtagttcacggcttattcgccatcagagaactcacactggagaaaaaccatttaaatgtgatgagtgtggcaaaggctttgttcagggctcacaccttattcagcatcagcgaatccacactggagagaaaccctatgtgtgtaatgactgtggaaaagccttcagtcagagttccagccttatttaccatcagagaatccataaaggagagaagccctacgaatgcctccaatgcggaaaagccttcagtatgagcacacagcttacaatacatcaaagggttcacactggagagaggccctataaatgtaatgaatgtgggaaagccttcagtcaaaactcaacccttttccaacaccagataattcatgcaggggtgaagccctatgagtgcagtgagtgtggaaaagccttcagccggagctcatatcttattgaacaccagagaatacacactagggcccagtggttttacgaatatgggaatgccctggaagggtccacctttgtgagccgtaaaaaggttaatactataaagaaactgcatcagtgtgaagactgtgagaagatatttaggtggcgttcacacctaattatacaccagagaattcacaccggggagaagccttataaatgcaatgactgtggcaaagcttttaatcgtagctcaaggcttacccagcatcaaaaaattcacatgggatagaccacttacatataaatgtgtatatatgtgaataaacctatagccttaactt

SEQ ID NO: 308441 - DNA, 2905 bp, Artificial Sequence
  derived and/or modified sequence
gcgcggcgggcgcggactcgggttgccctcggtccgagtgatccctggtcgcttccttagccctcccgccttcggcattggggtccccgcgtcccccgggcctccaggcgggaaagcgcgggggctttgcggggccttgagcgcctggtgtgggaggtggtcgagcccagccaccctcccccgcggcggcgcgaggtctctcggccagaacacgtggatgcccacccaccactgagcctcatggaggtggtaacatttggcgatgtggctgtgcacttctctcgggaggagtggcagtgtctggaccctggccagagggccctctacagggaagtgatgctggagaaccacagcagtgtggctggactagcaggattcctggttttcaagcctgagctgatctctcggctggagcagggagaagagccatgggtcctcgacctgcagggagcagaggggacagaggcaccaaggacctccaagacagattctacgattaggactgaaaatgagcaggcctgtgaggacatggacatcctaaaatcagaatcctatgggacagtggtcagaatctccccacaggactttcctcagaatcctggctttggagacgtttctgattctgaggtctggttagacagtcatctgggcagtcccgggctgaaagtgacaggctttaccttccaaaataactgtttgaatgaggagactgtggttcccaagaccttcaccaaggacgcaccccagggatgtaaggagctgggaagcagcggcctggattgtcagcctcttgaaagtcagggagagagtgcggaagggatgtcccagagatgcgaggagtgtggcaaaggcatcagagccacttcagatatcgctctgcattgggaaattaatacacagaaaattagcagatgtcaagaatgccaaaaaaagttatctgactgcttgcaggggaaacatacaaataactgccatggagagaagccgtacgaatgtgcagagtgtgggaaagtcttcaggctctgctcgcagcttaatcagcatcagagaatccacacgggagagaaaccctttaaatgcactgagtgtggaaaagccttccgcctgagctcaaaacttattcagcatcaaagaatccacactggggagaagccctacagatgtgaggaatgtggaaaagcttttggtcagagctcaagcctcatccaccatcagagaatccacacaggagagaggccctatggttgtcgtgagtgtgggaaagccttcagccagcagtcgcagctggttagacaccagagaactcacactggggagaggccctacccttgcaaggagtgtgggaaggccttcagccagagctccaccctagcccagcatcaaaggatgcatactggggagaaagctcaaattctaaaagcctcagacagtccaagccttgttgcacatcagagaattcacgctgtagagaaaccatttaagtgtgatgagtgtgggaaagcttttaggtggatctctcgcctgagtcagcatcagctgattcacactggagagaagccttataaatgcaacaagtgtacaaaagcctttggttgtagttcacggcttattcgccatcagagaactcacactggagaaaaaccatttaaatgtgatgagtgtggcaaaggctttgttcagggctcacaccttattcagcatcagcgaatccacactggagagaaaccctatgtgtgtaatgactgtggaaaagccttcagtcagagttccagccttatttaccatcagagaatccataaaggagagaagccctacgaatgcctccaatgcggaaaagccttcagtatgagcacacagcttacaatacatcaaagggttcacactggagagaggccctataaatgtaatgaatgtgggaaagccttcagtcaaaactcaacccttttccaacaccagataattcatgcaggggtgaagccctatgagtgcagtgagtgtggaaaagccttcagccggagctcatatcttattgaacaccagagaatacacactagggcccagtggttttacgaatatgggaatgccctggaagggtccacctttgtgagccgtaaaaaggttaatactataaagaaactgcatcagtgtgaagactgtgagaagatatttaggtggcgttcacacctaattatacaccagagaattcacaccggggagaagccttataaatgcaatgactgtggcaaagcttttaatcgtagctcaaggcttacccagcatcaaaaaattcacatgggatagaccacttacatataaatgtgtatatatgtgaataaacctatagccttaacttacttattttatatggaatcgtttatactgacaaacatgtagaatgttggtaaaggttcagaattgctctcaagaatatccaacttcaggccgagtgtggtggcttatgcctgtcatcccagcactttgggaggccaaggcgggcacatcacgaggtcaggaggttgagaccatcctgggtaacaggtgaaaccccatctctactaaaaatacaaaaatttagctgggcgtggtggcaggcacctgtggtcccagctgctcgggaggctgaggcaggagaatggcatcagcccaggaggcggagcttgcagtgagctgagatcgcgccactgcactccagcctgggtgacagagtgagactccctctcaaaaaaaaaaaaaaaaaaaaaaatccaacttcatacaaaatgtatgtttatttcctgaaatgtttgaccttaacctgttcaataaagcctgtgtccctcaaaatcagggtgcagtctgcagttttgagttgacaggtccctgtgaatgaggaagcagcacaaggagggctctacgagcgctgcta

SEQ ID NO: 308442 - DNA, 2082 bp, Artificial Sequence
  derived and/or modified sequence
cgtttccggcggcgtcgcgcgtttgcgagcctcgggtggtcctcagggagggtctctcggccagaacacgtggatgcccacccaccactgagcctcatgcaggattcctggttttcaagcctgagctgatctctcggctggagcagggagaagagccatgggtcctcgacctgcagggagcagaggggacagaggcaccaaggacctccaagacagattctacgattaggactgaaaatgagcaggcctgtgaggacatggacatcctaaaatcagaatcctatgggacagtggtcagaatctccccacaggactttcctcagaatcctggctttggagacgtttctgattctgaggtctggttagacagtcatctgggcagtcccgggctgaaagtgacaggctttaccttccaaaataactgtttgaatgaggagactgtggttcccaagaccttcaccaaggacgcaccccagggatgtaaggagctgggaagcagcggcctggattgtcagcctcttgaaagtcagggagagagtgcggaagggatgtcccagagatgcgaggagtgtggcaaaggcatcagagccacttcagatatcgctctgcattgggaaattaatacacagaaaattagcagatgtcaagaatgccaaaaaaagttatctgactgcttgcaggggaaacatacaaataactgccatggagagaagccgtacgaatgtgcagagtgtgggaaagtcttcaggctctgctcgcagcttaatcagcatcagagaatccacacgggagagaaaccctttaaatgcactgagtgtggaaaagccttccgcctgagctcaaaacttattcagcatcaaagaatccacactggggagaagccctacagatgtgaggaatgtggaaaagcttttggtcagagctcaagcctcatccaccatcagagaatccacacaggagagaggccctatggttgtcgtgagtgtgggaaagccttcagccagcagtcgcagctggttagacaccagagaactcacactggggagaggccctacccttgcaaggagtgtgggaaggccttcagccagagctccaccctagcccagcatcaaaggatgcatactggggagaaagctcaaattctaaaagcctcagacagtccaagccttgttgcacatcagagaattcacgctgtagagaaaccatttaagtgtgatgagtgtgggaaagcttttaggtggatctctcgcctgagtcagcatcagctgattcacactggagagaagccttataaatgcaacaagtgtacaaaagcctttggttgtagttcacggcttattcgccatcagagaactcacactggagaaaaaccatttaaatgtgatgagtgtggcaaaggctttgttcagggctcacaccttattcagcatcagcgaatccacactggagagaaaccctatgtgtgtaatgactgtggaaaagccttcagtcagagttccagccttatttaccatcagagaatccataaaggagagaagccctacgaatgcctccaatgcggaaaagccttcagtatgagcacacagcttacaatacatcaaagggttcacactggagagaggccctataaatgtaatgaatgtgggaaagccttcagtcaaaactcaacccttttccaacaccagataattcatgcaggggtgaagccctatgagtgcagtgagtgtggaaaagccttcagccggagctcatatcttattgaacaccagagaatacacactagggcccagtggttttacgaatatgggaatgccctggaagggtccacctttgtgagccgtaaaaaggttaatactataaagaaactgcatcagtgtgaagactgtgagaagatatttaggtggcgttcacacctaattatacaccagagaattcacaccggggagaagccttataaatgcaatgactgtggcaaagcttttaatcgtagctcaaggcttacccagcatcaaaaaattcacatgggatagaccacttacatataaatgtgtatatatgtgaataaacctatagccttaactt

SEQ ID NO: 308443 - DNA, 456 bp, Artificial Sequence
  derived and/or modified sequence
atgagcgacatcggcgactggttcagaagcatccccgccatcaccagatactggttcgccgccaccgtggccgtgcccctggtgggcaagctgggcctgatcagccccgcctacctgttcctgtggcccgaggccttcctgtacagattccaggcctgctacctgccctgggtgatcctgggcttcaactacatcatcggcggcagcgtgatcaacgagctgatcggcaacctggtgggccacctgtacttcttcctgatgttcagataccccatggacctgggcggcagaaacttcctgagcaccccccagttcctgtacagatggctgcccagcagaagaggcggcgtgagcggcttcggcgtgccccccgccagcatgagaagagccgccgaccagaacggcggcggcggcagacacaactggggccagggcttcagactgggcgaccagtag

SEQ ID NO: 308444 - DNA, 918 bp, Artificial Sequence
  derived and/or modified sequence
agaaggctgcctcgctggtccgaattcggtggcgccacgtccgcccgtctccgccttctgcatcgcggcttcggcggcttccacctagacacctaacagtcgcggagccggccgcgtcgtgagggggtcggcacggggagtcgggcggtcttgtgcatcttggctacctgtgggtcgaagatgtcggacatcggagactggttcaggagcatcccggcgatcacgcgctattggttcgccgccaccgtcgccgtgcccttggtcggcaaactcggcctcatcagcccggcctacctcttcctctggcccgaagccttcctttatcgctttcaggcctgctatttaccctgggttatccttggattcaactatatcatcggaggctcggtaatcaatgagcttattggaaatctggttggacatctttattttttcctaatgttcagatacccaatggacttgggaggaagaaattttctatccacacctcagtttttgtaccgctggctgcccagtaggagaggaggagtatcaggatttggtgtgccccctgctagcatgaggcgagctgctgatcagaatggcggaggcgggagacacaactggggccagggctttcgacttggagaccagtgaaggggcggcctcgggcagccgctcctctcaagccacatttcctcccagtgctgggtgcacttaacaactgcgttctggctaacactgttggacctgacccacactgaatgtagtctttcagtacgagacaaagtttcttaaatcccgaagaaaaatataagtgttccacaagtttcacgattctcattcaagtccttactgctgtgaagaacaaataccaactgtgcaaattgcaaaactgactacattttttggtgtcttctcttctcccctttccgtctg

SEQ ID NO: 308445 - DNA, 456 bp, Artificial Sequence
  derived and/or modified sequence
atgagcgacatcggagactggttccggtccatcccagctattacgcggtattggttcgcagctactgtcgcagtgccactggtagggaagctgggcctcatctctcctgcataccttttcctctggcccgaagcattcctctatcgcttccaggcatgttatttgccttgggttattctgggctttaattatattatcggtgggtctgtcatcaacgagttgattggcaatttagtgggtcacctgtatttcttcctgatgtttcggtacccaatggaccttggcggtcgcaacttcctcagtacgcctcagttcttgtacagatggcttccaagccgccgcggaggagtcagtggattcggggtgccacccgcgtccatgagacgcgccgcagatcagaatggggggggaggccggcataactggggtcagggcttcaggttgggggaccagtag

SEQ ID NO: 308446 - DNA, 456 bp, Artificial Sequence
  derived and/or modified sequence
atgtctgacatcggggactggttccgcagcatcccagccatcacccgctactggtttgctgccaccgtggccgtgcccctggtgggcaagctgggcctcatcagccctgcctacctgttcctgtggccagaggccttcctgtaccgcttccaggcctgctacctgccctgggtgatcctgggcttcaactacatcatcggcggcagcgtcatcaatgagctgattggcaacctggtgggccacctgtacttcttcctgatgttccgctaccccatggacctgggcggcaggaacttcctgagcaccccccagttcctgtaccgctggctgcccagcagaagaggaggagtgtctggcttcggcgtgcccccagcctccatgagaagagctgctgaccagaatggaggcggcggccgccacaactggggccagggcttccggctgggggaccagtag

SEQ ID NO: 308447 - DNA, 456 bp, Artificial Sequence
  derived and/or modified sequence
atgagcgacatcggcgactggttccggagcatccccgccatcaccaggtactggtttgcagctaccgtcgctgttcctctggtcggcaagctggggttaatatctccggcatatctctttctgtggccagaagccttcctgtaccggttccaggcctgttatttaccatgggtgatcttgggtttcaactacatcataggtggcagcgtcatcaatgagttgatcggtaacctcgtaggccatctttacttctttctgatgttcagatatcccatggatttgggtggtagaaatttcctctctacaccccagttcttgtatcgctggttaccctcacgtaggggaggagtgtccggttttggggtgccccctgctagcatgcggagagcggccgaccagaatggggggggcggcaggcacaattgggggcaggggtttcggctgggtgaccagtag

SEQ ID NO: 308448 - DNA, 456 bp, Artificial Sequence
  derived and/or modified sequence
atgagtgacattggtgactggtttagatcaatccccgcaataacaaggtattggtttgctgccacagtggcggtgccccttgtggggaagctgggtctgatctctcctgcatacctctttctgtggcccgaagccttcctctatagatttcaggcgtgctatctcccgtgggtcattctcggcttcaattacataatcggtggatcagtaatcaacgagctgataggcaacctcgtgggccacctttacttttttttgatgtttagataccctatggacttaggcggtcgaaatttcctctctacgccgcagttcctgtataggtggctcccctcacgcagaggaggcgtgtccggattcggggtccctccagcttccatgagacgtgccgctgaccagaatgggggtggtggcagacacaactggggccagggcttcagactgggcgaccaatag

SEQ ID NO: 308449 - DNA, 249 bp, Artificial Sequence
  derived and/or modified sequence
atgcagtgcctgtacttcatcctgatcctgaagggctacttccaccagcaacaccatacattactgattaccatcgcgctctgtttcctgcagcagcagcaggaaactaacttattggctaatcttactaccaacgacgctagggacaatagcaaggacttccagaacagtaaggttggagcagcagccaccagccgcgatgaaggtgagactcagaaatgcatccaaaaacctctgcacgagaagtag

SEQ ID NO: 308450 - DNA, 1074 bp, Artificial Sequence
  derived and/or modified sequence
atggtgggcaccgccctgcttgcatcgctgtggcaccatgtggcacccgttgccgggcaactacattcggtcgcatttcttgctctggcttttgttcttgccctcgcgtgctgtgccagtaatgtgaccttcttaccatttctgtcgcatctacccccacgttttcttcggagcttttttctgggccagggcctgtcagccttacttccatgcgtgcttgctcttgttcagggcgtgggccggctggaatgcccgcccgcgcctattaatggaacacccggacccccgctagattttttagagcgctttcctgctagcaccttcttctgggctctgacagccctgctggtcgcatcggccgccgcctttcaggggctgctgctgctgcttcctccgccaccttcagttccaaccggggaactggggtcaggactgcaggtaggggcccccggagccgaagaagaggtcgaggagtctagccccctccaagagcccccgagtcaggccgcaggcacgactccaggccctgatcctaaagcataccagctcctgagcgctcggtccgcctgcttactggggctcctcgccgcgacaaacgccctgaccaatggggtactccctgctgttcagtcgttcagttgtctcccctatgggcggcttgcttaccatctagccgtggtgctgggaagtgcagcgaatcctctggcctgttttctggcaatgggagtgctctgccggtcattggccgggctgggtggcctgtctctcttaggggttttctgcggcgggtatctaatggcccttgccgtgttaagtccatgtcctccactggtgggaacttccgctggggtcgttctcgtggtcctgagctgggttttgtgcctcggagtgttctcatacgtaaaggttgccgctagcagcctgctccacgggggaggccggccggccctgctggctgccggagtcgcaatccaggtcggctctttactgggagcggtggccatgtttccaccaacgtcaatctatcatgtgttccattcaagaaaagattgtgccgatccatgtgattcctag

SEQ ID NO: 308451 - DNA, 1074 bp, Artificial Sequence
  derived and/or modified sequence
atggtgggcacagccctgctggccagcctgtggcaccacgtggcccctgtggccggccagctgcacagcgtggccttcctggccctggcctttgtgctggccctggcctgctgtgccagcaatgtgaccttcctgcccttcctgagccacctgcccccacgcttcctgcggagcttcttcctgggccagggcctgagcgccctgctgccctgtgtgctggccctggtgcagggcgtgggccgcctggagtgccccccagcccccatcaatggcaccccaggcccccccctggacttcctggagcgcttccctgccagcaccttcttctgggccctgacagccctgctggtggccagcgctgctgccttccagggcctgctgctgctgctgcccccacctccttctgtgcccaccggggagctgggcagcggcctgcaggtgggcgcccctggagctgaggaggaggtggaggagagcagccccctgcaggagccccccagccaggccgccggcaccaccccaggccctgaccccaaggcctaccagctgctgagcgcccggagcgcctgcctgctgggcctgctggccgccaccaatgccctgaccaatggagtgctgcctgctgtgcagagcttcagctgcctgccctacggccgcctggcctaccacctggccgtggtgctgggcagcgctgccaaccccctggcctgcttcctggccatgggcgtgctgtgccgcagcctggccggcctgggcggcctgagcctgctgggcgtcttctgtggcggctacctgatggccctggccgtgctgagcccctgcccccccctggtgggcaccagcgctggggtggtgctggtggtgctgtcctgggtgctgtgcctgggcgtcttctcctatgtgaaggtggccgccagcagcctgctgcacggcggcggccgcccagccctgctggccgccggcgtggccatccaggtgggcagcctgctgggcgctgtggccatgtttcctcccaccagcatctaccacgtgttccacagcaggaaggactgtgccgacccctgtgacagctag

SEQ ID NO: 308452 - DNA, 1074 bp, Artificial Sequence
  derived and/or modified sequence
atggtgggcaccgccctgctggccagcctgtggcaccacgtggcccccgtcgccggtcagctgcactcggtcgcctttctggcactggccttcgtcctcgcccttgcttgttgcgccagtaacgtcacattcttgccctttttgagccacctgccaccaagattcttgagaagctttttcttaggccaggggctgtctgctctcttgccttgcgtgttggccctggtgcaaggcgtgggccgtcttgagtgcccacccgctccgatcaatggtaccccgggcccacccctcgatttcctcgagaggtttcccgcatctacatttttttgggctctgactgcacttctggtggctagcgctgccgcctttcaggggctgctcttactccttccgcctcctccgtcggtgccgaccggcgagctcggatccggactccaggttggcgctccgggcgctgaggaggaagtggaagagagcagcccacttcaagagccacccagtcaggctgctggcactacccctggtccagatccaaaagcttaccagctcctgagcgcaagatcagcctgtctcttaggattattggccgctaccaatgccttgaccaacggcgtcctgcctgcggtgcaatctttctcttgcctcccttacggacgcctggcataccaccttgctgtggttcttggttcagccgccaatcccctggcgtgctttttggccatgggtgtattgtgtcgctcattagctggactgggggggctaagccttctgggcgtgttttgtggggggtacctgatggccctcgcggtgctttcgccctgcccccccctggtcggaacgtcggctggtgtggtgctggtcgttctttcctgggtcctttgtctgggcgtgttttcatatgtaaaggttgccgcaagtagccttcttcacggcggaggacggcccgccctgctggccgctggggtcgccatccaggtgggtagcctgttaggcgctgtcgccatgtttccacctacatccatctaccacgtgtttcatagccgcaaagattgcgcagacccttgtgattcttag

SEQ ID NO: 308453 - DNA, 1074 bp, Artificial Sequence
  derived and/or modified sequence
atggtcgggacagccctgctggcttcactttggcaccatgtggcacccgtagcgggtcaactccactccgtggcatttctggccttggccttcgttctggccctcgcttgttgtgcctccaacgtgacttttctgccgtttctttcccatttacctccacgtttcttaaggagctttttcctggggcaggggctctcagctctacttccatgtgtgcttgctctggtgcagggggtgggcaggctggagtgccccccagcaccgataaatggaacgccgggaccacccctcgactttctggagcgttttccggcaagcacatttttttgggcccttacagcactgctcgtggcctctgctgccgcatttcagggactccttttgctgctcccccctcctccatcggttccgaccggggaactggggtctggactgcaggtcggggcaccaggggctgaggaggaggtggaagagagttctccactgcaggaacccccaagccaggccgctggtacaacccctggtccagaccctaaagcttaccaattgctgagtgcacgatctgcatgcctgttgggcctgctggcagcaaccaatgctttaaccaacggcgtgctgccagctgttcagagcttcagttgtctgccctatggcaggttagcctaccacctggcagtggtgttagggtccgcggctaatccactggcgtgtttcctcgccatgggcgtgctttgtaggtcactggcgggtcttggaggcctgtcactgctgggggtcttctgtgggggttatcttatggccctagcggtgttgagtccctgtcccccactggtcggcacttccgctggagttgttctggtagttctgtcctgggtcttatgtctcggagtgttttcgtacgtgaaggtcgccgcatcatctctcctgcatggaggcggacgaccagctctgctggcggcaggagtggcgattcaagtggggagcttacttggcgctgtcgctatgtttcccccaacgagtatttatcatgtgttccattcacgaaaggattgcgcggacccgtgtgattcatag

SEQ ID NO: 308454 - DNA, 1074 bp, Artificial Sequence
  derived and/or modified sequence
atggtgggcaccgccctgctggccagcctgtggcaccacgtggcccccgtggccggccagctgcacagcgtggccttcctggccctggccttcgtgctggccctggcctgctgcgccagcaacgtgaccttcctgcccttcctgagccacctgccccccagattcctgagaagcttcttcctgggccagggcctgagcgccctgctgccctgcgtgctggccctggtgcagggcgtgggcagactggagtgcccccccgcccccatcaacggcacccccggcccccccctggacttcctggagagattccccgccagcaccttcttctgggccctgaccgccctgctggtggccagcgccgccgccttccagggcctgctgctgctgctgccccccccccccagcgtgcccaccggcgagctgggcagcggcctgcaggtgggcgcccccggcgccgaggaggaggtggaggagagcagccccctgcaggagccccccagccaggccgccggcaccacccccggccccgaccccaaggcctaccagctgctgagcgccagaagcgcctgcctgctgggcctgctggccgccaccaacgccctgaccaacggcgtgctgcccgccgtgcagagcttcagctgcctgccctacggcagactggcctaccacctggccgtggtgctgggcagcgccgccaaccccctggcctgcttcctggccatgggcgtgctgtgcagaagcctggccggcctgggcggcctgagcctgctgggcgtgttctgcggcggctacctgatggccctggccgtgctgagcccctgcccccccctggtgggcaccagcgccggcgtggtgctggtggtgctgagctgggtgctgtgcctgggcgtgttcagctacgtgaaggtggccgccagcagcctgctgcacggcggcggcagacccgccctgctggccgccggcgtggccatccaggtgggcagcctgctgggcgccgtggccatgttcccccccaccagcatctaccacgtgttccacagcagaaaggactgcgccgacccctgcgacagctag

SEQ ID NO: 308455 - protein, 283 aa, Artificial Sequence
  derived and/or modified sequence
MGIWTSGTDIFLSLWEIYVSPRSPGWMDFIQHLGVCCLVALISVGLLSVAACWFLPSIIAAAASWIITCVLLCCSKHARCFILLVFLSCGLREGRNALIAAGTGIVILGHVENIFHNFKGLLDGMTCNLRAKSFSIHFPLLKKYIEAIQWIYGLATPLSVFDDLVSWNQTLAVSLFSPSHVLEAQLNDSKGEVLSVLYQMATTTEVLSSLGQKLLAFAGLSLVLLGTGLFMKRFLGPCGWKYENIYITRQFVQFDERERHQQRPCVLPLNKEERRKFISGFQS

SEQ ID NO: 308456 - DNA, 852 bp, Artificial Sequence
  derived and/or modified sequence
atgggcatttggacttccggcactgatatattcctctcattgtgggaaatctatgtcagccctcgaagcccaggatggatggattttattcagcatcttggagtctgttgcttagttgctctgatttctgtgggcctgctgtccgttgcggcttgttggttcctgccctctataatcgcggcagcagcgtcctggatcattacttgtgtgctattgtgctgctccaagcacgccagatgtttcatcttgctggtgtttttgagctgcggcctccgagaaggccgtaatgccctgatcgctgccggaactgggattgtgattttaggacacgtggaaaacatttttcacaactttaaggggctactggacggcatgacttgtaacctgagagccaagtctttcagcatccatttcccgcttctgaaaaagtacatcgaggcaatccagtggatatacgggttggccacaccattatctgtattcgacgacctcgtgtcctggaaccaaaccctcgccgtatccctcttcagtccttcgcacgtgctggaggcccagctaaatgattccaagggcgaggtgctgtcggtactataccaaatggctaccaccacagaggtcttgagctctcttggccagaaactgctggccttcgctggtttgtctctcgtgctgctcggaactggcctatttatgaagcgctttctgggaccatgtggctggaaatacgagaacatctatattaccagacagtttgtgcaattcgatgagagagaacgacaccagcagagaccttgtgtgcttccccttaacaaagaagaaaggcggaaattcattagcgggtttcagagttag

SEQ ID NO: 308457 - DNA, 852 bp, Artificial Sequence
  derived and/or modified sequence
atgggcatctggaccagcggcacagacatcttcctgagcctgtgggagatctacgtgagccccaggagccctggctggatggacttcatccagcacctgggcgtgtgctgcctggtggccctgatctctgtgggcctgctgtctgtggccgcctgctggttcctgcccagcatcatcgctgctgctgcctcctggatcatcacctgtgtgctgctgtgctgcagcaagcacgcccgctgcttcatcctgctggtgttcctgagctgtggcctgcgggagggcagaaatgccctgattgctgctggcactggaattgtcatcctgggccacgtggagaacatcttccacaacttcaagggcctgctggatggcatgacctgcaacctgcgggccaagagcttcagcatccacttccccctgctgaagaagtacatcgaggccatccagtggatctacggcctggccacccccctgtctgtgtttgatgacctggtgtcctggaaccagaccctggccgtgtccctcttcagccccagccacgtgctggaggcccagctgaatgacagcaagggggaggtgctgtctgtgctgtaccagatggccaccaccacagaggtgctgagcagcctgggccagaagctgctggcctttgctggcctgagcctggtgctgctgggcaccggcctcttcatgaagcgcttcctgggcccctgtggctggaagtatgagaacatctacatcacccggcagtttgtgcagtttgatgagcgggagcggcaccagcagaggccctgtgtgctgcccctgaacaaggaggagaggaggaagttcatcagcggcttccagagctag

SEQ ID NO: 308458 - DNA, 852 bp, Artificial Sequence
  derived and/or modified sequence
atgggcatctggaccagcggcaccgacatcttcctgagcctgtgggagatatatgtttctcctcgaagccccggttggatggactttatacagcaccttggagtctgttgtctggttgccctcatcagcgtcggactgttgagtgttgcagcctgctggtttttgccttcaataattgctgcggcagcgagctggattattacctgcgtgctgctatgctgctccaagcatgccagatgtttcattctgttagtgttcctgagttgtggcttgagagaaggaaggaatgccctcatcgccgcggggactgggatcgtcatccttggccacgtcgaaaacatctttcacaatttcaaaggattgctcgacggcatgacctgcaacctaagagcaaaatccttctcaatccacttccctctgctgaagaaatacattgaagccattcagtggatatatggcctggccactccattgtctgtctttgatgatcttgtctcctggaaccagaccctcgctgtgagcctcttctcccctagccatgtgctcgaggcacaactgaatgacagcaaaggtgaggttctgagcgtgctgtatcagatggctacaacaacagaggtcctgtcttcactgggtcaaaagttactggccttcgccggattgtctctcgtactgctgggcacgggactgttcatgaaacgattccttggtccgtgtggatggaagtatgagaacatctatatcacgaggcagttcgtgcaattcgacgagagagagaggcatcagcagcgcccctgtgtactccctttgaacaaggaggagcggcgcaagtttatttctggttttcaatcttag

SEQ ID NO: 308459 - DNA, 852 bp, Artificial Sequence
  derived and/or modified sequence
atgggtatttggacgtccggaactgacatttttctgtcactgtgggagatctatgtgtccccaagaagtccgggatggatggatttcattcagcacctcggagtgtgttgtttagtggccctgatctcagtaggcctactgtctgtggctgcctgttggttccttccttcaatcattgccgctgcagcttcttggatcataacttgtgtccttctttgctgttccaagcacgcgagatgttttattctgctggtgttcctgtcatgcggtctaagagagggaagaaacgccctgatcgccgctgggacagggatcgtcattctaggtcatgtcgagaatatctttcacaattttaagggactacttgacggtatgacctgcaacctccgcgctaagagttttagtattcacttccccctgctgaagaagtatatcgaggcaattcagtggatttacggacttgcaacaccattatctgtgtttgacgatctggtgagttggaaccaaacactggccgtctcactgttctctccctcccatgtcttggaggctcagcttaatgatagcaagggtgaagtcttatcagtattgtatcagatggccactacgaccgaggtgctatcttctctcggacaaaagttgctggcctttgcaggactgtccctggtgttgctggggaccgggctgttcatgaagagattcctaggtccatgcggttggaagtatgaaaatatctatatcacccgtcaatttgtgcagttcgatgaacgcgaacgccatcagcagagaccttgtgtgctgccacttaataaggaagaaaggcgcaagttcatctctggtttccaatcatag

SEQ ID NO: 308460 - DNA, 852 bp, Artificial Sequence
  derived and/or modified sequence
atgggcatctggaccagcggcaccgacatcttcctgagcctgtgggagatctacgtgagccccagaagccccggctggatggacttcatccagcacctgggcgtgtgctgcctggtggccctgatcagcgtgggcctgctgagcgtggccgcctgctggttcctgcccagcatcatcgccgccgccgccagctggatcatcacctgcgtgctgctgtgctgcagcaagcacgccagatgcttcatcctgctggtgttcctgagctgcggcctgagagagggcagaaacgccctgatcgccgccggcaccggcatcgtgatcctgggccacgtggagaacatcttccacaacttcaagggcctgctggacggcatgacctgcaacctgagagccaagagcttcagcatccacttccccctgctgaagaagtacatcgaggccatccagtggatctacggcctggccacccccctgagcgtgttcgacgacctggtgagctggaaccagaccctggccgtgagcctgttcagccccagccacgtgctggaggcccagctgaacgacagcaagggcgaggtgctgagcgtgctgtaccagatggccaccaccaccgaggtgctgagcagcctgggccagaagctgctggccttcgccggcctgagcctggtgctgctgggcaccggcctgttcatgaagagattcctgggcccctgcggctggaagtacgagaacatctacatcaccagacagttcgtgcagttcgacgagagagagagacaccagcagagaccctgcgtgctgcccctgaacaaggaggagagaagaaagttcatcagcggcttccagagctag

SEQ ID NO: 308461 - DNA, 949 bp, Artificial Sequence
  derived and/or modified sequence
gacgcagggagcatgggtatctggacctcaggcactgatatcttcctaagtctttgggagatttacgtgtctccaagaagccccggatggatggactttatccagcatttgggagtttgctgtttggttgctcttatttcagtgggcctcctgtctgtggccgcctgctggtttctgccatcaatcatagcggccgctgcctcctggattatcacgtgtgttctgctgtgttgctccaagcatgcacgatgttttattcttcttgtctttctctcttgtggcctgcgtgaaggcaggaatgctttgattgcagctggcacagggatcgtcatcttgggacacgtagaaaatatttttcacaactttaaaggtctcctagatggtatgacttgcaacctaagggcaaagagcttttccatacattttccacttttgaaaaaatatattgaggcaattcagtggatttatggccttgccactccactaagtgtatttgatgaccttgtttcttggaaccagaccctggcagtctctcttttcagtcccagccatgtcctggaggcacagctaaatgacagcaaaggggaagtcctgagcgtcttgtaccagatggcaacaaccacagaggtgttgtcctccctgggtcagaagctacttgcctttgcagggctttcgctcgtcctgcttggcactggcctcttcatgaagcgatttttgggcccttgtggttggaagtatgaaaacatctacatcaccagacaatttgttcagtttgatgaaagggagagacatcaacagaggccctgtgtgctcccgctgaataaggaggaaaggaggaaattcatttctggcttccagtcctgaaaatgattaggaagaagcaaatggacatggcaagtgcagacaagtcatgagagaccccgactactcctcagccacatcgcaccaa

SEQ ID NO: 308462 - protein, 2420 aa, Artificial Sequence
  derived and/or modified sequence
MSGHTLPPLPVPGTNSTEQASVPRAMAATLGAGTPPRPQARSIAGVYVEASGQAQSVYAAMEQGLLPAGLGQALLEAQAATGGLVDLARGQLLPVSKALQQGLVGLELKEKLLAAERATTGYPDPYGGEKLALFQAIGKEVVDRALGQSWLEVQLATGGLVDPAQGVLVAPEPACHQGLLDRETWHKLSELEPGTGDLRFLDPNTLERLTYHQLLERCVRAPGSGLALLPLKITFRSMGGAVSAAELLEVGILDEQAVQGLREGRLAAVDVSARAEVRRYLEGTGSVAGVVLLPEGHKKSFFQAATEHLLPMGTALPLLEAQAATHTLVDPITGQRLWVDEAVRAGLVSPELHEQLLVAEQAVTGHHDPFSGSQIPLFQAMKKGLVDRPLALRLLDAQLATGGLVCPARRLRLPLEAALRCGCLDEDTQRQLSQAGSFSDGTHGGLRYEQLLALCVTDPETGLAFLPLSGGPRGGEPQGPPFIKYSTRQALSTATATVSVGKFRGRPVSLWELLFSEAISSEQRAMLAQQYQEGTLSVEKLAAKLSATLEQAAATARVTFSGLRDTVTPGELLKAEIIDQDLYERLEHGQATAKDVGSLASVQRYLQGTGCIAGLLLPGSQERLSIYEARCKGLLRPGTALILLEAQAATGFIIDPKANKGHSVEEALRAAVIGPDVFAKLLSAERAVTGYTDPYTGQQISLFQAMQKGLIVREHGIRLLEAQIATGGVIDPVHSHRVPVDVAYRRGYFDQMLNLILLDPSDDTKGFFDPNTHENLTYLQLLERCVRDPETGLYLLPLSSTQSPLVDSATQQAFQNLLLSVKYGRFQGQRVSAWELINSEYFSEGRRRQLLRRYRQREVTLGQVAKLLEAETQRQADIMLPALRSRVTVHQLLEAGIIDQQLLDQVLAGTISPEALLLMDGVRRYLCGLGAVGGVRLLPSGQRLSLYQAMRQKLLGPRVALALLEAQAATGTIMDPHSPESLSVDEAVRRGVVGPELYGRLKRAEGAIAGFRDPFSGKQVSVFQAMKKGLIPWEQAARLLEAQVATGGIIDPTSHHHLPMPVAIQRGYVDQEMETALSSSSETFPTPDGQGRTSYAQLLEECPRDETSGLHLLPLPESAPALPTEEQVQRSLQAVPGAKDGTSLWDLLSSCHFTEEQRRGLLEDVQEGRTTVPQLLASVQRWVQETKLLAQARVMVPGPRGEVPAVWLLDAGIITQETLEALAQGTQSPAQVAEQPAVKACLWGTGCVAGVLLQPSGAKASIAQAVRDGLLPTGLGQRLLEAQVASGFLVDPLNNQRLSVEDAVKVGLVGRELSEQLGQAERAAAGYPDPYSRASLSLWQAMEKGLVPQNEGLPLLQVQLATGGVVDPVHGVHLPQAAACRLGLLDTQTSQVLTAVDKDNKFFFDPSARDQVTYQQLRERCVCDSETGLLLLPLPSDTVLEVDDHTAVALRAMKVPVSTGRFKGCSVSLWDLLLSEYVGADKRRELVALCRSGRAAALRQVVSAVTTLVEAAERQPLQATFRGLRKQVSARDLFRAQLISRKTLDELSQGTTTVKEVAEMDSVKRSLEGGNFIAGVLIQGTQERMSIPEALRRHILRPGTALVLLEAQAATGFIIDPVENRKLTVEEAFKAGMFGKETYVKLLSAERAVTGYTDPYTGQQISLFQAMQKDLIVREHGIRLLEAQIATGGIIDPVHSHRVPVDVAYRCGYFDEEMNRILADPSDDTKGFFDPNTHENLTYLQLLERCVEDPETGLYLLQIIKKGENYVYINEATRHVLQSRTAKMRVGRFADQVVSFWDLLSSPYFTEDRKRELIQEYGAQSGGLEKLLEIITTTIEETETQNQGIKVAAIRGEVTAADLFNSRVIDQKTLHTLRVGRTGGQALSTLECVKPYLEGSGCIAGVTVPSTREVMSLHEASRKELIPAAFATWLLEAQAATGFLLDPCTRQKLSVDEAVDVGLVNEELRERLLKAERAATGYRDPATGDTIPLFQAMQKQLIEKAEALRLLEVQVATGGVIDPQHHHRLPLETAYRRGCLHKDIYALISDQKHMRKRFVDPNTQEKVSYRELQERCRPQEDTGWLLFPVNKAARDSEHIDDETRRALEAEQVEITVGRFRGQKPTLWALLNSEYVTEEKKLQLVRMYRTHTRRALQTVAQLILELIEKQETSNKHLWFQGIRRQITASELLSSAIITEEMLQDLETGRSTTQELMEDDRVKRYLEGTSCIAGVLVPAKDQPGRQEKMSIYQAMWKGVLRPGTALVLLEAQAATGFVIDPVRNLRLSVEEAVAAGVVGGEIQEKLLSAERAVTGYTDPYTGQQISLFQAMQKDLIVREHGIRLLEAQIATGGVIDPVHSHRVPVDVAYRRGYFDEEMNRVLADPSDDTKGFFDPNTHENLTYLQLLQRATLDPETGLLFLSLSLQ

SEQ ID NO: 308463 - protein, 5088 aa, Artificial Sequence
  derived and/or modified sequence
MSGHTLPPLPVPGTNSTEQASVPRAMAATLGAGTPPRPQARSIAGVYVEASGQAQSVYAAMEQGLLPAGLGQALLEAQAATGGLVDLARGQLLPVSKALQQGLVGLELKEKLLAAERATTGYPDPYGGEKLALFQAIGKEVVDRALGQSWLEVQLATGGLVDPAQGVLVAPEPACHQGLLDRETWHKLSELEPGTGDLRFLDPNTLERLTYHQLLERCVRAPGSGLALLPLKITFRSMGGAVSAAELLEVGILDEQAVQGLREGRLAAVDVSARAEVRRYLEGTGSVAGVVLLPEGHKKSFFQAATEHLLPMGTALPLLEAQAATHTLVDPITGQRLWVDEAVRAGLVSPELHEQLLVAEQAVTGHHDPFSGSQIPLFQAMKKGLVDRPLALRLLDAQLATGGLVCPARRLRLPLEAALRCGCLDEDTQRQLSQAGSFSDGTHGGLRYEQLLALCVTDPETGLAFLPLSGGPRGGEPQGPPFIKYSTRQALSTATATVSVGKFRGRPVSLWELLFSEAISSEQRAMLAQQYQEGTLSVEKLAAKLSATLEQAAATARVTFSGLRDTVTPGELLKAEIIDQDLYERLEHGQATAKDVGSLASVQRYLQGTGCIAGLLLPGSQERLSIYEARCKGLLRPGTALILLEAQAATGFIIDPKANKGHSVEEALRAAVIGPDVFAKLLSAERAVTGYTDPYTGQQISLFQAMQKGLIVREHGIRLLEAQIATGGVIDPVHSHRVPVDVAYRRGYFDQMLNLILLDPSDDTKGFFDPNTHENLTYLQLLERCVRDPETGLYLLPLSSTQSPLVDSATQQAFQNLLLSVKYGRFQGQRVSAWELINSEYFSEGRRRQLLRRYRQREVTLGQVAKLLEAETQRQADIMLPALRSRVTVHQLLEAGIIDQQLLDQVLAGTISPEALLLMDGVRRYLCGLGAVGGVRLLPSGQRLSLYQAMRQKLLGPRVALALLEAQAATGTIMDPHSPESLSVDEAVRRGVVGPELYGRLKRAEGAIAGFRDPFSGKQVSVFQAMKKGLIPWEQAARLLEAQVATGGIIDPTSHHHLPMPVAIQRGYVDQEMETALSSSSETFPTPDGQGRTSYAQLLEECPRDETSGLHLLPLPESAPALPTEEQVQRSLQAVPGAKDGTSLWDLLSSCHFTEEQRRGLLEDVQEGRTTVPQLLASVQRWVQETKLLAQARVMVPGPRGEVPAVWLLDAGIITQETLEALAQGTQSPAQVAEQPAVKACLWGTGCVAGVLLQPSGAKASIAQAVRDGLLPTGLGQRLLEAQVASGFLVDPLNNQRLSVEDAVKVGLVGRELSEQLGQAERAAAGYPDPYSRASLSLWQAMEKGLVPQNEGLPLLQVQLATGGVVDPVHGVHLPQAAACRLGLLDTQTSQVLTAVDKDNKFFFDPSARDQVTYQQLRERCVCDSETGLLLLPLPSDTVLEVDDHTAVALRAMKVPVSTGRFKGCSVSLWDLLLSEYVGADKRRELVALCRSGRAAALRQVVSAVTTLVEAAERQPLQATFRGLRKQVSARDLFRAQLISRKTLDELSQGTTTVKEVAEMDSVKRSLEGGNFIAGVLIQGTQERMSIPEALRRHILRPGTALVLLEAQAATGFIIDPVENRKLTVEEAFKAGMFGKETYVKLLSAERAVTGYTDPYTGQQISLFQAMQKDLIVREHGIRLLEAQIATGGIIDPVHSHRVPVDVAYRCGYFDEEMNRILADPSDDTKGFFDPNTHENLTYLQLLERCVEDPETGLYLLQIIKKGENYVYINEATRHVLQSRTAKMRVGRFADQVVSFWDLLSSPYFTEDRKRELIQEYGAQSGGLEKLLEIITTTIEETETQNQGIKVAAIRGEVTAADLFNSRVIDQKTLHTLRVGRTGGQALSTLECVKPYLEGSGCIAGVTVPSTREVMSLHEASRKELIPAAFATWLLEAQAATGFLLDPCTRQKLSVDEAVDVGLVNEELRERLLKAERAATGYRDPATGDTIPLFQAMQKQLIEKAEALRLLEVQVATGGVIDPQHHHRLPLETAYRRGCLHKDIYALISDQKHMRKRFVDPNTQEKVSYRELQERCRPQEDTGWLLFPVNKAARDSEHIDDETRRALEAEQVEITVGRFRGQKPTLWALLNSEYVTEEKKLQLVRMYRTHTRRALQTVAQLILELIEKQETSNKHLWFQGIRRQITASELLSSAIITEEMLQDLETGRSTTQELMEDDRVKRYLEGTSCIAGVLVPAKDQPGRQEKMSIYQAMWKGVLRPGTALVLLEAQAATGFVIDPVRNLRLSVEEAVAAGVVGGEIQEKLLSAERAVTGYTDPYTGQQISLFQAMQKDLIVREHGIRLLEAQIATGGVIDPVHSHRVPVDVAYRRGYFDEEMNRVLADPSDDTKGFFDPNTHENLTYVQLLRRCVPDPDTGLYMLQLAGRGSAVHQLSEELRCALRDARVTPGSGALQGQSVSVWELLFYREVSEDRRQDLLSRYRAGTLTVEELGATLTSLLAQAQAQARAEAEAGSPRPDPREALRAATMEVKVGRLRGRAVPVWDVLASGYVSRAAREELLAEFGSGTLDLPALTRRLTAIIEEAEEAPGARPQLQDAWRGPREPGPAGRGDGDSGRSQREGQGEGETQEAAAAAAAAAARRQEQTLRDATMEVQRGQFQGRPVSVWDVLFSSYLSEARRDELLAQHAAGALGLPDLVAVLTRVIEETEERLSKVSFRGLRRQVSASELHTSGILGPETLRDLAQGTKTLQEVTEMDSVKRYLEGTSCIAGVLVPAKDQPGRQEKMSIYQAMWKGVLRPGTALVLLEAQAATGFVIDPVRNLRLSVEEAVAAGVVGGEIQEKLLSAERAVTGYTDPYTGQQISLFQAMQKDLIVREHGIRLLEAQIATGGVIDPVHSHRVPVDVAYQRGYFDEEMNRVLADPSDDTKGFFDPNTHENLTYVQLLRRCVPDPDTGLYMLQLAGRGSAVHQLSEELRCALRDARVTPGSGALQGQSVSVWELLFYREVSEDRRQDLLSRYRAGTLTVEELGATLTSLLAQAQAQARAEAEAGSPRPDPREALRAATMEVKVGRLRGRAVPVWDVLASGYVSRAAREELLAEFGSGTLDLPALTRRLTAIIEEAEEAPGARPQLQDAWRGPREPGPAGRGDGDSGRSQREGQGEGETQEAAAAARRQEQTLRDATMEVQRGQFQGRPVSVWDVLFSSYLSEARRDELLAQHAAGALGLPDLVAVLTRVIEETEERLSKVSFRGLRCQVSASELHTSGILGPETLRDLAQGTKTLQEVTEMDSVKRYLEGTSCIAGVLVPAKDQPGRQEKMSIYQAMWKGVLRPGTALVLLEAQAATGFVIDPVRNLRLSVEEAVAAGVVGGEIQEKLLSAERAVTGYTDPYTGQQISLFQAMQKDLIVREHGIRLLEAQIATGGVIDPVHSHRVPVDVAYRRGYFDEEMNRVLADPSDDTKGFFDPNTHENLTYVQLLRRCVPDPDTGLYMLQLAGRGSAVHQLSEELRCALRDARVTPGSGALQGQSVSVWELLFYREVSEDRRQDLLSRYRAGTLTVEELGATLTSLLAQAQAQARAEAEAGSPRPDPREALRAATMEVKVGRLRGRAVPVWDVLASGYVSRAAREELLAEFGSGTLDLPALTRRLTAIIEEAEEAPGARPQLQDAWRGPREPGPAGRGDGDSGRSQREGQGEGETQEAAAATAAARRQEQTLRDATMEVQRGQFQGRPVSVWDVLFSSYLSEARRDELLAQHAAGALGLPDLVAVLTRVIEETEERLSKVSFRGLRRQVSASELHTSGILGPETLRDLAQGTKTLQEVTEMDSVKRYLEGTSCIAGVLVPAKDQPGRQEKMSIYQAMWKGVLRPGTALVLLEAQAATGFVIDPVRNLRLSVEEAVAAGVVGGEIQEKLLSAERAVTGYTDPYTGQQISLFQAMQKDLIVREHGIRLLEAQIATGGVIDPVHSHRVPVDVAYRRGYFDEEMNRVLADPSDDTKGFFDPNTHENLTYVQLLRRCVPDPDTGLYMLQLAGRGSAVHQLSEELRCALRDARVTPGSGALQGQSVSVWELLFYREVSEDRRQDLLSRYRAGTLTVEELGATLTSLLAQAQAQARAEAEAGSPRPDPREALRAATMEVKVGRLRGRAVPVWDVLASGYVSRAAREELLAEFGSGTLDLPALTRRLTAIIEEAEEAPGARPQLQDAWRGPREPGPAGRGDGDSGRSQREGQGEGETQEAAAATAAARRQEQTLRDATMEVQRGQFQGRPVSVWDVLFSSYLSEARRDELLAQHAAGALGLPDLVAVLTRVIEETEERLSKVSFRGLRRQVSASELHTSGILGPETLRDLAQGTKTLQEVTEMDSVKRYLEGTSCIAGVLVPAKDQPGHQEKMSIYQAMWKGVLRPGTALVLLEAQAATGFVIDPVRNLRLSVEEAVAAGVVGGEIQEKLLSAERAVTGYTDPYTGQQISLFQAMQKDLIVREHGIRLLEAQIATGGVIDPVHSHRVPVDVAYRRGYFDEEMNRVLAHPSDDTKGFFDPNTHENLTYVQLLRRCVPDPDTGLYMLQLAGRGSAVHQLSEELRCALRDARVMPGSGALQGQSVSVWELLFYREVSEDRRQDLLSRYRAGTLTVEELGATLTSLLAQAQAQARAEAEAEAGSPRPDPREALRAATMEVKVGRLRGRAVPVWDVLASGYVSGAAREELLAEFGSGTLDLPALTRRLTAIIEEAEEAPGARPQLQDAWRGPREPGPAGRGDGDSGRSQREGQGEGETQEAAAAARRQEQTLRDATMEVQRGQFQGRPVSVWDVLFSSYLSEAHRDELLAQHAAGALGLPDLVAVLTRVIEETEERLSKVSFRGLRRQVSASELHTSGILGPETLRDLAQGTKTLQEVTEMDSVKRYLEGTSCIAGVLVPAKDQPGRQEKMSIYQAMWKGVLRPGTALVLLEAQAATGFVIDPVRNLRLSVEEAVAAGVVGGEIQEKLLSAERAVTGYTDPYTGQQISLFQAMQKDLIVREHGIRLLEAQIATGGVIDPVHSHRVPVDVAYRRGYFDEEMNRVLADPSDDTKGFFDPNTHENLTYLQLLQRATLDPETGLLFLSLSLQ

SEQ ID NO: 308464 - DNA, 7263 bp, Artificial Sequence
  derived and/or modified sequence
atgagcggccacaccctgccccccctgcccgtgcccggcaccaacagcaccgagcaggccagcgtgcccagagccatggccgccaccctgggcgccggcaccccccccagaccccaggccagaagcatcgccggcgtgtacgtggaggccagcggccaggcccagagcgtgtacgccgccatggagcagggcctgctgcccgccggcctgggccaggccctgctggaggcccaggccgccaccggcggcctggtggacctggccagaggccagctgctgcccgtgagcaaggccctgcagcagggcctggtgggcctggagctgaaggagaagctgctggccgccgagagagccaccaccggctaccccgacccctacggcggcgagaagctggccctgttccaggccatcggcaaggaggtggtggacagagccctgggccagagctggctggaggtgcagctggccaccggcggcctggtggaccccgcccagggcgtgctggtggcccccgagcccgcctgccaccagggcctgctggacagagagacctggcacaagctgagcgagctggagcccggcaccggcgacctgagattcctggaccccaacaccctggagagactgacctaccaccagctgctggagagatgcgtgagagcccccggcagcggcctggccctgctgcccctgaagatcaccttcagaagcatgggcggcgccgtgagcgccgccgagctgctggaggtgggcatcctggacgagcaggccgtgcagggcctgagagagggcagactggccgccgtggacgtgagcgccagagccgaggtgagaagatacctggagggcaccggcagcgtggccggcgtggtgctgctgcccgagggccacaagaagagcttcttccaggccgccaccgagcacctgctgcccatgggcaccgccctgcccctgctggaggcccaggccgccacccacaccctggtggaccccatcaccggccagagactgtgggtggacgaggccgtgagagccggcctggtgagccccgagctgcacgagcagctgctggtggccgagcaggccgtgaccggccaccacgaccccttcagcggcagccagatccccctgttccaggccatgaagaagggcctggtggacagacccctggccctgagactgctggacgcccagctggccaccggcggcctggtgtgccccgccagaagactgagactgcccctggaggccgccctgagatgcggctgcctggacgaggacacccagagacagctgagccaggccggcagcttcagcgacggcacccacggcggcctgagatacgagcagctgctggccctgtgcgtgaccgaccccgagaccggcctggccttcctgcccctgagcggcggccccagaggcggcgagccccagggcccccccttcatcaagtacagcaccagacaggccctgagcaccgccaccgccaccgtgagcgtgggcaagttcagaggcagacccgtgagcctgtgggagctgctgttcagcgaggccatcagcagcgagcagagagccatgctggcccagcagtaccaggagggcaccctgagcgtggagaagctggccgccaagctgagcgccaccctggagcaggccgccgccaccgccagagtgaccttcagcggcctgagagacaccgtgacccccggcgagctgctgaaggccgagatcatcgaccaggacctgtacgagagactggagcacggccaggccaccgccaaggacgtgggcagcctggccagcgtgcagagatacctgcagggcaccggctgcatcgccggcctgctgctgcccggcagccaggagagactgagcatctacgaggccagatgcaagggcctgctgagacccggcaccgccctgatcctgctggaggcccaggccgccaccggcttcatcatcgaccccaaggccaacaagggccacagcgtggaggaggccctgagagccgccgtgatcggccccgacgtgttcgccaagctgctgagcgccgagagagccgtgaccggctacaccgacccctacaccggccagcagatcagcctgttccaggccatgcagaagggcctgatcgtgagagagcacggcatcagactgctggaggcccagatcgccaccggcggcgtgatcgaccccgtgcacagccacagagtgcccgtggacgtggcctacagaagaggctacttcgaccagatgctgaacctgatcctgctggaccccagcgacgacaccaagggcttcttcgaccccaacacccacgagaacctgacctacctgcagctgctggagagatgcgtgagagaccccgagaccggcctgtacctgctgcccctgagcagcacccagagccccctggtggacagcgccacccagcaggccttccagaacctgctgctgagcgtgaagtacggcagattccagggccagagagtgagcgcctgggagctgatcaacagcgagtacttcagcgagggcagaagaagacagctgctgagaagatacagacagagagaggtgaccctgggccaggtggccaagctgctggaggccgagacccagagacaggccgacatcatgctgcccgccctgagaagcagagtgaccgtgcaccagctgctggaggccggcatcatcgaccagcagctgctggaccaggtgctggccggcaccatcagccccgaggccctgctgctgatggacggcgtgagaagatacctgtgcggcctgggcgccgtgggcggcgtgagactgctgcccagcggccagagactgagcctgtaccaggccatgagacagaagctgctgggccccagagtggccctggccctgctggaggcccaggccgccaccggcaccatcatggacccccacagccccgagagcctgagcgtggacgaggccgtgagaagaggcgtggtgggccccgagctgtacggcagactgaagagagccgagggcgccatcgccggcttcagagaccccttcagcggcaagcaggtgagcgtgttccaggccatgaagaagggcctgatcccctgggagcaggccgccagactgctggaggcccaggtggccaccggcggcatcatcgaccccaccagccaccaccacctgcccatgcccgtggccatccagagaggctacgtggaccaggagatggagaccgccctgagcagcagcagcgagaccttccccacccccgacggccagggcagaaccagctacgcccagctgctggaggagtgccccagagacgagaccagcggcctgcacctgctgcccctgcccgagagcgcccccgccctgcccaccgaggagcaggtgcagagaagcctgcaggccgtgcccggcgccaaggacggcaccagcctgtgggacctgctgagcagctgccacttcaccgaggagcagagaagaggcctgctggaggacgtgcaggagggcagaaccaccgtgccccagctgctggccagcgtgcagagatgggtgcaggagaccaagctgctggcccaggccagagtgatggtgcccggccccagaggcgaggtgcccgccgtgtggctgctggacgccggcatcatcacccaggagaccctggaggccctggcccagggcacccagagccccgcccaggtggccgagcagcccgccgtgaaggcctgcctgtggggcaccggctgcgtggccggcgtgctgctgcagcccagcggcgccaaggccagcatcgcccaggccgtgagagacggcctgctgcccaccggcctgggccagagactgctggaggcccaggtggccagcggcttcctggtggaccccctgaacaaccagagactgagcgtggaggacgccgtgaaggtgggcctggtgggcagagagctgagcgagcagctgggccaggccgagagagccgccgccggctaccccgacccctacagcagagccagcctgagcctgtggcaggccatggagaagggcctggtgccccagaacgagggcctgcccctgctgcaggtgcagctggccaccggcggcgtggtggaccccgtgcacggcgtgcacctgccccaggccgccgcctgcagactgggcctgctggacacccagaccagccaggtgctgaccgccgtggacaaggacaacaagttcttcttcgaccccagcgccagagaccaggtgacctaccagcagctgagagagagatgcgtgtgcgacagcgagaccggcctgctgctgctgcccctgcccagcgacaccgtgctggaggtggacgaccacaccgccgtggccctgagagccatgaaggtgcccgtgagcaccggcagattcaagggctgcagcgtgagcctgtgggacctgctgctgagcgagtacgtgggcgccgacaagagaagagagctggtggccctgtgcagaagcggcagagccgccgccctgagacaggtggtgagcgccgtgaccaccctggtggaggccgccgagagacagcccctgcaggccaccttcagaggcctgagaaagcaggtgagcgccagagacctgttcagagcccagctgatcagcagaaagaccctggacgagctgagccagggcaccaccaccgtgaaggaggtggccgagatggacagcgtgaagagaagcctggagggcggcaacttcatcgccggcgtgctgatccagggcacccaggagagaatgagcatccccgaggccctgagaagacacatcctgagacccggcaccgccctggtgctgctggaggcccaggccgccaccggcttcatcatcgaccccgtggagaacagaaagctgaccgtggaggaggccttcaaggccggcatgttcggcaaggagacctacgtgaagctgctgagcgccgagagagccgtgaccggctacaccgacccctacaccggccagcagatcagcctgttccaggccatgcagaaggacctgatcgtgagagagcacggcatcagactgctggaggcccagatcgccaccggcggcatcatcgaccccgtgcacagccacagagtgcccgtggacgtggcctacagatgcggctacttcgacgaggagatgaacagaatcctggccgaccccagcgacgacaccaagggcttcttcgaccccaacacccacgagaacctgacctacctgcagctgctggagagatgcgtggaggaccccgagaccggcctgtacctgctgcagatcatcaagaagggcgagaactacgtgtacatcaacgaggccaccagacacgtgctgcagagcagaaccgccaagatgagagtgggcagattcgccgaccaggtggtgagcttctgggacctgctgagcagcccctacttcaccgaggacagaaagagagagctgatccaggagtacggcgcccagagcggcggcctggagaagctgctggagatcatcaccaccaccatcgaggagaccgagacccagaaccagggcatcaaggtggccgccatcagaggcgaggtgaccgccgccgacctgttcaacagcagagtgatcgaccagaagaccctgcacaccctgagagtgggcagaaccggcggccaggccctgagcaccctggagtgcgtgaagccctacctggagggcagcggctgcatcgccggcgtgaccgtgcccagcaccagagaggtgatgagcctgcacgaggccagcagaaaggagctgatccccgccgccttcgccacctggctgctggaggcccaggccgccaccggcttcctgctggacccctgcaccagacagaagctgagcgtggacgaggccgtggacgtgggcctggtgaacgaggagctgagagagagactgctgaaggccgagagagccgccaccggctacagagaccccgccaccggcgacaccatccccctgttccaggccatgcagaagcagctgatcgagaaggccgaggccctgagactgctggaggtgcaggtggccaccggcggcgtgatcgacccccagcaccaccacagactgcccctggagaccgcctacagaagaggctgcctgcacaaggacatctacgccctgatcagcgaccagaagcacatgagaaagagattcgtggaccccaacacccaggagaaggtgagctacagagagctgcaggagagatgcagaccccaggaggacaccggctggctgctgttccccgtgaacaaggccgccagagacagcgagcacatcgacgacgagaccagaagagccctggaggccgagcaggtggagatcaccgtgggcagattcagaggccagaagcccaccctgtgggccctgctgaacagcgagtacgtgaccgaggagaagaagctgcagctggtgagaatgtacagaacccacaccagaagagccctgcagaccgtggcccagctgatcctggagctgatcgagaagcaggagaccagcaacaagcacctgtggttccagggcatcagaagacagatcaccgccagcgagctgctgagcagcgccatcatcaccgaggagatgctgcaggacctggagaccggcagaagcaccacccaggagctgatggaggacgacagagtgaagagatacctggagggcaccagctgcatcgccggcgtgctggtgcccgccaaggaccagcccggcagacaggagaagatgagcatctaccaggccatgtggaagggcgtgctgagacccggcaccgccctggtgctgctggaggcccaggccgccaccggcttcgtgatcgaccccgtgagaaacctgagactgagcgtggaggaggccgtggccgccggcgtggtgggcggcgagatccaggagaagctgctgagcgccgagagagccgtgaccggctacaccgacccctacaccggccagcagatcagcctgttccaggccatgcagaaggacctgatcgtgagagagcacggcatcagactgctggaggcccagatcgccaccggcggcgtgatcgaccccgtgcacagccacagagtgcccgtggacgtggcctacagaagaggctacttcgacgaggagatgaacagagtgctggccgaccccagcgacgacaccaagggcttcttcgaccccaacacccacgagaacctgacctacctgcagctgctgcagagagccaccctggaccccgagaccggcctgctgttcctgagcctgagcctgcagtag

SEQ ID NO: 308465 - DNA, 15267 bp, Artificial Sequence
  derived and/or modified sequence
atgagcggccacaccctgccccccctgcccgtgcccggcaccaacagcaccgagcaggccagcgtgcccagagccatggccgccaccctgggcgccggcaccccccccagaccccaggccagaagcatcgccggcgtgtacgtggaggccagcggccaggcccagagcgtgtacgccgccatggagcagggcctgctgcccgccggcctgggccaggccctgctggaggcccaggccgccaccggcggcctggtggacctggccagaggccagctgctgcccgtgagcaaggccctgcagcagggcctggtgggcctggagctgaaggagaagctgctggccgccgagagagccaccaccggctaccccgacccctacggcggcgagaagctggccctgttccaggccatcggcaaggaggtggtggacagagccctgggccagagctggctggaggtgcagctggccaccggcggcctggtggaccccgcccagggcgtgctggtggcccccgagcccgcctgccaccagggcctgctggacagagagacctggcacaagctgagcgagctggagcccggcaccggcgacctgagattcctggaccccaacaccctggagagactgacctaccaccagctgctggagagatgcgtgagagcccccggcagcggcctggccctgctgcccctgaagatcaccttcagaagcatgggcggcgccgtgagcgccgccgagctgctggaggtgggcatcctggacgagcaggccgtgcagggcctgagagagggcagactggccgccgtggacgtgagcgccagagccgaggtgagaagatacctggagggcaccggcagcgtggccggcgtggtgctgctgcccgagggccacaagaagagcttcttccaggccgccaccgagcacctgctgcccatgggcaccgccctgcccctgctggaggcccaggccgccacccacaccctggtggaccccatcaccggccagagactgtgggtggacgaggccgtgagagccggcctggtgagccccgagctgcacgagcagctgctggtggccgagcaggccgtgaccggccaccacgaccccttcagcggcagccagatccccctgttccaggccatgaagaagggcctggtggacagacccctggccctgagactgctggacgcccagctggccaccggcggcctggtgtgccccgccagaagactgagactgcccctggaggccgccctgagatgcggctgcctggacgaggacacccagagacagctgagccaggccggcagcttcagcgacggcacccacggcggcctgagatacgagcagctgctggccctgtgcgtgaccgaccccgagaccggcctggccttcctgcccctgagcggcggccccagaggcggcgagccccagggcccccccttcatcaagtacagcaccagacaggccctgagcaccgccaccgccaccgtgagcgtgggcaagttcagaggcagacccgtgagcctgtgggagctgctgttcagcgaggccatcagcagcgagcagagagccatgctggcccagcagtaccaggagggcaccctgagcgtggagaagctggccgccaagctgagcgccaccctggagcaggccgccgccaccgccagagtgaccttcagcggcctgagagacaccgtgacccccggcgagctgctgaaggccgagatcatcgaccaggacctgtacgagagactggagcacggccaggccaccgccaaggacgtgggcagcctggccagcgtgcagagatacctgcagggcaccggctgcatcgccggcctgctgctgcccggcagccaggagagactgagcatctacgaggccagatgcaagggcctgctgagacccggcaccgccctgatcctgctggaggcccaggccgccaccggcttcatcatcgaccccaaggccaacaagggccacagcgtggaggaggccctgagagccgccgtgatcggccccgacgtgttcgccaagctgctgagcgccgagagagccgtgaccggctacaccgacccctacaccggccagcagatcagcctgttccaggccatgcagaagggcctgatcgtgagagagcacggcatcagactgctggaggcccagatcgccaccggcggcgtgatcgaccccgtgcacagccacagagtgcccgtggacgtggcctacagaagaggctacttcgaccagatgctgaacctgatcctgctggaccccagcgacgacaccaagggcttcttcgaccccaacacccacgagaacctgacctacctgcagctgctggagagatgcgtgagagaccccgagaccggcctgtacctgctgcccctgagcagcacccagagccccctggtggacagcgccacccagcaggccttccagaacctgctgctgagcgtgaagtacggcagattccagggccagagagtgagcgcctgggagctgatcaacagcgagtacttcagcgagggcagaagaagacagctgctgagaagatacagacagagagaggtgaccctgggccaggtggccaagctgctggaggccgagacccagagacaggccgacatcatgctgcccgccctgagaagcagagtgaccgtgcaccagctgctggaggccggcatcatcgaccagcagctgctggaccaggtgctggccggcaccatcagccccgaggccctgctgctgatggacggcgtgagaagatacctgtgcggcctgggcgccgtgggcggcgtgagactgctgcccagcggccagagactgagcctgtaccaggccatgagacagaagctgctgggccccagagtggccctggccctgctggaggcccaggccgccaccggcaccatcatggacccccacagccccgagagcctgagcgtggacgaggccgtgagaagaggcgtggtgggccccgagctgtacggcagactgaagagagccgagggcgccatcgccggcttcagagaccccttcagcggcaagcaggtgagcgtgttccaggccatgaagaagggcctgatcccctgggagcaggccgccagactgctggaggcccaggtggccaccggcggcatcatcgaccccaccagccaccaccacctgcccatgcccgtggccatccagagaggctacgtggaccaggagatggagaccgccctgagcagcagcagcgagaccttccccacccccgacggccagggcagaaccagctacgcccagctgctggaggagtgccccagagacgagaccagcggcctgcacctgctgcccctgcccgagagcgcccccgccctgcccaccgaggagcaggtgcagagaagcctgcaggccgtgcccggcgccaaggacggcaccagcctgtgggacctgctgagcagctgccacttcaccgaggagcagagaagaggcctgctggaggacgtgcaggagggcagaaccaccgtgccccagctgctggccagcgtgcagagatgggtgcaggagaccaagctgctggcccaggccagagtgatggtgcccggccccagaggcgaggtgcccgccgtgtggctgctggacgccggcatcatcacccaggagaccctggaggccctggcccagggcacccagagccccgcccaggtggccgagcagcccgccgtgaaggcctgcctgtggggcaccggctgcgtggccggcgtgctgctgcagcccagcggcgccaaggccagcatcgcccaggccgtgagagacggcctgctgcccaccggcctgggccagagactgctggaggcccaggtggccagcggcttcctggtggaccccctgaacaaccagagactgagcgtggaggacgccgtgaaggtgggcctggtgggcagagagctgagcgagcagctgggccaggccgagagagccgccgccggctaccccgacccctacagcagagccagcctgagcctgtggcaggccatggagaagggcctggtgccccagaacgagggcctgcccctgctgcaggtgcagctggccaccggcggcgtggtggaccccgtgcacggcgtgcacctgccccaggccgccgcctgcagactgggcctgctggacacccagaccagccaggtgctgaccgccgtggacaaggacaacaagttcttcttcgaccccagcgccagagaccaggtgacctaccagcagctgagagagagatgcgtgtgcgacagcgagaccggcctgctgctgctgcccctgcccagcgacaccgtgctggaggtggacgaccacaccgccgtggccctgagagccatgaaggtgcccgtgagcaccggcagattcaagggctgcagcgtgagcctgtgggacctgctgctgagcgagtacgtgggcgccgacaagagaagagagctggtggccctgtgcagaagcggcagagccgccgccctgagacaggtggtgagcgccgtgaccaccctggtggaggccgccgagagacagcccctgcaggccaccttcagaggcctgagaaagcaggtgagcgccagagacctgttcagagcccagctgatcagcagaaagaccctggacgagctgagccagggcaccaccaccgtgaaggaggtggccgagatggacagcgtgaagagaagcctggagggcggcaacttcatcgccggcgtgctgatccagggcacccaggagagaatgagcatccccgaggccctgagaagacacatcctgagacccggcaccgccctggtgctgctggaggcccaggccgccaccggcttcatcatcgaccccgtggagaacagaaagctgaccgtggaggaggccttcaaggccggcatgttcggcaaggagacctacgtgaagctgctgagcgccgagagagccgtgaccggctacaccgacccctacaccggccagcagatcagcctgttccaggccatgcagaaggacctgatcgtgagagagcacggcatcagactgctggaggcccagatcgccaccggcggcatcatcgaccccgtgcacagccacagagtgcccgtggacgtggcctacagatgcggctacttcgacgaggagatgaacagaatcctggccgaccccagcgacgacaccaagggcttcttcgaccccaacacccacgagaacctgacctacctgcagctgctggagagatgcgtggaggaccccgagaccggcctgtacctgctgcagatcatcaagaagggcgagaactacgtgtacatcaacgaggccaccagacacgtgctgcagagcagaaccgccaagatgagagtgggcagattcgccgaccaggtggtgagcttctgggacctgctgagcagcccctacttcaccgaggacagaaagagagagctgatccaggagtacggcgcccagagcggcggcctggagaagctgctggagatcatcaccaccaccatcgaggagaccgagacccagaaccagggcatcaaggtggccgccatcagaggcgaggtgaccgccgccgacctgttcaacagcagagtgatcgaccagaagaccctgcacaccctgagagtgggcagaaccggcggccaggccctgagcaccctggagtgcgtgaagccctacctggagggcagcggctgcatcgccggcgtgaccgtgcccagcaccagagaggtgatgagcctgcacgaggccagcagaaaggagctgatccccgccgccttcgccacctggctgctggaggcccaggccgccaccggcttcctgctggacccctgcaccagacagaagctgagcgtggacgaggccgtggacgtgggcctggtgaacgaggagctgagagagagactgctgaaggccgagagagccgccaccggctacagagaccccgccaccggcgacaccatccccctgttccaggccatgcagaagcagctgatcgagaaggccgaggccctgagactgctggaggtgcaggtggccaccggcggcgtgatcgacccccagcaccaccacagactgcccctggagaccgcctacagaagaggctgcctgcacaaggacatctacgccctgatcagcgaccagaagcacatgagaaagagattcgtggaccccaacacccaggagaaggtgagctacagagagctgcaggagagatgcagaccccaggaggacaccggctggctgctgttccccgtgaacaaggccgccagagacagcgagcacatcgacgacgagaccagaagagccctggaggccgagcaggtggagatcaccgtgggcagattcagaggccagaagcccaccctgtgggccctgctgaacagcgagtacgtgaccgaggagaagaagctgcagctggtgagaatgtacagaacccacaccagaagagccctgcagaccgtggcccagctgatcctggagctgatcgagaagcaggagaccagcaacaagcacctgtggttccagggcatcagaagacagatcaccgccagcgagctgctgagcagcgccatcatcaccgaggagatgctgcaggacctggagaccggcagaagcaccacccaggagctgatggaggacgacagagtgaagagatacctggagggcaccagctgcatcgccggcgtgctggtgcccgccaaggaccagcccggcagacaggagaagatgagcatctaccaggccatgtggaagggcgtgctgagacccggcaccgccctggtgctgctggaggcccaggccgccaccggcttcgtgatcgaccccgtgagaaacctgagactgagcgtggaggaggccgtggccgccggcgtggtgggcggcgagatccaggagaagctgctgagcgccgagagagccgtgaccggctacaccgacccctacaccggccagcagatcagcctgttccaggccatgcagaaggacctgatcgtgagagagcacggcatcagactgctggaggcccagatcgccaccggcggcgtgatcgaccccgtgcacagccacagagtgcccgtggacgtggcctacagaagaggctacttcgacgaggagatgaacagagtgctggccgaccccagcgacgacaccaagggcttcttcgaccccaacacccacgagaacctgacctacgtgcagctgctgagaagatgcgtgcccgaccccgacaccggcctgtacatgctgcagctggccggcagaggcagcgccgtgcaccagctgagcgaggagctgagatgcgccctgagagacgccagagtgacccccggcagcggcgccctgcagggccagagcgtgagcgtgtgggagctgctgttctacagagaggtgagcgaggacagaagacaggacctgctgagcagatacagagccggcaccctgaccgtggaggagctgggcgccaccctgaccagcctgctggcccaggcccaggcccaggccagagccgaggccgaggccggcagccccagacccgaccccagagaggccctgagagccgccaccatggaggtgaaggtgggcagactgagaggcagagccgtgcccgtgtgggacgtgctggccagcggctacgtgagcagagccgccagagaggagctgctggccgagttcggcagcggcaccctggacctgcccgccctgaccagaagactgaccgccatcatcgaggaggccgaggaggcccccggcgccagaccccagctgcaggacgcctggagaggccccagagagcccggccccgccggcagaggcgacggcgacagcggcagaagccagagagagggccagggcgagggcgagacccaggaggccgccgccgccgccgccgccgccgccgccagaagacaggagcagaccctgagagacgccaccatggaggtgcagagaggccagttccagggcagacccgtgagcgtgtgggacgtgctgttcagcagctacctgagcgaggccagaagagacgagctgctggcccagcacgccgccggcgccctgggcctgcccgacctggtggccgtgctgaccagagtgatcgaggagaccgaggagagactgagcaaggtgagcttcagaggcctgagaagacaggtgagcgccagcgagctgcacaccagcggcatcctgggccccgagaccctgagagacctggcccagggcaccaagaccctgcaggaggtgaccgagatggacagcgtgaagagatacctggagggcaccagctgcatcgccggcgtgctggtgcccgccaaggaccagcccggcagacaggagaagatgagcatctaccaggccatgtggaagggcgtgctgagacccggcaccgccctggtgctgctggaggcccaggccgccaccggcttcgtgatcgaccccgtgagaaacctgagactgagcgtggaggaggccgtggccgccggcgtggtgggcggcgagatccaggagaagctgctgagcgccgagagagccgtgaccggctacaccgacccctacaccggccagcagatcagcctgttccaggccatgcagaaggacctgatcgtgagagagcacggcatcagactgctggaggcccagatcgccaccggcggcgtgatcgaccccgtgcacagccacagagtgcccgtggacgtggcctaccagagaggctacttcgacgaggagatgaacagagtgctggccgaccccagcgacgacaccaagggcttcttcgaccccaacacccacgagaacctgacctacgtgcagctgctgagaagatgcgtgcccgaccccgacaccggcctgtacatgctgcagctggccggcagaggcagcgccgtgcaccagctgagcgaggagctgagatgcgccctgagagacgccagagtgacccccggcagcggcgccctgcagggccagagcgtgagcgtgtgggagctgctgttctacagagaggtgagcgaggacagaagacaggacctgctgagcagatacagagccggcaccctgaccgtggaggagctgggcgccaccctgaccagcctgctggcccaggcccaggcccaggccagagccgaggccgaggccggcagccccagacccgaccccagagaggccctgagagccgccaccatggaggtgaaggtgggcagactgagaggcagagccgtgcccgtgtgggacgtgctggccagcggctacgtgagcagagccgccagagaggagctgctggccgagttcggcagcggcaccctggacctgcccgccctgaccagaagactgaccgccatcatcgaggaggccgaggaggcccccggcgccagaccccagctgcaggacgcctggagaggccccagagagcccggccccgccggcagaggcgacggcgacagcggcagaagccagagagagggccagggcgagggcgagacccaggaggccgccgccgccgccagaagacaggagcagaccctgagagacgccaccatggaggtgcagagaggccagttccagggcagacccgtgagcgtgtgggacgtgctgttcagcagctacctgagcgaggccagaagagacgagctgctggcccagcacgccgccggcgccctgggcctgcccgacctggtggccgtgctgaccagagtgatcgaggagaccgaggagagactgagcaaggtgagcttcagaggcctgagatgccaggtgagcgccagcgagctgcacaccagcggcatcctgggccccgagaccctgagagacctggcccagggcaccaagaccctgcaggaggtgaccgagatggacagcgtgaagagatacctggagggcaccagctgcatcgccggcgtgctggtgcccgccaaggaccagcccggcagacaggagaagatgagcatctaccaggccatgtggaagggcgtgctgagacccggcaccgccctggtgctgctggaggcccaggccgccaccggcttcgtgatcgaccccgtgagaaacctgagactgagcgtggaggaggccgtggccgccggcgtggtgggcggcgagatccaggagaagctgctgagcgccgagagagccgtgaccggctacaccgacccctacaccggccagcagatcagcctgttccaggccatgcagaaggacctgatcgtgagagagcacggcatcagactgctggaggcccagatcgccaccggcggcgtgatcgaccccgtgcacagccacagagtgcccgtggacgtggcctacagaagaggctacttcgacgaggagatgaacagagtgctggccgaccccagcgacgacaccaagggcttcttcgaccccaacacccacgagaacctgacctacgtgcagctgctgagaagatgcgtgcccgaccccgacaccggcctgtacatgctgcagctggccggcagaggcagcgccgtgcaccagctgagcgaggagctgagatgcgccctgagagacgccagagtgacccccggcagcggcgccctgcagggccagagcgtgagcgtgtgggagctgctgttctacagagaggtgagcgaggacagaagacaggacctgctgagcagatacagagccggcaccctgaccgtggaggagctgggcgccaccctgaccagcctgctggcccaggcccaggcccaggccagagccgaggccgaggccggcagccccagacccgaccccagagaggccctgagagccgccaccatggaggtgaaggtgggcagactgagaggcagagccgtgcccgtgtgggacgtgctggccagcggctacgtgagcagagccgccagagaggagctgctggccgagttcggcagcggcaccctggacctgcccgccctgaccagaagactgaccgccatcatcgaggaggccgaggaggcccccggcgccagaccccagctgcaggacgcctggagaggccccagagagcccggccccgccggcagaggcgacggcgacagcggcagaagccagagagagggccagggcgagggcgagacccaggaggccgccgccgccaccgccgccgccagaagacaggagcagaccctgagagacgccaccatggaggtgcagagaggccagttccagggcagacccgtgagcgtgtgggacgtgctgttcagcagctacctgagcgaggccagaagagacgagctgctggcccagcacgccgccggcgccctgggcctgcccgacctggtggccgtgctgaccagagtgatcgaggagaccgaggagagactgagcaaggtgagcttcagaggcctgagaagacaggtgagcgccagcgagctgcacaccagcggcatcctgggccccgagaccctgagagacctggcccagggcaccaagaccctgcaggaggtgaccgagatggacagcgtgaagagatacctggagggcaccagctgcatcgccggcgtgctggtgcccgccaaggaccagcccggcagacaggagaagatgagcatctaccaggccatgtggaagggcgtgctgagacccggcaccgccctggtgctgctggaggcccaggccgccaccggcttcgtgatcgaccccgtgagaaacctgagactgagcgtggaggaggccgtggccgccggcgtggtgggcggcgagatccaggagaagctgctgagcgccgagagagccgtgaccggctacaccgacccctacaccggccagcagatcagcctgttccaggccatgcagaaggacctgatcgtgagagagcacggcatcagactgctggaggcccagatcgccaccggcggcgtgatcgaccccgtgcacagccacagagtgcccgtggacgtggcctacagaagaggctacttcgacgaggagatgaacagagtgctggccgaccccagcgacgacaccaagggcttcttcgaccccaacacccacgagaacctgacctacgtgcagctgctgagaagatgcgtgcccgaccccgacaccggcctgtacatgctgcagctggccggcagaggcagcgccgtgcaccagctgagcgaggagctgagatgcgccctgagagacgccagagtgacccccggcagcggcgccctgcagggccagagcgtgagcgtgtgggagctgctgttctacagagaggtgagcgaggacagaagacaggacctgctgagcagatacagagccggcaccctgaccgtggaggagctgggcgccaccctgaccagcctgctggcccaggcccaggcccaggccagagccgaggccgaggccggcagccccagacccgaccccagagaggccctgagagccgccaccatggaggtgaaggtgggcagactgagaggcagagccgtgcccgtgtgggacgtgctggccagcggctacgtgagcagagccgccagagaggagctgctggccgagttcggcagcggcaccctggacctgcccgccctgaccagaagactgaccgccatcatcgaggaggccgaggaggcccccggcgccagaccccagctgcaggacgcctggagaggccccagagagcccggccccgccggcagaggcgacggcgacagcggcagaagccagagagagggccagggcgagggcgagacccaggaggccgccgccgccaccgccgccgccagaagacaggagcagaccctgagagacgccaccatggaggtgcagagaggccagttccagggcagacccgtgagcgtgtgggacgtgctgttcagcagctacctgagcgaggccagaagagacgagctgctggcccagcacgccgccggcgccctgggcctgcccgacctggtggccgtgctgaccagagtgatcgaggagaccgaggagagactgagcaaggtgagcttcagaggcctgagaagacaggtgagcgccagcgagctgcacaccagcggcatcctgggccccgagaccctgagagacctggcccagggcaccaagaccctgcaggaggtgaccgagatggacagcgtgaagagatacctggagggcaccagctgcatcgccggcgtgctggtgcccgccaaggaccagcccggccaccaggagaagatgagcatctaccaggccatgtggaagggcgtgctgagacccggcaccgccctggtgctgctggaggcccaggccgccaccggcttcgtgatcgaccccgtgagaaacctgagactgagcgtggaggaggccgtggccgccggcgtggtgggcggcgagatccaggagaagctgctgagcgccgagagagccgtgaccggctacaccgacccctacaccggccagcagatcagcctgttccaggccatgcagaaggacctgatcgtgagagagcacggcatcagactgctggaggcccagatcgccaccggcggcgtgatcgaccccgtgcacagccacagagtgcccgtggacgtggcctacagaagaggctacttcgacgaggagatgaacagagtgctggcccaccccagcgacgacaccaagggcttcttcgaccccaacacccacgagaacctgacctacgtgcagctgctgagaagatgcgtgcccgaccccgacaccggcctgtacatgctgcagctggccggcagaggcagcgccgtgcaccagctgagcgaggagctgagatgcgccctgagagacgccagagtgatgcccggcagcggcgccctgcagggccagagcgtgagcgtgtgggagctgctgttctacagagaggtgagcgaggacagaagacaggacctgctgagcagatacagagccggcaccctgaccgtggaggagctgggcgccaccctgaccagcctgctggcccaggcccaggcccaggccagagccgaggccgaggccgaggccggcagccccagacccgaccccagagaggccctgagagccgccaccatggaggtgaaggtgggcagactgagaggcagagccgtgcccgtgtgggacgtgctggccagcggctacgtgagcggcgccgccagagaggagctgctggccgagttcggcagcggcaccctggacctgcccgccctgaccagaagactgaccgccatcatcgaggaggccgaggaggcccccggcgccagaccccagctgcaggacgcctggagaggccccagagagcccggccccgccggcagaggcgacggcgacagcggcagaagccagagagagggccagggcgagggcgagacccaggaggccgccgccgccgccagaagacaggagcagaccctgagagacgccaccatggaggtgcagagaggccagttccagggcagacccgtgagcgtgtgggacgtgctgttcagcagctacctgagcgaggcccacagagacgagctgctggcccagcacgccgccggcgccctgggcctgcccgacctggtggccgtgctgaccagagtgatcgaggagaccgaggagagactgagcaaggtgagcttcagaggcctgagaagacaggtgagcgccagcgagctgcacaccagcggcatcctgggccccgagaccctgagagacctggcccagggcaccaagaccctgcaggaggtgaccgagatggacagcgtgaagagatacctggagggcaccagctgcatcgccggcgtgctggtgcccgccaaggaccagcccggcagacaggagaagatgagcatctaccaggccatgtggaagggcgtgctgagacccggcaccgccctggtgctgctggaggcccaggccgccaccggcttcgtgatcgaccccgtgagaaacctgagactgagcgtggaggaggccgtggccgccggcgtggtgggcggcgagatccaggagaagctgctgagcgccgagagagccgtgaccggctacaccgacccctacaccggccagcagatcagcctgttccaggccatgcagaaggacctgatcgtgagagagcacggcatcagactgctggaggcccagatcgccaccggcggcgtgatcgaccccgtgcacagccacagagtgcccgtggacgtggcctacagaagaggctacttcgacgaggagatgaacagagtgctggccgaccccagcgacgacaccaagggcttcttcgaccccaacacccacgagaacctgacctacctgcagctgctgcagagagccaccctggaccccgagaccggcctgctgttcctgagcctgagcctgcagtag

SEQ ID NO: 308466 - DNA, 7263 bp, Artificial Sequence
  derived and/or modified sequence
atgagtggacacaccctgccccccctaccagtcccaggcaccaattctacagagcaagcttcagtacccagagccatggcagcaaccctcggtgcaggaacgccacccaggcctcaagcacgctccattgcgggggtatatgttgaagccagtggacaagctcaatcagtgtacgccgcaatggagcaggggctgctgccagctggccttggtcaagcccttcttgaggctcaagccgccactggcggcctcgtagatttggctagaggccagcttctccctgtttccaaagctctgcagcaaggactggtgggacttgagttgaaggaaaagctgttggctgccgaaagagccaccactgggtacccagacccctatggtggggaaaagttagccttatttcaggccataggtaaggaggtggtggatcgcgcccttgggcaaagttggctcgaggttcagctcgccactggaggactggtggatcccgcccagggcgtcctagttgcccccgaacctgcctgccatcagggcctccttgatcgggaaacctggcacaaactaagcgagttggagcccggtacaggagacctccgtttcctggaccctaacactctggagcgcctgacctaccatcagctgctagaaagatgtgtgagagctcccggcagcggcctggcactcctgcccctcaaaatcacctttaggtcaatggggggtgccgtaagcgcagctgaactgcttgaggtcggaattctggatgagcaggccgtccaggggctccgcgaaggcaggttagccgcggttgatgtgtccgcacgggcggaggttagaaggtacctggaggggaccggctctgtagctggcgtggtgcttttgcccgagggccacaagaagagttttttccaagccgctacggagcatcttcttcccatgggcactgcccttccccttctggaggcccaggccgccacacataccttagtggatcccatcacaggacaacgcctctgggttgacgaggcagtgcgtgccggcctcgtgtccccagaactgcacgagcaacttttggtggctgagcaggccgtgacaggtcaccacgacccatttagtggatcacagataccactctttcaggccatgaagaagggcttagtcgacagaccactggccttacggctgctcgacgctcagctcgctactggtgggttggtgtgtcccgctcgccgcctccgcttaccgttagaggccgcacttcgttgcggttgcctggacgaagacacccagaggcaattgtcccaggcgggcagtttctccgatggcactcacggcggacttcggtacgagcagctcctcgcactgtgtgttactgatcctgagacgggactggcgttccttcctttgtccggtggcccacggggtggggagccacaaggccccccatttatcaaatacagtacaagacaggccctgtccactgccaccgccacggtgtcggttggcaaatttagaggcagaccagtgagtctgtgggagctgctgttctccgaggctatctcttcagaacagagggcgatgctggcccagcagtaccaggagggcaccctgtctgtggagaaactagcagcaaagctgagcgctaccctagaacaggccgcagcgactgctcgagtgactttttccgggctaagagacaccgtgacccccggtgagcttctaaaggccgagattatcgaccaggacctctacgaacgtctagaacacgggcaggccacagccaaggacgtcgggtcactcgccagcgttcagcgttaccttcaggggaccggttgtatagctggactgctcctgcccgggagtcaggagagactgagtatatatgaagctcggtgcaagggtctgttaaggcctggcactgctctcatactgcttgaggctcaagccgcaacaggttttatcattgaccccaaggcaaacaaggggcactcagtggaagaggctctccgcgccgcagtcattggtcctgacgtgttcgccaagctcctctcggcggaaagggctgtaacagggtatacagacccttatactggccaacagatcagtctgttccaagctatgcaaaaggggttaattgttagggaacacgggatccggctgttggaagctcagatcgccacaggcggggttattgatcctgttcattctcatcgtgtgcccgtggacgtggcctaccggagggggtacttcgatcagatgctcaacctgatcttgcttgacccatcagacgacaccaaagggttctttgaccccaacacacatgagaatctgacttatctccagttactagaacggtgtgttcgcgatccagaaaccggcctgtacctcctacccctgagcagcacacagagccctctagtggatagtgcgacccagcaggcatttcagaatcttctcctgagcgttaaatacgggagattccaggggcaacgggtatccgcctgggagttaatcaactccgaatacttcagcgaaggacgaaggaggcagcttctgagaaggtaccggcagcgtgaggttactttgggccaggtggctaagctgcttgaagctgagacccagagacaagcagacatcatgctgcctgctctgcggagtcgcgtgacagtacaccaattacttgaggctgggattattgaccaacaattgcttgatcaggtcctggcgggcactattagccccgaggcccttctcttaatggacggggtgagaagatacctatgtgggctgggtgcagtcgggggtgtcaggcttctgccctccggccagcgtctctccctgtatcaagctatgagacagaaactgcttgggccaagagttgcattagccctgctggaagctcaggccgccactgggaccatcatggacccacacagtcccgaaagcctgtccgtggacgaggcagttaggcggggcgtcgtcgggccagagctttatggtcgactgaagcgtgcagaaggagccatcgccggtttcagggatccatttagtggaaagcaagtgagcgtttttcaggccatgaaaaagggattgatcccttgggaacaggctgcaaggttactcgaggcacaggtcgcgactgggggaatcatcgatccaacctctcaccaccatttaccgatgccagtggccatccaacggggatatgtggatcaagagatggagactgcactgtcctcgagcagtgagacctttccaacgcctgatggccagggacggactagttatgcccagctgctcgaggagtgcccacgggacgagacctccgggttgcacttgctgcccttgcctgagagtgcaccagcactccctacggaagagcaggttcagcggtccctccaggctgtgccaggagccaaggatggtacgagtctttgggaccttctgagtagctgccattttacggaggagcagaggcgcgggttgctagaggacgtacaggaaggtcgaacaaccgtgccacaactgttggccagtgtgcaacgttgggtccaggaaaccaaactcctcgctcaggcccgcgtgatggtgccggggccacggggagaagttcctgctgtgtggctgttggatgcgggcattattacgcaggagactctggaggccttggcacaggggacccagtcacccgctcaggtggccgagcagcctgctgtcaaggcctgcctgtgggggactggatgcgtagccggtgtcttgcttcaaccctcaggcgcaaaagcctccatcgctcaggcagtgcgggatggtctccttcccaccggccttggccaaagattgctcgaggcgcaagtcgcctccgggttcctggttgaccccttgaataaccagcgtctttctgtggaggacgccgttaaggtgggacttgtcggcagggaactcagtgagcagttaggccaagcagaaagggctgctgccggctatcctgacccctacagcagagcctccctttcactatggcaggctatggaaaagggccttgtgccccagaatgagggattaccactcctgcaggtgcagctggccacaggtggagtagtagacccagtgcacggtgtgcacctgcctcaggctgcagcctgtcggctgggattgctggacacacaaacctcacaggttctcaccgccgtggataaggacaataaattttttttcgatccatctgcccgtgaccaggtcacatatcagcaacttagagagaggtgtgtatgtgatagtgaaacaggactattactgctgcctttgccctccgacaccgtgctggaagtggacgatcatacagcagtcgcgctgagggcaatgaaggtgccagtgagtacaggcaggttcaaaggatgttctgttagtttatgggacctcctcctgagcgaatacgtcggcgctgacaagcgacgggaactagtcgcgttgtgtaggagcggacgcgctgcagctctgcgacaggtcgtgtccgccgtgaccacactagtggaggcggctgagcgccagcctttacaggccacatttcgcggactgaggaaacaggtgtccgctcgcgatctctttcgagcgcagcttatttcccgaaagaccctggacgaattgtctcaagggaccactactgtgaaggaagtggcagaaatggactcagtgaaaagaagcctagagggggggaactttattgctggggtcctcattcagggaacacaagagcggatgagcatccccgaggccttgcggaggcatatactcagacctggtacggccctggtgttgctcgaggctcaggccgctaccggctttattattgatccagtcgaaaatcgtaagctcaccgttgaagaggcctttaaggccgggatgtttggtaaggagacatatgtgaagctgctgtccgccgagcgggcagtgaccggatataccgatccgtatacaggacagcagatctccctgttccaggcaatgcaaaaggacctcattgtacgcgagcacggaatcaggctgttggaagcccagatcgccactggggggattatcgatccagtacacagccatcgggtgcccgtggatgtggcttataggtgtggatatttcgacgaggagatgaacaggatcctggctgatccgtccgacgacacaaagggcttctttgaccccaacacacatgaaaatttgacctacctgcagctgctcgagagatgcgtggaggaccctgagaccgggctttatctcctacaaatcattaagaagggtgaaaattacgtctacatcaacgaagcaactcggcacgtgcttcagtcccggaccgctaagatgcgtgtgggccggtttgctgaccaggtggtaagtttctgggacctgctatcttccccctattttactgaagaccgaaaacgcgagctgattcaggaatatggggcccaatcaggggggctggagaaacttcttgagatcattacgacaaccatagaagagacagagacccagaaccagggtattaaggtggctgccattagaggagaagtcacagcagccgatttatttaactcgagagtcatagatcagaaaaccctgcataccctgagagtgggaaggacgggtggccaagcactgtccacgcttgagtgcgtgaaaccttatctcgagggaagcggatgcatagccggcgtgactgtcccctccacgagggaggtcatgtccctgcatgaagctagccgaaaggaactgatccccgctgcttttgctacctggctcttagaagctcaggctgcaaccgggttcctgctcgatccatgcaccaggcaaaaactgagcgtcgacgaggcagtcgatgttgggttggtgaatgaagagttgcgcgagagactattaaaggctgagagagcagccaccggctatcgagacccggcaactggtgatacaatccctctattccaggctatgcagaagcagcttatcgaaaaggccgaagccctgcggctcttggaggtgcaagttgccactgggggggtcatcgatccccagcatcaccaccgattacctctcgaaactgcttaccgcagaggctgtctgcataaggatatctacgccctaatctctgatcagaagcacatgcggaagcgattcgtagacccaaacactcaagagaaggtgtcatacagggagttgcaggaaagatgtaggccccaggaagataccggatggctgctctttcctgtgaataaagcagccagagacagcgaacatatcgatgacgagacaagaagggctttagaagccgagcaggttgagattacagtgggcaggttccggggacagaaacctacactttgggcacttctgaactcagaatacgttaccgaggaaaaaaagttgcaacttgtcaggatgtaccggacacacacgcgccgggcattgcagactgtggcccagctgatcctggagctcatcgaaaagcaggagacttctaataaacacttatggtttcagggaatccgccgtcagattaccgcttctgaactactttcatctgccattattacagaagaaatgctgcaggacctagagacaggtcgtagcaccacacaggagctgatggaggatgacagggtgaagcggtatctcgaggggacttcctgtatcgccggagtcctcgttcccgcaaaggaccagccaggcaggcaggagaagatgagcatatatcaagcaatgtggaagggtgtgttgagaccagggactgctctggtattgctcgaagcccaggcagccaccggcttcgtgatcgatcctgtgcgcaacttgcgtctttcggtggaggaagccgtcgccgcaggtgtggtggggggggaaattcaggagaagttgctgagtgccgaaagggccgtgaccggttataccgacccgtatactggacagcaaattagtctcttccaggccatgcagaaagacctgatcgtaagagaacatggcatcaggctgttggaggcacagatagccacgggcggtgtaatagaccccgtccattctcatcgagtgccagtggacgtagcctaccgccgggggtacttcgacgaggagatgaatagggtacttgccgacccgtccgatgacaccaagggattcttcgatccgaacacccacgaaaacttgacctatctacagctgctgcagcgagctaccctggatccagagacgggcctgctattcttgtccctgtctctgcagtag

SEQ ID NO: 308467 - DNA, 15267 bp, Artificial Sequence
  derived and/or modified sequence
atgtctggccacacattacctccactgcccgtccccggcactaactctacggaacaggcctctgtcccacgggctatggccgcaacgctcggggcggggacaccgcctaggccacaggctagatccattgcgggggtctatgttgaagcatcagggcaggcccagagcgtgtacgctgcaatggaacaggggctcctgcctgccggattgggccaagcattattggaagcccaggctgccactggaggtttagtggacctcgccagaggccagctgctgcctgtgtccaaagcactgcagcagggcctggtcggactagagttaaaagagaagttactggccgcagaacgcgctactactggatacccagacccttacggtggtgagaaactcgccctgtttcaggctatcggaaaggaggtggtggaccgggcactggggcaatcctggctggaggtccagctggccactgggggcctcgtggatccagctcagggcgttttagtggctcccgaacccgcatgtcaccaggggctcctcgacagggaaacatggcataagctgagcgaactggaacccggtactggtgacttgcggttcctcgatcccaataccctggagcgattaacctaccatcaactcttagaaagatgtgtgcgcgcacccggtagcgggctcgctctgctgccactgaagattacctttcggagtatgggtggagcagtgtctgctgcggagctgctggaagtgggtattctggatgaacaggctgtccagggactccgtgaagggcgtctcgccgctgtcgacgtgtccgctcgggctgaggtgaggcgctacctggaggggacaggctccgtagcgggcgtggtcctattacctgagggacacaaaaaaagcttctttcaggccgcgaccgagcaccttctgcccatggggaccgcactgcccctcctcgaagcacaagcagctacccacactcttgttgaccccattaccgggcaaaggttgtgggtcgacgaggcagtaagagccggcctggtcagccctgagcttcacgagcaattactcgtggcagagcaggctgtgacgggacaccacgatccattctctggcagccagattcccctgttccaggctatgaagaaagggctggtcgatcgacctctggcattgcgcctgctcgatgcacaactggcgacagggggcttggtttgtccagcacggcgattgagactgccactcgaggctgcacttaggtgcggatgtttggatgaggatactcagaggcaactttcacaggcaggcagctttagtgatggcacgcacggcggcttgcggtatgaacagctgttagctctttgtgtaaccgatccggaaaccggactcgctttcctgcctttgtctggaggaccccggggcggtgagccccagggccctcccttcatcaagtattccacacgacaagctctgtcaaccgccacagccactgtaagcgtaggcaagttcagagggagaccggtcagtttatgggaactgctgttttcggaggccatttctagcgaacagcgcgccatgctagcccagcagtatcaggagggcacgctgtccgtggagaagctggcggccaagctcagcgccaccctagaacaggctgcagcgactgcccgagtaaccttctccggcttgcgggacacagtcaccccgggcgagctgcttaaggcggagattattgaccaggacctctatgagcgtcttgagcacggtcaggctaccgccaaggatgtcggctcccttgcctccgtccagaggtacctgcaaggcaccggctgtatagctggactgcttctaccaggctcacaggaacggctgagtatctacgaggcaagatgcaaaggcttactcaggcccggtactgctctcatcctgcttgaggcccaggccgcaaccggtttcatcatagatccaaaagccaacaagggccactccgttgaggaggcattgagagcagctgtcatcggcccggacgtgttcgctaaactactgagcgctgagcgtgccgtgaccggttacacggatccatacactggccaacagattagtctgttccaggccatgcaaaagggccttatagttagagagcacgggatcagactcttggaggcgcagattgcaacgggcggagttatcgacccagttcatagccacagagtaccagtcgatgtcgcctatcgccgcggttattttgaccagatgttgaatttaattctgttggatccgtcggatgatacgaagggcttttttgacccaaatactcacgagaacctgacatacctgcagcttttggaacgctgcgtgcgagaccccgagacagggttgtaccttcttcccctgtcgtcaacccagagccccctggtcgactccgcaactcagcaggcattccagaacctcctactatccgtgaaatatggtcgatttcagggacagcgtgtcagcgcctgggaactgattaattccgagtatttcagtgagggacggaggagacagctgctcaggaggtatcgccagcgggaagttacacttggtcaggttgccaagctgctggaagccgagacacaacgtcaggccgacattatgcttcccgccttgcgcagtcgggttaccgtacatcaactgctcgaggcggggatcatagaccagcagttgctggatcaggtgcttgccgggaccatttcccccgaagcactgttgcttatggacggagttaggcggtatctttgtggcctaggtgcggtcggaggagtccggctcttacctagcgggcagagactgtcactctaccaggccatgagacagaagctgcttgggccccgcgttgccctggctctacttgaggcccaggctgccactggcactatcatggacccgcattccccagaatcgctgtccgtcgatgaagccgttcgccggggggtcgtaggacctgagttatacggcagactcaaaagggcggagggtgctattgccggctttagggatccattttccgggaaacaggtgtccgtgtttcaggcgatgaaaaaggggctaattccgtgggagcaagcagcgagacttctggaggcccaggtggctaccggaggaatcattgacccaaccagccaccaccacctgcccatgcctgtggctattcagcggggctacgtggaccaggaaatggagactgcactgtcaagcagctccgagacttttccaacaccagacgggcagggcaggaccagctacgcccagttgttggaagagtgcccccgggatgagaccagcggcctgcaccttctcccgctgccagagtccgcccctgctcttcccacggaggagcaagtacagaggagtctccaggccgtgcctggcgctaaggacggtacgagcctgtgggaccttctatcaagctgtcattttactgaagagcagaggcggggtcttctggaagacgtccaagagggccgtactactgtgccccaactgttggcttcggtccagagatgggtgcaggaaaccaagttgctggcacaggcacgagtcatggttccaggcccaagaggagaggtgcccgccgtgtggctcttggacgccggcataataacgcaggagacgcttgaggccctggcccagggaacccagtcccccgcccaggtggccgagcagccagccgtcaaggcctgtctgtggggcacaggctgtgtcgctggcgtcctcctgcaaccgagtggggctaaggcctctatcgcacaagctgtacgcgatggcctgctgccaacgggactagggcagcgattgctagaggctcaggtagcctcaggcttcctagtggatccgctgaataaccagaggctctcagtggaggatgctgtgaaggtggggctggttgggagagagctgtctgaacagctgggccaggcagagcgcgccgccgcaggctatcccgacccttactctcgagccagcctgtcgttatggcaggccatggagaaggggctggtaccccagaatgaaggactgccccttctgcaggttcagctggcaaccggcggggtggtggatcccgtacacggtgtccatctgccacaggctgcagcctgtcgtttagggctcctcgacacgcagacctcacaggtgctaaccgccgtagacaaagacaacaagtttttctttgatccaagtgcacgggaccaagtcacatatcaacagttgcgggaacgttgtgtgtgtgactccgagaccggcctacttctgctgcccctcccctctgacacagtattagaagtggacgatcacactgccgtcgctctgcgggctatgaaagtgcccgtttccacaggtcgcttcaaaggctgctcagttagcttgtgggacctgctgcttagcgagtacgttggcgccgataagcgccgggagcttgtggccctctgccgtagtggccgtgccgcggccttgagacaggtggtgagcgcagtcaccactctggtggaagcggcagaacgccaacctctccaagcgacctttcgcggactgcggaagcaggtgtccgcacgagatctgtttcgggcccagctaattagccgcaaaactttggatgaattgtcccaggggacaacaactgtgaaagaagtcgcagaaatggactctgtgaagcgcagtcttgaggggggcaatttcatcgcgggcgtcctgattcagggcacacaggaacggatgagcattccagaggcgttgaggagacacattctgcggccagggaccgctttagttctgttggaagcccaggcagcaacaggcttcattatcgacccagtagaaaaccggaaactcaccgtagaagaagcctttaaggccggcatgttcgggaaagaaacgtatgttaagctgctatcggcggagcgcgccgtcacaggctacaccgatccttacacaggtcagcagattagcttatttcaggccatgcagaaagatctgatcgtgcgagagcacggcattcgactactcgaagctcaaattgccaccggcgggattatagatcctgtgcacagtcaccgcgtgccagtcgacgtggcctaccggtgcggctacttcgatgaagaaatgaatcggatcctcgccgacccaagcgatgacactaagggcttctttgatcctaatacacacgaaaacctgacatatctgcagctgttagagcgctgcgttgaagaccctgaaaccggcctttatctgctgcagatcatcaagaaaggggagaattatgtgtacatcaatgaggcaactcggcacgtgcttcaaagcagaaccgcaaaaatgcgcgtgggaaggtttgcggaccaggtggtttccttctgggatttattgtcttcaccttactttacggaagataggaaaagggagctgatccaggagtatggtgctcagagcggggggctcgaaaaactccttgagatcattactaccaccatcgaggaaacagagactcagaatcaaggtataaaggtggccgccatccggggagaggttactgcagccgatttgtttaattcacgagtcatcgaccagaagactctgcacacattgagagtcggacggacaggaggccaggcactgtccacgctcgaatgcgtgaagccctacctcgagggctctggctgtatcgccggcgtgaccgttccctctacgcgcgaggtcatgagcctgcacgaagccagccgcaaggagctgatcccagccgcattcgcaacatggcttctagaggctcaggcagcgaccgggttcctgttagatccatgcacccggcagaagctttccgtagatgaggctgtagacgtgggcctcgtgaatgaggagctgcgggagagactcttgaaagcggagcgtgctgcaacaggctacagagatccagccacgggagacacaatcccactctttcaggccatgcagaaacagcttattgaaaaagctgaggctctccgtctgctggaggtccaggtcgctactggtggggtaattgacccccagcatcaccataggctccctcttgagaccgcttacagacgtggctgcctgcataaagacatctacgctctaatttctgaccagaagcatatgcgtaagcgcttcgtggatccaaatacccaggagaaagtttcttatcgtgaactccaagaacggtgccgcccacaagaggacaccggttggctcctgttccccgtgaataaagctgctcgggactccgagcacatcgacgatgagacgaggcgtgcccttgaagctgagcaagttgaaataaccgtggggcggttccgcggccaaaagcctacactctgggccttactgaatagcgagtatgttactgaagagaaaaagctgcaattggtgcgcatgtatagaactcataccagaagggccttacagaccgtggcacagctcattctcgagcttatcgagaaacaggaaacctctaataagcacctttggtttcaaggtatcaggcgtcagattaccgcctcagaattactgtcttcagctatcatcaccgaagagatgttgcaggacctggaaaccggacgctcgaccactcaggaattgatggaggatgatagggtaaagcgatatcttgaaggaacctcttgcattgctggagtgctggtgcccgcaaaggatcagcctgggcggcaggaaaagatgagtatttaccaagctatgtggaagggggtcctccgaccaggcacagccctggtcctactggaggcgcaggccgccaccggttttgttatcgacccggttaggaacctgcgactgagcgtagaagaggcagtggcagctggcgtcgtaggtggggaaattcaagagaagcttctgtccgctgaacgggcagtcaccgggtacacagatccctacacaggtcagcagatctctctgttccaagccatgcagaaggatctgatcgtgcgcgaacacggcattcggctcctggaggctcaaattgctactggaggcgtgatcgatcctgtgcattctcaccgggtacccgtcgacgtcgcctacaggaggggttacttcgacgaggagatgaatcgagtcctggctgacccctctgatgataccaaaggtttctttgacccaaacacacacgaaaacctcacatacgtccaactcctaaggcgatgcgttcccgaccctgatacaggactgtacatgctgcagttggccggaagaggaagcgccgttcaccagctgtctgaagaattgagatgcgctctccgcgatgctagggtgacccctggcagtggggccctgcagggccagtccgtgtctgtctgggagctcctgttctatcgggaggtctctgaagatcgcaggcaggatttactgtcgagatacagagccggcaccctaacagtagaggaactcggggccactctcacttctcttcttgcccaggctcaggcacaagctcgcgccgaggccgaggcgggatcacctcgccctgaccctcgggaagccttgcgcgcggccacgatggaggttaaggtcgggcggcttaggggtcgcgctgtgcccgtgtgggacgtcttggcatcaggttacgtgagtcgcgcagcaagagaagagctccttgctgagtttggctctggcaccctcgacctgcccgctctcaccaggagactaactgcaatcatcgaagaggccgaggaagctccgggcgctcgcccccagctgcaggatgcatggagaggtccgcgtgagcccggccctgctggtaggggtgacggcgatagcgggcgatctcaacgagaaggtcagggggagggtgagacccaagaggccgctgccgccgccgccgcggctgccgcccgccggcaggagcagacccttagagatgcgaccatggaggttcagcgtggccagtttcaaggaagaccagtttcagtctgggatgttttattctcatcatacttgtcggaggcacgcagagatgagctgttggcacagcacgccgctggcgccctcggactgcccgatctagttgccgttcttactagggtgatcgaagagactgaagagcgactgagcaaagtcagctttagaggactgcggcgtcaggtgagcgcatctgagttgcataccagtggaattctggggcccgagactcttcgtgatctggctcagggaacaaagacccttcaggaggtaaccgagatggacagtgtaaagcggtatctagaagggaccagctgcattgccggcgtgcttgtgcccgcaaaagatcaaccgggccggcaggagaagatgtctatttatcaggcaatgtggaagggagtactcaggcccggcacagcacttgtactgctcgaggcccaggctgccaccggattcgtcatcgaccccgtcagaaacttacgcctgtccgtggaggaagccgtcgcggccggagttgtaggcggcgagatacaggagaaactgttgtcagctgagcgagccgtgaccggctacaccgatccatacacgggccaacagataagcttgtttcaggccatgcaaaaagacctgatcgtccgagagcacggcatacgcttgctggaggcacagatcgccacaggcggcgttatagaccccgtgcattcacatagggtacctgtggatgtagcctatcaacgaggctacttcgacgaggagatgaaccgggtgcttgccgacccctctgatgacactaaggggttcttcgacccgaacacccacgagaatttaacatacgtgcagctgctgagacgctgcgttccggacccggataccggcctgtatatgctgcagctcgctggccggggctcagccgtgcatcagctgagcgaggaactgcggtgtgcgctacgcgatgcccgcgtgacgcccggctccggagctttacaagggcagtccgtgagtgtgtgggaattactattctatagagaggtgtctgaggacagaaggcaggatctcctctcgagatatcgtgccgggactctaaccgtggaggagctgggagcgaccctgaccagcctgctggcccaagcacaggctcaggcccgtgccgaagcagaagctggaagtcctaggccggatccgcgggaggccctgcgcgccgctactatggaggtgaaagttggtcggctcaggggcagagccgtgcctgtatgggatgttctagccagcggctatgttagtcgcgctgcacgcgaggaactcctggccgagtttggtagcggcacgcttgacctccctgcattgacgagacgactgacagctatcatcgaagaggccgaggaagcgccgggcgccaggcctcagttgcaggacgcctggaggggaccccgagaacctggaccggctgggagaggggatggggattccggtcggagccagcgcgagggtcagggcgagggcgaaactcaagaggcggccgctgccgctcgacgtcaagaacaaaccctccgcgacgctactatggaggtgcaaagaggtcagttccagggtagaccagtgtctgtgtgggatgttctctttagctcatacttatctgaagcaaggcgggacgagctgctggctcagcatgctgcaggtgccctgggtttgcctgacttggttgccgttttgacccgagtcattgaggagactgaggagagactctctaaggtgtccttccggggcctgaggtgtcaagtgtctgcttcagagctccatacgagcggaattctcggtcctgagacccttagggaccttgcccaagggacaaagactctgcaggaggtcactgaaatggattctgtgaaacgatatcttgaaggcacctcctgcatcgcaggggttctggttcctgctaaagaccagccgggtagacaggagaagatgtccatttaccaggccatgtggaagggagtgctccgacctggcactgcactggttctgctggaggcacaggctgcgacaggctttgtcatcgatcccgttcgcaatctcagactgtctgtcgaggaggccgtcgctgctggggtggtggggggggagattcaggagaaactcctttcagcggagagagcagtcacaggttatacagatccctacaccggacaacagattagcctcttccaagccatgcagaaggacttaatcgtgcgcgagcacgggatcagactcttggaggctcagatcgctacaggtggcgtgattgatccagtgcatagccatcgcgtgccggtggatgtggcgtacaggcgaggatactttgatgaggaaatgaacagagtattggctgatccgtccgatgataccaaaggcttctttgacccaaatactcacgagaatctcacctatgtgcagctgctgagacgctgtgtgccagacccagacaccgggctgtacatgcttcaattggccggaaggggttccgctgtgcaccagcttagcgaggaactgaggtgtgccctgcgcgacgctcgcgttactcccggatctggagccttgcagggtcagtcagtcagcgtctgggagttgctcttttatagagaagtctctgaagatcgacgccaggatcttctgagccggtacagggcagggaccttaaccgtggaggaactgggagctacactgacaagccttctggcacaggcgcaggcccaagcacgggctgaggctgaggctggcagccccaggcccgatccacgtgaggcccttcgtgcagctactatggaagtgaaagttggtaggctgagaggaagagcagtgcccgtgtgggacgtgctcgcaagtggctatgtgagtagagccgccagagaagagctattggctgaatttgggtctggaaccctggatcttcccgctctgacccgccgacttactgccattatagaagaagccgaagaagccccgggcgccaggccgcaactccaggacgcttggcgtgggcctcgcgagcctggcccagccggccggggggacggtgactctggaaggtcgcaaagggagggacagggcgagggggagacccaggaggctgccgcagccacagctgccgcacgcagacaggaacagactctccgtgacgccacaatggaagtgcagcgaggtcaatttcaggggagaccggtgtcggtctgggacgtacttttttcctcgtacctctcagaagccagaagagatgaacttctcgcccaacatgccgcaggtgcgttgggcttgcccgatcttgtcgcagtgctgacacgcgttatagaggagacggaagaacggcttagcaaggtgagtttcagaggcttacggcggcaagtgtccgcctcagaactacatacttccggcatactaggccctgagaccctgagggatttggcacagggcactaagaccttgcaggaagtgacagagatggactctgtgaagaggtatcttgaggggacctcgtgcattgccggagtgctcgtgcccgctaaggaccagccaggtcgacaagaaaaaatgtcaatctatcaggccatgtggaagggagttttaagaccgggtaccgctttggtcctgcttgaggcccaggccgccactggctttgttatagaccccgtgaggaatctgcgcctgtccgtggaagaggcagtggccgcgggagtcgtcggtggcgaaatccaggaaaagctattgtctgccgagcgtgccgtgacagggtacaccgatccatacacagggcagcagatctccctgttccaggctatgcagaaggacctgattgttcgcgagcatggcatccgactattggaggctcaaattgctaccggcggggtcatagacccggtccattcccatagggtgcccgttgacgttgcgtaccggcgcgggtacttcgacgaggaaatgaatagggtactggccgatccctctgacgatacgaaggggttcttcgaccccaatactcatgaaaatctgacgtatgtccagcttctgcggagatgtgtgccagaccctgatacgggtttatacatgctacagttggcaggtcggggcagcgcagtgcaccagctctccgaggaactacgctgcgctctgagagatgcaagggtaacccctggaagcggggccctacagggacagtcagtgtccgtgtgggaactcttgttctatagagaagtgagcgaggacaggaggcaggacctgctctccaggtaccgtgcaggcaccctcacggtggaagagctgggagcaacactgaccagcctgctggcgcaagcccaagcgcaagcacgtgctgaggccgaagctggctcaccgagacctgatccaagagaagccttgagggcagcgaccatggaggtgaaagtgggccggctcagaggacgcgctgtgccagtctgggacgttctcgcctctggctacgtttctcgggccgccagggaagagctgctggcagagtttggctctggaactcttgatctgccagctctcactaggagacttaccgcaataatagaagaagccgaggaggccccaggagcaagacctcagctgcaggatgcatggcgcggccctcgcgaacctggtcctgctggccgcggagatggggacagcggccgatcccagagagagggccagggggaaggagaaacccaggaagccgctgccgctacggctgcggcccgaaggcaggaacagacactgagagacgctactatggaggtacaaagggggcagttccagggaagaccggtgtccgtgtgggatgtactattttcaagttatctgtctgaggccagacgagacgaattgctcgcccagcacgccgcgggcgctttggggcttccggacctggtcgcggtactgactcgcgttattgaggagaccgaggagcggctgtccaaggtgtcttttcggggtttgcgccgccaagtctctgcaagtgagctgcacacttctggtattctaggacctgaaaccctgagagacttggcccaagggacaaaaacgttacaggaagtcaccgaaatggattctgtgaaacggtatcttgaggggaccagctgcattgcgggcgtgctggtccccgctaaagaccagccagggcatcaagaaaagatgtcaatataccaggcaatgtggaaaggtgtgcttcgccctggaactgctctcgtgctgcttgaagcccaggccgcaaccggattcgtaatcgacccagtgaggaatctaagactgtccgtcgaagaagctgttgcggctggggtggtggggggggagattcaggagaaactgctttccgcagaaagagcggtaaccgggtacaccgacccttacaccgggcagcagatatccctgttccaggccatgcagaaggatctgattgtgagggagcatgggatccgactgctcgaggctcagatcgcgaccggtggcgtcatcgaccctgtgcattcccaccgagtgcccgtggacgtagcctaccggcgggggtactttgatgaggagatgaatcgagtgttggcacatccttctgacgatacaaaggggtttttcgaccccaatacccacgagaacctcacctatgtgcagcttcttcgtaggtgtgtgcccgaccccgatactggtctgtatatgttgcagctggcaggtcggggctccgctgttcatcagttgagtgaagagctgagatgtgctctgagggatgctcgggtgatgcctgggtccggggccttacaggggcagagcgtctctgtgtgggagctgcttttctaccgagaagtgtctgaggaccggagacaagatctgttgagccgctatcgtgccggtaccttgacggtggaagaactcggtgcaactttgacaagcttattagctcaggcccaggcacaggcccgcgctgaggcggaggcagaggccggatcccctaggcccgatcccagagaggcactccgggccgccacaatggaggtgaaggtaggcaggctgagagggcgtgctgttcctgtgtgggacgtcctggcttccggatatgtctccggggccgcacgcgaggaactgctggcagagttcggttccggcactctcgatctgccagccctgacgcgccggctgactgccatcatagaagaagctgaggaagcccctggtgcaaggcctcagctgcaggatgcctggcgcgggccccgcgagccaggacccgccggtcgcggtgatggcgacagcggaagatcccagagggaggggcagggtgagggcgagacccaagaagcagccgctgccgcccgccgacaggaacaaaccttaagagacgctaccatggaggtccaaagaggacagttccaaggcaggccagtgtcagtctgggacgtgttattctccagttatttaagtgaggcccatcgggacgaattactggcacagcacgcagctggcgccctaggcctacccgatctagtcgcagttttgactcgggtgatcgaagagaccgaggagagactcagtaaggtaagcttccggggccttcgcaggcaggtcagtgcgtccgagcttcatacttcagggatactagggccagagacccttagggatttggctcaaggcacaaagacattgcaggaagtcaccgagatggattccgttaaacgatatctggagggcacttcatgtatagctggtgtgttagtacccgccaaagaccaacctggaaggcaagaaaagatgtctatttaccaggcaatgtggaagggggtcctccggcctgggaccgcgttggttctgctagaggcacaggccgccacaggcttcgtgattgaccccgtacgcaatctgcggctgtcagtggaggaggcggtggcagcaggcgttgtcggcggcgagatccaggaaaagctcttgtcggccgagcgggctgttaccggctacacggatccatacactgggcagcagatcagtctgttccaggcaatgcagaaggacctgatcgtgcgcgaacacggcatcagactgctcgaagctcagattgccacgggaggcgtgatcgaccccgtgcacagccatcgcgtgccagtagatgttgcctaccgacggggatactttgacgaggaaatgaatcgcgtgctcgcggacccttccgatgacacaaaaggcttttttgatcctaatacacacgagaatttaacttatttgcagctccttcagagagctactctcgaccctgagacgggcctactctttttgtccttgtctttgcagtag

SEQ ID NO: 308468 - DNA, 7997 bp, Artificial Sequence
  derived and/or modified sequence
actgcggaccgagcggcgagcgggcaggacagaggtggacctcagcaggctctgcataaccagccgtgtgtgatgagtggccacaccttgcctcctcttcccgtcccaggcaccaacagcacagagcaggccagtgtacccagagccatggcagccacgctgggagccggcacgccccccaggccccaggccaggagcatagctggggtgtatgtggaggcctcgggccaggcccagagtgtctacgccgccatggagcagggcctcctgcctgctgggctcgggcaggctctgctagaggcccaggcagccactgggggcctggtggacctcgcccggggccagctgctccctgtgtccaaggccctgcagcagggtctggtggggctggagctgaaggagaagctgctggccgctgagcgtgccactacgggctatcctgacccctacggcggtgagaagctggccctctttcaggccatcgggaaggaggttgtggacagggccctggggcagagctggctggaggtccaactggccactgggggcctggtggaccccgcccagggagtgctcgtggcccctgagccagcctgccaccagggcctcctggaccgggagacatggcacaagctgtcagagcttgagcctggcacaggtgacctgcgcttcctcgaccccaacacgctggagcggctgacataccaccagctgctggaaaggtgtgtgcgtgcccccggctcggggctagccttgctgcccctcaagatcaccttccgctccatgggcggggcggtgagtgcagctgagctgctggaggtgggcatcctggacgagcaggctgtgcagggtctgcgggagggcaggctggccgcagtggacgtgagtgcacgtgccgaggtgcggcgctacctggagggtaccggcagcgtggccggggttgtcctgctgcccgaaggccacaagaagagctttttccaggctgccaccgagcacctgctcccaatgggcaccgcgctgccactcctagaggcccaggctgccacccacaccctggtggaccccatcacaggccagcggctgtgggtagacgaggcagtcagggcgggcctggtcagcccagagctccatgagcagctcctggtggccgagcaggccgtgacagggcaccacgaccccttcagtggctcccaaatcccccttttccaggccatgaagaaggggctagtggacaggccactggcactgcggctcttggatgcccagctggccacaggcgggctggtctgtccagcacgcaggctccggctgcccctggaggccgccctgcgctgcggctgcctggatgaagacactcagcggcagctctcgcaggctggcagcttctcagacggcacgcacggcggcctgcgctatgaacagctgctggccctctgtgtcaccgacccagagaccgggcttgccttcctgccactctcagggggaccccggggaggggagccccagggacccccattcatcaagtacagcactcggcaggccctgagcacggccacagccaccgtctctgtggggaagttccggggccggcccgtgtccctctgggagctgctcttctctgaggccatctcctcagagcagagggcgatgctggcccagcagtaccaggaagggaccctctccgtggagaagctggccgctaagctgagcgccaccctcgagcaggctgcagccactgccagggtcaccttttctgggctgagggacaccgtgacaccaggagagctgctgaaagccgagatcatcgaccaggacctgtacgagcggctggagcatggacaggccacagccaaggatgtgggcagcctggcctcggtgcagaggtacctgcagggtacgggctgcattgctggcctgctgctccctggctcccaggaacgcctgagcatctatgaggcccgatgcaaggggctcctccggcccggcactgccctcatccttctggaggcacaagctgccacaggcttcatcatcgacccaaaagcaaacaaggggcactccgttgaggaggcactgagggctgctgtcattgggcctgatgtgttcgcgaagctgctgtcggctgagcgcgctgtcactggctacactgacccctacaccgggcagcagatctccctcttccaggccatgcagaagggcctcatcgtccgggagcacggcatccgcctgctggaggcccagatcgccacgggcggcgtcatcgaccccgtgcacagccaccgcgtgcccgtggacgtggcctaccggcgcggctacttcgatcagatgctgaacttgatcctgttggacccttctgacgacaccaagggcttcttcgaccccaacacgcacgagaacctcacgtacctgcagcttctggagcgctgtgtgcgtgaccccgagacgggcctgtacctcctgccactcagcagcacgcagtccccgctggtggacagtgccacccagcaggccttccagaacctgctgctctccgtgaagtatggacggtttcaggggcagagggtctccgcgtgggagctgatcaactctgagtacttcagcgagggccgcaggaggcagctgctgcgtcgctaccggcagcgcgaggtcacgctggggcaggtggcaaagctgctggaggcggagacgcagagacaggcggacatcatgctgcccgcactgcggagccgggtcaccgtccaccagctcctggaggccggtatcattgaccagcagctgttggaccaagtgctggccgggacaatcagcccggaggccctcctactcatggacggcgtccgcaggtacctgtgcggcctgggagctgtgggcggtgtgcggctgctgccctctggccagcggctcagcctctaccaggccatgaggcagaagctgctggggcccagggtggccctggccctgctggaggcccaggcggccaccggaaccatcatggaccctcacagcccagagagcctctcggtggatgaggccgtgcgcaggggtgtggtggggccggagctgtatggcaggctgaagcgggctgagggtgccattgctggcttcagagaccccttctctgggaagcaggtgtctgtgttccaggccatgaagaaaggtctcatcccttgggagcaagctgcccgcctcctggaggctcaagtggccacaggagggatcattgaccccaccagccaccaccacctccccatgccagtggccattcagcgtggctatgttgaccaggagatggagacagccttgtccagctcctccgaaaccttccccacaccggacggccaggggcgcacgagctatgcccagctcctggaggagtgccccagggatgagacttctggccttcacctcctgcccctgccagaaagtgctcctgccctccccaccgaggagcaggtccagaggagcctgcaggccgtgccgggggccaaggatggcacatccctctgggacctgctcagctcctgccacttcaccgaggagcaacggaggggcctgctggaggacgtgcaggaggggaggaccactgtgccacagctgctagcctctgtgcagaggtgggtacaggagaccaagctcctggcccaggcccgcgtcatggtgcccggcccacggggtgaggtacccgctgtctggctgctggatgctggcatcatcacccaggagacccttgaggccctggctcagggcacgcagtcgcccgcccaggtcgccgagcagccggcggtgaaggcctgcctgtggggcacaggctgcgtggccggtgtgctgctacagccctctggggccaaggccagcatcgcccaggccgtgagggatggcctcctgcccacaggcctgggccagaggctgctggaagcccaggtggcatctggcttccttgttgaccccctgaacaaccagagactgtcagtggaggacgcggttaaggtcggcctggtgggcagggagctgagtgagcagctcgggcaggccgagagggcggcggccgggtacccagatccctactctagggcctccctctctctgtggcaggccatggagaaggggctcgtgccacagaacgagggcttgcccctcctgcaggtgcagctggccacagggggtgtggtggaccctgtccacggggtgcacctgccccaggcggcagcctgcagactcggccttctggacacacagacgagccaggtgctgactgcagttgacaaggacaacaagttcttctttgaccccagtgcgcgggaccaggtgacctaccagcagctcagggagcgctgcgtgtgcgactccgagaccggattgttgctgttgccactgccctcagacacagtgcttgaggtggacgaccacaccgcggtggctctgagggccatgaaggtgcccgtcagcacagggaggtttaaggggtgtagcgtgtcactctgggacctgctgctctccgaatacgttggcgctgacaagcggcgggagctggtggcactctgtcggtctgggagggctgcggccctgcggcaggtggtcagcgcagtcaccaccctggtcgaggctgcagagaggcagcccctgcaggccaccttcagagggctccggaagcaggtgtcagccagggacctgttcagggcgcagctgatcagcaggaagacgctggacgagctgagccaggggacaacgactgtgaaggaggtggcggagatggacagcgtgaagcggtccctggagggaggcaacttcattgccggggtccttatccagggcacccaggagaggatgagcatcccagaggccctgaggaggcacatcctgcggcctggcacagccctggtgctgctggaggcacaggcagctaccggcttcatcatcgaccccgtggagaaccggaagctgaccgtggaggaggcgttcaaagcaggaatgttcgggaaagaaacctacgtgaagctgctgtcggccgagcgcgccgtcaccggctacaccgacccctataccgggcagcagatctccctcttccaggccatgcagaaggacctcatcgtccgggagcacggcatccgcctgctggaggcccagatcgccacgggcggcatcatcgaccccgtgcacagccaccgcgtgcccgtggacgtggcctaccgctgcggctacttcgacgaggagatgaaccgcatcctggcggaccccagcgacgacaccaagggcttcttcgaccccaacacgcacgagaacctcacgtacctgcagcttctggagcgctgtgtggaggaccccgagacgggcctgtacctgctacaaatcataaagaaaggagaaaactacgtgtacatcaatgaggccacgagacacgtgttgcaatccagaactgcaaaaatgcgcgtggggaggtttgctgaccaggtggtctctttctgggacctgctgtcctctccatacttcacagaggacaggaagcgggagctcatccaggagtatggagcccagagtgggggcctggagaaattgctggaaatcatcaccacgacaattgaagaaacagagacgcaaaaccaaggcatcaaagtggcggccatcagaggggaggtgacagctgcagacctgttcaactccagggtcatcgatcagaagaccctgcacacacttcgtgtggggaggactgggggacaggcactcagcacgctggagtgtgtgaagccctatctggaaggcagcggctgcattgcgggggtcacggtgccctccaccagggaggtcatgagcctccatgaggccagcaggaaggagctcatccctgcagcatttgcgacttggctgctggaggcgcaggccgccaccgggttcctcctggacccctgcacccgccagaagctctctgtggatgaggctgtggatgtgggcctggtgaacgaggagctgcgggagaggctcctgaaggctgaaagagctgccacgggctacagggatccggccacaggagacacgatcccgctgttccaggccatgcagaagcagctcatcgagaaggcggaggcactgaggctgctggaggtgcaggtggccacggggggtgtcatcgacccacagcaccaccaccggctcccactggaaacagcctacagacggggctgtctgcacaaggacatctatgcgctcatttccgaccagaagcacatgaggaaacggtttgtggacccgaacacgcaagagaaggtctcgtaccgagagctgcaggagaggtgccgcccacaagaggacacgggctggctgctgttcccagtgaacaaggctgcacgggactccgagcacatcgatgacgagacgagaagggccctggaggcagagcaagtggaaatcacagtgggaaggttcagaggccagaaaccaacactgtgggcactactgaattccgaatacgtgacagaggagaagaagctccagctggtgaggatgtatagaacacacaccagacgggcactgcagacggtagcgcagctcatcttagagttgatcgagaagcaggaaaccagcaacaaacacctgtggttccaaggaattagacgacagatcacagcttctgaactcctcagctcagccataatcacggaggaaatgctccaggacctggaaacgggacggagcacgacgcaagagctcatggaggacgaccgcgtcaagcgctacctggagggcaccagctgcatcgcgggcgtcctggtgcccgccaaggaccagcccggccgccaggagaagatgagcatctaccaggccatgtggaagggcgtgctgcggcccggcacggccctggtgctgctggaggcgcaggcggccaccggcttcgtcatcgaccccgtgcgcaacctgaggctgtcggtggaggaggccgtggccgcgggcgtggtgggcggcgagatccaggagaagctgctgtcggccgagcgcgccgtcaccggctacaccgacccctacaccgggcagcagatctccctcttccaggccatgcagaaggacctcatcgtccgggagcacggcatccgcctgctggaggcccagatcgccacgggcggcgtcatcgaccccgtgcacagccaccgcgtgcccgtggacgtggcctaccggcgcggctacttcgacgaggagatgaaccgcgtcctggccgaccccagcgacgacaccaagggcttcttcgaccccaacacgcacgagaacctcacgtacctgcagcttctgcagagggccaccctggaccctgagacggggctcctatttctttctctctctctacagtgactgggcttcctccgtgcagttttctgcaactctggagaagtggaggcatacttgtgtgtctgggttgttttttttttgtttttttttttgtcattctttaattttgttgttttacccattcgttatctgtggaaaacgttttaagttgtcatgtgacagaaacttttcctttgtccatcgaggtgtttcataagttttttggtgtgttttctgggtcgtctatgtgtcatatggttttacttttctctcctttttcgttttcagaacatttttctgtctgttttggattcactgcttccattttacagaatgtcactctttagactctcagtccatcatgccatcgggtactcttgttgcagtgtaatttttattacatgcggttatttccctaacgatgtgctattcacgttcatcttcaaactcattttccatcagccagtgtctactatttagtgccctggctctatttcggtcctcctccccgggctttccctggctgctgtgctggccaaaagcatgggctttattctctccattggctgctgctccaccttagaggtgtgacctcactagcgttgactgagcgagtctgttgtggagaagaactttttgtagtaatttactaggaaaaattctgaacaagtaaaatatgaaggaaa

SEQ ID NO: 308469 - DNA, 15267 bp, Artificial Sequence
  derived and/or modified sequence
atgagtggccacaccttgcctcctcttcccgtcccaggcaccaacagcacagagcaggccagtgtacccagagccatggcagccacgctgggagccggcacgccccccaggccccaggccaggagcatagctggggtgtatgtggaggcctcgggccaggcccagagtgtctacgccgccatggagcagggcctcctgcctgctgggctcgggcaggctctgctagaggcccaggcagccactgggggcctggtggacctcgcccggggccagctgctccctgtgtccaaggccctgcagcagggtctggtggggctggagctgaaggagaagctgctggccgctgagcgtgccactacgggctatcctgacccctacggcggtgagaagctggccctctttcaggccatcgggaaggaggttgtggacagggccctggggcagagctggctggaggtccaactggccactgggggcctggtggaccccgcccagggagtgctcgtggcccctgagccagcctgccaccagggcctcctggaccgggagacatggcacaagctgtcagagcttgagcctggcacaggtgacctgcgcttcctcgaccccaacacgctggagcggctgacataccaccagctgctggaaaggtgtgtgcgtgcccccggctcggggctagccttgctgcccctcaagatcaccttccgctccatgggcggggcggtgagtgcagctgagctgctggaggtgggcatcctggacgagcaggctgtgcagggtctgcgggagggcaggctggccgcagtggacgtgagtgcacgtgccgaggtgcggcgctacctggagggtaccggcagcgtggccggggttgtcctgctgcccgaaggccacaagaagagctttttccaggctgccaccgagcacctgctcccaatgggcaccgcgctgccactcctagaggcccaggctgccacccacaccctggtggaccccatcacaggccagcggctgtgggtagacgaggcagtcagggcgggcctggtcagcccagagctccatgagcagctcctggtggccgagcaggccgtgacagggcaccacgaccccttcagtggctcccaaatcccccttttccaggccatgaagaaggggctagtggacaggccactggcactgcggctcttggatgcccagctggccacaggcgggctggtctgtccagcacgcaggctccggctgcccctggaggccgccctgcgctgcggctgcctggatgaagacactcagcggcagctctcgcaggctggcagcttctcagacggcacgcacggcggcctgcgctatgaacagctgctggccctctgtgtcaccgacccagagaccgggcttgccttcctgccactctcagggggaccccggggaggggagccccagggacccccattcatcaagtacagcactcggcaggccctgagcacggccacagccaccgtctctgtggggaagttccggggccggcccgtgtccctctgggagctgctcttctctgaggccatctcctcagagcagagggcgatgctggcccagcagtaccaggaagggaccctctccgtggagaagctggccgctaagctgagcgccaccctcgagcaggctgcagccactgccagggtcaccttttctgggctgagggacaccgtgacaccaggagagctgctgaaagccgagatcatcgaccaggacctgtacgagcggctggagcatggacaggccacagccaaggatgtgggcagcctggcctcggtgcagaggtacctgcagggtacgggctgcattgctggcctgctgctccctggctcccaggaacgcctgagcatctatgaggcccgatgcaaggggctcctccggcccggcactgccctcatccttctggaggcacaagctgccacaggcttcatcatcgacccaaaagcaaacaaggggcactccgttgaggaggcactgagggctgctgtcattgggcctgatgtgttcgcgaagctgctgtcggctgagcgcgctgtcactggctacactgacccctacaccgggcagcagatctccctcttccaggccatgcagaagggcctcatcgtccgggagcacggcatccgcctgctggaggcccagatcgccacgggcggcgtcatcgaccccgtgcacagccaccgcgtgcccgtggacgtggcctaccggcgcggctacttcgatcagatgctgaacttgatcctgttggacccttctgacgacaccaagggcttcttcgaccccaacacgcacgagaacctcacgtacctgcagcttctggagcgctgtgtgcgtgaccccgagacgggcctgtacctcctgccactcagcagcacgcagtccccgctggtggacagtgccacccagcaggccttccagaacctgctgctctccgtgaagtatggacggtttcaggggcagagggtctccgcgtgggagctgatcaactctgagtacttcagcgagggccgcaggaggcagctgctgcgtcgctaccggcagcgcgaggtcacgctggggcaggtggcaaagctgctggaggcggagacgcagagacaggcggacatcatgctgcccgcactgcggagccgggtcaccgtccaccagctcctggaggccggtatcattgaccagcagctgttggaccaagtgctggccgggacaatcagcccggaggccctcctactcatggacggcgtccgcaggtacctgtgcggcctgggagctgtgggcggtgtgcggctgctgccctctggccagcggctcagcctctaccaggccatgaggcagaagctgctggggcccagggtggccctggccctgctggaggcccaggcggccaccggaaccatcatggaccctcacagcccagagagcctctcggtggatgaggccgtgcgcaggggtgtggtggggccggagctgtatggcaggctgaagcgggctgagggtgccattgctggcttcagagaccccttctctgggaagcaggtgtctgtgttccaggccatgaagaaaggtctcatcccttgggagcaagctgcccgcctcctggaggctcaagtggccacaggagggatcattgaccccaccagccaccaccacctccccatgccagtggccattcagcgtggctatgttgaccaggagatggagacagccttgtccagctcctccgaaaccttccccacaccggacggccaggggcgcacgagctatgcccagctcctggaggagtgccccagggatgagacttctggccttcacctcctgcccctgccagaaagtgctcctgccctccccaccgaggagcaggtccagaggagcctgcaggccgtgccgggggccaaggatggcacatccctctgggacctgctcagctcctgccacttcaccgaggagcaacggaggggcctgctggaggacgtgcaggaggggaggaccactgtgccacagctgctagcctctgtgcagaggtgggtacaggagaccaagctcctggcccaggcccgcgtcatggtgcccggcccacggggtgaggtacccgctgtctggctgctggatgctggcatcatcacccaggagacccttgaggccctggctcagggcacgcagtcgcccgcccaggtcgccgagcagccggcggtgaaggcctgcctgtggggcacaggctgcgtggccggtgtgctgctacagccctctggggccaaggccagcatcgcccaggccgtgagggatggcctcctgcccacaggcctgggccagaggctgctggaagcccaggtggcatctggcttccttgttgaccccctgaacaaccagagactgtcagtggaggacgcggttaaggtcggcctggtgggcagggagctgagtgagcagctcgggcaggccgagagggcggcggccgggtacccagatccctactctagggcctccctctctctgtggcaggccatggagaaggggctcgtgccacagaacgagggcttgcccctcctgcaggtgcagctggccacagggggtgtggtggaccctgtccacggggtgcacctgccccaggcggcagcctgcagactcggccttctggacacacagacgagccaggtgctgactgcagttgacaaggacaacaagttcttctttgaccccagtgcgcgggaccaggtgacctaccagcagctcagggagcgctgcgtgtgcgactccgagaccggattgttgctgttgccactgccctcagacacagtgcttgaggtggacgaccacaccgcggtggctctgagggccatgaaggtgcccgtcagcacagggaggtttaaggggtgtagcgtgtcactctgggacctgctgctctccgaatacgttggcgctgacaagcggcgggagctggtggcactctgtcggtctgggagggctgcggccctgcggcaggtggtcagcgcagtcaccaccctggtcgaggctgcagagaggcagcccctgcaggccaccttcagagggctccggaagcaggtgtcagccagggacctgttcagggcgcagctgatcagcaggaagacgctggacgagctgagccaggggacaacgactgtgaaggaggtggcggagatggacagcgtgaagcggtccctggagggaggcaacttcattgccggggtccttatccagggcacccaggagaggatgagcatcccagaggccctgaggaggcacatcctgcggcctggcacagccctggtgctgctggaggcacaggcagctaccggcttcatcatcgaccccgtggagaaccggaagctgaccgtggaggaggcgttcaaagcaggaatgttcgggaaagaaacctacgtgaagctgctgtcggccgagcgcgccgtcaccggctacaccgacccctataccgggcagcagatctccctcttccaggccatgcagaaggacctcatcgtccgggagcacggcatccgcctgctggaggcccagatcgccacgggcggcatcatcgaccccgtgcacagccaccgcgtgcccgtggacgtggcctaccgctgcggctacttcgacgaggagatgaaccgcatcctggcggaccccagcgacgacaccaagggcttcttcgaccccaacacgcacgagaacctcacgtacctgcagcttctggagcgctgtgtggaggaccccgagacgggcctgtacctgctacaaatcataaagaaaggagaaaactacgtgtacatcaatgaggccacgagacacgtgttgcaatccagaactgcaaaaatgcgcgtggggaggtttgctgaccaggtggtctctttctgggacctgctgtcctctccatacttcacagaggacaggaagcgggagctcatccaggagtatggagcccagagtgggggcctggagaaattgctggaaatcatcaccacgacaattgaagaaacagagacgcaaaaccaaggcatcaaagtggcggccatcagaggggaggtgacagctgcagacctgttcaactccagggtcatcgatcagaagaccctgcacacacttcgtgtggggaggactgggggacaggcactcagcacgctggagtgtgtgaagccctatctggaaggcagcggctgcattgcgggggtcacggtgccctccaccagggaggtcatgagcctccatgaggccagcaggaaggagctcatccctgcagcatttgcgacttggctgctggaggcgcaggccgccaccgggttcctcctggacccctgcacccgccagaagctctctgtggatgaggctgtggatgtgggcctggtgaacgaggagctgcgggagaggctcctgaaggctgaaagagctgccacgggctacagggatccggccacaggagacacgatcccgctgttccaggccatgcagaagcagctcatcgagaaggcggaggcactgaggctgctggaggtgcaggtggccacggggggtgtcatcgacccacagcaccaccaccggctcccactggaaacagcctacagacggggctgtctgcacaaggacatctatgcgctcatttccgaccagaagcacatgaggaaacggtttgtggacccgaacacgcaagagaaggtctcgtaccgagagctgcaggagaggtgccgcccacaagaggacacgggctggctgctgttcccagtgaacaaggctgcacgggactccgagcacatcgatgacgagacgagaagggccctggaggcagagcaagtggaaatcacagtgggaaggttcagaggccagaaaccaacactgtgggcactactgaattccgaatacgtgacagaggagaagaagctccagctggtgaggatgtatagaacacacaccagacgggcactgcagacggtagcgcagctcatcttagagttgatcgagaagcaggaaaccagcaacaaacacctgtggttccaaggaattagacgacagatcacagcttctgaactcctcagctcagccataatcacggaggaaatgctccaggacctggaaacgggacggagcacgacgcaagagctcatggaggacgaccgcgtcaagcgctacctggagggcaccagctgcatcgcgggcgtcctggtgcccgccaaggaccagcccggccgccaggagaagatgagcatctaccaggccatgtggaagggcgtgctgcggcccggcacggccctggtgctgctggaggcgcaggcggccaccggcttcgtcatcgaccccgtgcgcaacctgaggctgtcggtggaggaggccgtggccgcgggcgtggtgggcggcgagatccaggagaagctgctgtcggccgagcgcgccgtcaccggctacaccgacccctacaccgggcagcagatctccctcttccaggccatgcagaaggacctcatcgtccgggagcacggcatccgcctgctggaggcccagatcgccacgggcggcgtcatcgaccccgtgcacagccaccgcgtgcccgtggacgtggcctaccggcgcggctacttcgacgaggagatgaaccgtgtcctggccgaccccagcgacgacaccaagggcttcttcgaccccaacacgcacgagaacctcacgtacgtgcagctgctgcgccgctgcgtgcccgacccggacaccgggctctacatgctgcagctggcaggccggggctccgccgtgcaccagctgagcgaggagctgcgctgtgccctgcgcgacgcccgcgtgacgccaggctcgggcgccctccagggccagagcgtctccgtctgggagctcctcttctaccgcgaggtgtccgaggaccggcgccaggacctgctgagcagataccgggcgggcacgctgaccgtggaggagctgggcgccaccctcacctcgctgctggcccaggcccaggcccaggcccgggccgaggccgaggccgggagcccgcgcccagacccccgggaggccctgcgtgcggccaccatggaggtcaaggtgggccgcctccgggggcgcgcggtgcccgtgtgggacgtgctggcgtccggctacgtgagcagggccgcccgggaggagctgctggccgagtttggctcggggaccctggacttgcccgcgctgacccgccggctgaccgccatcatcgaggaggccgaggaggcccccggggcccggccgcagctccaggacgcctggcgcggcccgcgggagccagggccagccgggcgaggggacggcgactcggggcgctcccagcgagagggccagggggagggcgagacccaggaggccgccgccgccgccgccgccgccgccgcccgccgccaggagcagaccctgcgtgatgccaccatggaggtgcagcgcgggcagttccaggggcggccggtctccgtgtgggacgtcctcttctcctcgtacctgagcgaggcccgccgagacgagctcctggcccagcacgcggccggcgccctgggcctgcccgacctcgtcgccgtcctcacccgggtcatcgaggagaccgaggagcggctcagcaaggtgtccttccgcggcctgaggcgccaggtgtccgcctccgagctgcacacgtccgggatcctgggccccgagaccctgcgggacctggcccagggcactaagacgctgcaggaggtgacggagatggactcggtcaagcgctacctggagggcaccagctgcatcgcgggcgtcctggtgcccgccaaggaccagcccggccgccaggagaagatgagcatctaccaggccatgtggaagggcgtgctgcggcccggcacggccctggtgctgctggaggcgcaggcggccaccggcttcgtcatcgaccccgtgcgcaacctgaggctgtcggtggaggaggccgtggccgcgggcgtggtgggcggcgagatccaggagaagctgctgtcggccgagcgcgccgtcaccggctacaccgacccctacaccgggcagcagatctccctcttccaggccatgcagaaggacctcatcgtccgggagcacggcatccgcctgctggaggcccagatcgccacgggcggcgtcatcgaccccgtgcacagccaccgcgtgcccgtggacgtggcctaccagcgcggctacttcgacgaggagatgaaccgtgtcctggccgaccccagcgacgacaccaagggcttcttcgaccccaacacgcacgagaacctcacgtacgtgcagctgctgcgccgctgcgtgcccgacccggacaccgggctctacatgctgcagctggcaggccggggctccgccgtgcaccagctgagcgaggagctgcgctgtgccctgcgcgacgcccgcgtgacgccaggctcgggcgccctccagggccagagcgtctccgtctgggagctcctcttctaccgcgaggtgtccgaggaccggcgccaggacctgctgagcagataccgggcgggcacgctgaccgtggaagagctgggcgccaccctcacctcgctgctggcccaggcccaggcccaggcccgggccgaggccgaggccgggagcccgcgcccagacccccgggaggccctgcgtgcggccaccatggaggtcaaggtgggccgcctccgggggcgcgcggtgcccgtgtgggacgtgctggcgtccggctacgtgagcagggccgcccgggaggagctgctggccgagtttggctcggggaccctggacttgcccgcgctgacccgccggctgaccgccatcatcgaggaggccgaggaggcccccggggcccggccgcagctccaggacgcctggcgcggcccgcgggagccagggccagccgggcgaggggacggcgactcggggcgctcccagcgagagggccagggggagggcgagacccaggaggccgccgccgccgcccgccgccaggagcagaccctgcgtgatgccaccatggaggtgcagcgcgggcagttccaggggcggccggtctccgtgtgggacgtcctcttctcctcgtacctgagcgaggcccgccgagacgagctcctggcccagcacgcggccggcgccctgggcctgcccgacctcgtcgccgtcctcacccgggtcatcgaggagacggaggagcggctcagcaaggtgtccttccgcggcctgaggtgccaggtgtccgcctccgagctgcacacgtccgggatcctgggccccgagaccctgcgggacctggcccagggcactaagacgctgcaggaggtgacggagatggactcggtcaagcgctacctggagggcaccagctgcatcgcgggcgtcctggtgcccgccaaggaccagcccggccgccaggagaagatgagcatctaccaggccatgtggaagggcgtgctgcggcccggcacggccctggtgctgctggaggcgcaggcggccaccggcttcgtcatcgaccccgtgcgcaacctgaggctgtcggtggaggaggccgtggccgcgggcgtggtgggcggcgagatccaggagaagctgctgtcggccgagcgcgccgtcaccggctacaccgacccctacaccgggcagcagatctccctcttccaggccatgcagaaggacctcatcgtccgggagcacggcatccgcctgctggaggcccagatcgccacgggcggcgtcatcgaccccgtgcacagccaccgcgtgcccgtggacgtggcctaccggcgcggctacttcgacgaggagatgaaccgtgtcctggccgaccccagcgacgacaccaagggcttcttcgaccccaacacgcacgagaacctcacgtacgtgcagctgctgcgccgctgcgtgcccgacccggacaccgggctctacatgctgcagctggcaggccggggctccgccgtgcaccagctgagcgaggagctgcgctgtgccctgcgcgacgcccgcgtgacgccaggctcgggcgccctccagggccagagcgtctccgtctgggagctcctcttctaccgcgaggtgtccgaggaccggcgccaggacctgctgagcagataccgggcgggcacgctgaccgtggaggagctgggcgccaccctcacctcgctgctggcccaggcccaggcccaggcccgggccgaggccgaggccgggagcccgcgcccagacccccgggaggccctgcgtgcggccaccatggaggtcaaggtgggccgcctccgggggcgcgcggtgcccgtgtgggacgtgctggcgtccggctacgtgagcagggccgcccgggaggagctgctggccgagtttggctcggggaccctggacttgcccgcgctgacccgccggctgaccgccatcatcgaggaggccgaggaggcccccggggcccggccgcagctccaggacgcctggcgcggcccgcgggagccagggccagccgggcgaggggacggcgactcggggcgctcccagcgagagggccagggggagggcgagacccaggaggccgccgccgccaccgccgccgcccgccgccaggagcagaccctgcgtgatgccaccatggaggtgcagcgcgggcagttccaggggcggccggtctccgtgtgggacgtcctcttctcctcgtacctgagcgaggcccgccgagacgagctcctggcccagcacgcggccggcgccctgggcctgcccgacctcgtcgccgtcctcacccgggtcatcgaggagacggaggagcggctcagcaaggtgtccttccgcggcctgaggcgccaggtgtccgcctccgagctgcacacgtccgggatcctgggccccgagaccctgcgggacctggcccagggcactaagacgctgcaggaggtgacggagatggactcggtcaagcgctacctggagggcaccagctgcatcgcgggcgtcctggtgcccgccaaggaccagcccggccgccaggagaagatgagcatctaccaggccatgtggaagggcgtgctgcggcccggcacggccctggtgctgctggaggcgcaggcggccaccggcttcgtcatcgaccccgtgcgcaacctgaggctgtcggtggaggaggccgtggccgcgggcgtggtgggcggcgagatccaggagaagctgctgtcggccgagcgcgccgtcaccggctacaccgacccctacaccgggcagcagatctccctcttccaggccatgcagaaggacctcatcgtccgggagcacggcatccgcctgctggaggcccagatcgccacgggcggcgtcatcgaccccgtgcacagccaccgcgtgcccgtggacgtggcctaccggcgcggctacttcgacgaggagatgaaccgtgtcctggccgaccccagcgacgacaccaagggcttcttcgaccccaacacgcacgagaacctcacgtacgtgcagctgctgcgccgctgcgtgcccgacccggacaccgggctctacatgctgcagctggcaggccggggctccgccgtgcaccagctgagcgaggagctgcgctgtgccctgcgcgacgcccgcgtgacgccaggctcgggcgccctccagggccagagcgtctccgtctgggagctcctcttctaccgcgaggtgtccgaggaccggcgccaggacctgctgagcagataccgggcgggcacgctgaccgtggaggagctgggcgccaccctcacctcgctgctggcccaggcccaggcccaggcccgggccgaggccgaggccgggagcccgcgcccagacccccgggaggccctgcgtgcggccaccatggaggtcaaggtgggccgcctccgggggcgcgcggtgcccgtgtgggacgtgctggcgtccggctacgtgagcagggccgcccgggaggagctgctggccgagtttggctcggggaccctggacttgcccgcgctgacccgccggctgaccgccatcatcgaggaggccgaggaggcccccggggcccggccgcagctccaggacgcctggcgcggcccgcgggagccagggccagccgggcgaggggacggcgactcggggcgctcccagcgagagggccagggggagggcgagacccaggaggccgccgccgccaccgccgccgcccgccgccaggagcagaccctgcgtgatgccaccatggaggtgcagcgcgggcagttccaggggcggccggtctccgtgtgggacgtcctcttctcctcgtacctgagcgaggcccgccgagacgagctcctggcccagcacgcggccggcgccctgggcctgcccgacctcgtcgccgtcctcacccgggtcatcgaggagacggaggagcggctcagcaaggtgtccttccgcggcctgaggcgccaggtgtccgcctccgagctgcacacgtccgggatcctgggccccgagaccctgcgggacctggcccagggcactaagacgctgcaggaggtgacggagatggactcggtcaagcgctacctggagggcaccagctgcatcgcgggcgtcctggtgcccgccaaggaccagcccggccaccaggagaagatgagcatctaccaggccatgtggaagggcgtgctgcggcccggcacggccctggtgctgctggaggcgcaggcggccaccggcttcgtcatcgaccccgtgcgcaacctgaggctgtcggtggaggaggccgtggccgcgggcgtggtgggcggcgagatccaggagaagctgctgtcggccgagcgcgccgtcaccggctacaccgacccctacaccgggcagcagatctccctcttccaggccatgcagaaggacctcatcgtccgggagcacggcatccgcctgctggaggcccagatcgccacgggcggcgtcatcgaccccgtgcacagccaccgcgtgcccgtggacgtggcctaccggcgcggctacttcgacgaggagatgaaccgtgtcctggcccaccccagcgacgacaccaagggcttcttcgaccccaacacgcacgagaacctcacgtacgtgcagctgctgcgccgctgcgtgcccgacccggacaccgggctctacatgctgcagctggcaggccggggctccgccgtgcaccagctgagcgaggagctgcgctgtgccctgcgcgacgcccgcgtgatgccaggctcgggcgccctccagggccagagcgtctccgtctgggagctcctcttctaccgcgaggtgtccgaggaccggcgccaggacctgctgagcagataccgggcgggcacgctgaccgtggaggagctgggcgccaccctcacctcgctgctggcccaggcccaggcccaggcccgggccgaggccgaggccgaggccgggagcccgcgcccagacccccgggaggccctgcgtgcggccaccatggaggtcaaggtgggccgcctccgggggcgcgcggtgcccgtgtgggacgtgctggcgtccggctacgtgagcggggccgcccgggaggagctgctggccgagtttggctcggggaccctggacttgcccgcgctgacccgccggctgaccgccatcatcgaggaggccgaggaggcccccggggcccggccgcagctccaggacgcctggcgcggcccgcgggagccagggccagccgggcgaggggacggcgactcggggcgctcccagcgagagggccagggggagggcgagacccaggaggccgccgccgccgcccgccgccaggagcagaccctgcgtgatgccaccatggaggtgcagcgcgggcagttccaggggcggccggtctccgtgtgggacgtcctcttctcctcgtacctgagcgaggcccaccgagacgagctcctggcccagcacgcggccggcgccctgggcctgcccgacctcgtcgccgtcctcacccgggtcatcgaggagacggaggagcggctcagcaaggtgtccttccgcggcctgaggcgccaggtgtccgcctccgagctgcacacgtccgggatcctgggccccgagaccctgcgggacctggcccagggcactaagacgctgcaggaggtgacggagatggactcggtcaagcgctacctggagggcaccagctgcatcgcgggcgtcctggtgcccgccaaggaccagcccggccgccaggagaagatgagcatctaccaggccatgtggaagggcgtgctgcggcccggcacggccctggtgctgctggaggcgcaggcggccaccggcttcgtcatcgaccccgtgcgcaacctgaggctgtcggtggaggaggccgtggccgcgggcgtggtgggcggcgagatccaggagaagctgctgtcggccgagcgcgccgtcaccggctacaccgacccctacaccgggcagcagatctccctcttccaggccatgcagaaggacctcatcgtccgggagcacggcatccgcctgctggaggcccagatcgccacgggcggcgtcatcgaccccgtgcacagccaccgcgtgcccgtggacgtggcctaccggcgcggctacttcgacgaggagatgaaccgcgtcctggccgaccccagcgacgacaccaagggcttcttcgaccccaacacgcacgagaacctcacgtacctgcagcttctgcagagggccaccctggaccctgagacggggctcctatttctttctctctctctacagtga

SEQ ID NO: 308470 - DNA, 7263 bp, Artificial Sequence
  derived and/or modified sequence
atgagcggccacaccctgccccccctgcctgtgcccggcaccaacagcacagagcaggcctctgtgccccgggccatggccgccaccctgggcgccggcaccccaccccggccccaggcccggagcattgctggggtgtatgtggaggccagcggccaggcccagagcgtgtatgctgccatggagcagggcctgctgcctgctggcctgggccaggccctgctggaggcccaggccgccactggaggcctggtggacctggcccggggccagctgctgcctgtgtccaaggccctgcagcagggcctggtgggcctggagctgaaggagaagctgctggccgctgagcgggccaccaccggctacccagacccctacggcggggagaagctggccctcttccaggccatcggcaaggaggtggtggaccgggccctgggccagagctggctggaggtgcagctggccactggaggcctggtggaccctgcccagggcgtgctggtggcccctgagcccgcctgccaccagggcctgctggaccgggagacctggcacaagctgtctgagctggagcccggcactggagacctgcgcttcctggaccccaacaccctggagcggctgacctaccaccagctgctggagcgctgtgtgcgggcccctggcagcggcctggccctgctgcccctgaagatcaccttccgctccatgggcggcgctgtgtctgctgctgagctgctggaggtgggcatcctggatgagcaggccgtgcagggcctgcgggagggccgcctggccgctgtggatgtgtctgcccgggcagaggtgcggcgctacctggagggcaccggctctgtggccggcgtggtgctgctgcctgagggccacaagaagagcttcttccaggccgccacagagcacctgctgcccatgggcacagccctgcccctgctggaggcccaggccgccacccacaccctggtggaccccatcaccggccagaggctgtgggtggatgaggccgtgcgggccggcctggtgtccccagagctgcacgagcagctgctggtggccgagcaggccgtgacaggccaccacgaccccttcagcggcagccagatccccctcttccaggccatgaagaagggcctggtggaccggcccctggccctgcggctgctggatgcccagctggccactggaggcctggtgtgcccagcccggcggctgcggctgcccctggaggccgccctgcgctgtggctgcctggatgaggacacccagaggcagctgagccaggccggcagcttcagtgatggcacccatggaggcctgcgctatgagcagctgctggccctgtgtgtgacagatcctgagaccggcctggccttcctgcccctgagcggcggcccccggggcggggagccccagggcccccccttcatcaagtacagcacccggcaggccctgagcacagccacagccaccgtgtctgtgggcaagttccggggccggcctgtgtccctgtgggagctgctcttcagcgaggccatcagcagcgagcagagggccatgctggcccagcagtaccaggagggcaccctgtctgtggagaagctggccgccaagctgagcgccaccctggagcaggccgccgccacagcccgggtgaccttcagcggcctgcgggacacagtgaccccaggagagctgctgaaggccgagatcatcgaccaggacctgtatgagcggctggagcacggccaggccacagccaaggatgtgggcagcctggcctctgtgcagcgctacctgcagggcaccggctgcatcgccggcctgctgctgcccggcagccaggagcggctgagcatctatgaggcccgctgcaagggcctgctgcggcctggaacagccctgatcctgctggaggcccaggccgccaccggcttcatcatcgaccccaaggccaacaagggccacagcgtggaggaggccctgcgggctgctgtgattggaccagatgtgtttgccaagctgctgtctgctgagagagctgtgacaggctacacagacccctacacaggccagcagatcagcctcttccaggccatgcagaagggcctgattgtgcgggagcacggcatccggctgctggaggcccagatcgccaccggcggcgtcatcgaccctgtgcacagccaccgggtgcctgtggatgtggcctacagaagaggctactttgaccagatgctgaacctgatcctgctggaccccagtgatgacaccaagggcttctttgaccccaacacccatgagaacctgacctacctgcagctgctggagcgctgtgtgcgggaccctgagaccggcctgtacctgctgcccctgagcagcacccagagccccctggtggacagcgccacccagcaggccttccagaacctgctgctgtctgtgaagtatggccgcttccagggccagagggtgtctgcctgggagctgatcaacagcgagtacttcagcgagggcagaagacggcagctgctgcggcgctaccggcagcgggaggtgaccctgggccaggtggccaagctgctggaggccgagacccagaggcaggccgacatcatgctgcctgccctgcggagccgggtgacagtgcaccagctgctggaggccggcatcatcgaccagcagctgctggaccaggtgctggccggcaccatcagccctgaggccctgctgctgatggatggagtgcggcgctacctgtgtggcctgggcgctgtgggcggcgtgcggctgctgcccagcggccagaggctgagcctgtaccaggccatgaggcagaagctgctgggcccccgggtggccctggccctgctggaggcccaggccgccaccggcaccatcatggacccccacagccctgagagcctgtctgtggatgaagctgtgagaagaggagtggtgggccctgagctgtatggccgcctgaagagagctgagggcgccatcgccggcttccgggaccccttcagcggcaagcaggtgtctgtgttccaggccatgaagaagggcctcatcccctgggagcaggccgcccggctgctggaggcccaggtggccaccggcggcatcatcgaccccaccagccaccaccacctgcccatgcctgtggccatccagaggggctacgtggaccaggagatggagacagccctgagcagcagcagcgagaccttccccaccccagatggccagggccgcaccagctatgcccagctgctggaggagtgccccagagatgagaccagcggcctgcacctgctgcccctgcctgagagcgccccagccctgcccacagaggagcaggtgcagaggagcctgcaggccgtgcctggggccaaggatggcaccagcctgtgggacctgctgagcagctgccacttcacagaggagcagaggcggggcctgctggaggatgtgcaggagggccgcaccaccgtgccccagctgctggcctctgtgcagcgctgggtgcaggagaccaagctgctggcccaggcccgggtgatggtgcccggccccagaggagaggtgcctgctgtgtggctgctggatgctggcatcatcacccaggagaccctggaggccctggcccagggcacccagagccctgcccaggtggccgagcagcctgctgtgaaggcctgcctgtggggcaccggctgtgtggccggcgtgctgctgcagcccagcggggccaaggccagcatcgcccaggccgtgagagatggcctgctgcccaccggcctgggccagaggctgctggaggcccaggtggccagcggcttcctggtggaccccctgaacaaccagaggctgtctgtggaggatgctgtgaaggtgggcctggtgggccgggagctgtctgagcagctgggccaggccgagagagctgctgctggctacccagacccctacagccgggccagcctgagcctgtggcaggccatggagaagggcctggtgccccagaatgaaggcctgcccctgctgcaggtgcagctggccaccggcggcgtggtggaccctgtgcacggcgtgcacctgccccaggccgccgcctgccgcctgggcctgctggacacccagaccagccaggtgctgacagctgtggacaaggacaacaagttcttctttgaccccagcgcccgggaccaggtgacctaccagcagctgcgggagcgctgtgtgtgtgacagcgagaccggcctgctgctgctgcccctgcccagcgacacagtgctggaggtggatgaccacacagctgtggccctgcgggccatgaaggtgcctgtgtccacaggccgcttcaagggctgcagcgtgtccctgtgggacctgctgctgtctgaatatgtgggcgctgacaagagaagagagctggtggccctgtgccgcagcggccgggccgccgccctgcggcaggtggtgtctgctgtgaccaccctggtggaggccgctgagcggcagcccctgcaggccaccttccggggcctgaggaagcaggtgtctgcccgggacctcttccgggcccagctgatcagcaggaagaccctggatgagctgagccagggcaccaccaccgtgaaggaggtggccgagatggacagcgtgaagaggagcctggagggcggcaacttcatcgccggcgtgctgatccagggcacccaggagaggatgagcatccctgaggccctgcggcggcacatcctgcggcccggcacagccctggtgctgctggaggcccaggccgccaccggcttcatcattgatcctgtggagaacaggaagctgactgtggaggaggccttcaaggccggcatgtttgggaaggagacctacgtgaagctgctgtctgctgagagagctgtgacaggctacacagacccctacacaggccagcagatcagcctcttccaggccatgcagaaggacctgattgtgcgggagcacggcatccggctgctggaggcccagatcgccactggaggcatcattgatcctgtgcacagccaccgggtgcctgtggatgtggcctaccgctgtggctactttgatgaggagatgaaccgcatcctggccgaccccagtgatgacaccaagggcttctttgaccccaacacccatgagaacctgacctacctgcagctgctggagcgctgtgtggaggaccctgagaccggcctgtacctgctgcagatcatcaagaagggggagaactacgtgtacatcaatgaggccaccaggcatgtgctgcagagcaggacagccaagatgagggtgggccgctttgctgaccaggtggtgtccttctgggacctgctgagcagcccctacttcacagaggacaggaagcgggagctgatccaggagtatggagcccagagcggcggcctggagaagctgctggagatcatcaccaccaccatcgaggagacagagacccagaaccagggcatcaaggtggccgccatccggggggaggtgacagctgctgacctcttcaacagccgggtgattgaccagaagaccctgcacaccctgcgggtgggccgcactggaggccaggccctgagcaccctggagtgtgtgaagccctacctggagggcagcggctgcatcgccggcgtgacagtgcccagcacccgggaggtgatgagcctgcacgaggccagcaggaaggagctgatcccagctgcctttgccacctggctgctggaggcccaggccgccaccggcttcctgctggacccctgcacccggcagaagctgtctgtggatgaggccgtggatgtgggcctggtgaatgaggagctgcgggagcggctgctgaaggccgagcgggccgccaccggctacagagatcctgccactggagacaccatccccctcttccaggccatgcagaagcagctgattgagaaggccgaggccctgcggctgctggaggtgcaggtggccactggaggagtgattgacccccagcaccaccaccggctgcccctggagacagcctaccgccggggctgcctgcacaaggacatctatgccctgatcagtgaccagaagcacatgaggaagagatttgtggaccccaacacccaggagaaggtgtcctaccgggagctgcaggagcgctgccggccccaggaggacaccggctggctgctcttccctgtgaacaaggccgcccgggacagcgagcacattgatgatgagacccggcgggccctggaggccgagcaggtggagatcaccgtgggccgcttccggggccagaagcccaccctgtgggccctgctgaacagtgaatatgtgacagaggagaagaagctgcagctggtgaggatgtaccgcacccacacccggcgggccctgcagacagtggcccagctgatcctggagctgattgagaagcaggagaccagcaacaagcacctgtggttccagggcatccggcggcagatcacagccagcgagctgctgagcagcgccatcatcacagaggagatgctgcaggacctggagaccggccgcagcaccacccaggagctgatggaggatgacagagtgaagcgctacctggagggcaccagctgcatcgccggcgtgctggtgcctgccaaggaccagcccggccggcaggagaagatgagcatctaccaggccatgtggaagggcgtgctgcggcccggcacagccctggtgctgctggaggcccaggccgccactggatttgtgattgatcctgtgaggaacctgcggctgtctgtggaggaggccgtggccgccggcgtggtgggcggggagatccaggagaagctgctgtctgctgagagagctgtgacaggctacacagacccctacacaggccagcagatcagcctcttccaggccatgcagaaggacctgattgtgcgggagcacggcatccggctgctggaggcccagatcgccactggaggagtgattgatcctgtgcacagccaccgggtgcctgtggatgtggcctaccgccggggctactttgatgaggagatgaacagagtgctggccgaccccagtgatgacaccaagggcttctttgaccccaacacccatgagaacctgacctacctgcagctgctgcagagggccaccctggaccctgagaccggcctgctcttcctgagcctgagcctgcagtag

SEQ ID NO: 308471 - DNA, 15267 bp, Artificial Sequence
  derived and/or modified sequence
atgagcggccacaccctgccccccctgcctgtgcccggcaccaacagcacagagcaggcctctgtgccccgggccatggccgccaccctgggcgccggcaccccaccccggccccaggcccggagcattgctggggtgtatgtggaggccagcggccaggcccagagcgtgtatgctgccatggagcagggcctgctgcctgctggcctgggccaggccctgctggaggcccaggccgccactggaggcctggtggacctggcccggggccagctgctgcctgtgtccaaggccctgcagcagggcctggtgggcctggagctgaaggagaagctgctggccgctgagcgggccaccaccggctacccagacccctacggcggggagaagctggccctcttccaggccatcggcaaggaggtggtggaccgggccctgggccagagctggctggaggtgcagctggccactggaggcctggtggaccctgcccagggcgtgctggtggcccctgagcccgcctgccaccagggcctgctggaccgggagacctggcacaagctgtctgagctggagcccggcactggagacctgcgcttcctggaccccaacaccctggagcggctgacctaccaccagctgctggagcgctgtgtgcgggcccctggcagcggcctggccctgctgcccctgaagatcaccttccgctccatgggcggcgctgtgtctgctgctgagctgctggaggtgggcatcctggatgagcaggccgtgcagggcctgcgggagggccgcctggccgctgtggatgtgtctgcccgggcagaggtgcggcgctacctggagggcaccggctctgtggccggcgtggtgctgctgcctgagggccacaagaagagcttcttccaggccgccacagagcacctgctgcccatgggcacagccctgcccctgctggaggcccaggccgccacccacaccctggtggaccccatcaccggccagaggctgtgggtggatgaggccgtgcgggccggcctggtgtccccagagctgcacgagcagctgctggtggccgagcaggccgtgacaggccaccacgaccccttcagcggcagccagatccccctcttccaggccatgaagaagggcctggtggaccggcccctggccctgcggctgctggatgcccagctggccactggaggcctggtgtgcccagcccggcggctgcggctgcccctggaggccgccctgcgctgtggctgcctggatgaggacacccagaggcagctgagccaggccggcagcttcagtgatggcacccatggaggcctgcgctatgagcagctgctggccctgtgtgtgacagatcctgagaccggcctggccttcctgcccctgagcggcggcccccggggcggggagccccagggcccccccttcatcaagtacagcacccggcaggccctgagcacagccacagccaccgtgtctgtgggcaagttccggggccggcctgtgtccctgtgggagctgctcttcagcgaggccatcagcagcgagcagagggccatgctggcccagcagtaccaggagggcaccctgtctgtggagaagctggccgccaagctgagcgccaccctggagcaggccgccgccacagcccgggtgaccttcagcggcctgcgggacacagtgaccccaggagagctgctgaaggccgagatcatcgaccaggacctgtatgagcggctggagcacggccaggccacagccaaggatgtgggcagcctggcctctgtgcagcgctacctgcagggcaccggctgcatcgccggcctgctgctgcccggcagccaggagcggctgagcatctatgaggcccgctgcaagggcctgctgcggcctggaacagccctgatcctgctggaggcccaggccgccaccggcttcatcatcgaccccaaggccaacaagggccacagcgtggaggaggccctgcgggctgctgtgattggaccagatgtgtttgccaagctgctgtctgctgagagagctgtgacaggctacacagacccctacacaggccagcagatcagcctcttccaggccatgcagaagggcctgattgtgcgggagcacggcatccggctgctggaggcccagatcgccaccggcggcgtcatcgaccctgtgcacagccaccgggtgcctgtggatgtggcctacagaagaggctactttgaccagatgctgaacctgatcctgctggaccccagtgatgacaccaagggcttctttgaccccaacacccatgagaacctgacctacctgcagctgctggagcgctgtgtgcgggaccctgagaccggcctgtacctgctgcccctgagcagcacccagagccccctggtggacagcgccacccagcaggccttccagaacctgctgctgtctgtgaagtatggccgcttccagggccagagggtgtctgcctgggagctgatcaacagcgagtacttcagcgagggcagaagacggcagctgctgcggcgctaccggcagcgggaggtgaccctgggccaggtggccaagctgctggaggccgagacccagaggcaggccgacatcatgctgcctgccctgcggagccgggtgacagtgcaccagctgctggaggccggcatcatcgaccagcagctgctggaccaggtgctggccggcaccatcagccctgaggccctgctgctgatggatggagtgcggcgctacctgtgtggcctgggcgctgtgggcggcgtgcggctgctgcccagcggccagaggctgagcctgtaccaggccatgaggcagaagctgctgggcccccgggtggccctggccctgctggaggcccaggccgccaccggcaccatcatggacccccacagccctgagagcctgtctgtggatgaagctgtgagaagaggagtggtgggccctgagctgtatggccgcctgaagagagctgagggcgccatcgccggcttccgggaccccttcagcggcaagcaggtgtctgtgttccaggccatgaagaagggcctcatcccctgggagcaggccgcccggctgctggaggcccaggtggccaccggcggcatcatcgaccccaccagccaccaccacctgcccatgcctgtggccatccagaggggctacgtggaccaggagatggagacagccctgagcagcagcagcgagaccttccccaccccagatggccagggccgcaccagctatgcccagctgctggaggagtgccccagagatgagaccagcggcctgcacctgctgcccctgcctgagagcgccccagccctgcccacagaggagcaggtgcagaggagcctgcaggccgtgcctggggccaaggatggcaccagcctgtgggacctgctgagcagctgccacttcacagaggagcagaggcggggcctgctggaggatgtgcaggagggccgcaccaccgtgccccagctgctggcctctgtgcagcgctgggtgcaggagaccaagctgctggcccaggcccgggtgatggtgcccggccccagaggagaggtgcctgctgtgtggctgctggatgctggcatcatcacccaggagaccctggaggccctggcccagggcacccagagccctgcccaggtggccgagcagcctgctgtgaaggcctgcctgtggggcaccggctgtgtggccggcgtgctgctgcagcccagcggggccaaggccagcatcgcccaggccgtgagagatggcctgctgcccaccggcctgggccagaggctgctggaggcccaggtggccagcggcttcctggtggaccccctgaacaaccagaggctgtctgtggaggatgctgtgaaggtgggcctggtgggccgggagctgtctgagcagctgggccaggccgagagagctgctgctggctacccagacccctacagccgggccagcctgagcctgtggcaggccatggagaagggcctggtgccccagaatgaaggcctgcccctgctgcaggtgcagctggccaccggcggcgtggtggaccctgtgcacggcgtgcacctgccccaggccgccgcctgccgcctgggcctgctggacacccagaccagccaggtgctgacagctgtggacaaggacaacaagttcttctttgaccccagcgcccgggaccaggtgacctaccagcagctgcgggagcgctgtgtgtgtgacagcgagaccggcctgctgctgctgcccctgcccagcgacacagtgctggaggtggatgaccacacagctgtggccctgcgggccatgaaggtgcctgtgtccacaggccgcttcaagggctgcagcgtgtccctgtgggacctgctgctgtctgaatatgtgggcgctgacaagagaagagagctggtggccctgtgccgcagcggccgggccgccgccctgcggcaggtggtgtctgctgtgaccaccctggtggaggccgctgagcggcagcccctgcaggccaccttccggggcctgaggaagcaggtgtctgcccgggacctcttccgggcccagctgatcagcaggaagaccctggatgagctgagccagggcaccaccaccgtgaaggaggtggccgagatggacagcgtgaagaggagcctggagggcggcaacttcatcgccggcgtgctgatccagggcacccaggagaggatgagcatccctgaggccctgcggcggcacatcctgcggcccggcacagccctggtgctgctggaggcccaggccgccaccggcttcatcattgatcctgtggagaacaggaagctgactgtggaggaggccttcaaggccggcatgtttgggaaggagacctacgtgaagctgctgtctgctgagagagctgtgacaggctacacagacccctacacaggccagcagatcagcctcttccaggccatgcagaaggacctgattgtgcgggagcacggcatccggctgctggaggcccagatcgccactggaggcatcattgatcctgtgcacagccaccgggtgcctgtggatgtggcctaccgctgtggctactttgatgaggagatgaaccgcatcctggccgaccccagtgatgacaccaagggcttctttgaccccaacacccatgagaacctgacctacctgcagctgctggagcgctgtgtggaggaccctgagaccggcctgtacctgctgcagatcatcaagaagggggagaactacgtgtacatcaatgaggccaccaggcatgtgctgcagagcaggacagccaagatgagggtgggccgctttgctgaccaggtggtgtccttctgggacctgctgagcagcccctacttcacagaggacaggaagcgggagctgatccaggagtatggagcccagagcggcggcctggagaagctgctggagatcatcaccaccaccatcgaggagacagagacccagaaccagggcatcaaggtggccgccatccggggggaggtgacagctgctgacctcttcaacagccgggtgattgaccagaagaccctgcacaccctgcgggtgggccgcactggaggccaggccctgagcaccctggagtgtgtgaagccctacctggagggcagcggctgcatcgccggcgtgacagtgcccagcacccgggaggtgatgagcctgcacgaggccagcaggaaggagctgatcccagctgcctttgccacctggctgctggaggcccaggccgccaccggcttcctgctggacccctgcacccggcagaagctgtctgtggatgaggccgtggatgtgggcctggtgaatgaggagctgcgggagcggctgctgaaggccgagcgggccgccaccggctacagagatcctgccactggagacaccatccccctcttccaggccatgcagaagcagctgattgagaaggccgaggccctgcggctgctggaggtgcaggtggccactggaggagtgattgacccccagcaccaccaccggctgcccctggagacagcctaccgccggggctgcctgcacaaggacatctatgccctgatcagtgaccagaagcacatgaggaagagatttgtggaccccaacacccaggagaaggtgtcctaccgggagctgcaggagcgctgccggccccaggaggacaccggctggctgctcttccctgtgaacaaggccgcccgggacagcgagcacattgatgatgagacccggcgggccctggaggccgagcaggtggagatcaccgtgggccgcttccggggccagaagcccaccctgtgggccctgctgaacagtgaatatgtgacagaggagaagaagctgcagctggtgaggatgtaccgcacccacacccggcgggccctgcagacagtggcccagctgatcctggagctgattgagaagcaggagaccagcaacaagcacctgtggttccagggcatccggcggcagatcacagccagcgagctgctgagcagcgccatcatcacagaggagatgctgcaggacctggagaccggccgcagcaccacccaggagctgatggaggatgacagagtgaagcgctacctggagggcaccagctgcatcgccggcgtgctggtgcctgccaaggaccagcccggccggcaggagaagatgagcatctaccaggccatgtggaagggcgtgctgcggcccggcacagccctggtgctgctggaggcccaggccgccactggatttgtgattgatcctgtgaggaacctgcggctgtctgtggaggaggccgtggccgccggcgtggtgggcggggagatccaggagaagctgctgtctgctgagagagctgtgacaggctacacagacccctacacaggccagcagatcagcctcttccaggccatgcagaaggacctgattgtgcgggagcacggcatccggctgctggaggcccagatcgccactggaggagtgattgatcctgtgcacagccaccgggtgcctgtggatgtggcctaccgccggggctactttgatgaggagatgaacagagtgctggccgaccccagtgatgacaccaagggcttctttgaccccaacacccatgagaacctgacctacgtgcagctgctgcggcgctgtgtgcctgaccctgacaccggcctgtacatgctgcagctggccggccggggcagcgctgtgcaccagctgtctgaggagctgcgctgtgccctgagagatgcccgggtgaccccaggcagcggggccctgcagggccagagcgtgtctgtgtgggagctgctcttctaccgggaggtgtctgaagatcggcggcaggacctgctgagccgctacagagctggcaccctgactgtggaggagctgggcgccaccctgaccagcctgctggcccaggcccaggcccaggcccgggcagaggccgaggccggcagccccaggccagacccccgggaggccctgcgggccgccaccatggaggtgaaggtgggccgcctgcggggccgggctgtgcctgtgtgggatgtgctggccagcggctacgtgtcccgggccgcccgggaggagctgctggccgagtttggaagtggcaccctggacctgcctgccctgacccggcggctgacagccatcatcgaggaggccgaggaggcccctggggcccggccccagctgcaggatgcctggaggggcccccgggagcccggccctgctggaagaggagatggagacagcggccgcagccagcgggagggccagggcgagggggagacccaggaggccgctgctgctgctgctgctgctgctgcccggcggcaggagcagaccctgagagatgccaccatggaggtgcagaggggccagttccagggccggcctgtgtctgtgtgggatgtgctcttcagcagctacctgtctgaggccaggagagatgagctgctggcccagcacgccgccggggccctgggcctgcctgacctggtggccgtgctgaccagggtcatcgaggagacagaggagcggctgagcaaggtgtccttccggggcctgcggcggcaggtgtctgccagcgagctgcacaccagcggcatcctgggccctgagaccctgcgggacctggcccagggcaccaagaccctgcaggaggtgacagagatggattctgtgaagcgctacctggagggcaccagctgcatcgccggcgtgctggtgcctgccaaggaccagcccggccggcaggagaagatgagcatctaccaggccatgtggaagggcgtgctgcggcccggcacagccctggtgctgctggaggcccaggccgccactggatttgtgattgatcctgtgaggaacctgcggctgtctgtggaggaggccgtggccgccggcgtggtgggcggggagatccaggagaagctgctgtctgctgagagagctgtgacaggctacacagacccctacacaggccagcagatcagcctcttccaggccatgcagaaggacctgattgtgcgggagcacggcatccggctgctggaggcccagatcgccactggaggagtgattgatcctgtgcacagccaccgggtgcctgtggatgtggcctaccagaggggctactttgatgaggagatgaacagagtgctggccgaccccagtgatgacaccaagggcttctttgaccccaacacccatgagaacctgacctacgtgcagctgctgcggcgctgtgtgcctgaccctgacaccggcctgtacatgctgcagctggccggccggggcagcgctgtgcaccagctgtctgaggagctgcgctgtgccctgagagatgcccgggtgaccccaggcagcggggccctgcagggccagagcgtgtctgtgtgggagctgctcttctaccgggaggtgtctgaagatcggcggcaggacctgctgagccgctacagagctggcaccctgactgtggaggagctgggcgccaccctgaccagcctgctggcccaggcccaggcccaggcccgggcagaggccgaggccggcagccccaggccagacccccgggaggccctgcgggccgccaccatggaggtgaaggtgggccgcctgcggggccgggctgtgcctgtgtgggatgtgctggccagcggctacgtgtcccgggccgcccgggaggagctgctggccgagtttggaagtggcaccctggacctgcctgccctgacccggcggctgacagccatcatcgaggaggccgaggaggcccctggggcccggccccagctgcaggatgcctggaggggcccccgggagcccggccctgctggaagaggagatggagacagcggccgcagccagcgggagggccagggcgagggggagacccaggaggccgctgctgctgcccggcggcaggagcagaccctgagagatgccaccatggaggtgcagaggggccagttccagggccggcctgtgtctgtgtgggatgtgctcttcagcagctacctgtctgaggccaggagagatgagctgctggcccagcacgccgccggggccctgggcctgcctgacctggtggccgtgctgaccagggtgattgaggagacagaggagcggctgagcaaggtgtccttccggggcctgcgctgccaggtgtctgccagcgagctgcacaccagcggcatcctgggccctgagaccctgcgggacctggcccagggcaccaagaccctgcaggaggtgacagagatggacagcgtgaagcgctacctggagggcaccagctgcatcgccggcgtgctggtgcctgccaaggaccagcccggccggcaggagaagatgagcatctaccaggccatgtggaagggcgtgctgcggcctggaacagccctggtgctgctggaggcccaggccgccaccggcttcgtcatcgaccctgtgaggaacctgcggctgtctgtggaggaggccgtggccgccggcgtggtgggcggggagatccaggagaagctgctgtctgctgagagagctgtgacaggctacacagacccctacacaggccagcagatcagcctcttccaggccatgcagaaggacctgattgtgcgggagcacggcatccggctgctggaggcccagatcgccaccggcggcgtcatcgaccctgtgcacagccaccgggtgcctgtggatgtggcctacagaagaggctactttgatgaggagatgaacagagtgctggccgaccccagtgatgacaccaagggcttctttgaccccaacacccatgagaacctgacctacgtgcagctgctgcggcgctgtgtgcctgaccctgacaccggcctgtacatgctgcagctggccggccggggcagcgctgtgcaccagctgtctgaggagctgcgctgtgccctgagagatgcccgggtgaccccaggcagcggggccctgcagggccagagcgtgtctgtgtgggagctgctcttctaccgggaggtgtctgaggaccggcggcaggacctgctgagccgctaccgggccggcaccctgactgtggaggagctgggcgccaccctgaccagcctgctggcccaggcccaggcccaggcccgggcagaggccgaggccggcagccccaggccagacccccgggaggccctgcgggccgccaccatggaggtgaaggtgggccgcctgcggggccgggctgtgcctgtgtgggatgtgctggccagcggctacgtgtccagagctgcccgggaggagctgctggccgagtttggcagcggcaccctggacctgcctgccctgacccggcggctgacagccatcatcgaggaggccgaggaggcccctggggcccggccccagctgcaggatgcctggaggggcccccgggagcccggccctgctggaagaggagatggagacagcggccgcagccagcgggagggccagggcgagggggagacccaggaggccgctgctgccacagctgctgcccggcggcaggagcagaccctgagagatgccaccatggaggtgcagaggggccagttccagggccggcctgtgtctgtgtgggatgtgctcttcagcagctacctgtctgaggccaggagagatgagctgctggcccagcacgccgccggggccctgggcctgcctgacctggtggccgtgctgaccagggtgattgaggagacagaggagcggctgagcaaggtgtccttccggggcctgcggcggcaggtgtctgccagcgagctgcacaccagcggcatcctgggccctgagaccctgcgggacctggcccagggcaccaagaccctgcaggaggtgacagagatggacagcgtgaagcgctacctggagggcaccagctgcatcgccggcgtgctggtgcctgccaaggaccagcccggccggcaggagaagatgagcatctaccaggccatgtggaagggcgtgctgcggcctggaacagccctggtgctgctggaggcccaggccgccaccggcttcgtcatcgaccctgtgaggaacctgcggctgtctgtggaggaggccgtggccgccggcgtggtgggcggggagatccaggagaagctgctgtctgctgagagagctgtgacaggctacacagacccctacacaggccagcagatcagcctcttccaggccatgcagaaggacctgattgtgcgggagcacggcatccggctgctggaggcccagatcgccaccggcggcgtcatcgaccctgtgcacagccaccgggtgcctgtggatgtggcctacagaagaggctactttgatgaggagatgaacagagtgctggccgaccccagtgatgacaccaagggcttctttgaccccaacacccatgagaacctgacctacgtgcagctgctgcggcgctgtgtgcctgaccctgacaccggcctgtacatgctgcagctggccggccggggcagcgctgtgcaccagctgtctgaggagctgcgctgtgccctgagagatgcccgggtgaccccaggcagcggggccctgcagggccagagcgtgtctgtgtgggagctgctcttctaccgggaggtgtctgaggaccggcggcaggacctgctgagccgctaccgggccggcaccctgactgtggaggagctgggcgccaccctgaccagcctgctggcccaggcccaggcccaggcccgggcagaggccgaggccggcagccccaggccagacccccgggaggccctgcgggccgccaccatggaggtgaaggtgggccgcctgcggggccgggctgtgcctgtgtgggatgtgctggccagcggctacgtgtccagagctgcccgggaggagctgctggccgagtttggcagcggcaccctggacctgcctgccctgacccggcggctgacagccatcatcgaggaggccgaggaggcccctggggcccggccccagctgcaggatgcctggaggggcccccgggagcccggccctgctggaagaggagatggagacagcggccgcagccagcgggagggccagggcgagggggagacccaggaggccgctgctgccacagctgctgcccggcggcaggagcagaccctgagagatgccaccatggaggtgcagaggggccagttccagggccggcctgtgtctgtgtgggatgtgctcttcagcagctacctgtctgaggccaggagagatgagctgctggcccagcacgccgccggggccctgggcctgcctgacctggtggccgtgctgaccagggtgattgaggagacagaggagcggctgagcaaggtgtccttccggggcctgcggcggcaggtgtctgccagcgagctgcacaccagcggcatcctgggccctgagaccctgcgggacctggcccagggcaccaagaccctgcaggaggtgacagagatggacagcgtgaagcgctacctggagggcaccagctgcatcgccggcgtgctggtgcctgccaaggaccagcccggccaccaggagaagatgagcatctaccaggccatgtggaagggcgtgctgcggcctggaacagccctggtgctgctggaggcccaggccgccaccggcttcgtcatcgaccctgtgaggaacctgcggctgtctgtggaggaggccgtggccgccggcgtggtgggcggggagatccaggagaagctgctgtctgctgagagagctgtgacaggctacacagacccctacacaggccagcagatcagcctcttccaggccatgcagaaggacctgattgtgcgggagcacggcatccggctgctggaggcccagatcgccaccggcggcgtcatcgaccctgtgcacagccaccgggtgcctgtggatgtggcctacagaagaggctactttgatgaggagatgaacagagtgctggcccaccccagtgatgacaccaagggcttctttgaccccaacacccatgagaacctgacctacgtgcagctgctgcggcgctgtgtgcctgaccctgacaccggcctgtacatgctgcagctggccggccggggcagcgctgtgcaccagctgtctgaggagctgcgctgtgccctgagagatgcccgggtgatgcctggcagcggggccctgcagggccagagcgtgtctgtgtgggagctgctcttctaccgggaggtgtctgaggaccggcggcaggacctgctgagccgctaccgggccggcaccctgactgtggaggagctgggcgccaccctgaccagcctgctggcccaggcccaggcccaggcccgggcagaggccgaggccgaggccggcagccccaggccagacccccgggaggccctgcgggccgccaccatggaggtgaaggtgggccgcctgcggggccgggctgtgcctgtgtgggatgtgctggccagcggctacgtgtctggagctgcccgggaggagctgctggccgagtttggcagcggcaccctggacctgcctgccctgacccggcggctgacagccatcatcgaggaggccgaggaggcccctggggcccggccccagctgcaggatgcctggaggggcccccgggagcccggccctgctggaagaggagatggagacagcggccgcagccagcgggagggccagggcgagggggagacccaggaggccgctgctgctgcccggcggcaggagcagaccctgagagatgccaccatggaggtgcagaggggccagttccagggccggcctgtgtctgtgtgggatgtgctcttcagcagctacctgtctgaggcccacagagatgagctgctggcccagcacgccgccggggccctgggcctgcctgacctggtggccgtgctgaccagggtcatcgaggagacagaggagcggctgagcaaggtgtccttccggggcctgcggcggcaggtgtctgccagcgagctgcacaccagcggcatcctgggccctgagaccctgcgggacctggcccagggcaccaagaccctgcaggaggtgacagagatggattctgtgaagcgctacctggagggcaccagctgcatcgccggcgtgctggtgcctgccaaggaccagcccggccggcaggagaagatgagcatctaccaggccatgtggaagggcgtgctgcggcccggcacagccctggtgctgctggaggcccaggccgccactggatttgtgattgatcctgtgaggaacctgcggctgtctgtggaggaggccgtggccgccggcgtggtgggcggggagatccaggagaagctgctgtctgctgagagagctgtgacaggctacacagacccctacacaggccagcagatcagcctcttccaggccatgcagaaggacctgattgtgcgggagcacggcatccggctgctggaggcccagatcgccactggaggagtgattgatcctgtgcacagccaccgggtgcctgtggatgtggcctaccgccggggctactttgatgaggagatgaacagagtgctggccgaccccagtgatgacaccaagggcttctttgaccccaacacccatgagaacctgacctacctgcagctgctgcagagggccaccctggaccctgagaccggcctgctcttcctgagcctgagcctgcagtag

SEQ ID NO: 308472 - DNA, 7263 bp, Artificial Sequence
  derived and/or modified sequence
atgagcggccacaccctgccccccctgcccgtgcccggcaccaactccacggagcaagccagtgtgccccgtgcgatggccgctacgctcggggcagggacaccacctcgccctcaggcacggtccattgcaggcgtgtacgtagaagccagtggacaggcgcaaagtgtgtacgcagccatggagcagggccttcttccagccgggcttggccaagccctgctcgaggcccaagccgccacaggagggctggtagatctggccagaggacagctgctgccagtatccaaggccctacagcagggcctagtcgggcttgagctcaaagagaaacttctggctgcggagcgggctaccactggctaccccgatccttatgggggtgagaaactggctttgttccaagcaatcggcaaagaagtagttgatagagccttaggccagagctggctggaagtacagttggcaacggggggactggtcgaccctgcccaaggagtgctagtggctccggagcctgcatgccaccagggattacttgacagagaaacgtggcacaaactctccgagttggaacctggaaccggcgacctcagatttcttgacccgaacactctggaacgcttaacctatcaccaactgctggagaggtgcgtcagagcaccaggttcagggctagctctgctccccttgaagatcacctttcggtcgatgggcggggccgtttcagctgcagaacttctcgaagtggggattctggacgagcaggcggttcaggggcttagagaaggcagactcgccgcagtcgacgttagtgcaagagccgaagtgcggcggtacttggaagggaccggttcagtcgccggtgttgtccttttgcccgaaggacacaagaaatctttttttcaggccgccacagaacacctattgcccatggggacagcattgcccctcctggaggcccaagcagccacccatactctcgtcgatccgataaccggacaaagattgtgggtcgatgaggctgtgcgagctgggctcgtatcaccggaattgcacgagcagctgcttgtggcagagcaggcagtcaccggccaccatgatcccttcagtggctcgcagatcccactgtttcaggccatgaagaaaggcttggtggatcgaccgcttgctctcaggctcctggatgcccaactagcaacgggtggtctggtgtgccccgcaaggcgtcttcggctgcccttggaggccgcgctgcggtgtggctgcctagatgaggacacccagaggcagctgtctcaggccgggtcattctctgatggcactcacggaggactgagatacgaacaacttctggccctatgtgtgacagatcccgaaacaggactggcgtttttgccactgtccggagggccacgcggtggcgagcctcagggacccccgtttatcaagtactccacccgacaggccttgtctactgctacggccactgtgtctgtggggaagtttcgaggtcgcccagtgagcttatgggaactcctgttttccgaggctatctcatcagagcagagggccatgttggcccagcaataccaagagggtacccttagcgtggaaaagctcgctgccaaactgtccgctaccctggaacaagctgcagcgacggctcgagtgactttcagcggcctacgcgataccgtcacccctggagagcttttaaaggccgagatcatcgaccaggacctttacgagagactggaacacggtcaggccactgccaaggacgtcgggagcctcgctagcgtccagcgatatctacaaggcacaggctgcatcgccggcttgctcctccccggaagtcaggaaagactgagcatatatgaagcaagatgcaagggcttactacggcccggcactgccctcatcctactggaggcccaggccgccacgggattcatcattgaccccaaggcaaataaggggcattcagtggaggaggccttaagagctgcagtgatcggcccagacgtatttgccaaactactcagcgccgagcgagcggtcacaggatacacggatccatacaccggacagcagattagtctgttccaggctatgcagaaaggcttgatcgtgagggagcatggcatccgcctgctcgaagcacagattgctaccggcggcgtgatcgatcctgttcattctcatcgcgtacccgtggatgtggcataccgcagagggtactttgaccaaatgcttaatcttatcctgctcgaccctagcgatgacacgaaagggttcttcgatcctaatacacacgagaatcttacatacttgcagctcctggagaggtgtgtccgcgacccagagacaggtctttacctactcccgctctccagtactcaatcaccccttgtcgattctgctacccaacaagcttttcagaatcttctactgtccgttaagtacggcagattccagggccagagggtcagcgcgtgggagttgattaattcagagtatttctccgaggggcgtagacgccaactccttaggcgctaccggcagcgagaggtgacattggggcaagtggccaagctcctggaagccgagacgcagcgccaggctgatatcatgttgccagctttaaggagcagggttacagtccatcagcttctcgaggctggcatcattgatcagcaactgcttgatcaggtattggccggcaccatcagcccggaagccttactgctcatggacggggtgcgtaggtacctctgcggcctgggcgctgtggggggtgtccgtctgttgccaagcgggcagcggctgagcctctatcaggctatgcgacagaagcttctcggccccagggtcgctctggctctattggaggcccaagcagcaacagggaccataatggatcctcactcgccagaaagcctgagcgttgatgaagcagttcgcaggggggtagtggggcccgaactgtacggacgcttgaagcgggctgaaggagccatcgctgggtttcgggacccatttagcggaaaacaggtgagcgtcttccaggcaatgaagaaaggactcatcccctgggagcaagcagcccgtttattggaggcgcaagtagccaccggagggatcatagaccccacctctcaccaccacttgccgatgccggtggctattcagagggggtacgtagaccaagagatggaaacagctctgtcctccagcagtgagactttcccaaccccagacgggcagggacgaacaagctatgcccagctgctcgaagagtgtcccagggatgaaacctccggactgcatttgctccctctcccggaatctgccccagctctgcccaccgaggagcaggtacagcgctccctgcaggcagttcctggtgctaaagatggcacttcgctgtgggacctccttagctcttgtcacttcaccgaagaacagcgcaggggtctgcttgaggatgttcaggagggcagaacaactgtcccccaactcttagcgagcgttcagcggtgggttcaggaaacaaagttgctcgcccaggcccgagtcatggtcccagggcctcgcggggaggtaccagccgtatggctacttgacgccggaattataactcaagagacgctggaggcccttgcccaggggacccagagtccagcccaagtggctgaacagcccgccgtgaaggcctgtctctggggaacaggctgcgtcgcaggggtcctgctgcagcctagcggggccaaagcatctatcgcgcaggccgttagagacggactcttgccaactggactggggcagcgccttctcgaggcccaagtggccagtgggttcctcgtggatccattaaataaccagcggctgtcagttgaagatgcagtcaaggttgggttagttgggcgggagctcagtgagcaactggggcaggctgagagagccgctgctgggtaccctgacccctattctagggctagtctcagcctatggcaggccatggaaaaaggcctggtgcctcaaaacgaaggtttgccgcttttacaggtgcaattggccacaggcggcgtagtcgaccccgtacatggcgtgcacctgccacaggctgcagcctgtcggctcgggctcctagacacccagactagccaagttttaactgctgtggacaaggacaacaagtttttctttgacccgtccgctagggatcaggtcacctaccagcaactccgggagagatgtgtatgcgatagtgagacaggccttttactgttaccattaccaagtgataccgtgttggaagtggacgatcacacggctgtcgctcttcgcgctatgaaggttcctgtgtcgactggaaggtttaaaggttgctcagtgtccctgtgggacctactactcagtgagtatgttggggctgataagaggcgtgaactcgttgctttgtgtcggtccggaagggcagccgcactgcgacaagtcgtatctgctgtgacaacactcgtggaggctgcagaacgtcagcccctgcaggccaccttccgtggcttgcggaagcaggtatctgcccgcgacctctttcgggcccagctgatttccagaaaaacgttggacgaactttcccagggcaccactaccgtgaaggaagttgctgaaatggacagcgtcaagaggtctctggaggggggcaacttcatcgcaggagtccttatccagggcacacaggaaaggatgagtatcccagaggccctgcgacgtcacatactcaggccaggaaccgctctcgtgctgctcgaggcgcaggcggccaccggcttcattattgacccggttgaaaatagaaagcttaccgtggaagaagctttcaaagcgggtatgtttgggaaggagacatacgtgaagctcctgtcagccgaaagagccgtgacaggttatacagatccttacaccggccaacaaattagtctgttccaggccatgcagaaggacctcattgtgcgggagcacggaatccgattgttagaggcccaaattgctaccgggggcatcattgaccccgtccacagccacagagtgccggtggacgtggcttaccgctgcggatatttcgatgaggagatgaaccggatcctcgcggatccctcagatgataccaaagggtttttcgatcctaacacacatgaaaatttgacctacttgcagctgttggagcgctgtgtggaggatcccgagacagggctgtacctgttacagatcatcaaaaagggggagaattacgtctacatcaacgaggccaccagacacgtcttgcaatcaaggacagccaaaatgagagtggggcgcttcgccgatcaggtagtctctttctgggacctgctttccagtccatacttcacagaagatcggaaaagagagctgatccaggaatatggtgcccagtccggtggactggagaagctgttggaaatcatcacgactacgatcgaggagacggaaacacagaaccaggggatcaaagtggcagcgattagaggagaggtcaccgcagccgatctttttaattccagggtcatcgaccagaagacactccacacactgcgggtgggacggaccggcggccaagccctctcgactctcgagtgtgtgaagccgtaccttgaaggatctggttgcatagcaggcgtaacggtccccagcacgcgtgaggtgatgagcctccacgaagccagccgcaaagaattaatacccgccgcttttgctacatggctcctcgaggcacaagcagcgaccggattcctcctcgacccatgcactaggcagaagttgagtgttgatgaggccgtcgacgtcgggctggtaaatgaggagctgcgcgaacgactgttgaaagccgagagggccgccacagggtaccgcgaccccgcaacaggagacacgatcccactgttccaggccatgcagaaacagctgatcgagaaagcggaagccctgcgcctgctcgaagtccaggtcgcaaccggcggcgtgatcgaccctcagcaccatcaccgactgccgctcgagaccgcctacagaagaggctgccttcacaaagatatctacgcactcataagcgatcaaaaacatatgaggaagaggtttgtggaccccaacacacaggagaaagtcagttacagagaactgcaagagcgttgtcggcctcaggaagacaccgggtggctcctatttcccgtgaataaggccgctcgagattccgaacacattgatgacgagactaggcgcgctctggaagccgaacaagtggagatcaccgtgggccggttccggggccagaagcctacactctgggctctcctcaattccgagtacgtcaccgaagagaagaagctacagctcgttagaatgtataggacccacacccggagggccttgcagaccgtcgcacaactaatactggaacttatcgagaagcaagaaacctccaataagcacctctggtttcagggtattcggcgccaaataaccgcctccgagttgctgtccagcgcaatcattacggaggagatgttgcaagatctggaaacaggcaggtccaccactcaagaacttatggaagacgaccgagtcaaacggtatctagaggggacttcctgcattgctggcgtgctcgtacctgctaaagatcagccagggagacaagaaaaaatgtccatttaccaggctatgtggaagggggtcctgagaccgggaactgccctggtcctccttgaggctcaggccgcaaccggcttcgtgatcgatccagtaagaaacctgagactctcagtcgaagaagctgttgctgctggagtagtcgggggggaaatccaggaaaagctgctcagcgccgaacgagctgtcaccgggtacactgacccctatacagggcagcaaatatccctcttccaagccatgcaaaaggacctgatagttagggagcacggaatccggctgctggaggcccagatcgctacagggggcgtgattgatccggtgcactctcaccgggttcctgtggacgtcgcttatcggcgtggctactttgatgaggaaatgaacagggtcctggccgatcctagtgacgatactaaagggttctttgatccgaacacacatgaaaatctgacctacctgcagctacttcagagagctacacttgatcccgagacaggactcctcttcctatcgctgagcctccagtag

SEQ ID NO: 308473 - DNA, 15267 bp, Artificial Sequence
  derived and/or modified sequence
atgagcggccacaccctgccccccctgcccgtgcccggcaccaacagcaccgagcaggcctctgtgccccgcgccatggcggctaccctgggtgctgggacccccccacgtccccaggcccgcagtatcgcaggagtgtatgtggaagcttccggtcaggcgcagtcagtgtacgcagcgatggaacaaggtctactgcctgcggggctgggacaagcactgctagaggcgcaggccgccaccggcgggctcgttgatctcgctagaggacagctgctgccggtgtccaaggcgctgcagcagggtctggtgggcctggagctgaaagagaagctactggccgcagagagggccaccaccggctacccggacccttatggcggggagaagcttgccctttttcaggcaatcgggaaagaagttgttgaccgtgcccttggccagagctggctggaggttcagttggccaccggagggctggtggatcctgcccagggcgttctcgtggctccagagcccgcttgtcaccagggtctgcttgatcgggaaacttggcacaagttgtctgagctggaaccgggaaccggcgacctcaggttccttgatcctaacactctggagagattgacctaccaccagctgttggagcgatgcgtcagggcccccggcagcgggcttgcattattgccactgaaaataacgtttagatcaatgggcggggctgtctctgctgccgagctgctggaggtgggcatcctagatgaacaggccgtccaaggactgcgtgaaggtcgcctggccgcagtggacgtgtccgcccgggccgaggtccgccggtatctggaaggcaccgggagcgtggcaggcgtggtgctcctacctgaggggcataagaagtcatttttccaggcagccacagaacatctcttacccatgggcactgctttacctttgctcgaagctcaagctgcaactcacactctggtggatcctatcaccggtcagaggctctgggtggatgaagccgttcgggctggcctggtatctcctgagctgcacgagcagctgctggtggcggaacaggctgttacaggccaccacgacccattctctggcagtcaaatccctctattccaggctatgaagaaaggactcgtggacagaccactcgcactgcgtctgctggacgctcagctggccactggcggacttgtgtgtccagccaggaggttgcgccttcctctggaagcagcactccgatgcggatgtctggacgaagatacccagcgccaattatctcaggccgggtctttttccgacgggacacacggcggactgaggtatgaacagctgctggctctgtgtgtcactgatcccgaaaccggcttggccttcctacccttatccggaggcccaagaggaggggaaccccaaggccccccttttatcaaatacagcactcgccaagcactttcgaccgcaacagctaccgttagcgtcggcaagtttagaggacgtcctgtgtctttatgggagcttctgtttagtgaggctattagttccgaacagcgtgccatgctggcacaacaataccaggagggaacgttgtccgtggaaaagctggccgctaagctgagcgcaaccctggagcaggccgccgccacagctcgggtcaccttcagcggacttcgggatacagtgacgcccggtgaattgctaaaggctgagataatcgatcaggacctgtacgaaagacttgagcacggacaggccaccgccaaggacgtcgggtcactcgcgagcgttcagcgctacttgcaaggaactggatgcatcgctggcctgctgctgccaggatcccaggagcggctctcaatctacgaggctaggtgcaagggtctgttgcggcccgggaccgctctgatccttctcgaagctcaggcggcaactggctttatcattgatccaaaagccaataagggacacagcgtggaggaggctctacgcgccgcagtgataggccctgacgtgtttgctaagctgctgtctgcagagcgggccgtgactggttataccgatccttataccggacagcaaatctctctctttcaagccatgcagaaaggcctaattgttagagagcacggcattaggttactcgaagcccagattgccacggggggcgtgatcgacccagtgcacagccacagggtgcccgtcgacgtggcttatagaagaggctacttcgatcagatgcttaacctaatactcctggacccgagcgatgatactaagggatttttcgaccccaatacacacgagaacctgacttacttacaattgctcgagcgctgcgtgcgggatcccgaaactggattgtacctcctaccactctctagcacacagtcccctctggtggacagtgccacacagcaggcattccagaatctccttttgtctgtcaagtacgggaggtttcaggggcaaagggtgtccgcctgggagctgatcaattctgagtattttagcgagggtcggcgccgtcagctccttcgaagatatcgccaacgggaagtgactctgggacaagtggccaagttacttgaggccgagacccagcgccaagcagacatcatgttacctgctctgcgctctcgtgtcacagttcaccagcttctcgaggccgggattatcgaccaacagctattggaccaggtactcgctggcacgatatcgccggaggctcttttgctgatggatggtgtccgccgatatctgtgtggattgggagccgtggggggcgtgcgccttctgccctccggtcagaggctgagcctataccaagcaatgcggcagaagctgctcggcccgcgcgttgccctggcgctgctagaagcccaggcagcgaccggtaccatcatggacccccatagtccagaatccttgagcgtcgatgaggccgtaaggagaggtgtcgtgggaccagagctttatggacgcctgaagcgtgctgagggcgcaatagcgggttttcgggatcccttttcaggcaagcaggtgtccgtattccaggccatgaaaaaggggctgatcccatgggagcaggctgcacgacttttagaagcccaggtggccacaggtgggattatcgacccaacctcccaccatcacctccctatgcccgttgccatccagcgcggctatgtcgatcaggaaatggagacagcactgtcgagtagtagtgagacattccccactcccgacgggcagggtcggacttcctacgctcaactactggaagaatgtcctcgcgatgaaacctccgggctgcatttactgccactgcctgagtccgccccagcacttcccacggaagaacaggtgcagagatccctgcaggcagtgcccggggcaaaggacggcacttcactgtgggatctgctgtcctcctgtcacttcacagaagaacaacgaagagggctgctcgaggacgtacaggaagggcgaaccaccgtgcctcagttactggcatccgtgcaaaggtgggtgcaagaaactaagctgctggctcaggcccgcgtaatggtgcccggaccccgtggagaagttcctgcagtgtggctcctcgatgcagggattattacacaggaaacactggaagccctagcacaggggacacagtcaccagcccaggtggcagagcaacccgccgtaaaggcatgcctgtggggcaccgggtgcgtcgctggggtgttgctgcagccgagtggggccaaggcatctatcgcgcaagctgtgcgagacggactgttgccaacaggactgggtcagaggctccttgaggcacaggtggcctccggttttcttgtggacccccttaacaaccagcgcctcagcgttgaggatgccgtgaaggtggggctggtgggtcgggaactcagtgagcagctcggacaagctgagcgcgcggctgctggataccccgacccctactccagagcctcactgtccctgtggcaggcaatggagaaggggctggtccctcaaaatgaaggcctgccccttttgcaggtgcaattagcaactggaggtgtggtggaccctgtgcatggcgtccatcttccgcaagctgcagcctgtcgcttgggtctactagacacccagacctcccaggtgctcacagctgttgataaagataataaattcttttttgaccccagtgccagagaccaggtaacgtatcaacagctccgtgagaggtgcgtctgcgatagtgaaaccggcctgcttctgttgcccctccccagtgacacggtactcgaggtggatgaccatactgcagtcgcgctacgggcaatgaaggtgcctgtcagcaccgggcggttcaaaggatgtagtgtgtctctttgggacttgctactctctgagtacgtgggtgcagacaaacggcgtgagctggtagccttgtgcaggagcggcagagcagcggcactccggcaagtggtgtctgccgttacaacattggtggaagccgccgaacgccagccactccaggccacattccgcgggcttaggaagcaagtgtctgccagagacctgtttcgggcccaattgatctccagaaagacccttgatgagctgtctcagggaaccacgactgtgaaagaggtggccgagatggacagtgtgaagaggtccctggagggtggaaatttcatcgcaggagtgcttatccaaggcactcaagagcgcatgtccattccagaggctctccgcaggcacatcttgcgtcccggaacagctctggtgttgctggaggcacaagctgccacggggttcatcatcgacccggtggaaaatagaaagctcactgtagaggaggccttcaaggccggcatgttcggtaaggagacctacgtgaaacttctgagtgccgaaagggctgtgacgggatacactgatccctacactggacagcagatttcacttttccaggccatgcagaaggatctcattgtacgcgagcacggaatccgtttgcttgaggctcagatcgcaacaggggggattattgatcccgtccacagccaccgcgtgcccgtggacgtggcttacaggtgtgggtatttcgacgaagagatgaaccgcattctggccgatccatctgacgacaccaagggtttcttcgaccccaatactcacgagaatctcacctacttacagctattggagcggtgtgtcgaagacccagaaacaggcctgtaccttctacagattattaaaaaaggcgagaattacgtatacatcaatgaggcaactagacatgttctccagagtaggacagcaaagatgagagtgggtcggttcgctgatcaggtggtcagcttctgggatctgctctcctctccttactttaccgaggaccggaagcgagagctgatacaggagtacggggctcagtcaggcggtcttgagaagctgctggagataatcacaactaccatcgaagaaactgagacccaaaatcaggggatcaaggtggccgccattcgcggggaagtcaccgctgccgacctcttcaactccagggtgatcgatcagaagaccctgcacactctgagagttggaagaacagggggccaggcactgagtacacttgagtgcgtaaagccttacttggaaggcagtggctgtattgctggcgtaaccgtgccaagcacacgagaagttatgtcgctgcatgaggctagtcgcaaggagctcattcctgccgccttcgccacctggctacttgaagctcaggccgcaactggatttctcctggacccctgcacaaggcagaagctttcagtcgatgaagccgtcgacgtcggcctggtgaacgaggaactgagagaaagactcttaaaagcagaaagggctgcgaccgggtatcgtgaccccgctaccggggatactatcccgcttttccaggctatgcagaagcagctgattgagaaggcggaagctctgcgcctgctagaggttcaggttgccaccggcggcgtgatcgacccacagcatcaccaccgcctaccgctggagacggcctataggcgcgggtgccttcacaaagacatctacgccctcatctctgatcagaagcatatgaggaaacggtttgtcgacccgaacacccaagagaaggtctcctatcgggagctccaggagagatgtcggccccaagaggacacaggctggctgctttttccagtgaataaggcagcccgggattctgagcacattgacgatgaaacgagaagagcccttgaagcagaacaagtcgagataactgtggggcgctttcggggacagaaacctaccctgtgggccctgctgaatagcgagtacgtgacagaggagaagaagttgcagttagttcgcatgtacagaacacacacaagaagggccctgcaaactgttgcccaactgatactcgagcttatcgaaaagcaggagacatccaacaaacacctctggtttcagggcattagaagacagatcaccgcatccgagctactgagttcagctatcatcaccgaagagatgcttcaagatttggaaacagggcgcagcaccactcaagagctgatggaagatgacagggttaaacgatatttggaaggaacatcatgtattgccggcgtattggtgccagcgaaggaccaacccggtaggcaggaaaagatgagtatctatcaagcaatgtggaagggggtacttcgaccaggtactgcgcttgtccttttggaggcacaggcggccacaggttttgtgattgaccccgtgcggaatctgagactcagcgtggaggaggcagtggctgctggcgtggtagggggcgaaatacaagagaagttactctccgccgaacgggccgttactggatacactgacccatatacaggacagcaaatttctctgtttcaagctatgcagaaagatcttattgtgagggaacacggcatccgccttttggaagcccagattgccactggcggagtgattgaccctgtgcacagtcaccgggtgcccgttgacgtggcgtatcgtaggggctactttgatgaggaaatgaacagagtacttgctgatccatcagacgacaccaaaggcttcttcgaccccaatacccacgagaacctcacatatgtccagctgcttagacggtgtgttccagatcccgacaccggtctttacatgctgcagcttgccgggagaggctcagccgtgcaccagctatcagaagaactaagatgcgcgctgagggatgcgagggttacccccggaagcggcgcattgcaggggcagtcggtgagcgtctgggagttgctgttttaccgggaggtttccgaggatagacggcaagacttgctcagtcgttacagggccgggaccctgactgtggaggagctgggcgcgacacttacatcactcctcgctcaggctcaggctcaggcaagggccgaggccgaggcggggtccccacgccctgaccccagggaagcgctgcgggcggccaccatggaagtgaaggttgggcgactcaggggccgcgccgtgcctgtgtgggacgtcctggcttcaggatacgtgagtcgggctgcccgcgaggaactgctggccgagttcggctcaggtaccctcgacctcccagcactcacacgacgcctgacagctattattgaagaagctgaggaggcacccggcgcgcggcctcagctgcaggatgcctggagaggcccccgtgagcctgggcccgccggacgtggagacggagactctgggagatctcagagggagggccagggtgagggagaaacccaggaggcggccgccgccgcggccgctgctgcagccagacgccaggagcagaccctccgcgacgctaccatggaagtacaaaggggccaatttcagggaagacccgtgagcgtgtgggacgtccttttctcttcctacctgtctgaagcacgtagagacgaactgcttgcacagcacgccgccggggctctgggtcttccagatcttgtggctgtgctaacccgggttattgaggaaaccgaggaaagactgagtaaggtctcttttagaggcctgcgccgacaagtaagcgcttctgaattgcatacatccggtatactcggccccgagactctcagggacctcgcccaggggaccaaaacactgcaagaggtgactgagatggatagtgtaaagcggtacctcgagggtacgagctgtatcgctggagtgctagtgcctgccaaggaccagcctggaagacaggagaagatgtctatttatcaggccatgtggaagggcgtgctgcgcccgggcacagcccttgtactccttgaagcccaggcggctactgggtttgtgatcgacccggtcaggaatctcaggttgtccgtagaggaggcagtcgcagctggtgtggtcggcggagagattcaggagaagctgctctcagccgagcgggccgttaccggctacactgacccctacaccggccagcaaatctccctctttcaggcaatgcagaaagacctcatcgtgagagagcacggtatcaggctgctcgaagcccagatcgctactggcggagtcatcgaccctgtgcacagtcatagagttccagttgacgtcgcttaccagagaggctacttcgatgaagagatgaaccgggtgcttgccgacccctcagatgacactaaggggttcttcgacccaaacacacatgagaatctgacctatgtgcaactgctaagacgttgcgtgcctgatcctgacactgggctgtacatgctccagctcgctggccgcggaagtgctgttcatcagctgagtgaggagttacggtgtgcacttcgggatgcaagagtgacacctggttctggagcgctgcagggtcagtcggtctcagtgtgggagctccttttctatagggaagtctcagaggatcggcggcaggaccttcttagtagataccgggccgggacactgaccgtggaggaacttggtgcgaccttaactagtctgcttgcccaagctcaggcccaggcgcgggccgaagcggaggccgggtcacctaggcccgatcctcgggaagccctcagagccgctacaatggaggtgaaagtcggaaggttaagagggcgagctgttcctgtgtgggatgtcctggccagcggctacgtatcaagagccgcgagagaagaactcctggccgaatttggcagcgggacactggacctcccagcacttactagacgactgacagcaatcatagaggaagctgaggaggcacccggcgccagaccccaacttcaggatgcatggcgggggccccgtgaaccaggcccagctggccgtggcgacggcgactccggtcgatcacagcgtgagggccaaggcgaaggtgagacccaggaggcggccgccgccgcccggcgacaagagcagaccctaagggacgctaccatggaggtgcaaaggggccaatttcagggcaggcccgtgagtgtctgggatgtgttattctcatcttatctgagcgaggcacgccgggacgaactgcttgcccagcacgcagcaggtgctcttggactaccggacctggtagcagttttgactcgcgtgatcgaggaaacagaagagagattgagtaaagtgtcatttcgagggctaagatgccaagtgagcgccagtgagcttcacacttcaggcattctagggccggaaacattgagagacctcgcacagggcaccaagactctacaagaagtgactgagatggatagcgtgaagcggtacctggagggcacctcctgcatagccggggtattagtgcctgccaaggatcaacccggtcgccaagagaagatgtctatctatcaggctatgtggaaaggggtgctacggccggggaccgctttggttctgttagaagctcaggcagccactggttttgtgattgatcccgtgagaaacctcaggctgagtgtggaagaggccgtagcggccggggtggtcggaggggagatccaagagaagctcctgagtgccgagcgggctgtcaccggatacaccgatccttacacgggacagcagataagtctgtttcaggcgatgcaaaaagatcttatagtccgggagcatggaatccgcttgttggaggcacagattgcaacaggcggtgtgatagatccggtccactctcatagagtacctgttgacgtggcctataggcggggctattttgacgaggaaatgaaccgggtgcttgcggatccaagcgacgacacaaagggcttttttgatcctaacacacacgagaacctgacttacgtgcaactgctgcggagatgtgtaccggatcctgataccgggctttacatgctgcagctcgcaggaaggggatctgctgtgcaccagctgtccgaggaactccgctgtgccttgagagatgccagagtcactccggggtccggcgcactccaggggcagagcgtgtctgtgtgggagttactattttaccgggaagtctcagaagacaggcgccaggatctcctatctaggtaccgggccgggacacttaccgtcgaagagctgggagccacgcttacatccctcctggctcaggcccaagcccaggcacgggctgaagctgaagctgggagccctagacctgacccaagggaggctctcagggccgcaacaatggaggttaaggtcggcaggctgaggggccgtgcagtccccgtctgggatgtcctggctagcgggtatgtgtcacgcgcagcgcgcgaggagttgctggccgagtttggctccgggactctggatttgcccgccctcactagacgcctgactgccatcatcgaggaagcagaagaggcccctggcgcacggccacagctccaggatgcttggaggggacccagagagccaggaccagcagggaggggggatggtgattccggcaggtcccagcgcgaggggcagggagaaggtgagacccaggaggccgcagccgccacagctgccgctcggcggcaggagcaaactttgcgcgacgctacaatggaggtccagagaggtcagtttcagggtcgacctgtctcagtctgggacgttctgtttagttcctacctctcagaagcaaggcgcgacgaactgctcgcccagcatgccgctggagccttgggcctcccagaccttgtcgccgtcctgacacgagtgatcgaagaaactgaagaaaggctgtcaaaggtttctttcagagggctgagacggcaagtgtccgcttccgaattgcacacctcagggatcctaggacccgagacactgagagacttagcccagggcacaaagaccctgcaggaagttaccgagatggacagcgtgaagcggtatttagagggaacatcgtgcatagctggggtactggtccccgccaaagaccagcccggaagacaagagaagatgtccatctatcaggcaatgtggaaaggtgtgcttcgccctggaactgcattagtcctgctcgaggcacaggcagccacaggatttgtcatcgatccggttcgaaacttgagactctctgtggaagaggccgtcgccgcgggagttgtcggcggagaaatccaggagaagctcctgagtgccgaacgcgctgtgactgggtacaccgatccctacacaggacaacagatctccctgtttcaagcaatgcagaaagatttaatcgtgcgggaacacggaattcgcctgttagaggcacagatcgccaccgggggggtgatagatcctgtccattctcatagagtccctgtggacgtggcgtaccgacgtggctattttgacgaggagatgaacagggttctcgcagacccatccgatgatactaagggcttctttgatcccaacacccatgagaatctgacttatgtgcagctgctgcgacgctgcgtgcccgaccctgataccggcctgtacatgctccagctggccggtcgaggcagcgctgtgcatcagttgtcagaagaactgcggtgtgctctgagggatgcccgcgtcacgccgggttctggtgctctccagggtcaaagcgttagtgtatgggagctgcttttctatcgtgaagtgagcgaggatcggcgtcaagatcttttgtcacggtatcgagccggaacactgacagtagaagaactgggtgctacactgacttccctgctagcacaggcccaagcacaggcgcgggccgaagctgaggccggatcccctcggcccgacccaagagaggccctgagggccgctaccatggaagtaaaggtggggcgactcagggggcgtgcagtgcccgtctgggatgtgctagccagcgggtacgtgtcacgagcagctcgcgaggagttattagccgaatttggctcgggcacactggaccttcctgcccttactcggcgcctgaccgcaatcatcgaggaggccgaggaggcaccgggtgcaaggccgcagctgcaggatgcatggcgcggaccacgcgaaccaggacccgccgggcgcggggatggagattccggacgatcgcagagagaaggacaaggagaaggggagacgcaggaggctgctgctgccaccgccgccgctcgcaggcaggagcagacactgcgcgacgcaaccatggaggtgcagcggggccagttccagggacggcccgtgagtgtctgggacgtgctcttttccagttatctgtctgaagcgagacgcgatgagctgctcgcccagcatgccgccggcgccctcggattgcctgacctggttgctgtgttgaccagagtcattgaggaaacagaagaaagattgagcaaggtcagcttccgagggctgagaagacaggtcagcgccagcgaactccacacctccggcattctcggaccagaaacgctccgagacctagctcagggcaccaagactttgcaggaagtcactgagatggactctgtaaaacgatacctggagggcacctcctgcatagctggggtgctggtgcctgccaaggatcagcccggccatcaggagaaaatgtcaatctaccaagctatgtggaagggggtcttgagaccaggaactgcccttgtccttttggaggcccaggccgctactggatttgtcatagatcccgtgaggaatttgcgcctgagcgtcgaggaggcagtcgccgccggggttgtaggcggggagatccaagaaaagctgctgtctgctgagcgcgcggtgaccgggtacactgacccgtacacaggacagcagatctcactgtttcaggctatgcaaaaagatctgatcgtgagagagcacggtatcagactgttggaggcccagatcgcaacgggcggagtcatagaccccgtgcactcacatagggtgcccgtcgatgtcgcttatcggcggggttacttcgacgaggaaatgaatagggtcctggcccatccgagtgatgacacaaagggattcttcgatccgaacacgcatgagaatctcacttacgtgcaacttctgaggcgctgcgttcctgaccccgataccggactgtacatgcttcagctggccggacgcggctcagccgttcaccagctctccgaagagttgagatgcgccctccgcgacgcccgcgtaatgccagggagcggcgctctccagggtcagagcgtgtctgtgtgggaactactgttttatagagaagtgtctgaagacagacggcaggatctcctgtctagatatcgcgccggcacactgacagtggaggaactcggagctaccctgacctctctgctcgcacaggcccaggcccaggctcgcgcagaggccgaggctgaggctggatccccccgccctgatccccgggaggccttgagagcagcgactatggaggttaaggtgggtcgtctgcggggcagggccgtgccagtttgggacgtgctggcctccgggtacgtaagtggggccgcaagagaagaactgctggccgagtttggcagcggcaccctcgacctgccggccctcacgcgtcgacttactgctatcatagaagaggcggaggaggcgcctggggcccggccccagctccaggacgcatggcgcggcccaagggagcccggacctgctggaagaggagatggcgactccggacgatctcagcgggaggggcagggcgaaggtgagacacaagaggccgcagcagccgccaggaggcaagagcagacactcagggacgcaaccatggaggtgcagagaggacaattccagggcagacccgtgtcggtctgggacgttttattttcaagctatctgagcgaagctcaccgggacgaattgttggcgcagcacgcggcaggtgcactaggcctgccggaccttgtagcagtactgacccgcgtaatcgaggagacagaggaacgcctaagtaaagtctccttccgcggccttcgccgacaagtgtctgcctcagaactgcacacctctggcatactgggacccgaaaccctgagagacttggcgcagggtaccaagactctgcaggaagtcaccgagatggattcagtgaagcgttaccttgagggaacttcttgcatcgccggcgtcctcgttcccgcaaaagaccagccagggcggcaggaaaaaatgtcaatctatcaggccatgtggaaaggcgtgctgcggcctggcacagcactggtgctgctggaagctcaagcggccacaggttttgtgatagacccagtgcggaatcttcggctcagcgtggaggaagctgtggcggctggggtagtcgggggggagatccaagaaaagttgctgagcgccgaaagggccgtcactgggtacacagacccttacaccggacaacaaataagtttgttccaggcaatgcagaaggatctgattgtcagagaacacggcatccgactcctcgaagctcagatagcaaccggtggcgttattgatccagtacatagtcacagagtgcctgtggacgttgcctatcgacggggttactttgacgaagagatgaaccgtgtgctagcagacccctccgacgacacaaagggattttttgatccaaacactcacgagaacctgacctatctgcagctgttgcagcgggccaccctcgacccggagactgggcttctgttcttaagcttgtcccttcagtag

SEQ ID NO: 308474 - DNA, 7262 bp, Artificial Sequence
  derived and/or modified sequence
atgtccggtcatacgctgccccctctgcccgtgcctggaacaaactctacggaacaggcttccgtgccgcgtgctatggccgcaaccctgggcgctggcacacctccccgaccgcaggctcgttcgattgccggagtgtacgtcgaagcttcgggccaggcgcagtccgtgtacgctgccatggagcaaggcctgctacccgcaggcctgggccaggcacttctcgaggcccaggcagccacaggaggtctcgtggacctggcgagggggcagcttttgccggtttccaaggctctgcaacagggattggtaggcttagaactgaaggagaaattgttggcagccgagcgagctacaactgggtaccccgacccctacggaggtgaaaaactggcgttgtttcaggctattggtaaggaggttgtcgacagagctttaggacagagttggcttgaggtccagctggccacaggaggtctcgtcgaccctgcccagggggtgctggtggcccctgagcctgcctgtcaccagggactgctcgatcgtgaaacatggcataaactgtctgagcttgagccagggactggcgatctgcgattcctcgacccaaacacgctggagagacttacataccatcaacttctggaaaggtgcgttcgtgcacccggtagcggattagccttactgcctttaaagattacgttccggtcaatgggcggtgcagtatcagcagcagagctgctggaggtcgggatcctggatgagcaggctgtgcaagggctcagggagggcagattggccgcagtcgatgtgtccgcacgtgctgaggttcggaggtacctggaaggcacagggtcggttgctggcgtggtcttgcttcccgaaggccataagaaaagtttctttcaggccgcaacggagcacctcctgcccatgggaaccgctcttcctctgctcgaggcccaagctgccacccatacgctagtggatccgataactggacagaggttgtgggtcgatgaggcagttcgggcaggtctggtctcccctgaactgcatgaacaattactcgtggccgagcaagccgtgacgggacaccatgaccctttttcaggttcacaaattcccctgttccaagcgatgaaaaagggcctagtcgacagaccattggcattaaggttgttagatgcccagctggccacgggtgggttggtctgccccgcaaggagactacggctcccgctggaagctgcactgaggtgcggatgcctcgatgaggatacacagcgacagctgagccaggccggaagttttagcgacggtacccatggtggcctcagatacgaacaactgctggccctctgtgtcactgacccagagacagggctggctttcctgccactgtccggaggacctcggggtggcgaaccacaggggcctcccttcattaagtactcaaccagacaggctctcagcaccgctaccgctaccgtgtccgttgggaagttcagaggcaggcccgtttccctgtgggaactcctcttctccgaagcaataagcagcgagcagcgtgccatgctcgctcagcagtaccaggaggggaccctctccgtcgaaaaactcgccgctaaactgtccgcaaccctggagcaggccgcagcgactgcacgggtcactttttctggcctgcgtgatacagtgacaccaggagagctcctcaaggcggaaatcatcgatcaggacctctatgaaagattagaacacggtcaagctacagcaaaagatgtcggttcgctcgcctccgttcaaaggtatctccagggaactgggtgcattgcgggtctgctgctcccgggatcacaggaaaggctgtctatctacgaggctcggtgtaagggacttttgcgacccggtacagccctgatcctgttagaggctcaggctgctaccgggttcataatagacccgaaggctaacaaggggcactcggtggaagaggccttaagagccgctgttatagggccagacgtgtttgctaaactgcttagcgccgaacgagctgtcactggctatactgacccctacactggacaacagatctccctctttcaggctatgcagaaaggactgatcgtgcgcgaacacggcatccggctgttggaggcccagatcgcgacaggaggggtcatcgaccccgtccacagtcatcgggtcccagtggacgtagcttatagacggggatattttgatcagatgctgaatcttattctgttagatccatccgacgatacaaaggggttcttcgaccccaacacccatgagaatttgacctatctgcaattactggagagatgcgtgcgcgaccccgagactggcctttacctcctccctctttcaagcacacagagccctctcgtcgatagtgctactcagcaggcatttcagaacctgttactcagcgttaagtatggtcgcttccagggacagcgggtctctgcttgggaattgattaactcagagtactttagtgagggacgtaggcgtcaattactgcgacggtatagacagagagaggtgactctagggcaggtggcaaaactgttagaggcagaaacgcagcgtcaggctgacatcatgctgcctgctctcaggagtcgcgtgaccgtccatcaactgctggaagcgggaataatcgatcagcagctgttagatcaggtcctcgctggcaccatttcacccgaggcactgctgctgatggacggagtgcggagatatctgtgtggacttggggctgttggcggtgtaagactgttgccctcgggccagcgcctttctctctatcaagccatgagacagaagctgctgggtcctcgggtcgcccttgcgctgctggaggcccaggctgcaacgggaactatcatggatccgcactcgccggaatctctttcagttgacgaggctgtgaggcgaggagttgtgggaccagagttgtacggaagactaaagagagccgagggggcaatcgctggctttagagaccctttttcggggaagcaagtgtccgtgtttcaggcgatgaagaaaggcctgatcccatgggaacaagccgcacgattattggaggcccaggtggctaccggcggaatcatagatcccacctcccaccatcacctacccatgccagtcgcgattcagcgagggtacgtggaccaagaaatggaaaccgcactcagcagctctagtgagacattcccaacgcccgatggacagggcagaaccagctacgcacaactcttagaagagtgtccaagggacgagaccagcggcctccatttactgcccttgcccgagagtgcacccgctcttccgactgaagaacaagtccagcggtccctccaggcggtcccaggcgcaaaagatggaacgtcgctgtgggacctgctcagtagttgtcactttaccgaggaacaacggcgaggactgctcgaggacgtccaggaaggacgcacaaccgtcccccagctgctcgcgagtgtgcaacggtgggtccaggagaccaaacttttagcccaggcgagagtgatggtccctggaccaagaggagaggtcccggcagtatggcttttggacgcgggaattatcacccaagagactctggaagcccttgcccaaggaacccagagtcccgcacaggtagctgaacagcctgccgttaaggcctgtttgtggggaaccgggtgcgtggctggcgtcctgctgcagccttccggggcaaaagcatcaattgcgcaggctgtaagggatggtctcttacctaccggtttggggcaaaggctcctggaggctcaggtggcaagtggctttctcgtggaccccctgaacaaccagagactatctgtggaggatgccgtaaaggttggcctggttggtagggagctgtctgaacagttaggccaggccgagagagccgcagccggatatccggatccatactctcgcgcttccttatccctgtggcaggcaatggaaaaaggcctagtgccccagaatgaaggccttccccttttgcaggtgcagctggcgaccggtggagtcgtggaccccgtgcacggcgtgcatcttcctcaggcggctgcttgtcgactgggccttctggacacgcagacatctcaggtgctgacagcagtggataaggacaacaaatttttttttgacccttccgcgcgtgaccaggtgacatatcagcaattacgcgaacggtgtgtatgcgactccgaaacagggctcctcctgctgcccttaccttccgacaccgtactggaggtggacgatcatacagctgtggcccttagggcaatgaaagtgccagtcagcactggacggttcaaaggatgtagcgtgagcctatgggacctgctgcttagcgaatatgttggagccgataagcgtcgcgaacttgtggcactctgtcggtcagggagggccgctgctctacgacaggtggtctccgcggtgaccaccttggtggaagcagcagaaagacagcctcttcaggccacatttcggggactgagaaaacaggtgtcagctagggatctgtttcgagcccagttgatcagcaggaagaccctggacgaactctcacagggaacaacgacggtgaaagaggtggcggagatggactccgtaaagcggtcattagaaggtggtaatttcatagccggtgtgctaatccaaggcacacaagagcggatgagtattccagaggcactccggcgacacattttaagaccagggacagcattagtcctcctggaagctcaagccgctaccggatttattattgatcctgtggagaatcggaagctcaccgtcgaggaggctttcaaagccggtatgttcggaaaggagacctatgtaaaacttctcagcgcggaacgcgctgtaactgggtatacagacccctacacagggcagcagatctcattattccaggctatgcagaaggatttgatcgtcagagagcatgggattcgattgctggaggctcagatcgcaactgggggaatcattgatcccgtacacagccacagagtgccagtagacgtggcctaccggtgcggctacttcgacgaagaaatgaataggatactagccgacccatccgatgacacgaagggattcttcgatcccaacacccacgagaatctgacttatttgcagctattagaacggtgcgtcgaagatcctgagactggcctgtacttgctccagatcatcaaaaaaggggagaattacgtgtacattaacgaggctacccgtcacgtgctgcaatctcgaacagcaaaaatgagagtcggcaggttcgccgatcaggtggtttccttctgggacttattgtccagcccctacttcaccgaggatagaaaacgagagctcatacaggaatatggagcacaatccggcggactggagaagctactcgagatcatcacaacaaccatagaggagacggagacccagaatcaaggaatcaaagtcgctgctatccgcggagaagttactgctgcagatctgtttaactctcgggtgatagaccagaagaccctgcatacccttcgtgtaggccgaactggagggcaagcactgagcacactagagtgcgtcaagccttacctggaaggatccgggtgtattgccggtgtgaccgtcccgtccacacgagaagtgatgagtctccacgaagcatcccgaaaagagctgataccggctgcttttgcaacatggttgctggaagcgcaggccgctaccgggttccttcttgatccatgtaccaggcaaaagctgagcgtggacgaggctgtggatgtaggactggtcaacgaagagcttagagagagattgctgaaggccgagagagccgcaaccggatatcgcgaccccgcaaccggcgacacaatcccactcttccaagcgatgcagaaacaactgattgaaaaggctgaagctctgcgacttctggaggtgcaagtggcgaccggtggggttattgatccacagcatcatcaccgccttcctttggaaacggcataccgcagggggtgcctgcataaggacatctatgctttaatttcggatcagaagcatatgaggaaaaggttcgtcgatccaaatacacaggagaaggtcagctaccgagaactgcaggagcgctgccggcctcaggaggacacgggttggctgctcttccctgtgaataaggcagcccgagatagcgagcacatcgatgacgagacacgacgagcccttgaagccgagcaggtggaaattaccgtcggaaggttcagagggcagaagcccacactgtgggctttactcaattccgagtatgtgacagaggagaagaagctacagctcgttaggatgtataggactcacacacggagggccttacagacagttgcccagttgatattagaactgatcgagaagcaagaaacgagtaacaagcatctgtggtttcagggcattagaaggcagatcacagcttctgaacttctgagctccgctatcattacagaagagatgctgcaagatctggaaactggcaggagtaccacccaggagctgatggaggacgacagggtgaagagatatctggaaggcactagctgcatcgctggcgtgttggtcccagctaaagaccagcccggtaggcaagagaagatgtcaatctatcaggcaatgtggaaaggcgtgctcagacctggcaccgccttggtgttgctggaggcccaggcagccactggatttgtgattgacccagtgaggaacttgcgtctctctgtggaagaggccgtggccgctggcgtggtaggtggagagatccaagagaaactcctctcagctgaacgtgctgtcaccggctatactgatccctacacaggtcaacagatctccctgtttcaggcgatgcaaaaagacctcatagtgcgggagcatggcatccgcctgctcgaggcacagattgctaccggcggagtgatcgaccccgtccactcccacagggtgccggtcgacgtggcctacagaaggggttatttcgatgaagagatgaatcgcgtgcttgccgaccccagcgacgacacgaaaggcttttttgatcctaatacacatgagaatctaacctacctgcagctgttgcagagagcaactctggatcccgaaactgggctgctattcctgtccctgagcctgcagta

SEQ ID NO: 308475 - DNA, 15267 bp, Artificial Sequence
  derived and/or modified sequence
atgtccggccacacactccctcccctgcctgtccccggaaccaactctacagagcaggccagcgttccccgagccatggctgcgaccctaggagccggaactcctccacgtccacaggctcggtccatcgccggagtatacgtcgaagctagtgggcaggcgcaatccgtgtacgcagcaatggaacagggactgttgcctgctgggctggggcaggccctactggaagctcaggcagccactggcggtttggtcgacctagcgcgtggccagcttctgcccgtgtctaaagcactgcaacaggggctggtcggcctggaactgaaggaaaaactactcgcggctgaacgtgcgactacagggtaccccgatccctatggcggagagaagctggcattatttcaggcaattggcaaggaagtggtcgaccgagccctgggccagtcatggctagaggtgcagctcgcaaccgggggactcgtggatcctgctcaaggggtcttggtggcgcctgagccagcttgtcaccaggggttgctggatcgggaaacctggcataagctctccgagttggagcctggcaccggggatctccggttccttgaccctaatacactagagcgtctgacgtaccaccaactcctggaacgctgtgtccgagccccaggcagtggattggcgctgctgcctcttaaaatcactttccggtctatgggcggagctgtgagtgcagctgaattattagaagttggcattctggatgagcaagcagttcagggacttagagagggtcgactcgcagccgtcgacgtttctgcacgagccgaagtgcggcgttatctcgagggcacgggctcggttgccggagtagttttgctccctgaagggcataagaagagtttttttcaggctgcaaccgaacacctcctccctatgggtacagcactgcctctattagaagcccaagcagcaactcacaccctggttgacccgattacaggtcagagattgtgggtggacgaggccgtgcgggcaggcctggtttccccagagttacatgagcagcttctcgtcgccgagcaggctgtaactgggcaccatgatcccttcagcgggagccagattccactcttccaagccatgaagaaaggtctggtagataggcccctggccctaagactattagacgcgcaattagctacaggcggtttggtgtgtcctgctagacgactgaggctcccattggaggcagctcttaggtgcggctgtctggatgaagatacacagagacaattgtctcaggccggtagcttttccgatggcacacacggcggactccgctatgagcagctgctcgcactgtgtgtgactgaccctgagaccggtctggccttcttgcctctgtcgggaggacctcggggaggcgagccccagggaccccctttcatcaagtacagtacacgacaggcactgtctactgcaactgctacagtgagtgtgggcaaatttcgcggaaggccagtgtctctgtgggagctgttgttctctgaggctatatccagtgagcagagggctatgctggcgcagcagtatcaggaggggaccctcagcgttgagaagctcgcggcaaaactgagcgctactctggaacaggcagctgcgactgcgcgtgtgacatttagtggtctgagagatactgtcactccaggggaactcctgaaggctgagattatcgaccaggacctgtatgaaaggctcgagcatggtcaggccacagccaaagatgtaggttcactagccagtgttcagaggtatttacagggcacaggatgcatcgccggactactcctgcctggttcacaagaaagactttctatctacgaggctagatgcaagggcctgctgaggcctggtaccgcccttatcctgttagaagcccaggccgcaacgggtttcattattgacccaaaagctaacaaagggcactccgtagaggaagctctgcgtgctgcagtgataggccctgatgtcttcgccaagctgctgtcagcagagcgagctgtgaccggctatactgacccatacacgggccagcaaatatctttgttccaagctatgcaaaagggcctgatcgttcgggagcacgggattagactgctcgaggcgcaaattgctactggtggcgtgatcgatcctgtccattcccaccgcgtcccagtggatgttgcgtacaggcgaggatacttcgatcagatgctcaacttgatcttactagatccctcagatgatactaaaggattcttcgaccccaacacccacgagaatctcacttatctccagctgctcgagaggtgtgtgcgggatcccgagactgggttgtacctgttgccgctgtcctctacacaaagcccactggtagacagcgccactcagcaggcgttccagaaccttctcctgtctgtcaagtacggtcggttccaggggcagcgcgtctccgcttgggagctcattaatagtgagtacttctcagagggccgtcggagacagctgctgagacggtacagacagcgagaagttaccctgggtcaggtggctaaattgctggaagccgaaacacagcggcaagctgatattatgttgcccgctttgagatctcgcgtgacagttcatcagctgcttgaggccggaattatcgaccagcagctcctggatcaggtcctggcgggaaccatctcacccgaggcattacttctcatggatggggttcgcagatatctatgcggtctgggcgctgtgggcggagtccggctcttgccgtccggacagagactatctctgtaccaagccatgcggcaaaagctgcttggcccacgggtggctctggctttgctggaggcccaggcggctaccggtactattatggatcctcacagcccagagtcactgagtgtcgatgaagcagtgagaagaggagtcgtgggccctgagttatacgggcgtctcaaacgtgcagaaggtgctattgcgggattcagagatcctttcagcggcaagcaggtgtccgtgttccaggccatgaagaagggccttatcccttgggagcaggccgctcggctactggaagcccaggtcgctacaggtggaatcattgacccgaccagtcatcaccacttgccaatgccggtcgctatccagcgcggttacgtggaccaggagatggagacagccttatcctctagcagcgaaacttttccgacacctgacggccagggtcgcacctcctatgcacagctactggaggaatgtcctagggatgagacgtccggactgcatctccttccactccccgagagtgctcctgccctgccgacagaagagcaggtgcagaggagtttgcaggctgtccccggtgccaaggatgggacaagtctgtgggaccttctgtcgtcatgtcacttcacagaggagcagcgcaggggtctgttagaggacgtccaagaaggccgtaccacggtgccccagctgctggcctctgttcagagatgggttcaggagaccaaactcctcgcacaggccagagtgatggtgcccggaccaagaggggaagtgccagcagtatggttgctcgacgctgggatcattacccaggagaccctggaagctctggcgcaaggtactcagtctcctgcgcaggtcgccgagcagcccgctgtcaaggcatgcctgtggggtaccgggtgtgtcgcaggcgtgctgctgcagcctagcggtgctaaggcaagcatcgctcaggctgttagggatggcctgcttcctaccgggcttgggcagcggcttttggaggcccaggttgcgagtggattcctcgtcgatcctctaaataaccagcggttgagcgttgaagatgccgtcaaggttggtctagtggggagggagcttagtgagcagctcgggcaggccgagagggccgcagccggatatccagacccttacagccgggcaagcctttccttgtggcaggccatggagaaggggctggttccccagaacgagggccttcctctgctgcaggtccagctggccaccgggggagtggttgacccagttcacggggttcaccttccccaggccgctgcctgtcgcctgggccttcttgatacccaaacctctcaggtcctgacagccgttgacaaggataacaaattctttttcgatccctcagcgagagatcaagttacatatcagcagctccgggaaaggtgtgtttgcgatagcgagacaggcctcttactgctgcctttgccttctgacacagtgctggaagtggacgatcacaccgcagtcgcgctgagagccatgaaggtccctgtgtctactggacgcttcaagggctgctccgtcagtctgtgggatctgctcttgtcagagtatgttggcgcagataaacgcagggaattggtcgccctttgtcgatcgggcagagccgcagctctgaggcaggtggtgtctgcggttacaaccttagtggaggccgcagagcgtcagccattgcaagccaccttccgtggcctcaggaaacaggtgagcgcaagagatctgtttcgggcacaacttatctctaggaaaaccttagacgagttgtcccaaggaactaccacggtgaaggaagtcgctgaaatggattccgtgaaaaggagtctggagggcggaaatttcattgcaggggtgctgatccagggcacacaggaacgcatgagcattcccgaggccttgcgacgccacatcctaaggccaggtactgcgctggtgctcctggaggctcaggcagccacaggatttataatcgaccctgtggagaacagaaaactgaccgtggaggaagccttcaaggccggaatgtttggaaaggaaacctacgtgaaacttttgtccgctgaacgggcagtcacaggatataccgatccctatacaggtcagcaaatcagcctattccaggccatgcaaaaagatcttatcgtcagggaacacgggattagacttctcgaagctcagatcgcaacaggcggaatcattgaccctgtacattcccatagagtgccagtcgacgtggcatacaggtgcggttattttgacgaggaaatgaatcggattctggccgacccgtctgacgatacaaaggggtttttcgaccctaacactcacgaaaacctcacttatctgcagttacttgagagatgtgtggaggaccccgaaaccggcctttaccttctgcagataattaagaagggggaaaactacgtttacatcaatgaagcgactcgccatgtacttcaatcgcggactgctaagatgagggtcggcagatttgccgaccaagtcgtctccttctgggacttgctgtcttcgccatacttcacagaggatagaaaacgtgaactgatccaagagtatggggcacagtctggaggtctcgaaaaattgttagaaatcataacaaccacgatcgaggaaacggagacacagaatcagggcattaaggtcgcagccatccggggagaggtcacggcagctgatctgtttaattcaagggtgattgaccagaaaactttgcatacactgagggtggggagaaccggtggtcaggcactgagtactttagaatgtgtaaagccctacctcgaggggtctggatgcattgcgggagtcacagttccctctacgagagaagtcatgtccctgcacgaagccagtcgaaaagaattgattccagctgccttcgcgacctggctccttgaagcccaagcagccacgggtttcctgcttgatccctgtactagacagaagctgagcgttgacgaggctgtggatgtcggtttggtcaatgaggaactgcgtgagcgcctcctaaaagctgaacgagccgctacagggtacagggatcccgctaccggcgatactatacctctgttccaggccatgcagaaacaactcattgagaaggccgaagccttgaggctgctggaggtccaagtcgctaccggaggagtgattgaccctcagcatcatcaccgcctccctcttgaaacagcctaccggaggggatgcctacacaaggacatctatgccctgatttctgatcagaagcacatgagaaagagattcgtggaccctaatacccaggagaaagtaagttatcgagaattgcaggaaaggtgtcggcctcaagaggatacagggtggctgttgtttcctgtaaacaaggcggctcgtgattccgaacatattgacgacgagaccagaagggctttggaagccgaacaggttgaaataacagtgggcagatttagaggccaaaagcccaccctatgggcgctcctcaactccgaatacgtgactgaggaaaagaagctgcagctggtccgcatgtaccgtacccataccagaagggcattgcagaccgtcgcccaactgatcctcgaattaatcgaaaagcaggagacctctaacaagcatttatggtttcagggaatccgcaggcagattaccgcttcagaactgttgagctccgccatcattacggaggagatgttgcaggacctggaaaccggtcggagcacaacccaagaactgatggaggatgaccgggtaaagaggtatctcgaaggcacctcttgtatcgccggagtattggttccagcaaaggatcagcccggtcggcaggagaagatgagtatctaccaagccatgtggaagggcgtgctccggccagggacagcactggtgctcctggaggctcaagccgcaacgggctttgttattgatccagttcgaaacctgcggctttctgttgaagaggctgtcgccgctggtgtggtaggaggggagatccaagagaagcttctctctgctgaacgcgctgttacaggctacacggatccgtatactggtcagcagatctctctgttccaagctatgcagaaggatcttatcgttcgagagcacgggattaggcttctcgaagcccagatcgcaactggtggggtcattgacccggtgcactctcatagagttcccgtggacgtggcctacagacgaggatatttcgatgaggagatgaatagagtgcttgcagatcccagcgacgataccaaaggcttcttcgatcccaacacacacgagaatctcacttacgttcagcttttaaggcgttgcgttccagaccctgatacagggttatacatgcttcagcttgctggcagaggaagtgccgttcaccagctgagcgaggaactccgctgtgccttgagagatgcccgtgtgactccaggctctggagctctgcagggacaatcagtgtcggtatgggaactgctcttctaccgcgaagtgtccgaagaccgaaggcaagacctgctgtcacgataccgggctgggaccctgaccgtagaagaactgggagctacactcacaagcctccttgcccaggcacaggcgcaagctcgggctgaagcagaagccggttctcccaggccagatccacgcgaagccttgagggccgcaaccatggaggtgaaggtgggccgtctgcgcggaagagcggtaccagtgtgggatgttctggcctcaggttatgtctcccgcgctgccagagaagaactactggccgagttcggttcaggtacccttgacctccccgctctgaccagaaggctgactgcaataattgaggaagccgaggaagcgcctggggctagacctcagttgcaagatgcctggcgaggcccaagagagcctggcccagccggacgtggggacggtgattctgggcgttcacagagagaagggcaaggagagggagagacacaggaggccgctgctgctgcagccgcagccgcagcaagaagacaagagcagaccctcagagatgcgaccatggaggtgcagcgtggacagttccaaggaagacccgtgtccgtttgggacgttcttttttcttcctacttgagcgaagctcggcgagacgagctattggcccaacatgcggctggagcccttggtctgcccgacctggtggcggtgctgacacgagtgatcgaggagaccgaagagcggctcagcaaggtttccttcagaggtctgcgaagacaagtgtccgcgagcgaactgcacacaagcggtatactcgggcctgaaacacttagagaccttgctcagggcactaagacccttcaagaagtgaccgaaatggattcagtgaaacgatatctggaaggtacgtcctgtatagccggtgtgctggttcctgctaaggaccagcccggacgccaggagaagatgagcatttatcaggctatgtggaagggcgtcttaagacccggaactgccctcgtgttgctggaagcacaggcagccactggatttgtgatcgatccagtgaggaatctgcgcctgtccgtcgaggaggcagtggccgcaggggttgttggtggagaaatccaagagaagcttctgtctgcggaacgagcagtcacgggttacacagacccttacaccggccagcagatttctttatttcaggccatgcagaaagacctgatcgtgcgagagcatggcatccgcctgctcgaggcccagatcgccacgggaggcgtgatagacccagtccatagtcatagggtgcccgtggatgtggcctaccagcgaggctattttgatgaggagatgaaccgagttctagccgatcccagcgatgatactaagggattcttcgatcctaacacacacgagaacttgacatacgtacaattgcttcgccgatgcgtcccagatcctgatactggcctgtatatgctgcagttggccggtcgtggttctgctgtgcaccagctcagtgaagaactcaggtgtgctctgcgcgatgccagggtcacaccaggatctggggctttgcaggggcagtcagtttccgtttgggagctactgttctaccgggaggtctcagaggaccgtaggcaagaccttctgtccagatatagagccggaactctgaccgtcgaagaattgggggctactctcacatctctactggcacaggctcaggcccaagctagggctgaagcggaagccggatctccacgaccagatcctcgtgaggccttaagggccgcaaccatggaggttaaagtgggccgtttgaggggtcgcgctgtgccagtctgggacgttctggcatcagggtacgtttctcgcgcagctcgcgaggaattgttggccgaatttggcagtggtacgctggacctaccagcgctgacgcgccgtttaacggctatcatcgaggaagccgaggaagcacccggtgctcggcctcagctacaggatgcctggcggggtcccagggaacccggtccagcaggacgtggagatggagactcaggaaggtctcaaagagaaggccagggcgagggcgagacacaagaggccgcagctgctgctcgaaggcaggagcagacattaagggatgcaacaatggaggtgcaaagaggtcagttccagggcaggccagtctcagtgtgggacgtgcttttttcttcttacctgtctgaagcgaggagagacgagcttctggctcagcacgcagcaggagcgcttggcctgcccgatctggtagccgtcctcactcgggtgattgaagaaactgaggagaggctgtctaaagtctctttcagaggactgcgttgccaagtgtccgcctctgagctgcatacctccggtattctgggtccagaaaccctgagagatctcgctcaagggactaaaaccttacaggaggtgacagagatggactctgtaaagagatacttagaaggtacaagctgcatcgccggagtactggtgcccgctaaagaccaaccaggtcgtcaggagaagatgagcatctaccaggccatgtggaaaggcgtgctgaggcccggaaccgccctcgtgttgctcgaggcgcaagccgctacaggctttgtgatcgaccccgtgcgaaacctgagactgagcgtcgaagaggccgtggcagcaggcgtggtcgggggagagatccaggagaaactgctctctgcagaaagagccgtgacgggctatacggatccatatactgggcagcaaatctccctttttcaagctatgcagaaggatttaatcgttcgcgagcacggcattcgactcttagaggcccagattgccaccgggggagtcatcgaccccgtgcacagtcaccgggtgcctgtcgatgtggcctacagaagggggtactttgacgaagagatgaatcgagtcttggcggacccttctgatgataccaagggattcttcgaccccaacacccatgagaacctgacctacgtacagttgctccgcagatgcgtccctgatcccgataccggcctgtatatgcttcagctcgccggacgcggatcagccgtccaccagctgtcagaagaattgcggtgtgccctcagagatgcacgagtgacacccggatctggggcactgcaaggacagtccgtgtctgtgtgggaactgctcttctacagggaggtcagtgaggaccggcgacaagatcttctctcgcggtatcgggcaggcaccctgacggttgaggaattaggggctaccctgacgtccctgcttgctcaggcccaggcccaggcacgcgctgaggcagaggccggttccccaaggcctgacccacgggaggccctgagagccgctactatggaagttaaggtggggagactgcgtgggagggccgtgcccgtgtgggacgtgcttgcctctgggtatgtctcacgtgctgccagggaggaacttctagctgaattcggcagcggcactctggatctgcccgcactgaccaggaggctcactgccatcatcgaggaggcagaagaagcacctggtgctcgaccgcagctgcaggacgcttggcgaggtcctagggaacctggacctgccggtcgcggagacggagacagcggcagatcccaacgggagggccagggtgagggggaaacccaggaggccgctgctgctaccgcagctgcacgacggcaagagcagacactaagagacgccactatggaggtccagcgtggtcaatttcagggacggcctgtcagcgtttgggatgtgctgttttcatcttatcttagtgaggcgagacgggacgagttgttggcccagcatgcagcgggtgccctcgggctccctgacctggtggccgttctgacccgtgtcatcgaggagaccgaagaacggctcagtaaagtgtcattccggggactgcgacggcaggtctccgcgtccgaacttcacacttccgggatccttgggcctgaaaccctccgagatctggcacagggtaccaaaacattgcaagaggtgactgaaatggattctgtcaagaggtatctggaggggacatcttgtatcgctggtgtactggtacctgcgaaggatcaacccggaaggcaggagaaaatgtccatataccaggcgatgtggaagggcgtcttacgtcccggaactgctctggttcttctcgaagcacaggctgcaaccggatttgtcattgaccctgtccgcaacctccgactaagtgtggaagaggccgttgcagcaggggtggtgggtggagagattcaggaaaaactgctgagtgccgagcgggcagtgaccggctacaccgacccttataccgggcaacagattagcctgtttcaagcaatgcagaaggacctgatagttcgagagcatggcattcgccttctagaggcacaaattgcaactgggggtgtcatcgacccagtgcattctcaccgggtccccgtagacgtggcttacagacgcggatatttcgacgaagagatgaaccgagttcttgccgatccatctgatgataccaaaggattttttgaccctaacacccacgaaaacctgacatatgtccagctgctgcgtcgatgtgtgcccgacccggataccggcctgtacatgctgcaattagccggacgagggtccgccgtgcatcagctatccgaggagctgcgctgtgcactgcgcgacgccagggtcacccctgggtctggtgcactccaaggacaaagcgttagtgtttgggaactcttattctatagggaggtatctgaggaccgcaggcaagatttgctgagccgctatcgagctggtactcttaccgtggaggaactaggtgctacattgacttctctcctggcacaagcccaggctcaggccagggctgaggcagaagctgggtcaccccgacctgaccccagagaggccctcagggcagccacaatggaagttaaggtaggccgactgagagggcgagccgtgcccgtctgggatgtgttggcttctggctatgtatcaagggccgctcgggaggagctgctcgccgaatttgggtccggcactctggatctgcctgctttgaccaggcgtttgactgcaatcattgaagaggccgaagaggcaccaggggctagaccccagctgcaggacgcatggcggggacccagggaacccggaccagcaggcagaggagacggggacagcggtcgctcccagagagaagggcaaggcgagggggagactcaggaggccgctgcggctacagcagcggctagaaggcaggagcaaacgctccgcgatgcaacaatggaggtgcaaagggggcagtttcaagggcgacctgtgagcgtatgggacgtcctgtttagctcttatctaagcgaggccagacgtgacgagctactggctcagcacgcggctggggctctgggactgcctgatctggtcgctgtgctgacaagggtcattgaggagacagaggagcgtctcagtaaagtctcatttaggggacttaggagacaggtgtctgccagcgaactgcatacgagtgggatattaggtcccgaaacacttcgcgacctcgctcaaggaacaaagacccttcaggaagtgacagagatggacagcgtgaagcgttatctcgaaggcactagctgcatcgccggtgttcttgtgcccgctaaagaccagcctgggcaccaggaaaagatgtctatctaccaagccatgtggaagggcgtcctgcggcctggtacggcgctggttctcctggaggcccaagcggcaactgggttcgtgattgatcccgttcgaaacctgcgcttatctgttgaggaggccgtggcagcaggcgttgtggggggagagattcaagagaagctgcttagtgcagaacgggctgtgacagggtacactgacccatacaccggtcagcaaatctcactgttccaagctatgcagaaagatttaatcgtccgtgagcacggtatccgactcctggaagcccagattgccaccggcggtgttattgaccctgtacatagccaccgagtgcccgtagatgtcgcctaccggagggggtatttcgacgaggagatgaatagggtgctagctcacccctccgatgataccaaaggattcttcgaccctaacacccatgaaaacctgacctacgtccaactgctgcgcagatgtgtgcctgatcctgatactggcctgtacatgctccagctggccggacgaggctccgctgttcaccagttatcagaagaacttcgttgcgcgcttagagacgcacgggtgatgcctggctcgggggcactgcagggacaatcagttagcgtttgggagctcctgttttatagagaagtatccgaggaccgcagacaggacctgctgtctcgataccgtgctggaactctgaccgtagaagaacttggggcaaccctcacctctcttttggctcaagcacaagctcaggcccgagctgaggccgaagctgaggccggaagccctaggcccgatcccagagaggctctccgcgctgctacaatggaggtcaaggtgggccgtctcaggggcagagcagtgccagtgtgggatgttttagcctccggttacgtcagcggggctgccagagaggagttgctagctgagtttggaagtggtacattagatctccccgctctgactaggaggcttaccgcaatcattgaagaggccgaagaggccccaggagcacgcccacagcttcaagatgcctggcggggtcccagggagcctggcccagcaggcagaggagacggagacagtggacgcagtcagagagaaggacagggcgagggcgagacccaggaggccgcagccgcagccagaagacaagagcagactctccgcgatgccaccatggaagtacagagaggacagtttcagggcagaccagtttcagtctgggacgtgttattctccagctacctctcagaggcacatcgggatgagctccttgcacagcatgcagctggtgctctggggcttccagacctggtcgctgtgttaacaagagtgattgaggagacagaagaacggctgagtaaggtttcctttaggggtcttcggaggcaagtcagcgccagtgaattgcacaccagtggaatattggggccagaaaccctccgcgatcttgcccagggtaccaaaaccctacaggaagttaccgaaatggacagcgtgaaaagatatttggaaggcacctcctgcattgcgggagtgctagtcccagctaaggatcagccaggccgacaagagaaaatgtcaatttaccaagccatgtggaagggagtcctgcgaccaggcactgcactcgtgctgctcgaagcccaggccgcaaccgggttcgtgatcgatccggtgagaaatctgcgactgagtgtcgaggaggccgtggccgctggagtagtggggggtgaaattcaggagaagctgctgagcgccgaacgtgctgtgaccgggtacaccgacccctatacaggtcagcaaatatccctgtttcaggccatgcagaaagacctgattgtgcgagagcacggaatccgcctgctggaagcacaaatagccaccggaggggttatcgatccagttcacagtcatcgcgtgcctgtagatgtcgcatacagacgcggttactttgatgaggagatgaaccgggtcttggccgatccatcggacgacaccaaaggcttcttcgatcccaacactcacgagaacctgacttatttacagctcctgcaacgagccacactggaccccgaaacagggcttctgtttctgtcactgagtcttcagtaa

SEQ ID NO: 308476 - protein, 1139 aa, Artificial Sequence
  derived and/or modified sequence
MSVPDYMQCAEDHQTLLVVVQPVGIVSEENFFRIYKRICSVSQISVRDSQRVLYIRYRHHYPPENNEWGDFQTHRKVVGLITITDCFSAKDWPQTFEKFHVQKEIYGSTLYDSRLFVFGLQGEIVEQPRTDVAFYPNYEDCQTVEKRIEDFIESLFIVLESKRLDRATDKSGDKIPLLCVPFEKKDFVGLDTDSRHYKKRCQGRMRKHVGDLCLQAGMLQDSLVHYHMSVELLRSVNDFLWLGAALEGLCSASVIYHYPGGTGGKSGARRFQGSTLPAEAANRHRPGALTTNGINPDTSTEIGRAKNCLSPEDIIDKYKEAISYYSKYKNAGVIELEACIKAVRVLAIQKRSMEASEFLQNAVYINLRQLSEEEKIQRYSILSELYELIGFHRKSAFFKRVAAMQCVAPSIAEPGWRACYKLLLETLPGYSLSLDPKDFSRGTHRGWAAVQMRLLHELVYASRRMGNPALSVRHLSFLLQTMLDFLSDQEKKDVAQSLENYTSKCPGTMEPIALPGGLTLPPVPFTKLPIVRHVKLLNLPASLRPHKMKSLLGQNVSTKSPFIYSPIIAHNRGEERNKKIDFQWVQGDVCEVQLMVYNPMPFELRVENMGLLTSGVEFESLPAALSLPAESGLYPVTLVGVPQTTGTITVNGYHTTVFGVFSDCLLDNLPGIKTSGSTVEVIPALPRLQISTSLPRSAHSLQPSSGDEISTNVSVQLYNGESQQLIIKLENIGMEPLEKLEVTSKVLTTKEKLYGDFLSWKLEETLAQFPLQPGKVATFTINIKVKLDFSCQENLLQDLSDDGISVSGFPLSSPFRQVVRPRVEGKPVNPPESNKAGDYSHVKTLEAVLNFKYSGGPGHTEGYYRNLSLGLHVEVEPSVFFTRVSTLPATSTRQCHLLLDVFNSTEHELTVSTRSSEALILHAGECQRMAIQVDKFNFESFPESPGEKGQFANPKQLEEERREARGLEIHSKLGICWRIPSLKRSGEASVEGLLNQLVLEHLQLAPLQWDVLVDGQPCDREAVAACQVGDPVRLEVRLTNRSPRSVGPFALTVVPFQDHQNGVHNYDLHDTVSFVGSSTFYLDAVQPSGQSACLGALLFLYTGDFFLHIRFHEDSTSKELPPSWFCLPSVHVCALEAQA

SEQ ID NO: 308477 - DNA, 3420 bp, Artificial Sequence
  derived and/or modified sequence
atgagcgtgcccgactacatgcagtgcgccgaggaccaccagaccctgctggtggtggtgcagcccgtgggcatcgtgagcgaggagaacttcttcagaatctacaagagaatctgcagcgtgagccagatcagcgtgagagacagccagagagtgctgtacatcagatacagacaccactacccccccgagaacaacgagtggggcgacttccagacccacagaaaggtggtgggcctgatcaccatcaccgactgcttcagcgccaaggactggccccagaccttcgagaagttccacgtgcagaaggagatctacggcagcaccctgtacgacagcagactgttcgtgttcggcctgcagggcgagatcgtggagcagcccagaaccgacgtggccttctaccccaactacgaggactgccagaccgtggagaagagaatcgaggacttcatcgagagcctgttcatcgtgctggagagcaagagactggacagagccaccgacaagagcggcgacaagatccccctgctgtgcgtgcccttcgagaagaaggacttcgtgggcctggacaccgacagcagacactacaagaagagatgccagggcagaatgagaaagcacgtgggcgacctgtgcctgcaggccggcatgctgcaggacagcctggtgcactaccacatgagcgtggagctgctgagaagcgtgaacgacttcctgtggctgggcgccgccctggagggcctgtgcagcgccagcgtgatctaccactaccccggcggcaccggcggcaagagcggcgccagaagattccagggcagcaccctgcccgccgaggccgccaacagacacagacccggcgccctgaccaccaacggcatcaaccccgacaccagcaccgagatcggcagagccaagaactgcctgagccccgaggacatcatcgacaagtacaaggaggccatcagctactacagcaagtacaagaacgccggcgtgatcgagctggaggcctgcatcaaggccgtgagagtgctggccatccagaagagaagcatggaggccagcgagttcctgcagaacgccgtgtacatcaacctgagacagctgagcgaggaggagaagatccagagatacagcatcctgagcgagctgtacgagctgatcggcttccacagaaagagcgccttcttcaagagagtggccgccatgcagtgcgtggcccccagcatcgccgagcccggctggagagcctgctacaagctgctgctggagaccctgcccggctacagcctgagcctggaccccaaggacttcagcagaggcacccacagaggctgggccgccgtgcagatgagactgctgcacgagctggtgtacgccagcagaagaatgggcaaccccgccctgagcgtgagacacctgagcttcctgctgcagaccatgctggacttcctgagcgaccaggagaagaaggacgtggcccagagcctggagaactacaccagcaagtgccccggcaccatggagcccatcgccctgcccggcggcctgaccctgccccccgtgcccttcaccaagctgcccatcgtgagacacgtgaagctgctgaacctgcccgccagcctgagaccccacaagatgaagagcctgctgggccagaacgtgagcaccaagagccccttcatctacagccccatcatcgcccacaacagaggcgaggagagaaacaagaagatcgacttccagtgggtgcagggcgacgtgtgcgaggtgcagctgatggtgtacaaccccatgcccttcgagctgagagtggagaacatgggcctgctgaccagcggcgtggagttcgagagcctgcccgccgccctgagcctgcccgccgagagcggcctgtaccccgtgaccctggtgggcgtgccccagaccaccggcaccatcaccgtgaacggctaccacaccaccgtgttcggcgtgttcagcgactgcctgctggacaacctgcccggcatcaagaccagcggcagcaccgtggaggtgatccccgccctgcccagactgcagatcagcaccagcctgcccagaagcgcccacagcctgcagcccagcagcggcgacgagatcagcaccaacgtgagcgtgcagctgtacaacggcgagagccagcagctgatcatcaagctggagaacatcggcatggagcccctggagaagctggaggtgaccagcaaggtgctgaccaccaaggagaagctgtacggcgacttcctgagctggaagctggaggagaccctggcccagttccccctgcagcccggcaaggtggccaccttcaccatcaacatcaaggtgaagctggacttcagctgccaggagaacctgctgcaggacctgagcgacgacggcatcagcgtgagcggcttccccctgagcagccccttcagacaggtggtgagacccagagtggagggcaagcccgtgaacccccccgagagcaacaaggccggcgactacagccacgtgaagaccctggaggccgtgctgaacttcaagtacagcggcggccccggccacaccgagggctactacagaaacctgagcctgggcctgcacgtggaggtggagcccagcgtgttcttcaccagagtgagcaccctgcccgccaccagcaccagacagtgccacctgctgctggacgtgttcaacagcaccgagcacgagctgaccgtgagcaccagaagcagcgaggccctgatcctgcacgccggcgagtgccagagaatggccatccaggtggacaagttcaacttcgagagcttccccgagagccccggcgagaagggccagttcgccaaccccaagcagctggaggaggagagaagagaggccagaggcctggagatccacagcaagctgggcatctgctggagaatccccagcctgaagagaagcggcgaggccagcgtggagggcctgctgaaccagctggtgctggagcacctgcagctggcccccctgcagtgggacgtgctggtggacggccagccctgcgacagagaggccgtggccgcctgccaggtgggcgaccccgtgagactggaggtgagactgaccaacagaagccccagaagcgtgggccccttcgccctgaccgtggtgcccttccaggaccaccagaacggcgtgcacaactacgacctgcacgacaccgtgagcttcgtgggcagcagcaccttctacctggacgccgtgcagcccagcggccagagcgcctgcctgggcgccctgctgttcctgtacaccggcgacttcttcctgcacatcagattccacgaggacagcaccagcaaggagctgccccccagctggttctgcctgcccagcgtgcacgtgtgcgccctggaggcccaggcctag

SEQ ID NO: 308478 - DNA, 3420 bp, Artificial Sequence
  derived and/or modified sequence
atgtcagtcccagactacatgcagtgtgctgaggaccaccaaacacttctggtggtggtgcagcccgtaggaattgtttctgaagaaaacttttttcgaatttataaacgtatctgtagcgtgtcccagatttcagtacgggactcccagcgtgtcttgtacattcgatacaggcatcactaccctcctgagaataatgaatggggtgactttcagacccaccgaaaagtcgtgggactgattaccataaccgactgtttcagtgccaaagattggccacagaccttcgaaaaattccacgtgcaaaaagagatttatggatctactctttatgactcacggttattcgttttcggactccagggcgagattgtcgagcagccccgaaccgacgtggcattctatcctaactatgaggactgtcagacagttgagaaaaggatcgaggactttattgagtctttgtttattgtcctggagtcaaaacgcctggaccgagctaccgataaaagcggcgacaaaataccactgctgtgcgtccccttcgagaagaaagactttgttgggcttgatacggatagcaggcattataagaaacggtgccaggggagaatgcgaaagcacgttggggacctctgtctgcaggccggcatgctccaggattctctggtgcattatcacatgtctgtcgaactcctcaggagtgtcaatgactttctctggttaggagccgccttggaaggcttgtgctcggcctctgttatatatcattaccccggcggcacgggaggaaagtcaggcgctcgccgctttcagggcagtactctccctgccgaggccgctaatagacacagacccggggccttgaccacaaacggaatcaacccagacacatccactgagattggaagagccaagaactgcctgtcccctgaggatataatagacaagtacaaggaagcaataagttattacagtaagtacaaaaacgccggcgttattgagcttgaggcgtgcatcaaggccgtgcgggtactcgccattcaaaagagatcaatggaagccagcgaattcctccagaatgccgtgtacatcaatttaaggcagctgagtgaagaagagaagatccagcgttatagcatcctgagcgagttatacgaactgatcgggttccataggaaaagcgccttctttaaaagagtggcagccatgcagtgcgtcgccccttccattgccgaaccgggttggcgggcttgttacaaacttcttctagaaacactcccggggtatagtttgagcctggatccaaaggactttagtcgagggacccatcgtgggtgggcagctgtgcaaatgcggttactgcacgaactcgtctatgcgagccgccgtatgggaaaccccgccctgagtgtaagacatctctctttcctcctgcagactatgctggacttcctaagtgaccaagaaaaaaaagatgtggctcagtcactggagaattacacaagcaagtgccctggcacaatggagcccatagcacttcctggaggcctgacccttcccccagtgcctttcaccaagctgcctatcgttagacacgtgaaattattaaacttgcctgccagtctccgtcctcacaagatgaaaagcctgcttgggcagaacgtgagtactaaaagtccctttatttacagccccatcatcgcacacaaccgcggagaagaaaggaacaagaagattgacttccaatgggtgcagggggatgtctgtgaggtccagctgatggtttacaatcccatgccctttgagctgcgggtggagaacatgggcttgttgacatctggtgttgagttcgagagcctccctgcggcccttagtctccctgcggagagcggtctgtatccagtcaccctcgtgggagtgcctcagactactggcactattactgttaacggctaccacacaactgtttttggcgtcttctctgactgccttctggacaatttaccaggcattaagacaagcggttccaccgtggaggtgattccagcactgccacgcctgcaaattagtactagtctgccccggtccgctcactctctgcagcccagttctggcgatgagatctcaactaatgtatccgtccagctttacaacggcgagtctcagcagctgatcatcaaacttgagaacatcggtatggaaccgctggaaaaactggaggtgacctccaaggtccttaccacgaaggagaaactgtacggtgacttcctgtcttggaagctggaagaaaccctggctcagttccccctgcagcccggtaaggtggccaccttcacgataaacatcaaggtgaagctggacttttcctgtcaggaaaacctgctgcaggacctttcagacgatggaatctcggttagtggcttccccttgtcgtcccccttcaggcaagtcgtgagaccacgagtagaagggaagcctgtaaaccctcctgagagtaataaagccggcgactattctcacgtgaagacattggaagccgttttaaatttcaagtactccggaggtccaggccatacggaggggtactatcggaatctgtctctgggtctgcatgtcgaggtggagcctagcgtgttctttacgcgtgtgtcgacattacccgctacaagcaccagacagtgccatctgctgttggacgttttcaattctaccgagcacgaactcacagtgagcactcgctcctctgaggcactgattctgcatgccggagaatgccagagaatggccattcaggtggataaatttaatttcgagtcgtttcccgagagtcctggcgaaaagggacaattcgctaaccctaaacagctcgaggaagagaggcgcgaagcccgcggactggagattcactccaaactgggcatttgctggcgaataccctcattgaagcggtctggagaggcaagcgtagaggggctcctcaatcagttagtccttgaacaccttcaactggccccgctgcagtgggacgtcctggtggatggccagccctgcgatcgggaggcagtagctgcctgccaagtgggcgacccagtgagactggaagtcagactgactaatcgctctcccagaagtgtggggccttttgctctgacagtcgtcccctttcaggaccaccagaacggcgttcacaactatgacctgcacgacacggtgtccttcgtcgggtcaagtacgttttacctcgatgccgtccaaccttctgggcaatctgcttgtctaggcgccctgctgtttctatacactggcgactttttcctgcacatcaggttccacgaagacagcacttccaaagagctgccgccctcctggttttgcctgccatccgtgcacgtgtgcgccttagaggcacaggcatag

SEQ ID NO: 308479 - DNA, 3420 bp, Artificial Sequence
  derived and/or modified sequence
atgtctgtgcctgactacatgcagtgtgccgaggaccaccagaccctgctggtggtggtgcagcctgtgggcatcgtgtctgaggagaacttcttccgcatctacaagaggatctgcagcgtgtcccagatctctgtgcgggacagccagagggtgctgtacatccgctaccgccaccactacccacctgagaacaatgagtggggagacttccagacccacaggaaggtggtgggcctcatcaccatcacagactgcttcagcgccaaggactggccccagacctttgagaagttccacgtgcagaaggagatctacggcagcaccctgtatgacagccggctgtttgtgtttggcctgcagggcgagatcgtggagcagcccaggacagatgtggccttctaccccaactatgaggactgccagacagtggagaagagaattgaggacttcatcgagagcctcttcatcgtgctggagagcaagaggctggaccgggccacagacaagagcggggacaagatccccctgctgtgtgtgccctttgagaagaaggactttgtgggcctggacacagacagccgccactacaagaagcgctgccagggccgcatgaggaagcacgtgggggacctgtgcctgcaggccggcatgctgcaggacagcctggtgcactaccacatgtctgtggagctgctgcggtctgtgaatgacttcctgtggctgggcgccgccctggagggcctgtgcagcgccagcgtcatctaccactacccaggcggcaccggcggcaagagcggggcccggcgcttccagggcagcaccctgcctgctgaggccgccaacagacacaggcctggggccctgaccaccaacggcatcaacccagacaccagcacagagatcggccgggccaagaactgcctgagccctgaggacatcatcgacaagtacaaggaggccatctcctactacagcaagtacaagaatgctggggtcatcgagctggaggcctgcatcaaggctgtgcgggtgctggccatccagaagaggtccatggaggccagcgagttcctgcagaatgctgtgtacatcaacctgcggcagctgtctgaggaggagaagatccagcgctacagcatcctgtctgagctgtatgagctgattggcttccacaggaagagcgccttcttcaagagggtggccgccatgcagtgtgtggcccccagcattgctgagcccggctggagggcctgctacaagctgctgctggagaccctgcccggctacagcctgagcctggaccccaaggacttcagccggggcacccaccggggctgggccgctgtgcagatgaggctgctgcacgagctggtgtatgccagcaggaggatgggcaacccagccctgtctgtgcgccacctgtccttcctgctgcagaccatgctggacttcctgagtgaccaggagaagaaggatgtggcccagagcctggagaactacaccagcaagtgccccggcaccatggagcccatcgccctgcccggcggcctgaccctgccccctgtgcccttcaccaagctgcccatcgtgagacatgtgaagctgctgaacctgcctgccagcctgcggccccacaagatgaagagcctgctgggccagaatgtgtccaccaagagccccttcatctacagccccatcatcgcccacaacagaggagaggagaggaacaagaagattgacttccagtgggtgcagggagatgtgtgtgaggtgcagctgatggtgtacaaccccatgccctttgagctgcgggtggagaacatgggcctgctgaccagcggcgtggagtttgagagcctgcctgctgccctgagcctgcctgctgagagcggcctgtaccctgtgaccctggtgggcgtgccccagaccaccggcaccatcaccgtgaatggctaccacaccaccgtgtttggagtcttcagtgactgcctgctggacaacctgcccggcatcaagaccagcggcagcacagtggaggtgatcccagccctgccccggctgcagatcagcaccagcctgcccaggtctgcccacagcctgcagcccagcagtggagatgagatcagcaccaacgtgtctgtgcagctgtacaatggagagagccagcagctgatcatcaagctggagaacatcggcatggagcccctggagaagctggaggtgaccagcaaggtgctgaccaccaaggagaagctgtatggagacttcctgtcctggaagctggaggagaccctggcccagttccccctgcagcccgggaaggtggccaccttcaccatcaacatcaaggtgaagctggacttcagctgccaggagaacctgctgcaggacctgagtgatgatggcatctctgtgtctggcttccccctgagcagccccttccggcaggtggtgcggccccgggtggagggcaagcctgtgaaccccccagagagcaacaaggccggggactacagccacgtgaagaccctggaggccgtgctgaacttcaagtacagcggcggccctggccacacagagggctactacagaaacctgagcctgggcctgcacgtggaggtggagcccagcgtcttcttcaccagggtgtccaccctgcctgccaccagcacccggcagtgccacctgctgctggatgtgttcaacagcacagaacatgagctgactgtgtccaccaggagcagcgaggccctgatcctgcatgctggggagtgccagaggatggccatccaggtggacaagttcaactttgagagcttccctgagagccctggagagaagggccagtttgccaaccccaagcagctggaggaggagcggcgggaggcccggggcctggagatccacagcaagctgggcatctgctggaggatccccagcctgaagaggtctggagaggcctctgtggagggcctgctgaaccagctggtgctggagcacctgcagctggcccccctgcagtgggatgtgctggtggatggccagccctgtgaccgggaggccgtggccgcctgccaggtgggggaccctgtgcggctggaggtgcggctgaccaacagaagccccaggtctgtgggcccctttgccctgactgtggtgcccttccaggaccaccagaatggagtgcacaactatgacctgcatgacacagtgtcctttgtgggcagcagcaccttctacctggatgctgtgcagcccagcggccagagcgcctgcctgggcgccctgctcttcctgtacaccggggacttcttcctgcacatccgcttccacgaggacagcaccagcaaggagctgcccccatcctggttctgcctgcccagcgtgcacgtgtgtgccctggaggcccaggcctag

SEQ ID NO: 308480 - DNA, 3420 bp, Artificial Sequence
  derived and/or modified sequence
atgagcgtgcccgactacatgcagtgcgccgaggaccaccagaccttgttggtcgttgtgcaacccgtggggattgtgagcgaggaaaacttttttcgaatatacaaaagaatctgctctgtgtcacagatcagtgtccgggattctcagcgggtgttgtacatacgttataggcaccactatccgcctgagaacaatgagtggggagattttcagactcacaggaaggttgtgggactgatcaccatcactgattgttttagtgccaaggattggcctcagacgttcgagaagttccatgtgcagaaagaaatctatgggagcaccctctatgactcacgcctatttgtgttcggtctccagggcgagattgtcgagcaacccagaaccgacgtggcattttatccaaattatgaggactgtcagaccgtcgagaaaagaatcgaagactttatcgagagtctcttcatcgttctagaaagtaagagactggatcgggccaccgacaagagcggcgacaaaatcccccttctatgtgtacccttcgagaagaaggacttcgtcgggctagacaccgactcacggcactacaaaaagcgttgtcaggggcgtatgcgaaagcacgtcggagatctgtgccttcaggccgggatgctccaggattccctggttcattatcatatgagtgtggagctgcttcgtagcgtcaacgacttcctgtggctgggggccgccctggaaggactctgctccgccagcgtgatctaccactatcccggaggaacgggcggtaaaagtggagcacgtcgcttccagggatcaactcttccagcagaagcagcgaaccgccatcggcccggagctttaacgactaacgggatcaacccggacacttcaacggagataggccgggctaaaaattgcctcagccctgaagacatcatcgataagtacaaggaagcgatcagctattactctaaatacaagaatgctggggtcatcgaactcgaagcttgtattaaggccgtgcgcgtcctggccattcagaagcgcagtatggaagctagcgagtttctgcaaaacgccgtctacatcaacctgcgccagttgagtgaggaggaaaagatccagcgttactcaatactttcggagctctacgaactgattggttttcatagaaagagcgccttctttaagcgtgtggcagctatgcaatgcgtagccccctcgatcgccgagcccgggtggcgagcttgctataagttgctcttagagaccctcccagggtatagtctgagcttggatcccaaagacttcagccggggtacacacaggggctgggccgccgtgcagatgagactattacacgaactagtatacgcgtcccgtcgaatgggcaatcctgcacttagtgtgagacacctcagtttcctgctgcagactatgctggattttctgtctgaccaagagaagaaagatgtggcccagtcattggagaactacactagcaagtgtcccggcactatggagcccattgcgctgcctggcggcctcactctgccccctgtcccgttcacaaagctgcccattgtgcgtcacgtgaagctgcttaacctgcctgccagcctgcgtccgcataaaatgaagtctcttctgggtcagaatgtatccacgaagtcccccttcatctatagtcccatcatcgcgcacaataggggagaggagcgcaacaagaaaatcgactttcagtgggtccagggtgatgtttgtgaggtccagcttatggtgtacaatcctatgccctttgagttgcgagtggagaatatgggactcctcacatcaggcgtggaattcgagtctttgcccgctgctctcagtctgcccgcggaaagtggcctttacccagtaactctggtgggtgtgccgcagaccaccgggactattaccgtgaacggttatcacacgacagtcttcggtgtcttctctgactgtctgctagataacctgcctgggattaaaacatcaggctcgacagtagaagtcataccagccctgcctagactgcagatctctacatcgcttcctcggtctgcccattccctgcagccctcttccggggatgagatctccactaacgtttcagttcagctttacaatggcgaatcccaacagctgatcatcaaactcgaaaacattggtatggagccacttgaaaagcttgaagtaacaagcaaggtgctgacaaccaaggaaaagctctatggggacttcctttcctggaaactggaggagacgctggcccaattccctttacagcctgggaaagtggctaccttcaccatcaatattaaggttaagctcgacttctcatgccaggaaaatctgcttcaggacctctcagatgatgggatctctgtgagtgggtttccgctttcctctccatttcgacaggtggtacgaccccgcgtggaggggaaacccgtgaacccaccagagtcaaataaggctggggactactcccatgtgaagacactagaagccgtgcttaatttcaagtacagcggcggacccggtcacactgaaggctattaccgcaatttgagcttaggcctgcacgtggaagtggagccatccgttttcttcacccgcgtgtctaccctgcctgcgacaagcacccgccagtgtcatttgcttctggatgtattcaattcaacagagcacgagctgaccgtcagtactcgctccagcgaagccctcattctgcacgcaggcgagtgtcagcgtatggccattcaggtggataagtttaatttcgagagcttccctgaatcaccaggggagaagggacagttcgccaaccctaaacagctggaagaggagaggcgggaggcgcgaggcctggagatccatagcaaactgggtatatgttggcgaatccccagcctgaagcgcagtggcgaagcttccgtcgaaggcctgctgaaccaactagtgctcgaacacctgcagcttgcacctctgcagtgggacgtgctggtggacggtcagccctgtgatcgcgaggccgtcgcggcttgtcaagtgggcgacccggtgcgtctggaggtgaggctaactaaccgatccccaagatcggtggggcctttcgcgctgaccgttgtacccttccaggatcatcagaatggcgttcataactacgatctccatgatactgtaagcttcgtcgggagcagtaccttctacctagatgctgtacagccatccgggcagtccgcatgcctgggggccctactctttctgtatacaggcgatttctttttgcacatcagattccatgaagattccaccagtaaggaattgcctcccagctggttttgcttgcccagcgtgcatgtgtgtgcactggaggctcaggcctag

SEQ ID NO: 308481 - DNA, 3420 bp, Artificial Sequence
  derived and/or modified sequence
atgagcgtgcctgattatatgcagtgtgccgaggaccaccagaccctcctggtggtcgtgcagccagtgggcatcgtctctgaggaaaatttctttagaatttataagagaatttgttcagtgtcgcagatctctgttagagattctcagcgggtgttgtatatccgataccggcaccattaccctcccgaaaacaacgagtggggcgactttcagacacatcggaaggtagttggacttatcaccattactgactgtttctctgcaaaggattggccccagacttttgagaaatttcatgttcagaaggagatttacgggtcaaccctgtatgacagccgactgtttgtcttcggcctccagggggagatcgttgagcagcccagaacagacgtggccttttacccgaactacgaagattgtcaaacggtggagaagcggatagaagattttattgaatctctgtttatcgtcctggaaagtaaacgtctggatcgcgctacagacaagtcaggcgacaaaattccccttctgtgtgttcctttcgagaagaaagactttgttggcttagacaccgacagcaggcactacaagaaaaggtgccagggcaggatgcggaaacatgtaggcgatctgtgcttacaggccggaatgctgcaggattccctggtccactatcatatgagtgtcgaattgctaaggagtgttaatgacttcctgtggctgggagctgcgctcgaaggattatgttccgcgagcgtaatctatcattatccgggaggaaccgggggaaaaagcggagctcggcgttttcagggatcgacactgcccgcagaggccgctaatcgacacagacccggtgccttgactacgaacggtatcaatccagatacgagcactgagattggcagggccaaaaattgcttgtcacctgaagacatcatcgacaagtacaaggaagcaatttcctattatagcaaatataaaaacgcgggagtcatagagctggaagcatgtataaaggccgtgcgagtactggccatccagaagaggagtatggaagcaagcgaattcctccagaacgctgtgtacatcaatctgagacagttgtcagaggaggagaagattcagcgttacagcatcctatcagagctatacgaactgattggctttcacagaaaaagtgcattcttcaagcgcgtagcagccatgcagtgcgtggctccgtccatcgccgagccaggatggagagcctgctacaagctcctccttgaaaccctgcccggatactctctgtccctggatcctaaggatttctccagaggtacacataggggctgggctgctgtccaaatgcggttgcttcacgagttggtgtatgcgtcaaggagaatgggaaatccagctctctcagtgcgtcacctgtcttttttattgcaaactatgcttgacttcctcagcgaccaagaaaagaaggacgtcgctcagagcttggaaaattataccagtaagtgtccaggaacaatggagccaatcgccctccccggaggactaacgctccccccagtgcctttcactaaattgcccattgtccgacatgtgaagcttttaaatttgcccgcttcccttaggccacataaaatgaaaagcctcctgggccagaatgtgagcacaaagagccccttcatctacagtccaatcattgcccataaccgtggtgaggagcgaaacaagaaaattgatttccagtgggtgcaaggggacgtttgtgaagtgcaactcatggtatacaatcctatgcccttcgagctgcgggtggaaaacatgggcctgctgacctctggggtggaatttgagtcactgccagctgctttgtcccttcccgcagagtccggcctttaccctgtgactctggtgggcgtgccccaaacaaccggaacaatcacggtgaacggataccatacaaccgtgtttggagtgttctccgactgcctgcttgacaatttgccaggcatcaagacgagcggcagcacagttgaagttatacctgctctgccgagacttcagataagcacgtcactgccaagatcggcccattcactccagccaagctctggcgacgagatcagcacaaacgtcagcgtacaactttataacggcgagagccagcagcttatcatcaaactcgaaaatatagggatggaacctttggagaagctcgaagtcacatccaaggtccttaccacaaaagaaaagctttatggtgactttttatcatggaagctcgaggagacgcttgcccagttccctctgcagccaggaaaggtggcaaccttcacaattaatattaaggttaaactggacttcagctgtcaggaaaatctccttcaggatttatccgatgatggaatatctgtgtctggatttccactttcttcaccctttagacaggtagtacgtcccagagtagagggcaaaccagtcaacccccctgagtcaaacaaggccggagattattcgcacgtaaaaacgttggaggccgtgctgaactttaagtatagtgggggtccgggacacactgagggatattataggaacctctctctgggcctccatgtcgaagtagaaccaagcgtcttctttacgcgcgtgagtacgctgcctgcgacttccacacggcagtgccacctattactggacgtctttaattcaaccgagcatgaattgacggtgtctacccgctcctctgaagcccttattctacacgcaggggaatgtcagaggatggctattcaagtggataaattcaatttcgagagctttcctgaatctcccggtgagaagggtcagttcgctaatcccaaacaactcgaagaagaaagaagagaggctcggggactggaaattcattctaagctaggtatatgctggcgtataccttcactgaaaagatcaggagaggcgagtgtggaaggactgctgaaccagctggtgctggaacatctgcagctggccccattgcagtgggacgtgctcgtcgacggccagccgtgcgaccgtgaggcagtagccgcatgtcaggtgggggacccggttagactggaggtcaggctgaccaaccggagcccgaggtctgtggggccttttgctttgaccgtggttcctttccaggaccaccagaacggcgtacacaactacgacttgcacgataccgtgtcctttgttggatcgtctacgttctatcttgatgccgtgcagcccagtggccaatctgcctgtctgggggctctactgttcttgtataccggtgatttcttcctgcacatccgatttcacgaagattctacttccaaggaattaccaccaagctggttctgtctcccgtccgtacacgtgtgtgctctcgaagcccaggcttag

SEQ ID NO: 308482 - DNA, 4272 bp, Artificial Sequence
  derived and/or modified sequence
agcgccggctcggccgccagtaggaagcgccagcccagagcctgggaagtggccgcagaggctgctcggccccgctgcccgccaggtcgtgggctcccgctccgggcccggggccaccggctgtggacttcaaaatgagcgtccctgactacatgcagtgtgctgaggaccaccagacgctgctcgtggtggtccagcctgtgggcatcgtctccgaggagaacttcttcaggatctataagaggatttgctctgtgagtcagatcagcgtgcgggactcccagcgagtcctctacatccgctacaggcaccactacccacccgagaacaacgagtggggtgacttccagacccaccgcaaagtcgtgggcctcatcaccatcacagactgcttctcggccaaggactggccacagacctttgagaagttccacgtgcagaaggagatctacggctccacactgtatgactcccggctctttgtcttcgggctgcagggggagatcgtggagcagccgcgcaccgacgtggctttctaccccaactacgaggactgccagacggtggagaagagaatcgaggacttcatcgagtcactgttcatcgtgctggagtccaagcgtctggacagagccacagacaagtctggggataagatcccccttctctgtgtcccgtttgagaaaaaggactttgtaggactggacacagacagcagacattacaagaagcggtgccaaggccgcatgcggaagcacgtgggggacctgtgcctgcaggcagggatgctgcaggactccctggtgcattaccacatgtcggtggagctgctgcgttctgtgaatgactttctgtggcttggagctgccctggaaggattgtgttcagcttctgtcatctatcactatcctggtggaactggtgggaagagtggagctcggaggttccagggcagcacccttcctgctgaagcagccaatagacaccggccaggtgccctcaccaccaatggcatcaaccctgacaccagtactgagatcggacgtgctaagaactgccttagccctgaagacataattgacaagtataaagaggcgatttcctattacagcaagtataagaatgcgggagtgattgagttggaagcgtgcatcaaggctgtacgtgtccttgcaattcagaaacggagcatggaagcatcagaatttcttcagaatgcagtttacattaaccttcgacagctttctgaggaagagaaaattcagcgctacagcatcctctccgagctctatgagctgatcggcttccatcgcaagtctgcgttcttcaagcgcgtggccgccatgcagtgcgtggccccaagcatcgcggagcctgggtggagggcctgctacaaactcctcctggaaacgctgcccggctacagtctgtcgctggatcccaaagatttcagcagaggcacgcacagaggctgggctgcggtccagatgcgtttgctccatgaattggtctacgcctcccgaaggatggggaaccctgccctctctgtcagacacctgtccttccttctacagaccatgctggacttcttgtcggatcaggaaaagaaagatgtggcccaaagcctagagaactatacgtccaagtgtcctgggaccatggagcccatcgccctccctggcggcctcaccctgccaccggtgcccttcaccaagcttcccatcgtcaggcatgtgaaactattgaaccttcctgctagcctccggccacacaaaatgaaaagcttgctgggtcagaacgtgtcaaccaaaagtcctttcatctattcaccaattatcgcacacaaccgtggagaagagcggaacaagaaaatagatttccagtgggttcaaggagatgtgtgtgaagttcagctgatggtatataacccaatgccgtttgaacttcgagttgaaaacatggggctgctcaccagcggagtggagttcgagtctctccctgcggcgctttctcttccggctgaatctggtctgtacccagtgacgctcgtcggggtcccgcagacgactggaacgattactgtgaacggttaccataccacggtcttcggtgtgttcagtgactgtttgctggataacctgccgggaataaaaaccagtggctccacagtggaagtcattcccgcgttgccaagactgcagatcagcacctctctgcccagatctgcacattcattgcaaccttcttctggtgatgaaatatctactaatgtatctgtccagctttacaatggagaaagtcagcaactaatcattaaattggaaaatattggaatggaaccattggagaaactggaggtcacctcgaaagttctcaccactaaagaaaaattgtatggcgacttcttgagctggaagctagaggaaacccttgcccagttccctttgcagcctgggaaggtggccacgttcacaatcaacatcaaagtgaagctggatttctcctgccaggagaatctcctgcaggatctcagtgatgatggaatcagtgtgagtggctttcccctgtccagtccttttcggcaggtcgttcggccccgagtggagggcaaacctgtgaacccacccgagagcaacaaagcaggcgactacagccacgtgaagaccctggaagctgtcctgaatttcaaatactctggaggcccgggccacactgaaggatattacaggaatctctccctggggctgcatgtagaagtcgagccgtctgtatttttcacccgagtcagcaccctcccagcaaccagtacccggcagtgtcacctgctcctggatgtcttcaactccaccgagcatgagctgaccgtcagcaccaggagcagcgaggcactcatcctgcacgccggcgagtgccagcgaatggctattcaagtggacaagttcaactttgagagtttcccggagtcccctggggagaaggggcaatttgcaaaccccaagcagctggaggaagagcggcgggaagcccgaggcctggagatccacagcaagctgggcatctgctggagaatcccctccctgaagcgcagtggcgaggcgagtgtggaaggactcctgaaccagctcgtcctggagcacctgcagctggcgcctctgcagtgggatgtgctggtggacggacagccatgtgaccgcgaggctgtggcggcctgccaggtgggcgaccccgtgcgcctggaggtgcggctgaccaaccggagcccgcgcagcgtagggcccttcgccctcactgtggtccccttccaggaccaccagaacggcgtgcacaactacgacctgcacgacaccgtctccttcgtgggctccagcaccttctacctcgacgcggtgcagccgtccggccagtcggcctgcctcggggccctcctcttcctctacacgggagacttcttcctccacatccggttccacgaggacagcaccagcaaggagctgccaccctcttggttctgcctgcccagtgtgcacgtgtgtgccctggaggcgcaggcctgagcccgcctacttccgtccctctttctgcagggccagaggtgaccctgcctggcctcccacaccccctgcaatgagcaaggccttcactgcagccccatctcctcctcctcccccagacccctcccagccctctcctcctgttcctcctgtagcatctttgctgggctacgcagaagccccggacatggcagccccaccccatgccacgccccttcctacactgttccctggaccatacacaggctgaagcagaggaaatcccaaagcgggtgcccatccagcccaggtcccaggatccctgcacccatttctgtgacctggggccccagccgtgctgtgctgctcatcccagcagagggacctccctcgtccagcgacttccctttggccatagaaagaaatggtgagcatgagactgggcacagcctgagggcgtgggcagcttcccaccctccctgggccttggaatcccccaaggctggttttcttcctggagacccccatgggcaacttggcaggagagatggtgccgtaggaggtcgtggatggttgatgccaagagaggccctccacccgtggtgggcaaatgtccaggcctgggctggcagcccagggctgtttctgggtgctccctggccccagggtggcgtctggttaccatggctgtgtgtgtccatgtctgcaagcagttcttcaataaatggcctgcctccccctc

SEQ ID NO: 308483 - DNA, 222 bp, Artificial Sequence
  derived and/or modified sequence
atgtcttaccagcagcagcagtgcaagcagccctgccagccaccacctcctgtgtgccgcctgccaaagcgtccagagccatgtccacccctgaagtgccctgagccctgcccaccaccaaagtgtccacagccctgcccacctcagcagtgccagcagaaatatcctctggtgacaccttccccaccctgccagccaaagtgtccacccaagagcaagtaa

SEQ ID NO: 308484 - protein, 193 aa, Artificial Sequence [sequence omitted]

SEQ ID NO: 308485 - DNA, 3735 bp, Artificial Sequence
  derived and/or modified sequence
agtcacaacttcgggggttgaggttgtcaaggagctgtccgtgatggttctatggtgtgtgcgtacacacatactctctctctcacacacacacaccacagtgacagatgacctattgaaataatttcagagccggtctgtggttgctacgacaaccaatgatctcttggctttcatctggccatgtgacagggactttgacgtcagctagaggcagagtctgtggctgagtccacacagtcaaaggcttgtgagaatctggtggatgctggaccttgctgctgctgctactgctgtttccaggggctgcagagcatggactgttaaatcttgcacttcttctgagtgagctgaattcttgccgccaggatggggaaacagaacagcaagctgcgcccggaggtcatgcaggacttgctggaaagcacagactttacagagcatgagatccaggaatggtataaaggcttcttgagagactgccccagtggacatttgtcaatggaagagtttaagaaaatatatgggaactttttcccttatggggatgcttccaaatttgcagagcatgtcttccgcaccttcgatgcaaatggagatgggacaatagactttagagaattcatcatcgccttgagtgtaacttcgagggggaagctggagcagaagctgaaatgggccttcagcatgtacgacctggacggaaatggctatatcagcaaggcagagatgctagagatcgtgcaggcaatctataagatggtttcctctgtaatgaaaatgcctgaagatgagtcaaccccagagaaaagaacagaaaagatcttccgccagatggacaccaatagagacggaaaactctccctggaagagttcatccgaggagccaaaagcgacccgtccattgtgcgcctcctgcagtgcgacccgagcagtgccggccagttctgagccctgcgcccaccaatcgaattgtagagctgcttgtgttcccttttgattcttctttttaacaatttttttttttttttgccaaacaatatcaatggtgatgccgtcccctgtgcggtctgatgcgccttcctccgtgacgccttcagcttcttttgtcgtggatgcttcgtgggaatgcccagagccccagtgtgcttgtggagagcatggacagacttcgtggtgttcattgtttgatgatttttaatcgttactattatttttttttattctaatgtctctgttctaaaacgtaagactcgggggttggggcaaaagaagggaaacccatccagtcctgtgattctattgcaagcttcaaggggcttttgtttgaaagacaaaactccccacctgaatctgttgtcacacgtgccgtaggggtgatggatggcaccggatgctggattccccaagaacaagttaccctctggggtgaggctattccagcgagctgggacatttccccatgggggcccactcccctctcttccccagcaggctgtagtttctaagctgtgaacatttcaagataaattaacagaggagaggaaaaagatggctcagctattttttcacaggtttacactagttgagctaatatgcgtgtctttggaaattaaacacaaatggtaacatattccaaaaccagacccatcttgttgcctattgtgataaaataaaaagacggctgtatataacatattgggtaatgcagaccaaattaagtgttttgccttgtttaaatgaaatgcatgtttagtgagcactaatacaatcttattccagaagactgtttttagtagcttattgtgaagtaagacaactataatgaatgtctgtcttgtttggaagtcatatctgtctttgcacaaatgtaccaatcgacaagtatattttatatattccataaaaatacaaagtaaccctgactagggcccaactttaattttgaatgcatttccagagtggccatgcctagagggcagatgcagagcaggtggtagtgggacaggacaattggagcacaggaatgttaacatgtatgacaggggaccagtagggtggtttccctctcaggcccagcagcccattgacagcattagactggcggcatggtgcttttctgagcagatcaatactctgcagactcgaaaaaacatcacatacattcttggaacttcccagtggtttaatctatgtgcatggttagggagccaggtctggaatattcagtttccctgcccctgttaaagaatcagaggttgggcagtcatcaaattcatcataaagacatgggcaagtgtgtctgtggtttccaaggcccccctatggagaatccaaaagtattttccattgccgtgctctttgaatgcagacttctatttccagaagtgacagcacaagtctgagttgctgtttggtctggtgacctcagacacactaatttgaattgaaagctaagagtaaaaatttgctggttacaggcgagtcatactcttgcaagtagttagcaaagggaggcccaaattctcaaggttgttgatggggaacttgccactaagagaaggcagagaggtccctagtgggtatatttgctgccaagccacttgccaaagaagaggaaccacagaaagagagacatcatgaccaggagaaaaatgtgactagacatgctaacctccaggtttttatatatgacttgagtctgctgtaattggcagcagaaatccaaatttgtatggtagaccaaaaagaaccaaatccatagggtgaaattttgagacctagactctgtaaaaataatcctagtcttcctccaggggtcagttcctcacagtggttctgtaccaaaacttgccaaattcctccatggccaagtgttaaaatctgtgtttggaaaatagcgaattaacctaagacacagaaggcagactgggtgaggagacctagcatgccctattggcagtgctcaggagctgcatcccacttttccctgctctgaatcgaagtcctagttccttcctttgattctcctttggtaggtggaatcagttaatgttttgagaaacctgcctgggctctgcccttagtcatgacatctcgctgagccagacccactctgttccttggaacctagagctggagtgaggagtagaggtctccggctattccagaaagaaaagtgagccacatgcaggctgatgaatgccgacacttccagaatgtatagaaatagtccctgtcctggcctgccactgaccctgtctgtattttctcggaggttgtttttctccttctccttcccaggaaggtctttgtatgtcgaatccagtgcactcaagtttggccaagggactccacagcacccagaagactgcatgcctcaaggtttatgtcactcctctgctgggctgttcattgtcattgctgtgttcagggacctttggaaataaaacctgttctgtcccaaataaaaccagcctgtgatgttcaagggactggaataaagtggcttacgacctgaaggattctacagagtgctcaactgttcatacatcattcagagtgggagggagctgggggtgctgtcccatcccatctgtatgcccacggtggatttaataatatataatttataaatcatagcctatggagtggcccgtaaatcagttgactgtgtagctcttgcctggcattaaagcatgtttttggtttaacatgaaaaaaaaaaaaaaaaaa

SEQ ID NO: 308486 - DNA, 582 bp, Artificial Sequence
  derived and/or modified sequence
atggggaaacagaatagtaagctgcggccagaggtgatgcaggacctgctggagtctaccgattttaccgaacacgaaatccaggagtggtacaaggggttcctcagggactgcccgtccggacacttgtcgatggaggaattcaagaagatttatggcaatttttttccatacggcgatgccagcaaattcgccgagcacgtgtttcgtacattcgatgccaacggtgatggtacaattgattttcgcgagttcatcatcgccctgagcgtaaccagtcgcgggaagttagagcaaaaattaaaatgggccttctccatgtatgacttagatggtaacgggtacatttccaaagcagagatgctcgaaatcgtgcaagctatttacaagatggtgtcctctgtgatgaaaatgcccgaggacgaatccactccagagaaacgaaccgaaaaaatcttcaggcagatggacaccaacagagatgggaaattgagtctggaggagtttattcggggcgccaaatctgacccatctatcgtgcgcttattgcagtgcgatccaagttcggcaggccaattctag

SEQ ID NO: 308487 - DNA, 582 bp, Artificial Sequence
  derived and/or modified sequence
atgggaaaacagaacagcaagttgcgaccagaagttatgcaagacctgctggagtccaccgacttcacggagcatgaaatacaggaatggtacaagggctttctgagagactgcccatccggccatctgtcaatggaagaatttaagaaaatctacggaaatttcttcccatacggagacgcttctaagtttgccgagcatgtgtttaggacctttgacgccaatggagatgggaccattgactttagagagtttattatagcgctgtctgtcacatcaagaggcaaactggagcagaaactcaaatgggccttcagcatgtatgatctggacggtaatggttacataagcaaagccgagatgctggagatagtccaggccatctataaaatggtatccagtgtgatgaaaatgcctgaggatgaatcaactcccgaaaagcgcacagagaagatctttcgtcaaatggacacaaatcgggacggtaaactttctctggaggaattcattagaggagctaaaagcgaccctagcatcgtccgactgcttcagtgtgatcccagctccgctggtcagttctag

SEQ ID NO: 308488 - DNA, 582 bp, Artificial Sequence
  derived and/or modified sequence
atgggcaagcagaactccaagctccgcccagaagtcatgcaggaccttcttgagtcaaccgattttaccgagcatgagattcaggaatggtacaagggtttccttcgcgattgtcctagcgggcacctctcgatggaagagtttaagaagatttacggcaacttcttcccctatggcgacgcaagcaaattcgctgagcacgtgttccgcacttttgacgccaacggtgacggaaccatcgacttccgcgagttcatcatcgccctctccgtgacgagtagggggaagctcgagcagaaactcaaatgggctttttcaatgtacgacctcgatggcaatggctatatctcgaaggctgagatgttggaaatcgttcaggctatatataagatggtgagcagcgtgatgaagatgccggaggacgagagtacacctgagaagaggacagaaaagatttttcgacaaatggataccaatcgcgatggcaaactgagtctcgaggagttcattaggggagccaagtcggatcccagcatcgtacgcttgctacagtgtgacccttcctccgcaggacagttctag

SEQ ID NO: 308489 - DNA, 582 bp, Artificial Sequence
  derived and/or modified sequence
atgggaaagcaaaattccaagttgcggcctgaagtgatgcaagatctcctcgagagcacggatttcacagaacacgaaattcaggagtggtataagggctttcttcgagattgccctagcggccatcttagtatggaggagtttaaaaagatctacgggaactttttcccctatggagacgcgagcaagtttgcagagcatgtctttcgcacattcgatgccaatggagacggcacaatcgacttccgcgagttcatcatcgcactgtctgtcactagcagaggtaagctggaacaaaaactgaagtgggcttttagcatgtacgatctagacggaaatggatacatctcaaaagccgaaatgctggagatcgtgcaggccatctacaagatggtgtcaagcgtgatgaagatgcctgaagatgaatccaccccggaaaagaggactgagaaaatcttccggcagatggatactaatagggacggaaagctgtccctggaagagtttattagaggggccaagagcgatcccagtatagttcgactcctccaatgcgacccgtcgtcagccgggcagttctag

SEQ ID NO: 308490 - DNA, 582 bp, Artificial Sequence
  derived and/or modified sequence
atgggtaaacaaaatagtaagttgaggccagaggtgatgcaagacctgttggaatccacagattttaccgaacacgagatacaggaatggtataagggctttctgcgggattgtccctctgggcacctgagcatggaagaatttaagaaaatttacggaaatttcttcccatacggagacgcctccaaattcgccgagcacgtcttccgtacctttgatgctaacggcgacggcaccattgatttccgggaatttattatcgcactttctgtcacgtcccgaggaaagttagaacagaaactgaagtgggcttttagcatgtacgacctggacggaaatggatacatctcgaaggctgagatgctggaaatcgtgcaggctatatacaagatggtgagctctgtcatgaagatgccggaggatgaatctacacccgagaagcggacagagaaaattttcaggcagatggatactaatcgtgatgggaagctgagtttagaagagttcatccgcggcgccaagagtgacccttcaatagtgcgccttctgcagtgtgacccatccagcgctggacagttttag

SEQ ID NO: 308491 - DNA, 582 bp, Artificial Sequence
  derived and/or modified sequence
atgggcaagcagaacagcaagctgcggcctgaggtgatgcaggacctgctggagagcacagacttcacagaacatgagatccaggagtggtacaagggcttcctgcgggactgccccagcggccacctgtccatggaggagttcaagaagatctacggcaacttcttcccctatggagatgccagcaagtttgctgagcacgtgttccgcacctttgatgccaatggagatggcaccatcgacttccgggagttcatcatcgccctgtctgtgaccagccggggcaagctggagcagaagctgaagtgggccttctccatgtatgacctggatggaaatggctacatcagcaaggccgagatgctggagatcgtgcaggccatctacaagatggtgtcctctgtgatgaagatgccagaagatgagagcaccccagagaagaggacagagaagatcttccggcagatggacaccaacagagatggcaagctgagcctggaggagttcatccggggggccaagagtgaccccagcatcgtgcggctgctgcagtgtgaccccagcagcgctggccagttctag

SEQ ID NO: 308492 - DNA, 582 bp, Artificial Sequence
  derived and/or modified sequence
atgggcaagcagaacagcaagctgcggcccgaggtgatgcaggacctgctcgagagcactgacttcactgaacacgagattcaagagtggtacaaaggattcctgcgcgactgcccgagtggtcatctgagtatggaagaattcaaaaagatctatgggaacttctttccgtatggcgacgcctctaaattcgccgagcatgtgtttaggacattcgatgctaacggtgacgggactattgatttccgggagtttattatcgccctgtccgtgacatctaggggtaaacttgaacaaaagctaaaatgggcgttctcaatgtacgaccttgacggaaacggttacattagtaaagccgaaatgctcgagatcgtccaagccatttacaagatggtgtcgagcgttatgaaaatgcctgaggacgaaagcactccagagaagaggacggagaagatcttcagacagatggatactaacagagatgggaagctgtctttggaagagttcatacgcggcgccaagtccgatccgtctatagtgagattacttcagtgtgatccatcgtccgcaggacagttctag

SEQ ID NO: 308493 - DNA, 582 bp, Artificial Sequence
  derived and/or modified sequence
atgggcaagcagaacagcaagctgcggcccgaggtgatgcaggacctgctggagtctacggactttactgagcacgaaatccaggagtggtacaagggcttcctccgggactgcccaagtggacacctgtctatggaggagttcaagaagatctacggtaacttcttcccctacggcgatgcgtccaaatttgcggaacacgtttttaggactttcgatgctaatggcgatggaacaatcgatttcagagagtttatcatcgcactatccgtgacttctagaggtaaattggaacaaaagctcaaatgggccttctcaatgtatgacttagacggcaacggctacatttccaaagcagagatgcttgagatcgtgcaggccatatacaaaatggtttcaagcgtgatgaaaatgcccgaagatgaatcaacacccgaaaagcgtacggaaaaaatattcagacagatggatactaaccgggatggcaagctgtcactggaagaattcatacggggcgctaagtcagatcccagcattgtgcgcctgctccagtgtgatccaagtagcgctggccagttctag

SEQ ID NO: 308494 - DNA, 582 bp, Artificial Sequence
  derived and/or modified sequence
atgggcaagcagaacagcaagctgcggcccgaggtgatgcaggacctgctcgagtcaactgattttaccgaacacgagattcaagagtggtataagggcttcttgcgggattgcccaagcgggcatctgtccatggaggagttcaaaaagatttatggaaacttctttccatacggcgatgcctccaaattcgccgaacacgttttccggacttttgacgccaacggagatggcacaatcgactttcgagagttcattattgccctaagcgtgacctccagggggaagctcgagcaaaaacttaagtgggccttctccatgtatgatctggatggcaatggctatataagcaaggctgagatgttggagatcgtgcaagccatatacaagatggtgtcttccgtaatgaagatgcccgaggatgagtccactccagaaaagcgcactgagaaaatcttccggcagatggacacaaatcgtgatggcaaactctctctggaggagtttatccgtggtgccaagtctgatccctctattgttaggctgctgcaatgtgacccttcatctgctggacagttctag

SEQ ID NO: 308495 - DNA, 582 bp, Artificial Sequence
  derived and/or modified sequence
atgggcaagcagaacagcaagctgcggcccgaggtgatgcaggacctgctggagagtaccgatttcacggagcacgagatccaggagtggtacaaaggcttcctccgagattgccctagtggacacctgtccatggaagagttcaaaaaaatctatggaaacttctttccatacggggatgcatctaagttcgctgaacatgtgttccggaccttcgacgcaaatggagacggcaccatcgattttcgcgagttcattatcgccctgtccgtgacatctcgcgggaagctagagcagaaactgaagtgggcattttctatgtatgacttggacggtaatgggtatattagcaaagccgagatgttggaaatcgttcaagctatttataagatggtgagtagcgtgatgaaaatgcccgaagatgagtctactccagagaaacggactgaaaagatcttcaggcagatggacacgaatagggacggaaaactgagtctcgaagagttcatcagaggagctaagagcgatcccagcatcgttaggctgctccagtgcgacccttcgtcggcagggcagttctag

SEQ ID NO: 308496 - DNA, 582 bp, Artificial Sequence
  derived and/or modified sequence
atgggcaagcagaacagcaagctgcggcccgaggtgatgcaggacctgctggaaagcaccgacttcaccgaacatgagattcaagagtggtacaagggcttcctgagagactgtccgtcgggacatctctctatggaggaatttaaaaagatttacggaaatttcttcccctatggcgacgccagcaagttcgccgagcacgtgttcaggacatttgacgccaacggcgacgggacaatcgacttcagagagttcattattgcactctccgtgacgagcagaggaaagctggagcaaaagcttaagtgggccttctcgatgtacgatctagatggcaacggctacattagtaaagccgagatgctggagatcgtgcaggccatttacaagatggtatccagtgtcatgaaaatgcctgaggacgaatccactcccgagaagcgtaccgagaagatctttcgacagatggacacgaacagggatggtaaactctcacttgaagagttcattcggggcgcaaagtcagatccatcaattgtgagacttctgcaatgtgacccctcctctgcggggcagttctag

SEQ ID NO: 308497 - DNA, 3283 bp, Artificial Sequence
  derived and/or modified sequence
gtgagaatctggtggatgctggaccttgctgctgctgctactgctgtttccaggggctgcagagcatggactgttaaatcttgcacttcttctgagtgagctgaattcttgccgccaggatggggaaacagaacagcaagctgcgcccggaggtcatgcaggacttgctggaaagcacagactttacagagcatgagatccaggaatggtataaaggcttcttgagagactgccccagtggacatttgtcaatggaagagtttaagaaaatatatgggaactttttcccttatggggatgcttccaaatttgcagagcatgtcttccgcaccttcgatgcaaatggagatgggacaatagactttagagaattcatcatcgccttgagtgtaacttcgagggggaagctggagcagaagctgaaatgggccttcagcatgtacgacctggacggaaatggctatatcagcaaggcagagatgctagagatcgtgcaggcaatctataagatggtttcctctgtaatgaaaatgcctgaagatgagtcaaccccagagaaaagaacagaaaagatcttccgccagatggacaccaatagagacggaaaactctccctggaagagttcatccgaggagccaaaagcgacccgtccattgtgcgcctcctgcagtgcgacccgagcagtgccggccagttctgagccctgcgcccaccaatcgaattgtagagctgcttgtgttcccttttgattcttctttttaacaatttttttttttttttgccaaacaatatcaatggtgatgccgtcccctgtgcggtctgatgcgccttcctccgtgacgccttcagcttcttttgtcgtggatgcttcgtgggaatgcccagagccccagtgtgcttgtggagagcatggacagacttcgtggtgttcattgtttgatgatttttaatcgttactattatttttttttattctaatgtctctgttctaaaacgtaagactcgggggttggggcaaaagaagggaaacccatccagtcctgtgattctattgcaagcttcaaggggcttttgtttgaaagacaaaactccccacctgaatctgttgtcacacgtgccgtaggggtgatggatggcaccggatgctggattccccaagaacaagttaccctctggggtgaggctattccagcgagctgggacatttccccatgggggcccactcccctctcttccccagcaggctgtagtttctaagctgtgaacatttcaagataaattaacagaggagaggaaaaagatggctcagctattttttcacaggtttacactagttgagctaatatgcgtgtctttggaaattaaacacaaatggtaacatattccaaaaccagacccatcttgttgcctattgtgataaaataaaaagacggctgtatataacatattgggtaatgcagaccaaattaagtgttttgccttgtttaaatgaaatgcatgtttagtgagcactaatacaatcttattccagaagactgtttttagtagcttattgtgaagtaagacaactataatgaatgtctgtcttgtttggaagtcatatctgtctttgcacaaatgtaccaatcgacaagtatattttatatattccataaaaatacaaagtaaccctgactagggcccaactttaattttgaatgcatttccagagtggccatgcctagagggcagatgcagagcaggtggtagtgggacaggacaattggagcacaggaatgttaacatgtatgacaggggaccagtagggtggtttccctctcaggcccagcagcccattgacagcattagactggcggcatggtgcttttctgagcagatcaatactctgcagactcgaaaaaacatcacatacattcttggaacttcccagtggtttaatctatgtgcatggttagggagccaggtctggaatattcagtttccctgcccctgttaaagaatcagaggttgggcagtcatcaaattcatcataaagacatgggcaagtgtgtctgtggtttccaaggcccccctatggagaatccaaaagtattttccattgccgtgctctttgaatgcagacttctatttccagaagtgacagcacaagtctgagttgctgtttggtctggtgacctcagacacactaatttgaattgaaagctaagagtaaaaatttgctggttacaggcgagtcatactcttgcaagtagttagcaaagggaggcccaaattctcaaggttgttgatggggaacttgccactaagagaaggcagagaggtccctagtgggtatatttgctgccaagccacttgccaaagaagaggaaccacagaaagagagacatcatgaccaggagaaaaatgtgactagacatgctaacctccaggtttttatatatgacttgagtctgctgtaattggcagcagaaatccaaatttgtatggtagaccaaaaagaaccaaatccatagggtgaaattttgagacctagactctgtaaaaataatcctagtcttcctccaggggtcagttcctcacagtggttctgtaccaaaacttgccaaattcctccatggccaagtgttaaaatctgtgtttggaaaatagcgaattaacctaagacacagaaggcagactgggtgaggagacctagcatgccctattggcagtgctcaggagctgcatcccacttttccctgctctgaatcgaagtcctagttccttcctttgattctcctttggtaggtggaatcagttaatgttttgagaaacctgcctgggctctgcccttagtcatgacatctcgctgagccagacccactctgttccttggaacctagagctggagtgaggagtagaggtctccggctattccagaaagaaaagtgagccacatgcaggctgatgaatgccgacacttccagaatgtatagaaatagtccctgtcctggcctgccactgaccctgtctgtattttctcggaggttgtttttctccttctccttcccaggaaggtctttgtatgtcgaatccagtgcactcaagtttggccaagggactccacagcacccagaagactgcatgcctcaaggtttatgtcactcctctgctgggctgttcattgtcattgctgtgttcagggacctttggaaataaaacctgttctgtcccaaataaaaccagcctgtgatgttcaagggactggaataaagtggcttacgacctgaaggattctacaga

SEQ ID NO: 308498 - DNA, 3727 bp, Artificial Sequence
  derived and/or modified sequence
gacggtgctgtccagggggaggcgggcggagggaaggcgctgccgctgctgccgccgcctcgcccgaagcgacacagacgctgggagcggccgaggcgagatgtatttagactttttaattattcttcctagttcctgataagctaagacaatacttttatttttgacagagtgatttcttctgacttgagcctgcagtgtgctgtgagagatctaccactagattatctcaactttggtctcctgggaccactcgttgctgacagtcagaaattgcaaggcatctgatctcctggtgttaaaatctgtcgtgataccgaggaaggccccgagatcccaggcactgagtgactgcatactctgaattcttgccgccaggatggggaaacagaacagcaagctgcgcccggaggtcatgcaggacttgctggaaagcacagactttacagagcatgagatccaggaatggtataaaggcttcttgagagactgccccagtggacatttgtcaatggaagagtttaagaaaatatatgggaactttttcccttatggggatgcttccaaatttgcagagcatgtcttccgcaccttcgatgcaaatggagatgggacaatagactttagagaattcatcatcgccttgagtgtaacttcgagggggaagctggagcagaagctgaaatgggccttcagcatgtacgacctggacggaaatggctatatcagcaaggcagagatgctagagatcgtgcaggcaatctataagatggtttcctctgtaatgaaaatgcctgaagatgagtcaaccccagagaaaagaacagaaaagatcttccgccagatggacaccaatagagacggaaaactctccctggaagagttcatccgaggagccaaaagcgacccgtccattgtgcgcctcctgcagtgcgacccgagcagtgccggccagttctgagccctgcgcccaccaatcgaattgtagagctgcttgtgttcccttttgattcttctttttaacaatttttttttttttttgccaaacaatatcaatggtgatgccgtcccctgtgcggtctgatgcgccttcctccgtgacgccttcagcttcttttgtcgtggatgcttcgtgggaatgcccagagccccagtgtgcttgtggagagcatggacagacttcgtggtgttcattgtttgatgatttttaatcgttactattatttttttttattctaatgtctctgttctaaaacgtaagactcgggggttggggcaaaagaagggaaacccatccagtcctgtgattctattgcaagcttcaaggggcttttgtttgaaagacaaaactccccacctgaatctgttgtcacacgtgccgtaggggtgatggatggcaccggatgctggattccccaagaacaagttaccctctggggtgaggctattccagcgagctgggacatttccccatgggggcccactcccctctcttccccagcaggctgtagtttctaagctgtgaacatttcaagataaattaacagaggagaggaaaaagatggctcagctattttttcacaggtttacactagttgagctaatatgcgtgtctttggaaattaaacacaaatggtaacatattccaaaaccagacccatcttgttgcctattgtgataaaataaaaagacggctgtatataacatattgggtaatgcagaccaaattaagtgttttgccttgtttaaatgaaatgcatgtttagtgagcactaatacaatcttattccagaagactgtttttagtagcttattgtgaagtaagacaactataatgaatgtctgtcttgtttggaagtcatatctgtctttgcacaaatgtaccaatcgacaagtatattttatatattccataaaaatacaaagtaaccctgactagggcccaactttaattttgaatgcatttccagagtggccatgcctagagggcagatgcagagcaggtggtagtgggacaggacaattggagcacaggaatgttaacatgtatgacaggggaccagtagggtggtttccctctcaggcccagcagcccattgacagcattagactggcggcatggtgcttttctgagcagatcaatactctgcagactcgaaaaaacatcacatacattcttggaacttcccagtggtttaatctatgtgcatggttagggagccaggtctggaatattcagtttccctgcccctgttaaagaatcagaggttgggcagtcatcaaattcatcataaagacatgggcaagtgtgtctgtggtttccaaggcccccctatggagaatccaaaagtattttccattgccgtgctctttgaatgcagacttctatttccagaagtgacagcacaagtctgagttgctgtttggtctggtgacctcagacacactaatttgaattgaaagctaagagtaaaaatttgctggttacaggcgagtcatactcttgcaagtagttagcaaagggaggcccaaattctcaaggttgttgatggggaacttgccactaagagaaggcagagaggtccctagtgggtatatttgctgccaagccacttgccaaagaagaggaaccacagaaagagagacatcatgaccaggagaaaaatgtgactagacatgctaacctccaggtttttatatatgacttgagtctgctgtaattggcagcagaaatccaaatttgtatggtagaccaaaaagaaccaaatccatagggtgaaattttgagacctagactctgtaaaaataatcctagtcttcctccaggggtcagttcctcacagtggttctgtaccaaaacttgccaaattcctccatggccaagtgttaaaatctgtgtttggaaaatagcgaattaacctaagacacagaaggcagactgggtgaggagacctagcatgccctattggcagtgctcaggagctgcatcccacttttccctgctctgaatcgaagtcctagttccttcctttgattctcctttggtaggtggaatcagttaatgttttgagaaacctgcctgggctctgcccttagtcatgacatctcgctgagccagacccactctgttccttggaacctagagctggagtgaggagtagaggtctccggctattccagaaagaaaagtgagccacatgcaggctgatgaatgccgacacttccagaatgtatagaaatagtccctgtcctggcctgccactgaccctgtctgtattttctcggaggttgtttttctccttctccttcccaggaaggtctttgtatgtcgaatccagtgcactcaagtttggccaagggactccacagcacccagaagactgcatgcctcaaggtttatgtcactcctctgctgggctgttcattgtcattgctgtgttcagggacctttggaaataaaacctgttctgtcccaaataaaaccagcctgtgatgttcaagggactggaataaagtggcttacgacctgaaggattctacagagtgctcaactgttcatacatcattcagagtgggagggagctgggggtgctgtcccatcccatctgtatgcccacggtggatttaataatatataatttataaatcatagcctatggagtggcccgtaaatcagttgactgtgtagctcttgcctggcattaaagcatgtttttggtttaacatg

SEQ ID NO: 308499 - DNA, 3808 bp, Artificial Sequence
  derived and/or modified sequence
aggggccccttagatgtcttcctccggattttttgttaagcttttcctagacagtttacagaaggctttgggtagagaaagcactagttagacaaaagcagcccccctcccaccttgtgggcatgaagagtccagaggacaccacctgagaagcttttcaactgccttccaaggctcccttgaacttcactgcggtagagcagggaccccagaccccccctcaaatcgaagcttggaaggaggtgctctaggctgaatctgacctcccaggacccgaggaggcaagcagatggcaccccttggaaagtagcagtgcaggctggctagaggcctgggcgagtgatttcttctgacttgagcctgcagtgtgctgtgagagatctaccactagattatctcaactttggtctcctgggaccactcgttgctgacagtcagaaactgaattcttgccgccaggatggggaaacagaacagcaagctgcgcccggaggtcatgcaggacttgctggaaagcacagactttacagagcatgagatccaggaatggtataaaggcttcttgagagactgccccagtggacatttgtcaatggaagagtttaagaaaatatatgggaactttttcccttatggggatgcttccaaatttgcagagcatgtcttccgcaccttcgatgcaaatggagatgggacaatagactttagagaattcatcatcgccttgagtgtaacttcgagggggaagctggagcagaagctgaaatgggccttcagcatgtacgacctggacggaaatggctatatcagcaaggcagagatgctagagatcgtgcaggcaatctataagatggtttcctctgtaatgaaaatgcctgaagatgagtcaaccccagagaaaagaacagaaaagatcttccgccagatggacaccaatagagacggaaaactctccctggaagagttcatccgaggagccaaaagcgacccgtccattgtgcgcctcctgcagtgcgacccgagcagtgccggccagttctgagccctgcgcccaccaatcgaattgtagagctgcttgtgttcccttttgattcttctttttaacaatttttttttttttttgccaaacaatatcaatggtgatgccgtcccctgtgcggtctgatgcgccttcctccgtgacgccttcagcttcttttgtcgtggatgcttcgtgggaatgcccagagccccagtgtgcttgtggagagcatggacagacttcgtggtgttcattgtttgatgatttttaatcgttactattatttttttttattctaatgtctctgttctaaaacgtaagactcgggggttggggcaaaagaagggaaacccatccagtcctgtgattctattgcaagcttcaaggggcttttgtttgaaagacaaaactccccacctgaatctgttgtcacacgtgccgtaggggtgatggatggcaccggatgctggattccccaagaacaagttaccctctggggtgaggctattccagcgagctgggacatttccccatgggggcccactcccctctcttccccagcaggctgtagtttctaagctgtgaacatttcaagataaattaacagaggagaggaaaaagatggctcagctattttttcacaggtttacactagttgagctaatatgcgtgtctttggaaattaaacacaaatggtaacatattccaaaaccagacccatcttgttgcctattgtgataaaataaaaagacggctgtatataacatattgggtaatgcagaccaaattaagtgttttgccttgtttaaatgaaatgcatgtttagtgagcactaatacaatcttattccagaagactgtttttagtagcttattgtgaagtaagacaactataatgaatgtctgtcttgtttggaagtcatatctgtctttgcacaaatgtaccaatcgacaagtatattttatatattccataaaaatacaaagtaaccctgactagggcccaactttaattttgaatgcatttccagagtggccatgcctagagggcagatgcagagcaggtggtagtgggacaggacaattggagcacaggaatgttaacatgtatgacaggggaccagtagggtggtttccctctcaggcccagcagcccattgacagcattagactggcggcatggtgcttttctgagcagatcaatactctgcagactcgaaaaaacatcacatacattcttggaacttcccagtggtttaatctatgtgcatggttagggagccaggtctggaatattcagtttccctgcccctgttaaagaatcagaggttgggcagtcatcaaattcatcataaagacatgggcaagtgtgtctgtggtttccaaggcccccctatggagaatccaaaagtattttccattgccgtgctctttgaatgcagacttctatttccagaagtgacagcacaagtctgagttgctgtttggtctggtgacctcagacacactaatttgaattgaaagctaagagtaaaaatttgctggttacaggcgagtcatactcttgcaagtagttagcaaagggaggcccaaattctcaaggttgttgatggggaacttgccactaagagaaggcagagaggtccctagtgggtatatttgctgccaagccacttgccaaagaagaggaaccacagaaagagagacatcatgaccaggagaaaaatgtgactagacatgctaacctccaggtttttatatatgacttgagtctgctgtaattggcagcagaaatccaaatttgtatggtagaccaaaaagaaccaaatccatagggtgaaattttgagacctagactctgtaaaaataatcctagtcttcctccaggggtcagttcctcacagtggttctgtaccaaaacttgccaaattcctccatggccaagtgttaaaatctgtgtttggaaaatagcgaattaacctaagacacagaaggcagactgggtgaggagacctagcatgccctattggcagtgctcaggagctgcatcccacttttccctgctctgaatcgaagtcctagttccttcctttgattctcctttggtaggtggaatcagttaatgttttgagaaacctgcctgggctctgcccttagtcatgacatctcgctgagccagacccactctgttccttggaacctagagctggagtgaggagtagaggtctccggctattccagaaagaaaagtgagccacatgcaggctgatgaatgccgacacttccagaatgtatagaaatagtccctgtcctggcctgccactgaccctgtctgtattttctcggaggttgtttttctccttctccttcccaggaaggtctttgtatgtcgaatccagtgcactcaagtttggccaagggactccacagcacccagaagactgcatgcctcaaggtttatgtcactcctctgctgggctgttcattgtcattgctgtgttcagggacctttggaaataaaacctgttctgtcccaaataaaaccagcctgtgatgttcaagggactggaataaagtggcttacgacctgaaggattctacagagtgctcaactgttcatacatcattcagagtgggagggagctgggggtgctgtcccatcccatctgtatgcccacggtggatttaataatatataatttataaatcatagcctatggagtggcccgtaaatcagttgactgtgtagctcttgcctggcattaaagcatgtttttggtttaacatg

SEQ ID NO: 308500 - DNA, 1832 bp, Artificial Sequence
  derived and/or modified sequence
aaaaaaaaaaaaaaaaaaaaaaaaaaactgaattcttgccgccaggatggggaaacagaacagcaagctgcgcccggaggtcatgcaggacttgctggaaagcacagactttacagagcatgagatccaggaatggtataaaggcttcttgagagactgccccagtggacatttgtcaatggaagagtttaagaaaatatatgggaactttttcccttatggggatgcttccaaatttgcagagcatgtcttccgcaccttcgatgcaaatggagatgggacaatagactttagagaattcatcatcgccttgagtgtaacttcgagggggaagctggagcagaagctgaaatgggccttcagcatgtacgacctggacggaaatggctatatcagcaaggcagagatgctagagatcgtgcaggcaatctataagatggtttcctctgtaatgaaaatgcctgaagatgagtcaaccccagagaaaagaacagaaaagatcttccgccagatggacaccaatagagacggaaaactctccctggaagagttcatccgaggagccaaaagcgacccgtccattgtgcgcctcctgcagtgcgacccgagcagtgccggccagttctgagccctgcgcccaccaatcgaattgtagagctgcttgtgttcccttttgattcttctttttaacaatttttttttttttttgccaaacaatatcaatggtgatgccgtcccctgtgcggtctgatgcgccttcctccgtgacgccttcagcttcttttgtcgtggatgcttcgtgggaatgcccagagccccagtgtgcttgtggagagcatggacagacttcgtggtgttcattgtttgatgatttttaatcgttactattatttttttttattctaatgtctctgttctaaaacgtaagactcgggggttggggcaaaagaagggaaacccatccagtcctgtgattctattgcaagcttcaaggggcttttgtttgaaagacaaaactccccacctgaatctgttgtcacacgtgccgtaggggtgatggatggcaccggatgctggattccccaagaacaagttaccctctggggtgaggctattccagcgagctgggacatttccccatgggggcccactcccctctcttccccagcaggctgtagtttctaagctgtgaacatttcaagataaattaacagaggagaggaaaaagatggctcagctattttttcacaggtttacactagttgagctaatatgcgtgtctttggaaattaaacacaaatggtaacatattccaaaaccagacccatcttgttgcctattgtgataaaataaaaagacggctgtatataacatattgggtaatgcagaccaaattaagtgttttgccttgtttaaatgaaatgcatgtttagtgagcactaatacaatcttattccagaagactgtttttagtagcttattgtgaagtaagacaactataatgaatgtctgtcttgtttggaagtcatatctgtctttgcacaaatgtaccaatcgacaagtatattttatatattccataaaaatacaaagtaaccctgactagggcccaactttaattttgaatgcatttccagagtggccatgcctagagggcagatgcagagcaggtggtagtgggacaggacaattggagcacaggaatgttaacatgtatgacaggggaccagtagggtggtttccctctcaggcccagcagcccattgacagcattagactggcggcatggtgcttttctgagcagatcaatactctgcagactcgaaaaaaca

SEQ ID NO: 308501 - DNA, 2289 bp, Artificial Sequence
  derived and/or modified sequence
gggggaggcgggcggagggaaggcgctgccgctgctgccgccgcctcgcccgaagcgacacagacgctgggagcggccgaggcgagatcctatcattattttaaaattcctcctcctccacgaagtccttcctgattccttcaaagaaatatcactcctccgaattcccagagtgatttcttctgacttgagcctgcagtgtgctgtgagagatctaccactagattatctcaactttggtctcctgggaccactcgttgctgacagtcagaaactgaattcttgccgccaggatggggaaacagaacagcaagctgcgcccggaggtcatgcaggacttgctggaaagcacagactttacagagcatgagatccaggaatggtataaaggcttcttgagagactgccccagtggacatttgtcaatggaagagtttaagaaaatatatgggaactttttcccttatggggatgcttccaaatttgcagagcatgtcttccgcaccttcgatgcaaatggagatgggacaatagactttagagaattcatcatcgccttgagtgtaacttcgagggggaagctggagcagaagctgaaatgggccttcagcatgtacgacctggacggaaatggctatatcagcaaggcagagatgctagagatcgtgcaggcaatctataagatggtttcctctgtaatgaaaatgcctgaagatgagtcaaccccagagaaaagaacagaaaagatcttccgccagatggacaccaatagagacggaaaactctccctggaagagttcatccgaggagccaaaagcgacccgtccattgtgcgcctcctgcagtgcgacccgagcagtgccggccagttctgagccctgcgcccaccaatcgaattgtagagctgcttgtgttcccttttgattcttctttttaacaatttttttttttttttgccaaacaatatcaatggtgatgccgtcccctgtgcggtctgatgcgccttcctccgtgacgccttcagcttcttttgtcgtggatgcttcgtgggaatgcccagagccccagtgtgcttgtggagagcatggacagacttcgtggtgttcattgtttgatgatttttaatcgttactattatttttttttattctaatgtctctgttctaaaacgtaagactcgggggttggggcaaaagaagggaaacccatccagtcctgtgattctattgcaagcttcaaggggcttttgtttgaaagacaaaactccccacctgaatctgttgtcacacgtgccgtaggggtgatggatggcaccggatgctggattccccaagaacaagttaccctctggggtgaggctattccagcgagctgggacatttccccatgggggcccactcccctctcttccccagcaggctgtagtttctaagctgtgaacatttcaagataaattaacagaggagaggaaaaagatggctcagctattttttcacaggtttacactagttgagctaatatgcgtgtctttggaaattaaacacaaatggtaacatattccaaaaccagacccatcttgttgcctattgtgataaaataaaaagacggctgtatataacatattgggtaatgcagaccaaattaagtgttttgccttgtttaaatgaaatgcatgtttagtgagcactaatacaatcttattccagaagactgtttttagtagcttattgtgaagtaagacaactataatgaatgtctgtcttgtttggaagtcatatctgtctttgcacaaatgtaccaatcgacaagtatattttatatattccataaaaatacaaagtaaccctgactagggcccaactttaattttgaatgcatttccagagtggccatgcctagagggcagatgcagagcaggtggtagtgggacaggacaattggagcacaggaatgttaacatgtatgacaggggaccagtagggtggtttccctctcaggcccagcagcccattgacagcattagactggcggcatggtgcttttctgagcagatcaatactctgcagactcgaaaaaacatcacatacattcttggaacttcccagtggtttaatctatgtgcatggttagggagccaggtctggaatattcagtttccctgcccctgttaaagaatcagaggttgggcagtcatcaaattcatcataaagacatgggcaagtgtgtctgtggtttccaaggcccccctatggagaatccaaaagtattttccattgccgtgctctttga

SEQ ID NO: 308502 - DNA, 582 bp, Artificial Sequence
  derived and/or modified sequence
atgggtaagcagaattctaaattaagaccggaagtgatgcaggaccttctcgagagtactgacttcaccgaacatgaaatccaggagtggtataaaggcttccttcgtgattgcccttcagggcacctgtcaatggaagaatttaaaaagatctatggaaatttctttccatacggcgatgcttcgaagttcgccgagcatgtgtttcggacattcgatgccaatggtgacggaacaatagacttccgggaatttatcatcgccctgtcggttacttcacggggtaaactggaacagaagctcaagtgggcctttagtatgtatgatctggatgggaacggatacatctccaaggctgagatgctagaaatcgtgcaggccatatacaagatggtgtccagtgtgatgaaaatgcccgaggacgagagtactcccgagaaaagaacagaaaagatcttccggcagatggatacaaatagagacggaaagttgagcctggaagaatttatcaggggcgcaaaatccgatccatcaatcgtgcggttactacagtgcgacccttccagtgctggccagttctag

SEQ ID NO: 308503 - DNA, 582 bp, Artificial Sequence
  derived and/or modified sequence
atgggtaaacaaaattcaaagctcagacccgaggtgatgcaggacctcttagaatctaccgatttcaccgagcacgagatccaagagtggtataagggatttctgagagattgtccgtcaggacatctgtcgatggaagagtttaaaaaaatttatggtaatttttttccctatggcgacgcttccaaattcgcagaacacgtgtttcgtacattcgatgccaacggagatggaaccattgacttcagagagtttattatcgcactctcagtcacctcacgaggtaagcttgagcagaagcttaagtgggccttctccatgtacgatctcgatggtaacggatacatttctaaagctgaaatgctcgaaatcgtgcaggcaatctacaagatggtttctagcgtaatgaaaatgcccgaagacgagtccaccccagaaaaaaggacagagaaaatcttccgacagatggacacgaacagggacggcaagttgtccctggaagagttcattcgcggagccaagtccgaccccagcatcgtaagactgctgcaatgcgatcccagcagcgcaggacagttctag

SEQ ID NO: 308504 - DNA, 582 bp, Artificial Sequence
  derived and/or modified sequence
atgggcaagcagaactctaagctccgcccagaggtcatgcaagatctcttagagagtactgacttcaccgaacatgagatccaggagtggtacaaagggttcctgcgagactgtccttcaggacacctctctatggaggagtttaaaaagatttacggcaatttcttcccctatggtgatgcaagtaaattcgccgagcacgtcttcagaacttttgacgccaatggcgacggcaccatcgacttcagagagtttattattgccctgtctgttacgagccgcggaaaactagagcaaaaattaaaatgggcctttagtatgtatgatctggacggcaacggttacatatcgaaggccgagatgctcgagatcgtgcaggctatctacaagatggtatcctcagtaatgaaaatgccagaggatgagtccacaccagagaaacggacagaaaaaatattccgccagatggataccaaccgcgacgggaaactctctctggaggaatttatcagaggggcaaagagtgacccctctatcgtgaggctcttgcagtgcgatccttccagtgcaggacagttctag

SEQ ID NO: 308505 - DNA, 582 bp, Artificial Sequence
  derived and/or modified sequence
atggggaagcagaactcgaagctgaggccagaggtcatgcaggacttgctcgagtccacggacttcaccgagcacgaaattcaagagtggtacaagggcttcctccgggattgtccctccggacacctgtctatggaggagtttaagaagatttacgggaacttctttccgtacggggatgcatccaaattcgcagagcacgttttcagaacgttcgacgctaatggggatgggacgatcgattttagggagttcattattgcgctatcagtcacctccagagggaagctcgagcaaaaacttaaatgggccttctcaatgtacgatttagatggaaacgggtacatcagtaaagccgagatgctggagatcgtccaggccatctacaaaatggtctcttccgtcatgaaaatgccagaggatgagagcacccccgagaaacgcacggaaaaaatttttcgccagatggacaccaaccgggatgggaagctctcgttggaggaattcattaggggcgctaagtccgatccctctattgtgagacttctgcaatgtgacccaagctcagccggtcagttctag

SEQ ID NO: 308506 - DNA, 582 bp, Artificial Sequence
  derived and/or modified sequence
atgggcaaacagaacagcaaactcagacctgaagtaatgcaggacctgcttgagagtactgatttcacagagcacgagattcaggagtggtacaagggatttttacgcgattgcccctctggccacttgtcaatggaagagttcaaaaaaatctatggcaattttttcccttacggagacgcctcaaagtttgctgaacatgtgttccggacatttgatgctaatggggatggcacaatagacttcagggagtttatcatcgccctgtccgtcacgagtcggggaaagctggagcagaagctgaaatgggccttttccatgtacgatctagatggtaatggttacataagcaaagctgagatgctggagatcgtgcaggccatttataagatggtgagctcggttatgaaaatgcccgaggatgagtccacccctgaaaagcggacggagaaaatttttcgccagatggatactaaccgggacggtaagctgtccctcgaggagttcattaggggggctaaatcggacccatctattgtccgcttgcttcaatgtgacccctcaagtgcgggtcagttctag

SEQ ID NO: 308507 - DNA, 582 bp, Artificial Sequence
  derived and/or modified sequence
atgggcaagcagaacagcaagctgagacccgaggtgatgcaggacctgctggagagcaccgacttcaccgagcacgagatccaggagtggtacaagggcttcctgagagactgccccagcggccacctgagcatggaggagttcaagaagatctacggcaacttcttcccctacggcgacgccagcaagttcgccgagcacgtgttcagaaccttcgacgccaacggcgacggcaccatcgacttcagagagttcatcatcgccctgagcgtgaccagcagaggcaagctggagcagaagctgaagtgggccttcagcatgtacgacctggacggcaacggctacatcagcaaggccgagatgctggagatcgtgcaggccatctacaagatggtgagcagcgtgatgaagatgcccgaggacgagagcacccccgagaagagaaccgagaagatcttcagacagatggacaccaacagagacggcaagctgagcctggaggagttcatcagaggcgccaagagcgaccccagcatcgtgagactgctgcagtgcgaccccagcagcgccggccagttctag

SEQ ID NO: 308508 - DNA, 588 bp, Artificial Sequence
  derived and/or modified sequence
atgcccgtgcccctgaccagcagacacgaggtggtgcccgccctggacgccggcagcagcgacagcagcagcagacagcacagacccggccacgacgccgtgggcgaggtggaggcctggcacagaaactgcatcgcctacaccagcccctggagcccctgcagcaccagctgcggcctgggcgtgagcaccagaatcagcaacgtgaacgcccagtgctggcccgagcaggagagcagactgtgcaacctgagaccctgcgacgtggacatccacaccctgatcaaggccggcaagaagtgcctggccgtgtaccagcccgaggccagcatgaacttcaccctggccggctgcatcagcaccagaagctaccagcccaagtactgcggcgtgtgcatggacaacagatgctgcatcccctacaagagcaagaccatcgacgtgagcttccagtgccccgacggcctgggcttcagcagacaggtgctgtggatcaacgcctgcttctgcaacctgagctgcagaaaccccaacgacatcttcgccgacctggagagctaccccgacttcagcgagatcgccaactag

SEQ ID NO: 308509 - DNA, 588 bp, Artificial Sequence
  derived and/or modified sequence
atgcccgtgcctctgacctcacgccacgaagtcgtgccagccctcgacgcggggagcagtgacagttcgtctaggcagcaccggcccggccacgacgcagtcggcgaagtggaggcgtggcacaggaactgtattgcctacacgagcccgtggtcaccatgtagcactagctgcggtctaggcgtgtcaactagaatctcgaatgtgaatgctcagtgctggcctgagcaagaaagtcgcctgtgcaacctgcgtccatgcgatgtggacattcataccctgataaaagccggaaagaagtgcctcgccgtttatcaacccgaggcaagcatgaacttcaccttggccggctgcattagcaccagatcttaccagccgaagtattgcggggtgtgcatggacaaccggtgctgcatcccctataagtcgaagacaattgatgtgtctttccagtgccccgacggtctaggtttttctaggcaggtcctgtggattaatgcttgcttctgcaatctgtcctgtcgtaacccgaacgacatctttgcagatctcgaaagttatccagattttagtgaaatcgccaactag

SEQ ID NO: 308510 - DNA, 588 bp, Artificial Sequence
  derived and/or modified sequence
atgcctgtgcccctgaccagcagacatgaggtggtgcctgccctggatgctggcagcagtgacagcagcagccggcagcacaggcctggccatgatgctgtgggggaggtggaggcctggcacaggaactgcatcgcctacaccagcccctggagcccctgcagcaccagctgtggcctgggcgtgtccacccgcatcagcaatgtgaatgcccagtgctggccagagcaggagagccggctgtgcaacctgcggccctgtgatgtggacatccacaccctcatcaaggccggcaagaagtgcctggccgtgtaccagcctgaggcctccatgaacttcaccctggccggctgcatcagcaccaggagctaccagcccaagtactgcggcgtgtgcatggacaaccgctgctgcatcccctacaagagcaagaccattgatgtgtccttccagtgcccagatggcctgggcttcagccggcaggtgctgtggatcaatgcctgcttctgcaacctgagctgcaggaaccccaatgacatctttgctgacctggagagctacccagacttcagcgagatcgccaactag

SEQ ID NO: 308511 - DNA, 588 bp, Artificial Sequence
  derived and/or modified sequence
atgcccgtgcccctgaccagccggcacgaggtggtgcccgccctggacgctggaagcagtgactcatcctcaaggcagcaccggccaggccacgatgcagtgggagaagtagaagcctggcaccgtaattgtatcgcatacacgtcaccgtggtccccctgctcaacaagttgtggactgggggtttccacgagaatcagcaatgtgaacgctcagtgctggcctgagcaagagtctcgcctatgtaacctgcgtccctgtgacgttgacattcatactcttattaaagccggaaagaagtgtctggccgtgtatcagcctgaggcttcaatgaactttaccctcgctgggtgtatctcaaccaggtcctatcagccaaaatactgcggagtctgtatggataacagatgttgtattccctacaagagtaagaccatcgatgtttcattccaatgcccagatggtctgggctttagcaggcaagtgctctggattaacgcctgcttctgcaacctcagctgtagaaaccccaacgacatctttgctgatctcgagagctaccctgacttcagcgagatagcgaattag

SEQ ID NO: 308512 - DNA, 588 bp, Artificial Sequence
  derived and/or modified sequence
atgcccgtccccctaacgagtagacatgaggtggtgccagcactcgatgctggctcttcagactcctcatcaaggcaacacagaccagggcacgacgcagtgggcgaggtcgaagcatggcacaggaactgcatcgcctatacaagcccatggagcccatgtagcacttcatgcggactgggagtttcaacaagaatctcaaacgttaacgctcagtgctggcccgaacaggaaagtagactgtgtaacctgagaccctgcgacgtggatatccacacactgataaaagctggtaagaaatgtctggctgtgtatcagcccgaggcgtctatgaacttcaccctggccggatgtatttccactcgcagttatcaaccaaagtattgtggagtatgtatggataatagatgctgtatcccctacaaatccaagacaatcgacgtgtccttccagtgtcctgacggattggggttctcacgtcaagtgctctggataaacgcttgcttctgcaacttgagctgtcggaaccctaacgatatattcgcagatttagagagctaccctgattttagtgagatcgccaattag

SEQ ID NO: 308513 - DNA, 630 bp, Artificial Sequence
  derived and/or modified sequence
ccgagaggtggtcggatcctctgggctgctcggtcgatgcctgtgccactgacgtccaggcatgaggtggttcctgccctggacgctggcagcagtgacagcagcagccgccagcaccgtcctggccacgatgctgtgggtgaggtggaggcatggcacaggaactgcatagcctacacaagcccctggagcccttgctccaccagctgcggcctgggggtctccactcggatctccaatgttaacgcccagtgctggcctgagcaagagagccgcctctgcaacttgcggccatgcgatgtggacatccatacactcattaaggcagggaagaagtgtctggctgtgtaccagccagaggcatccatgaacttcacacttgcgggctgcatcagcacacgctcctatcaacccaagtactgtggagtttgcatggacaataggtgctgcatcccctacaagtctaagactatcgacgtgtccttccagtgtcctgatgggcttggcttctcccgccaggtcctatggattaatgcctgcttctgtaacctgagctgtaggaatcccaatgacatctttgctgacttggaatcctaccctgacttctcagaaattgccaactaggcaggc

SEQ ID NO: 308514 - DNA, 891 bp, Artificial Sequence
  derived and/or modified sequence
atgagcaaggaggtgtggctgaacatgctgaagaaggagagcagatacgtgcacgacaagcacttcgaggtgctgcacagcgacctggagccccagatgagaagcatcctgctggactggctgctggaggtgtgcgaggtgtacaccctgcacagagagaccttctacctggcccaggacttcttcgacagattcatgctgacccagaaggacatcaacaagaacatgctgcagctgatcggcatcaccagcctgttcatcgccagcaagctggaggagatctacgcccccaagctgcaggagttcgcctacgtgaccgacggcgcctgcagcgaggaggacatcctgagaatggagctgatcatcctgaaggccctgaagtgggagctgtgccccgtgaccatcatcagctggctgaacctgttcctgcaggtggacgccctgaaggacgcccccaaggtgctgctgccccagtacagccaggagaccttcatccagatcgcccagctgctggacctgtgcatcctggccatcgacagcctggagttccagtacagaatcctgaccgccgccgccctgtgccacttcaccagcatcgaggtggtgaagaaggccagcggcctggagtgggacagcatcagcgagtgcgtggactggatggtgcccttcgtgaacgtggtgaagagcaccagccccgtgaagctgaagaccttcaagaagatccccatggaggacagacacaacatccagacccacaccaactacctggccatgctggaggaggtgaactacatcaacaccttcagaaagggcggccagctgagccccgtgtgcaacggcggcatcatgaccccccccaagagcaccgagaagccccccggcaagcactag

SEQ ID NO: 308515 - DNA, 2726 bp, Artificial Sequence
  derived and/or modified sequence
gcgtgcggggcgggaccggcccggcctatatattgggttggcgccggcgccagctgagccgagcggtagctggtctggcgaggttttatacacctgaaagaagagaatgtcaagacgaagtagccgtttacaagctaagcagcagccccagcccagccagacggaatccccccaagaagcccagataatccaggccaagaagaggaaaactacccaggatgtcaaaaaaagaagagaggaggtcaccaagaaacatcagtatgaaattaggaattgttggccacctgtattatctggggggatcagtccttgcattatcattgaaacacctcacaaagaaataggaacaagtgatttctccagatttacaaattacagatttaaaaatctttttattaatccttcacctttgcctgatttaagctggggatgttcaaaagaagtctggctaaacatgttaaaaaaggagagcagatatgttcatgacaaacattttgaagttctgcattctgacttggaaccacagatgaggtccatacttctagactggcttttagaggtatgtgaagtatacacacttcatagggaaacattttatcttgcacaagacttttttgatagatttatgttgacacaaaaggatataaataaaaatatgcttcaactcattggaattacctcattattcattgcttccaaacttgaggaaatctatgctcctaaactccaagagtttgcttacgtcactgatggtgcttgcagtgaagaggatatcttaaggatggaactcattatattaaaggctttaaaatgggaactttgtcctgtaacaatcatctcctggctaaatctctttctccaagttgatgctcttaaagatgctcctaaagttcttctacctcagtattctcaggaaacattcattcaaatagctcagcttttagatctgtgtattctagccattgattcattagagttccagtacagaatactgactgctgctgccttgtgccattttacctccattgaagtggttaagaaagcctcaggtttggagtgggacagtatttcagaatgtgtagattggatggtaccttttgtcaatgtagtaaaaagtactagtccagtgaagctgaagacttttaagaagattcctatggaagacagacataatatccagacacatacaaactatttggctatgctggaggaagtaaattacataaacaccttcagaaaagggggacagttgtcaccagtgtgcaatggaggcattatgacaccaccgaagagcactgaaaaaccaccaggaaaacactaaagaagataactaagcaaacaagttggaattcaccaagattgggtagaactggtatcactgaactactaaagttttacagaaagtagtgctgtgattgattgccctagccaattcacaagttacactgccattctgattttaaaacttacaattggcactaaagaatacatttaattatttcctatgttagctgttaaagaaacagcaggacttgtttacaaagatgtcttcattcccaaggttactggatagaagccaaccacagtctataccatagcaatgtttttcctttaatccagtgttactgtgtttatcttgataaactaggaattttgtcactggagttttggactggataagtgctaccttaaagggtatactaagtgatacagtactttgaatctagttgttagattctcaaaattcctacactcttgactagtgcaatttggttcttgaaaattaaatttaaacttgtttacaaaggtttagttttgtaataaggtgactaatttatctatagctgctatagcaagctattataaaacttgaatttctacaaatggtgaaatttaatgttttttaaactagtttatttgccttgccataacacattttttaactaataaggcttagatgaacatggtgttcaacctgtgctctaaacagtgggagtaccaaagaaattataaacaagataaatgctgtggctccttcctaactggggctttcttgacatgtaggttgcttggtaataacctttttgtatatcacaatttgggtgaaaaacttaagtaccctttcaaactatttatatgaggaagtcactttactactctaagatatccctaaggaatttttttttttaatttagtgtgactaaggctttatttatgtttgtgaaactgttaaggtcctttctaaattcctccattgtgagataaggacagtgtcaaagtgataaagcttaacacttgacctaaacttctattttcttaaggaagaagagtattaaatatatactgactcctagaaatctatttattaaaaaaagacatgaaaacttgctgtacataggctagctatttctaaatattttaaattagcttttctaaaaaaaaaatccagcctcataaagtagattagaaaactagattgctagtttattttgttatcagatatgtgaatctcttctccctttgaagaaactatacatttattgttacggtatgaagtcttctgtatagtttgtttttaaactaatatttgtttcagtattttgtctgaaaagaaaacaccactaattgtgtacatatgtattatataaacttaaccttttaatactgtttatttttagcccattgtttaaaaaataaaagttaaaaaaatttaactgcttaaaagt

SEQ ID NO: 308516 - DNA, 1361 bp, Artificial Sequence
  derived and/or modified sequence
gtgcggggcgggaccggcccggcctatatattgggttggcgccggcgccagctgagccgagcggtagctggtctggcgaggttttatacacctgaaagaagagaatgtcaagacgaagtagccgtttacaagctaagcagcagccccagcccagccagacggaatccccccaagaagcccagataatccaggccaagaagaggaaaactacccaggatgtcaaaaaaagaagagaggaggtcaccaagaaacatcagtatgaaattaggaattgttggccacctgtattatctggggggatcagtccttgcattatcattgaaacacctcacaaagaaataggaacaagtgatttctccagatttacaaattacagatttaaaaatctttttattaatccttcacctttgcctgatttaagctggggatgttcaaaagaagtctggctaaacatgttaaaaaaggagagcagatatgttcatgacaaacattttgaagttctgcattctgacttggaaccacagatgaggtccatacttctagactggcttttagaggtatgtgaagtatacacacttcatagggaaacattttatcttgcacaagacttttttgatagatttatgttgacacaaaaggatataaataaaaatatgcttcaactcattggaattacctcattattcattgcttccaaacttgaggaaatctatgctcctaaactccaagagtttgcttacgtcactgatggtgcttgcagtgaagaggatatcttaaggatggaactcattatattaaaggctttaaaatgggaactttgtcctgtaacaatcatctcctggctaaatctctttctccaagttgatgctcttaaagatgctcctaaagttcttctacctcagtattctcaggaaacattcattcaaatagctcagcttttagatctgtgtattctagccattgattcattagagttccagtacagaatactgactgctgctgccttgtgccattttacctccattgaagtggttaagaaagcctcaggtttggagtgggacagtatttcagaatgtgtagattggatggtaccttttgtcaatgtagtaaaaagtactagtccagtgaagctgaagacttttaagaagattcctatggaagacagacataatatccagacacatacaaactatttggctatgctgtgcatgatttcttcccatgtataggaggaagtaaattacataaacaccttcagaaaagggggacagttgtcaccagtgtgcaatggaggcattatgacaccaccgaagagcactgaaaaaccaccaggaaaacactaaagaagataactaagcaaa

SEQ ID NO: 308517 - DNA, 3330 bp, Artificial Sequence
  derived and/or modified sequence
ccgcgaggctccgtctccccggcgcggcccgctcgccgtccggctcgctcagggcctgggcagacgcggcccgcccgagctaccgcgggttccgagacgccttcgcactgctcctccacccgggggatctttgttcccggagctgttccccgcctcgctgctcccgccgcaaaacctgtttgcggaatacccgccgcaagtctgacttgacgatgtgcagttttgggaggttttatacacctgaaagaagagaatgtcaagacgaagtagccgtttacaagctaagcagcagccccagcccagccagacggaatccccccaagaagcccagataatccaggccaagaagaggaaaactacccaggatgtcaaaaaaagaagagaggaggtcaccaagaaacatcagtatgaaattaggaattgttggccacctgtattatctggggggatcagtccttgcattatcattgaaacacctcacaaagaaataggaacaagtgatttctccagatttacaaattacagatttaaaaatctttttattaatccttcacctttgcctgatttaagctggggatgttcaaaagaagtctggctaaacatgttaaaaaaggagagcagatatgttcatgacaaacattttgaagttctgcattctgacttggaaccacagatgaggtccatacttctagactggcttttagaggtatgtgaagtatacacacttcatagggaaacattttatcttgcacaagacttttttgatagatttatgttgacacaaaaggatataaataaaaatatgcttcaactcattggaattacctcattattcattgcttccaaacttgaggaaatctatgctcctaaactccaagagtttgcttacgtcactgatggtgcttgcagtgaagaggatatcttaaggatggaactcattatattaaaggctttaaaatgggaactttgtcctgtaacaatcatctcctggctaaatctctttctccaagttgatgctcttaaagatgctcctaaagttcttctacctcagtattctcaggaaacattcattcaaatagctcagcttttagatctgtgtattctagccattgattcattagagttccagtacagaatactgactgctgctgccttgtgccattttacctccattgaagtggttaagaaagcctcaggtttggagtgggacagtatttcagaatgtgtagattggatggtaccttttgtcaatgtagtaaaaagtactagtccagtgaagctgaagacttttaagaagattcctatggaagacagacataatatccagacacatacaaactatttggctatgctggaggaagtaaattacataaacaccttcagaaaagggggacagttgtcaccagtgtgcaatggaggcattatgacaccaccgaagagcactgaaaaaccaccaggaaaacactaaagaagataactaagcaaacaagttggaattcaccaagattgggtagaactggtatcactgaactactaaagttttacagaaagtagtgctgtgattgattgccctagccaattcacaagttacactgccattctgattttaaaacttacaattggcactaaagaatacatttaattatttcctatgttagctgttaaagaaacagcaggacttgtttacaaagatgtcttcattcccaaggttactggatagaagccaaccacagtctataccatagcaatgtttttcctttaatccagtgttactgtgtttatcttgataaactaggaattttgtcactggagttttggactggataagtgctaccttaaagggtatactaagtgatacagtactttgaatctagttgttagattctcaaaattcctacactcttgactagtgcaatttggttcttgaaaattaaatttaaacttgtttacaaaggtttagttttgtaataaggtgactaatttatctatagctgctatagcaagctattataaaacttgaatttctacaaatggtgaaatttaatgttttttaaactagtttatttgccttgccataacacattttttaactaataaggcttagatgaacatggtgttcaacctgtgctctaaacagtgggagtaccaaagaaattataaacaagataaatgctgtggctccttcctaactggggctttcttgacatgtaggttgcttggtaataacctttttgtatatcacaatttgggtgaaaaacttaagtaccctttcaaactatttatatgaggaagtcactttactactctaagatatccctaaggaatttttttttttaatttagtgtgactaaggctttatttatgtttgtgaaactgttaaggtcctttctaaattcctccattgtgagataaggacagtgtcaaagtgataaagcttaacacttgacctaaacttctattttcttaaggaagaagagtattaaatatatactgactcctagaaatctatttattaaaaaaagacatgaaaacttgctgtacataggctagctatttctaaatattttaaattagcttttctaaaaaaaaaatccagcctcataaagtagattagaaaactagattgctagtttattttgttatcagatatgtgaatctcttctccctttgaagaaactatacatttattgttacggtatgaagtcttctgtatagtttgtttttaaactaatatttgtttcagtattttgtctgaaaagaaaacaccactaattgtgtacatatgtattatataaacttaaccttttaatactgtttatttttagcccattgtttaaaaaataaaagttaaaaaaatttaactgcttaaaagtaaagttttgccattgcttggagaaacttttttttccttctctgcgctgccagctgtaacacttcttctggattgcttgcattcaactctgtctggccgatggctttgatcttccaaaacagaaaagtgatgttattagaggtgtgtcaaaaattaagttttgttggtacaagtaatataaagctacctacgtgctaacaacgatacagtttaatgattaactgaacctcttaactgtaaaacccaggagtcttggaaaaaaattaacataaagattaaccagggccactctcaaggaaagatggactgctgagccatagtttatggaattacttaagtggcattttaatatattaagtaaattcatgtaaatttatttgaaagtataagtaagctctacatggcgatttttagagttaaactagggctccacttgttaatgtgcaaaaataactggt

SEQ ID NO: 308518 - DNA, 1733 bp, Artificial Sequence
  derived and/or modified sequence
gagccgagcggtagctggtctggcgaggttttatacacctgaaagaagagaatgtcaagacgaagtagccgtttacaagctaagcagcagccccagcccagccagacggaatccccccaagaagcccagataatccaggccaagaagaggaaaactacccaggatgtcaaaagaagtctggctaaacatgttaaaaaaggagagcagatatgttcatgacaaacattttgaagttctgcattctgacttggaaccacagatgaggtccatacttctagactggcttttagaggtatgtgaagtatacacacttcatagggaaacattttatcttgcacaagacttttttgatagatttatgttgacacaaaaggatataaataaaaatatgcttcaactcattggaattacctcattattcattgcttccaaacttgaggaaatctatgctcctaaactccaagagtttgcttacgtcactgatggtgcttgcagtgaagaggatatcttaaggatggaactcattatattaaaggctttaaaatgggaactttgtcctgtaacaatcatctcctggctaaatctctttctccaagttgatgctcttaaagatgctcctaaagttcttctacctcagtattctcaggaaacattcattcaaatagctcagcttttagatctgtgtattctagccattgattcattagagttccagtacagaatactgactgctgctgccttgtgccattttacctccattgaagtggttaagaaagcctcaggtttggagtgggacagtatttcagaatgtgtagattggatggtaccttttgtcaatgtagtaaaaagtactagtccagtgaagctgaagacttttaagaagattcctatggaagacagacataatatccagacacatacaaactatttggctatgctggaggaagtaaattacataaacaccttcagaaaagggggacagttgtcaccagtgtgcaatggaggcattatgacaccaccgaagagcactgaaaaaccaccaggaaaacactaaagaagataactaagcaaacaagttggaattcaccaagattgggtagaactggtatcactgaactactaaagttttacagaaagtagtgctgtgattgattgccctagccaattcacaagttacactgccattctgattttaaaacttacaattggcactaaagaatacatttaattatttcctatgttagctgttaaagaaacagcaggacttgtttacaaagatgtcttcattcccaaggttactggatagaagccaaccacagtctataccatagcaatgtttttcctttaatccagtgttactgtgtttatcttgataaactaggaattttgtcactggagttttggactggataagtgctaccttaaagggtatactaagtgatacagtactttgaatctagttgttagattctcaaaattcctacactcttgactagtgcaatttggttcttgaaaattaaatttaaacttgtttacaaaggtttagttttgtaataaggtgactaatttatctatagctgctatagcaagctattataaaacttgaatttctacaaatggtgaaatttaatgttttttaaactagtttatttgccttgccataacacattttttaactaataaggcttagatgaacatggtgttcaacctgtgctctaaacagtgggagtacc

SEQ ID NO: 308519 - DNA, 891 bp, Artificial Sequence
  derived and/or modified sequence
atgtccaaggaagtgtggctcaacatgctgaaaaaggaaagccgctacgtgcatgataaacattttgaagtactccacagtgatctagagccccagatgcggagcatcctgctcgactggctgcttgaggtctgtgaagtttacactttgcaccgcgaaactttttacctcgcccaggacttttttgaccgcttcatgctgacgcaaaaggacattaacaagaacatgctgcaacttatagggataaccagcctttttatagcctctaaactggaggaaatctacgcccctaaactgcaagagtttgcctacgtcactgacggggcttgttcagaggaggacattctgcgaatggaactgataattctcaaagcactgaagtgggagttatgtcccgtgacaatcatctcctggctcaatttatttttacaagtggacgccctgaaggatgcccctaaagtgctgttaccacagtacagccaagagaccttcatccagatcgctcagctcctggacctctgtatactggctattgactcgctggagttccagtacagaattctgacagcggctgctctgtgtcatttcacctcaattgaggttgtgaagaaggcgtcaggccttgaatgggatagtataagtgagtgcgtggactggatggtgcctttcgtgaatgtggtgaaaagcacctctcccgtgaaactcaaaacctttaagaagattccaatggaggataggcacaatattcagacccacactaattatcttgccatgctggaggaagtcaactacataaacacatttcgtaaagggggtcagctctctcccgtttgcaatggcgggataatgaccccacccaaatccacagaaaaaccccctggcaaacactag

SEQ ID NO: 308520 - DNA, 891 bp, Artificial Sequence
  derived and/or modified sequence
atgagcaaggaggtgtggctgaacatgctgaagaaggagagccgctacgtgcatgacaagcactttgaggtgctgcacagcgacctggagccccagatgaggagcatcctgctggactggctgctggaggtgtgtgaggtgtacaccctgcaccgggagaccttctacctggcccaggacttctttgaccgcttcatgctgacccagaaggacatcaacaagaacatgctgcagctgattggcatcaccagcctcttcatcgccagcaagctggaggagatctatgcccccaagctgcaggagtttgcctacgtgacagatggagcctgcagcgaggaggacatcctgaggatggagctgatcatcctgaaggccctgaagtgggagctgtgccctgtgaccatcatctcctggctgaacctcttcctgcaggtggatgccctgaaggatgcccccaaggtgctgctgccccagtacagccaggagaccttcatccagatcgcccagctgctggacctgtgcatcctggccatcgacagcctggagttccagtaccgcatcctgacagctgctgccctgtgccacttcaccagcattgaggtggtgaagaaggccagcggcctggagtgggacagcatcagtgaatgtgtggactggatggtgccctttgtgaatgtggtgaagagcaccagccctgtgaagctgaagaccttcaagaagatccccatggaggacagacacaacatccagacccacaccaactacctggccatgctggaggaggtgaactacatcaacaccttcaggaagggcggccagctgagccctgtgtgcaatggaggcatcatgaccccacccaagagcacagagaagcccccaggcaagcactag

SEQ ID NO: 308521 - DNA, 891 bp, Artificial Sequence
  derived and/or modified sequence
atgagcaaggaggtgtggctgaacatgctgaagaaggagagccggtacgttcacgataaacacttcgaggtcctacatagcgacctggaaccccagatgagatcaattttgctggattggttgttggaggtgtgcgaggtatacacgcttcaccgggagactttctatctggcccaggactttttcgacaggttcatgctgacacagaaagacatcaacaagaacatgcttcagttgattggtataacatccctcttcatagcctctaagctcgaagaaatatacgctccaaagctccaggaatttgcctacgtgacggatggcgcctgctcggaagaggatatcctccggatggagctgatcatcctgaaggcgctcaagtgggagttgtgcccagtgactataatatcctggcttaacctgtttctacaggttgacgctctgaaagatgccccaaaggtcttattgccccagtactcccaggagaccttcattcagatagcacagctcctcgacctatgtatcctggccatcgactccctagagttccaatatagaatcctcacagcagctgccctgtgtcacttcacaagcatcgaggtggtgaagaaggcctcaggtcttgaatgggactctattagtgagtgcgtagactggatggtaccgtttgtgaatgtcgtgaaatctacttccccagtgaaactcaagacattcaaaaaaattcctatggaggatagacacaatatccagacccatacgaactaccttgccatgttggaagaggtgaattacattaacacttttcgtaaggggggacagttgtcccccgtttgcaatggtgggattatgaccccccctaagtccacagagaaacctcctggcaagcactag

SEQ ID NO: 308522 - DNA, 891 bp, Artificial Sequence
  derived and/or modified sequence
atgagtaaggaagtatggcttaatatgctcaagaaggagagccgatacgtacatgacaaacattttgaagtcctgcactcagatctggaaccccagatgagaagcatactgcttgactggctgctggaggtgtgtgaagtttacactcttcatagagaaaccttttatctggcccaggatttctttgatcggtttatgctgactcagaaagatattaacaagaacatgctacagctcatcggtatcacctctctgttcattgcgtctaagttggaggaaatctacgctcctaagttacaggagtttgcctatgtaaccgacggggcttgtagcgaggaggacattctccgcatggaacttatcatacttaaggctcttaagtgggagctgtgcccagtcaccatcatttcctggctgaacctgttcttgcaagtagatgcactgaaagacgcaccgaaggtgctgcttccacagtactcacaggagacatttatacagattgcacagttactggatctgtgcatcctcgctatcgactcattagagttccaatacaggatactgaccgcagcagctctatgccacttcacgtccatcgaagttgtgaagaaagctagtggtttagagtgggactcaatctcagaatgtgtggactggatggtaccgttcgtgaacgtggtgaaatctacatcgccagtgaagctgaaaaccttcaaaaagatccccatggaagatcgtcataacattcaaacacataccaactacctagctatgctcgaagaagttaattacataaatacattccggaaaggtggtcagctctcacccgtatgtaacggaggcatcatgacacctcctaaatccaccgaaaagcccccagggaaacattag

SEQ ID NO: 308523 - protein, 240 aa, Artificial Sequence
  derived and/or modified sequence
MFQRLNKMFVGEVSSSSNQEPEFNEKEDDEWILVDFIDTCTGFSAEEEEEEEDISEESPTEHPSVFSCLPASLECLADTSDSCFLQFESCPMEESWFITPPPCFTAGGLTTIKVETSPMENLLIEHPSMSVYAVHNSCPGLSEATRGTDELHSPSSPRVEAQNEMGQHIHCYVAALAAHTTFLEQPKSFRPSQWIKEHSERQPLNRNSLRRQNLTRDCHPRQVKHNGWVVHQPCPRQYNY

SEQ ID NO: 308524 - protein, 185 aa, Artificial Sequence
  derived and/or modified sequence
MFQRLNKMFVGEVSSSSNQEPEFNEKEDDEWILVDFIDTCTGFSAEEEEEEEDISEESPTEHPSVFSCLPASLECLADTSDSCFLQFESCPMEESWFITPPPCFTAGGLTTIKVETSPMENLLIEHPSMSVYAVHNSCPGLSEATRGTDELHSPSSPRYSQDCHPRQVKHNGWVVHQPCPRQYNY

SEQ ID NO: 308525 - DNA, 723 bp, Artificial Sequence
  derived and/or modified sequence
atgttccagagacttaataagatgtttgttggagaagttagttcctcaagtaaccaagaacctgaattcaatgaaaaggaagatgacgaatggatccttgtggacttcattgatacatgtaccggctttagcgcagaggaggaagaggaagaggaggacatctctgaggaatcccccacagagcacccatccgtattctcctgcctgccagcttctctggagtgcttggccgacacaagcgatagttgtttcctgcaatttgagtcatgtcctatggaggagtcttggttcatcaccccacctccgtgctttaccgctggtgggctgacaacaatcaaagtggaaacaagcccgatggagaatctcctgatcgaacatccaagcatgtccgtctacgccgtgcacaattcttgccctgggctgtcagaagcgacacgcgggactgatgagttgcattccccctcctctccacgagttgaggctcagaatgagatgggacaacacatacattgttatgtcgcggccttagcggctcatacaacatttttagagcagcctaagtctttccgcccttcacagtggataaaggaacactcagaacggcagccccttaatagaaattccctccgccggcagaatctcacccgcgattgccacccgcggcaggtgaagcataatgggtgggtggtccaccagccttgtcctagacagtacaactattag

SEQ ID NO: 308526 - DNA, 723 bp, Artificial Sequence
  derived and/or modified sequence
atgttccagaggctgaacaagatgtttgtgggggaggtgagcagcagcagcaaccaggagcctgagttcaatgagaaggaggatgatgagtggatcctggtggacttcatcgacacctgcaccggcttctctgctgaggaggaggaggaggaggaggacatcagcgaggagagccccacagagcaccccagcgtcttcagctgcctgcctgccagcctggagtgcctggccgacaccagtgacagctgcttcctgcagtttgagagctgccccatggaggagagctggttcatcaccccaccaccctgcttcaccgctgggggcctgaccaccatcaaggtggagaccagccccatggagaacctgctgattgagcaccccagcatgtctgtgtatgctgtgcacaacagctgccccggcctgtctgaggccacccggggcacagatgagctgcacagccccagcagcccccgggtggaggcccagaatgagatgggccagcacatccactgctacgtggccgccctggccgcccacaccaccttcctggagcagcccaagagcttccggcccagccagtggatcaaggagcacagcgagcggcagcccctgaacagaaacagcctgcggcggcagaacctgacccgggactgccacccccggcaggtgaagcacaacggctgggtggtgcaccagccctgcccccggcagtacaactactag

SEQ ID NO: 308527 - DNA, 723 bp, Artificial Sequence
  derived and/or modified sequence
atgttccagcggctgaacaagatgttcgtgggcgaggtgagcagctcctcaaatcaggaaccagaattcaatgagaaagaggacgacgagtggatcttagtcgacttcatagacacctgcacaggcttttcagccgaggaagaagaggaggaggaggacatctctgaggaaagcccaacagagcacccgtccgtattcagctgtctcccggcctctctcgaatgccttgccgataccagtgacagttgcttcctacagtttgagtcttgtcccatggaggagtcctggttcatcactccacctccctgctttacggccggggggctgacgaccatcaaggtggaaacgagtcctatggaaaatctgttgatcgagcaccccagtatgagcgtgtacgccgtgcataacagctgccccggactctcagaagccacacgcggaactgacgagttgcattcaccatcatcaccacgcgtggaggctcagaacgaaatgggccagcacattcattgctacgtcgccgcccttgcagctcatacaaccttcttagagcaacctaagtcattccgcccatcgcagtggattaaagagcacagcgaacggcagccactgaaccgaaactccctgaggaggcaaaacttgacccgcgactgtcacccgcgtcaggttaaacataacggctgggtcgtgcatcagccctgtcccaggcagtacaattattag

SEQ ID NO: 308528 - DNA, 723 bp, Artificial Sequence
  derived and/or modified sequence
atgttccagcggcttaacaaaatgttcgtgggtgaggtcagctcgtcctctaaccaggagcctgaattcaatgagaaggaggatgacgagtggattctcgtggactttatcgatacatgtacgggttttagtgcggaggaagaggaagaagaagaggacatttctgaggaatcccctaccgaacatcccagcgtgttttcgtgcctgccagccagtttagagtgcctcgcggacacttctgattcctgcttcctgcagtttgagtcctgccccatggaggaaagttggttcataaccccgccaccgtgcttcacagcaggtggattaacaaccatcaaggtcgagacatccccaatggaaaacttgctaattgaacatcctagtatgtccgtgtacgcagtacacaatagttgccctgggctgagcgaagctaccagagggaccgatgaactccactcccctagttcaccgcgagtggaagcccagaacgagatgggccagcacatacattgttacgtggctgcactagccgcacacactacttttttagagcagccgaaatcatttagacccagtcagtggatcaaggagcattctgagcgccagcccctgaacagaaacagcctgaggcgacagaatttgaccagggactgtcatccaagacaggtcaaacacaatggctgggttgtccatcagccttgtccgagacaatataactattag

SEQ ID NO: 308529 - DNA, 5638 bp, Artificial Sequence
  derived and/or modified sequence
gggcccgacggcgagcggagcggccgatcagctgttgcgagcgctgcacaacaacaaaaggacttggactggccggcctgggcgcagcgacccgagggctggagccggccccgcgcctgccgtctgggtacctgaacgaggtgcagcgcagcccggccccaccgcagctacctcagcagtcccgccccgcccgcgtccttccccgccgagccggcggccgctcccttccccgcgcagccccgcacggcccgggcccacgtacaatgactcttcttgcttttcacctaagttgaataagcaccctgtgcactttaatctcctgtcggtaccattgggccaactaaagacaaggttttgaaatctcagctataaaagacatccagccaaactctcagtcttgccttaacaatgttccagaggctgaataaaatgtttgtgggtgaagtcagttcttcctccaaccaagaaccagaattcaatgagaaagaagatgatgaatggattcttgttgacttcatagatacttgcactggtttctcagcagaagaagaagaagaagaggaggacatcagtgaagagtcacctactgagcacccttcagtcttttcctgtttaccggcatctcttgagtgcttggctgatacaagtgattcctgctttctccagtttgagtcatgtccaatggaggagagctggtttatcaccccacccccatgttttactgcaggtggattaaccactatcaaggtggaaacaagtcctatggaaaaccttctcattgaacatcccagcatgtctgtctatgctgtgcataactcctgccctggtctcagtgaggccacccgtgggactgatgaattacatagcccaagtagtcccagagtggaagctcaaaatgaaatggggcagcatattcattgttatgttgcagctcttgctgctcatacaacttttctggaacaacccaagagctttcgcccttcccagtggataaaagaacacagtgaaagacagcctcttaacagaaatagccttcgtcgccaaaatcttaccagggattgccaccctcggcaagtcaagcacaatggctgggttgttcatcagccctgcccgcgtcagtacaattactaatagtttcaagttttgttggttggtttctcttggtttgtgcttacatgtatggatgtgtgtatatgtacagtgaaaatgttgtctctttacaaccaattgataaccaatcacatagttttatcagtgtatttagacactatcttgaaaatcagatttatatgctgtgtatcacataatgccttgcctttaacatttactttttttgtacactttttcagattatttctggaaacatatcaatataattacagtgtttgggggtgtctttaaatatattaggttatacattagtcagcattttaaagacatttcttcccaagtacgagaataggcatctttcattttcattttattttgtattacttaatcttttaagcaagcaaaaatttattctcagggtcagctgtacactttattgaccagtacttgataatctctctgtatatgatgaatacatttttacacactaacattagcattaacaggtgatagttgccatggatataatggaattatggctggactttcttttgaaagaaaacttgatgtattctgtgtgtatggtttttccccagattagtcatacagttcatttggaattcaggtacattaagctttagtgaagagtgcatgcagtaattccaatgtgactgcatgacgtggtacagacattacaggtgttgtagacagaggcacttgtctcgtgcagagggattaaattagacctgtgagattatatttggaaaaattcatgtctgtaactaacccattagtgcagtatttaatttgttactattccttcccgccaattctgtccactcctcacctcgcatcagctataaatttggaagtacttgtccaggcactcaagtgacttcatatttctctctgcccatgggaaaagagataggctttatatttccacagagtgaaaaatcctctgtcatggagcctgtcctgccaagtggcaagagtgtggggactgtctggtgatgatgtctttcatggcatctgagtgaagagtgacaggttggctcaacttttttctttttttttttttaattgccttgtattgtaagtattcttccctgcagtccaagtgacttttcattttttgttttaacttcaggcaaaatctttaaccactctggcctctgtttcccccaccaacggggagcagtgacatttacctccctcacagagtcactgtgaggattctatactgatttgaagtggagctgttcagaactgaaccttgtaggaaattccaagggcctttctactgaatctggtgatggggtggggccgtggcactttctctgccacagctgttcttcacagtgttggtgctaatgaggccagggtgcagggttcgattcacacgtaggccagttaacttagagaaaatctatttccttacctctagccagtcacttcctttttccgcagttgtgatgggttttgctgagccatccactctgactgatttcctctgaagtaaacatatttacaatccaaagcaattctactgacagaagtgttgccttcataatcaaacagcttgtttttccatctcctctgcaaccctaattaaatgagtacaggtctacaaaatgttttcaaggagaaaagcagcatatccttaagtgaagtattatatttttcaataaccctgtagtggcttgatgcagggaaccctgggggactttcagcgaagagctgtgctcttttctgactagattagagcgtttggagtggaagacgtcaaatgtgtagtgagatggaggttttacattgttcttctactggctgtgatgaagtgccagaatgtctctttagaacaagagttagattccccctttctccttattgccccttccgttttgacttcccctttatttatttgttgtctaattaggggccaagtctgtaaagttttgtcaaagtgagttagaagttgttttctcttactatttgtgtttaccagagttgggagataagatagtttccatgaaggtgtgtatgttttatacgatgtttgttatagggccatgcattggtaacttgaaaatagaccagcttaatgtcttcaggatgtaaaactctgaatacacggcgtctctttttcatacattgcatgtaagttgttagtacctcacaagctacagaagttcagccatgagattttgtttggcaacatgaacagatttgtgtataactgcaatggcctttttttccagatttccttattgactttttgtttgccttacctggggctagttttttatgctttgtacctagaaaacaaaaaattacattcgttgggctttttttcaaggttgggattaccacaccacctggaatatcatactgtggtttctgcctaaaattggcacatgtaagtattgaagaaaatggttatataattcagttgaaactcttggttattagatgttaggcatctcctgtatgtaagacacaaggccaaccacaacacagaacgatgttgacctgttaagtattctctgaaacatggccaaaatgcattttatgagcttttttttttgctattgtaaatattagtggtttacaatgcgctttagacatatttctttaaaatgcaagcagtgagaaataagacctctctgaattagtagctctaaactgttaacatagaatgttacttggaaaaagtctggaatatgtggtgtacacaagcagtgcttcgtgaatgagtttcttagcttttatagtgcgccatgtttctcaaagtttgtttttgttgacaaaacattttataatatatatcttatgtttattttttttctcaactaattgtgtactgcactgtaaggtgaaaattagccatccattatttatcttctgtggcaatgcatttatatggttgattgggtggggaattttttgcagaaagatgcaaagtgattgggttttcgacttcctatcgcagggagcttttaagaaatattaatttcctatacatttttccaatccccatgcaaactgttcctgtttacataccttctctgttgtatcagtactttgagtgagaagacagtttatttaaaacttgagcaggctgttcagcattgtttctgcttctgaaatctgtatagtacactggtttgtaatcattatgtcttcattgaaatccttgctacttctcttcctcctcaatgaaatacattatatattatctttatgtactcttaagaaaaacgagcaaggaagagtatcttcattattctcattttctctgagttggaaacaaaaacatgaaggactccaactagaagacagatatttacatttaaatagattagtgggaaaactttaagagtttccacatattagttttcattttttgagtcaagagactgctccttgtactgggagacactagtagtatatgtttgtaatgttactttaaaattatctttttattttataaggcccataaatactggttaaactctgttaaaagtgggccttctatcttggatggtttcactgccatcagccatgctgatatattagaaatggcatccctatctacttactttaatgcttaaaattatacataaaatgctttatttagaaaacctacatgatacagtggtgtcagccttgccatgtatcagtttcacttgaaatttgagaccaattaaatttcaactgtttagggtggagaaagaggtactggaaaacatgcagatgaggatatcttttatgtgcaacagtatcctttgcatgggaggagagttactcttgaaaggcaggcagcttaagtggacaatgttttgtatatagttgagaattttacgacacttttaaaaattgtgtaattgttaaatgtccagttttgctctgttttgcctgaagttttagtatttgttttctaggtggacctctgaaaaccaaaccagtacctggggaggttagatgtgtgtttcaggcttggagtgtatgagtggttttgcttgtattttcctccagagattttgaactttaataattgcgtgtgttttttttttttttaagtggctttgtttttttttctcaagtaaaattgtgaacatatttcctttataggggcagggcatgagttagggagactgaagagtattgtagactgtacatgtgccttcttaatgtgtttctcgacacattttttttcagtaacttgaaaattcaaaagggacatttggttaggttactgtacatcaatctatgcataaatggcagcttgttttcttgagccacggtctaaattttgtttttatagaaattttttatactgattggttcatagatggtcagttttgtacacagactgaacaatacagcactttgccaaaaatgagtgtagcattgtttaaacattgtgtgttaacacctgttctttgtaattgggttgtggtgcattttgcactacctggagttacagttttcaatctgtcagtaaataaagtgtcctttaacttca

SEQ ID NO: 308530 - DNA, 5631 bp, Artificial Sequence
  derived and/or modified sequence
gcacaacaacaaaaggacttggactggccggcctgggcgcagcgacccgagggctggagccggccccgcgcctgccgtctgggtacctgaacgaggtgcagcgcagcccggccccaccgcagctacctcagcagtcccgccccgcccgcgtccttccccgccgagccggcggccgctcccttccccgcgcagccccgcacggcccgggcccacgtacaatgactcttcttgcttttcacctaagttgaataagcaccctgtgcactttaatctcctgtcggtaccattgggccaactaaagacaaggttttgaaatctcagctataaaagacatccagccaaactctcagtcttgccttaacaatgttccagaggctgaataaaatgtttgtgggtgaagtcagttcttcctccaaccaagaaccagaattcaatgagaaagaagatgatgaatggattcttgttgacttcatagatacttgcactggtttctcagcagaagaagaagaagaagaggaggacatcagtgaagagtcacctactgagcacccttcagtcttttcctgtttaccggcatctcttgagtgcttggctgatacaagtgattcctgctttctccagtttgagtcatgtccaatggaggagagctggtttatcaccccacccccatgttttactgcaggtggattaaccactatcaaggtggaaacaagtcctatggaaaaccttctcattgaacatcccagcatgtctgtctatgctgtgcataactcctgccctggtctcagtgaggccacccgtgggactgatgaattacatagcccaagtagtcccagggccaggaaaagctgcttataagactcacgggcacagaagtggaagctcaaaatgaaatggggcagcatattcattgttatgttgcagctcttgctgctcatacaacttttctggaacaacccaagagctttcgcccttcccagtggataaaagaacacagtgaaagacagcctcttaacagaaatagccttcgtcgccaaaatcttaccagggattgccaccctcggcaagtcaagcacaatggctgggttgttcatcagccctgcccgcgtcagtacaattactaatagtttcaagttttgttggttggtttctcttggtttgtgcttacatgtatggatgtgtgtatatgtacagtgaaaatgttgtctctttacaaccaattgataaccaatcacatagttttatcagtgtatttagacactatcttgaaaatcagatttatatgctgtgtatcacataatgccttgcctttaacatttactttttttgtacactttttcagattatttctggaaacatatcaatataattacagtgtttgggggtgtctttaaatatattaggttatacattagtcagcattttaaagacatttcttcccaagtacgagaataggcatctttcattttcattttattttgtattacttaatcttttaagcaagcaaaaatttattctcagggtcagctgtacactttattgaccagtacttgataatctctctgtatatgatgaatacatttttacacactaacattagcattaacaggtgatagttgccatggatataatggaattatggctggactttcttttgaaagaaaacttgatgtattctgtgtgtatggtttttccccagattagtcatacagttcatttggaattcaggtacattaagctttagtgaagagtgcatgcagtaattccaatgtgactgcatgacgtggtacagacattacaggtgttgtagacagaggcacttgtctcgtgcagagggattaaattagacctgtgagattatatttggaaaaattcatgtctgtaactaacccattagtgcagtatttaatttgttactattccttcccgccaattctgtccactcctcacctcgcatcagctataaatttggaagtacttgtccaggcactcaagtgacttcatatttctctctgcccatgggaaaagagataggctttatatttccacagagtgaaaaatcctctgtcatggagcctgtcctgccaagtggcaagagtgtggggactgtctggtgatgatgtctttcatggcatctgagtgaagagtgacaggttggctcaacttttttctttttttttttttaattgccttgtattgtaagtattcttccctgcagtccaagtgacttttcattttttgttttaacttcaggcaaaatctttaaccactctggcctctgtttcccccaccaacggggagcagtgacatttacctccctcacagagtcactgtgaggattctatactgatttgaagtggagctgttcagaactgaaccttgtaggaaattccaagggcctttctactgaatctggtgatggggtggggccgtggcactttctctgccacagctgttcttcacagtgttggtgctaatgaggccagggtgcagggttcgattcacacgtaggccagttaacttagagaaaatctatttccttacctctagccagtcacttcctttttccgcagttgtgatgggttttgctgagccatccactctgactgatttcctctgaagtaaacatatttacaatccaaagcaattctactgacagaagtgttgccttcataatcaaacagcttgtttttccatctcctctgcaaccctaattaaatgagtacaggtctacaaaatgttttcaaggagaaaagcagcatatccttaagtgaagtattatatttttcaataaccctgtagtggcttgatgcagggaaccctgggggactttcagcgaagagctgtgctcttttctgactagattagagcgtttggagtggaagacgtcaaatgtgtagtgagatggaggttttacattgttcttctactggctgtgatgaagtgccagaatgtctctttagaacaagagttagattccccctttctccttattgccccttccgttttgacttcccctttatttatttgttgtctaattaggggccaagtctgtaaagttttgtcaaagtgagttagaagttgttttctcttactatttgtgtttaccagagttgggagataagatagtttccatgaaggtgtgtatgttttatacgatgtttgttatagggccatgcattggtaacttgaaaatagaccagcttaatgtcttcaggatgtaaaactctgaatacacggcgtctctttttcatacattgcatgtaagttgttagtacctcacaagctacagaagttcagccatgagattttgtttggcaacatgaacagatttgtgtataactgcaatggcctttttttccagatttccttattgactttttgtttgccttacctggggctagttttttatgctttgtacctagaaaacaaaaaattacattcgttgggctttttttcaaggttgggattaccacaccacctggaatatcatactgtggtttctgcctaaaattggcacatgtaagtattgaagaaaatggttatataattcagttgaaactcttggttattagatgttaggcatctcctgtatgtaagacacaaggccaaccacaacacagaacgatgttgacctgttaagtattctctgaaacatggccaaaatgcattttatgagcttttttttttgctattgtaaatattagtggtttacaatgcgctttagacatatttctttaaaatgcaagcagtgagaaataagacctctctgaattagtagctctaaactgttaacatagaatgttacttggaaaaagtctggaatatgtggtgtacacaagcagtgcttcgtgaatgagtttcttagcttttatagtgcgccatgtttctcaaagtttgtttttgttgacaaaacattttataatatatatcttatgtttattttttttctcaactaattgtgtactgcactgtaaggtgaaaattagccatccattatttatcttctgtggcaatgcatttatatggttgattgggtggggaattttttgcagaaagatgcaaagtgattgggttttcgacttcctatcgcagggagcttttaagaaatattaatttcctatacatttttccaatccccatgcaaactgttcctgtttacataccttctctgttgtatcagtactttgagtgagaagacagtttatttaaaacttgagcaggctgttcagcattgtttctgcttctgaaatctgtatagtacactggtttgtaatcattatgtcttcattgaaatccttgctacttctcttcctcctcaatgaaatacattatatattatctttatgtactcttaagaaaaacgagcaaggaagagtatcttcattattctcattttctctgagttggaaacaaaaacatgaaggactccaactagaagacagatatttacatttaaatagattagtgggaaaactttaagagtttccacatattagttttcattttttgagtcaagagactgctccttgtactgggagacactagtagtatatgtttgtaatgttactttaaaattatctttttattttataaggcccataaatactggttaaactctgttaaaagtgggccttctatcttggatggtttcactgccatcagccatgctgatatattagaaatggcatccctatctacttactttaatgcttaaaattatacataaaatgctttatttagaaaacctacatgatacagtggtgtcagccttgccatgtatcagtttcacttgaaatttgagaccaattaaatttcaactgtttagggtggagaaagaggtactggaaaacatgcagatgaggatatcttttatgtgcaacagtatcctttgcatgggaggagagttactcttgaaaggcaggcagcttaagtggacaatgttttgtatatagttgagaattttacgacacttttaaaaattgtgtaattgttaaatgtccagttttgctctgttttgcctgaagttttagtatttgttttctaggtggacctctgaaaaccaaaccagtacctggggaggttagatgtgtgtttcaggcttggagtgtatgagtggttttgcttgtattttcctccagagattttgaactttaataattgcgtgtgttttttttttttttaagtggctttgtttttttttctcaagtaaaattgtgaacatatttcctttataggggcagggcatgagttagggagactgaagagtattgtagactgtacatgtgccttcttaatgtgtttctcgacacattttttttcagtaacttgaaaattcaaaagggacatttggttaggttactgtacatcaatctatgcataaatggcagcttgttttcttgagccacggtctaaattttgtttttatagaaattttttatactgattggttcatagatggtcagttttgtacacagactgaacaatacagcactttgccaaaaatgagtgtagcattgtttaaacattgtgtgttaacacctgttctttgtaattgggttgtggtgcattttgcactacctggagttacagttttcaatctgtcagtaaataaagtgtcctttaacttca

SEQ ID NO: 308531 - DNA, 723 bp, Artificial Sequence
  derived and/or modified sequence
atgttccagagactgaacaagatgttcgtgggcgaggtgagcagcagcagcaaccaggagcccgagttcaacgagaaggaggacgacgagtggatcctggtggacttcatcgacacctgcaccggcttcagcgccgaggaggaggaggaggaggaggacatcagcgaggagagccccaccgagcaccccagcgtgttcagctgcctgcccgccagcctggagtgcctggccgacaccagcgacagctgcttcctgcagttcgagagctgccccatggaggagagctggttcatcaccccccccccctgcttcaccgccggcggcctgaccaccatcaaggtggagaccagccccatggagaacctgctgatcgagcaccccagcatgagcgtgtacgccgtgcacaacagctgccccggcctgagcgaggccaccagaggcaccgacgagctgcacagccccagcagccccagagtggaggcccagaacgagatgggccagcacatccactgctacgtggccgccctggccgcccacaccaccttcctggagcagcccaagagcttcagacccagccagtggatcaaggagcacagcgagagacagcccctgaacagaaacagcctgagaagacagaacctgaccagagactgccaccccagacaggtgaagcacaacggctgggtggtgcaccagccctgccccagacagtacaactactag

SEQ ID NO: 308532 - protein, 127 aa, Artificial Sequence [sequence omitted]

SEQ ID NO: 308533 - protein, 1386 aa, Artificial Sequence
  derived and/or modified sequence
MSAPVGPRGRLAPIPAASQPPLQPEMPDLSHLTEEERKIILAVMDRQKKEVKEEHKPQLTQWFPFSGITELVNNVLQPQQKQQNEKEPQTKLHQQFEMYKEQVKKMGEESQQQQEQKGDAPTCGICHKTKFADGCGHNCSYCQTKFCARCGGRVSLRSNKVMWVCNLCRKQQEILTKSGAWFYNSGSNTPQQPDQKVLRGLRNEEAPQEKKPKLHEQTQFQGPSGDLSVPAVEKSRSHGLTRQHSIKNGSGVKHHIASDIASDRKRSPSVSRDQNRRYDQREEREEYSQYATSDTAMPRSPSDYADRRSQHEPQFYEDSDHLSYRDSNRRSHRHSKEYIVDDEDVESRDEYERQRREEEYQSRYRSDPNLARYPVKPQPYEEQMRIHAEVSRARHERRHSDVSLANADLEDSRISMLRMDRPSRQRSISERRAAMENQRSYSMERTREAQGPSSYAQRTTNHSPPTPRRSPLPIDRPDLRRTDSLRKQHHLDPSSAVRKTKREKMETMLRNDSLSSDQSESVRPPPPKPHKSKKGGKMRQISLSSSEEELASTPEYTSCDDVEIESESVSEKGDMDYNWLDHTSWHSSEASPMSLHPVTWQPSKDGDRLIGRILLNKRLKDGSVPRDSGAMLGLKVVGGKMTESGRLCAFITKVKKGSLADTVGHLRPGDEVLEWNGRLLQGATFEEVYNIILESKPEPQVELVVSRPIGDIPRIPDSTHAQLESSSSSFESQKMDRPSISVTSPMSPGMLRDVPQFLSGQLSIKLWFDKVGHQLIVTILGAKDLPSREDGRPRNPYVKIYFLPDRSDKNKRRTKTVKKTLEPKWNQTFIYSPVHRREFRERMLEITLWDQARVREEESEFLGEILIELETALLDDEPHWYKLQTHDVSSLPLPHPSPYMPRRQLHGESPTRRLQRSKRISDSEVSDYDCDDGIGVVSDYRHDGRDLQSSTLSVPEQVMSSNHCSPSGSPHRVDVIGRTRSWSPSVPPPQSRNVEQGLRGTRTMTGHYNTISRMDRHRVMDDHYSPDRDSHFLTLPRSRYSQTIDHHHRDGRDCEAADRQPYHRSRSTEQRPLLERTTTRSRSTERPDTNLMRSMPSLMTGRSAPPSPALSRSHPRTGSVQTSPSSTPVAGRRGRQLPQLPPKGTLDRKAGGKKLRSTVQRSTETGLAVEMRNWMTRQASRESTDGSMNSYSSEGNLIFPGVRLASDSQFSDFLDGLGPAQLVGRQTLATPAMGDIQVGMMDKKGQLEVEIIRARGLVVKPGSKTLPAPYVKVYLLDNGVCIAKKKTKVARKTLEPLYQQLLSFEESPQGKVLQIIVWGDYGRMDHKSFMGVAQILLDELELSNMVIGWFKLFPPSSLVDPTLAPLTRRASQSSLESSTGPSYSRS

SEQ ID NO: 308534 - protein, 1411 aa, Artificial Sequence
  derived and/or modified sequence
MSAPVGPRGRLAPIPAASQPPLQPEMPDLSHLTEEERKIILAVMDRQKKEVKEEHKPQLTQWFPFSGITELVNNVLQPQQKQQNEKEPQTKLHQQFEMYKEQVKKMGEESQQQQEQKGDAPTCGICHKTKFADGCGHNCSYCQTKFCARCGGRVSLRSNKVMWVCNLCRKQQEILTKSGAWFYNSGSNTPQQPDQKVLRGLRNEEAPQEKKPKLHEQTQFQGPSGDLSVPAVEKSRSHGLTRQHSIKNGSGVKHHIASDIASDRKRSPSVSRDQNRRYDQREEREEYSQYATSDTAMPRSPSDYADRRSQHEPQFYEDSDHLSYRDSNRRSHRHSKEYIVDDEDVESRDEYERQRREEEYQSRYRSDPNLARYPVKPQPYEEQMRIHAEVSRARHERRHSDVSLANADLEDSRISMLRMDRPSRQRSISERRAAMENQRSYSMERTREAQGPSSYAQRTTNHSPPTPRRSPLPIDRPDLRRTDSLRKQHHLDPSSAVRKTKREKMETMLRNDSLSSDQSESVRPPPPKPHKSKKGGKMRQISLSSSEEELASTPEYTSCDDVEIESESVSEKGDSQKGKRKTSEQAVLSDSNTRSERQKEMMYFGGHSLEEDLEWSEPQIKDSGVDTCSSTTLNEEHSHSDKHPVTWQPSKDGDRLIGRILLNKRLKDGSVPRDSGAMLGLKVVGGKMTESGRLCAFITKVKKGSLADTVGHLRPGDEVLEWNGRLLQGATFEEVYNIILESKPEPQVELVVSRPIGDIPRIPDSTHAQLESSSSSFESQKMDRPSISVTSPMSPGMLRDVPQFLSGQLSIKLWFDKVGHQLIVTILGAKDLPSREDGRPRNPYVKIYFLPDRSDKNKRRTKTVKKTLEPKWNQTFIYSPVHRREFRERMLEITLWDQARVREEESEFLGEILIELETALLDDEPHWYKLQTHDVSSLPLPHPSPYMPRRQLHGESPTRRLQRSKRISDSEVSDYDCDDGIGVVSDYRHDGRDLQSSTLSVPEQVMSSNHCSPSGSPHRVDVIGRTRSWSPSVPPPQSRNVEQGLRGTRTMTGHYNTISRMDRHRVMDDHYSPDRDRDCEAADRQPYHRSRSTEQRPLLERTTTRSRSTERPDTNLMRSMPSLMTGRSAPPSPALSRSHPRTGSVQTSPSSTPVAGRRGRQLPQLPPKGTLDRKAGGKKLRSTVQRSTETGLAVEMRNWMTRQASRESTDGSMNSYSSEGNLIFPGVRLASDSQFSDFLDGLGPAQLVGRQTLATPAMGDIQVGMMDKKGQLEVEIIRARGLVVKPGSKTLPAPYVKVYLLDNGVCIAKKKTKVARKTLEPLYQQLLSFEESPQGKVLQIIVWGDYGRMDHKSFMGVAQILLDELELSNMVIGWFKLFPPSSLVDPTLAPLTRRASQSSLESSTGPSYSRS

SEQ ID NO: 308535 - DNA, 4161 bp, Artificial Sequence
  derived and/or modified sequence
atgtctgctcctgtaggcccacggggcaggctggcccccattccagctgccagtcagccgcccttacagcccgagatgcctgatctctcccacctcacagaggaggaacggaagattatcctggctgttatggacaggcagaaaaaggaagtcaaagaagaacataaaccacagctaacgcagtggtttccattctctgggattactgaactagttaataatgttctgcagcctcagcagaagcaacagaatgagaaagagcctcagactaagttgcaccagcagttcgagatgtataaggagcaggtcaagaaaatgggggaggaatcacagcaacagcaggagcaaaaaggagatgcaccaacttgcgggatctgtcataagacaaaattcgccgatggatgtggccacaactgctcatactgtcagactaaattctgcgctcgctgtggggggagggtctcccttcgcagcaacaaggttatgtgggtctgcaatctctgtcgcaagcagcaggagattctgaccaagtctggggcttggttttataacagtgggtcgaacacgccgcagcagcccgatcagaaggttctgcggggcctgagaaatgaggaagctccccaggaaaagaagcctaagctgcatgaacagacacagttccagggcccatccggcgacctcagtgtcccagccgtggaaaagtcacggagccatggccttactcgtcagcactcaatcaaaaacggcagcggtgtgaagcaccatatcgcaagcgatattgcatctgaccggaagcgttctcctagcgtttcccgagaccaaaataggagatatgatcaaagagaggaacgcgaggagtattctcaatacgccacttccgatacagcaatgcccaggtcgccttcagactacgctgacagacgcagccaacatgagccccaattctatgaggacagcgaccacttgtcatatcgggacagcaacaggcgcagtcaccgccactccaaagaatacattgtggacgatgaggatgtggagtcccgggacgaatatgaacgccagcgccgagaggaggaataccagtcccggtacaggagcgaccctaatttagcacgctatccggttaagccacagccctacgaggaacagatgcggatccacgcggaggtgagtcgagcacgccatgagaggaggcattccgacgttagtctggccaatgcggaccttgaggacagtaggattagcatgttgagaatggacaggccctcccggcagcgaagtatatccgagcggagggccgctatggaaaatcagcggtcctattccatggaaaggactcgcgaagcgcaaggaccttcctcgtacgcccagcgaaccacaaatcactcgcccccaacccctagacgaagtccattgcctatcgataggccagatttgagaaggacagattctttgcggaagcagcaccacttggatccgtcctccgcagtcagaaaaaccaagagggagaagatggagaccatgttgcgtaatgactctctatccagtgaccagtcggaatctgtgaggccccccccacccaagccacataagagtaagaagggcggcaagatgagacagatctctctcagcagctcagaggaggaactggcctctactccagaatacaccagctgtgacgacgtagaaatcgaatctgagagcgttagcgagaagggggatatggactataattggctcgaccacacctcttggcactcatcagaagcctcccctatgtctctgcatcctgtcacgtggcaaccctcaaaagacggcgaccgactgataggcagaattctgctcaacaagcgcctgaaggacggcagtgtgcctagggactccggcgccatgctgggtcttaaggttgtcggtggcaagatgactgaatctggcaggttgtgcgcgttcattactaaggttaaaaaaggatctctcgccgacaccgtaggccatctccggcctggtgatgaggttctagagtggaatgggaggctcctacagggggcgactttcgaggaagtgtacaatattatcttggagtccaagcccgagcctcaggtggaactcgtagttagcagaccaataggtgacatacccagaatcccagactctacccacgcccaattagaatctagctcctcctcattcgagagtcaaaagatggaccgcccttcaattagtgtgacatcaccgatgtcacccggcatgctacgggacgtgccacagttcctctccggccaattaagtattaaattgtggtttgacaaggtgggacaccagctgattgtcactattcttggcgcaaaggatctcccatcgcgagaggacggtcgacctcgaaacccgtatgtgaagatttacttcttgcccgatcgcagtgacaagaataagcggcgaaccaaaacggtgaagaaaaccctggagcccaaatggaaccagaccttcatttatagtcccgtgcacaggcgcgaattccgtgagaggatgttggagatcaccctttgggaccaggctagggtaagggaggaagagagtgaatttctgggcgaaattctaatcgaactggagaccgctctgctggatgacgaaccccactggtacaaactgcagacccacgatgtatcctctctcccgctgccccatcccagcccttacatgcctcgccgtcagctgcacggagaaagcccgactagaaggctccagcgcagtaaacgtatttcggactccgaggtgagcgactacgactgcgatgacggaataggcgtggtcagtgactaccgtcacgacggccgggatttgcaatcttctacactaagcgtgcctgaacaggttatgtcttctaaccattgcagtccctccggctcaccccatcgtgtggacgtgattggacggacccggagctggtcccctagtgtaccaccaccacagtcaagaaatgtggaacaaggcctgagagggacccggactatgaccggacactacaataccatatctcgcatggaccgacacagggtcatggatgatcactactcgcccgatagagatagccacttcttgacgttgccaagatcccgttattcccagaccatcgatcaccaccaccgcgatggtcgtgattgcgaggcagccgacagacagccttatcataggtccagatctaccgagcagaggccactcttggagcgtacaaccactcgaagtcgcagtactgagagacctgacaccaacttaatgaggtcgatgccgtcccttatgaccgggagatctgcccctccatccccagccttgtctagaagtcatccgcggaccggctccgtgcaaactagcccctcttcgactccagtcgcgggacgaagaggccggcagctgccacagcttccgccaaaggggacactcgaccggaaagccggtgggaaaaagctgagaagtaccgtgcagcgtagcactgaaactggcttggcagtcgaaatgagaaactggatgacacgtcaggcctcccgggagtcaacagacggaagtatgaacagctactcttcagaaggaaatctcatatttccaggggttcgactcgcgagcgacagccagtttagtgattttctcgacggtttaggccctgctcagctggtcgggaggcaaaccctcgcaacaccagcaatgggggacattcaagtgggaatgatggacaaaaagggccagctcgaggtggaaatcattcgggctcgaggcctagtggtgaagccgggcagtaagactctacccgctccgtacgtgaaagtgtatcttctggacaacggcgtctgtatcgctaagaagaaaacaaaggtggccagaaagacgctagagcctttataccagcagttactgagcttcgaagagtcgccacagggcaaagtgctgcagatcatagtgtggggtgactacgggaggatggaccacaaatctttcatgggcgtggcccagatacttcttgacgaattggagctctccaacatggtgatcggctggtttaaactgtttccgccatcttctctcgtggaccctaccctggcccctctcactcggcgtgcatcacagagctctctcgaatcttctaccggaccctcctactcccggtcctag

SEQ ID NO: 308536 - DNA, 4236 bp, Artificial Sequence
  derived and/or modified sequence
atgtcagctccggtggggccgcgcggccggctggctccgattcccgccgcctcccaaccacccctgcaaccagagatgcccgacctgagccatttaacagaggaagaacgaaagataattctcgctgtgatggaccgtcagaaaaaggaagtgaaagaagagcacaagcctcagcttactcaatggtttcctttttctggaatcaccgagctggtgaataacgttcttcagcctcagcagaaacagcaaaatgagaaagagcctcagactaagctccatcagcagttcgagatgtataaagaacaggtgaaaaagatgggagaagagtcccaacaacaacaagagcagaagggagacgcccctacctgcggaatatgtcacaagactaagttcgctgacggctgcggccataactgcagctactgccagactaagttctgcgcccgttgcggaggccgcgtcagccttcgctccaataaggtgatgtgggtctgcaatctctgtcgcaaacagcaagagatccttacaaagtctggcgcctggttctataacagtggtagtaataccccgcagcaacccgatcaaaaggtcctgaggggtctgcggaacgaggaggccccacaggagaagaaacctaaactccatgaacagacacagtttcagggacccagcggcgatctgtctgtgccagcggttgagaagagtcgctcacatggcctgacgcgacagcattccatcaagaatggttccggcgtcaagcatcacattgcctccgatattgcctctgatagaaagagatccccctcagtcagcagagatcaaaatcgccgatatgaccaaagggaggaaagagaggagtactcccagtatgctaccagtgacacagctatgcctcgttccccttctgactacgccgacagacggagccaacacgagccccagttctatgaggatagtgaccacttgtcatacagagattctaacagacgcagtcatcgacactctaaagagtacattgtggatgatgaggatgtcgagtccagagatgagtatgagcgccagagaagggaggaggaataccagtctcgctaccgatccgaccccaacctggcccgataccccgtgaagcctcagccttatgaggaacaaatgagaatccacgctgaggtgagtcgcgccagacacgagcgcaggcactctgatgttagtcttgccaacgccgaccttgaggactctagaatcagtatgctgcggatggatcgcccgagcagacagagatccatatctgagagacgtgccgctatggaaaatcagcgatcttactccatggaaaggaccagggaagcacagggaccctctagctacgcccagcgcacaaccaaccacagcccccccactcctcggcgctcacctctccccatcgataggcctgatctacggaggactgacagcctgcggaaacagcaccacctggacccttcttctgctgttcggaaaactaaacgggagaaaatggaaacgatgctccgcaatgacagcttgagctcagaccaaagcgaatccgtgaggcctcctccccctaagcctcataagagtaaaaagggcggtaaaatgcgtcaaatatccctctccagtagcgaggaagagctggcctcaactcccgaatatacgagctgcgacgatgtggaaattgagtctgaatccgtttctgaaaaaggggatagtcagaagggaaagagaaagactagtgaacaggcagtgttatctgatagtaatactagaagcgagcgccaaaaagagatgatgtattttggaggccattctctggaagaggacttagagtggtcagagccccagataaaggactccggcgtggatacttgcagctcaaccactctgaatgaggagcattcccattccgataaacaccccgtcacatggcagcctagcaaagacggagataggctgattggccgcatcctgctgaacaaaagacttaaggatggctcagtaccaagagatagcggtgctatgctgggtttgaaggtggtggggggcaagatgacagaatccggacggttgtgcgccttcatcaccaaagtaaaaaaggggagccttgcagacactgttggacacttaagaccaggcgacgaagtcctcgaatggaacggaaggctgcttcagggcgcaacatttgaggaagtgtacaatatcattctggagagcaagcccgaacctcaagtagagctggttgtttcccggcctatcggcgatattccccgcattcccgactctacacacgctcagctcgaaagcagttcttctagctttgaatcacagaagatggataggccttccatcagtgtgacaagtcccatgagcccaggcatgcttcgcgacgtcccgcagttcctaagcggtcagctgagcataaaactctggtttgataaggtgggacatcagctcatcgtgaccatacttggtgcaaaggatctgccaagtcgggaagacggccgcccacggaacccttacgtgaagatttacttcctccccgaccggagcgacaagaacaaaaggcgcactaaaacagtgaagaagactctcgagccaaaatggaaccagaccttcatctatagtccagttcaccgccgcgagttccgtgagcgtatgctggaaatcacgctgtgggatcaggcaagggttagagaagaagagagcgaattcctgggcgaaatcttgatagagcttgaaaccgcactgttggacgacgagccccactggtataagctgcagacccatgacgtgagttctctgccactgcctcatccatcgccgtacatgccccgccggcagctccatggggagagtcccacccgcagactccagagatctaagcgcatctcagatagcgaagtgagtgattatgactgcgatgacgggatcggagtcgttagtgattaccgccatgacgggcgggatcttcagtcttccaccctctctgtcccggagcaggtgatgagcagcaatcactgcagccccagcgggtctccccaccgcgttgacgtgatcggacgtactcgctcttggtcaccttccgtgccgcccccccagagtcgaaacgtagaacaggggctgcgaggcacccgcactatgaccggacactacaatacaatctcccgtatggatagacatagggtaatggatgaccattacagtcctgatcgcgaccgcgactgtgaagcagccgacagacagccctatcaccgaagtagatctacagagcagcggcctctactggaaagaactacaacacgatctagatccacagagcggcctgacacaaacctcatgcgctccatgccttccctgatgactggacggtctgcccctcccagcccagccttatcaagaagccacccacgcactggctccgtgcagacatcaccttcctctactcctgtggctggccggaggggcagacagttgccccagcttccccccaagggaacccttgatagaaaagccgggggaaaaaaattgcgctcaaccgtacagcgctccactgaaacgggtctggccgtggagatgaggaactggatgacgcggcaggcctcacgggaaagcacagacggaagcatgaactcctactctagcgaaggcaacttgatctttcccggcgtcagactggccagcgactcacagttttcagattttttggatggactgggtcctgcacagctggttggtcgccagactttagccaccccagccatgggcgatattcaagttgggatgatggacaagaaaggtcagctggaagtggagattatccgcgcacgcggcctggtggtcaagcccggaagcaagaccttgcctgctccatatgttaaggtgtatttactcgataacggagtgtgtatcgccaaaaagaaaaccaaagtcgcacgaaagacacttgaacccctatatcagcagctcctctcatttgaggaaagtccccagggcaaggttctgcaaataattgtgtggggggattacggccgcatggaccataaatcctttatgggcgtggcccagatcctgttggatgaacttgaactttcaaatatggtaatcgggtggttcaaactctttccaccctcatccctggtggacccaaccctagctcccctaaccaggagagccagccagtcctcccttgagagctccaccggaccatcctattcccgatcatag

SEQ ID NO: 308537 - DNA, 4161 bp, Artificial Sequence
  derived and/or modified sequence
atgtctgcccctgtgggcccccggggccgcctggcccccatcccagctgccagccagccccccctgcagcctgagatgccagacctgagccacctgacagaggaggagaggaagatcatcctggccgtgatggaccggcagaagaaggaggtgaaggaggagcacaagccccagctgacccagtggttccccttcagcggcatcacagagctggtgaacaacgtgctgcagccccagcagaagcagcagaatgagaaggagccccagaccaagctgcaccagcagtttgagatgtacaaggagcaggtgaagaagatgggagaggagagccagcagcagcaggagcagaagggagatgcccccacctgtggcatctgccacaagaccaagtttgctgatggctgcggccacaactgcagctactgccagaccaagttctgtgcccgctgtggcggccgggtgtccctgcggagcaacaaggtgatgtgggtgtgcaacctgtgcaggaagcagcaggagatcctgaccaagagcggggcctggttctacaacagcggcagcaacaccccccagcagcctgaccagaaggtgctgcggggcctgagaaatgaggaggccccccaggagaagaagcccaagctgcacgagcagacccagttccagggccccagcggggacctgtctgtgcctgctgtggagaagagccgcagccacggcctgacccggcagcacagcatcaagaatggcagcggcgtgaagcaccacatcgccagtgacatcgccagtgacaggaagaggagccccagcgtgtcccgggaccagaacagaagatatgaccagcgggaggagcgggaggagtacagccagtatgccaccagtgacacagccatgcccaggagccccagcgactatgctgacagaagaagccagcacgagccccagttctatgaagattctgaccacctgagctacagagacagcaacagaagaagccaccgccacagcaaggagtacatcgtggatgatgaagatgtggagagcagagatgaatatgagcggcagaggcgggaggaggagtaccagagccgctacagaagtgaccccaacctggcccgctaccctgtgaagccccagccctatgaggagcagatgagaattcatgctgaggtgtcccgggcccggcatgaaagaagacacagtgatgtgtccctggccaatgctgacctggaggacagccgcatctccatgctgaggatggaccggcccagccggcagaggagcatcagcgagaggagagctgccatggagaaccagaggagctacagcatggagaggacccgggaggcccagggccccagcagctatgcccagaggaccaccaaccacagcccccccaccccccggcgcagccccctgcccatcgacagaccagacctgcggaggacagacagcctgaggaagcagcaccacctggaccccagcagcgctgtgaggaagaccaagcgggagaagatggagaccatgctgagaaatgacagcctgagcagtgaccagagcgagagcgtgcggcccccaccacccaagccccacaagagcaagaagggcggcaagatgaggcagatcagcctgagcagcagcgaggaggagctggccagcaccccagagtacaccagctgtgatgatgtggagattgagagcgagagcgtgtctgagaagggggacatggactacaactggctggaccacacctcctggcacagcagcgaggccagccccatgagcctgcaccctgtgacctggcagcccagcaaggatggagacaggctcatcggccgcatcctgctgaacaagaggctgaaggatggctctgtgccccgggacagcggggccatgctgggcctgaaggtggtgggcggcaagatgacagagagcggccgcctgtgtgccttcatcaccaaggtgaagaagggcagcctggccgacacagtgggccacctgcggcctggagatgaggtgctggagtggaatggccgcctgctgcagggcgccacctttgaggaggtgtacaacatcatcctggagagcaagccagagccccaggtggagctggtggtgtcccggcccatcggggacatcccccgcatcccagacagcacccacgcccagctggagagcagcagcagcagctttgagagccagaagatggaccggcccagcatctctgtgaccagccccatgagccctggcatgctgagagatgtgccccagttcctgagcggccagctgagcatcaagctgtggtttgacaaggtgggccaccagctgattgtgaccatcctgggcgccaaggacctgcccagcagagaagatggccggcccaggaacccctacgtgaagatctacttcctgcctgacagaagtgacaagaacaagaggaggaccaagacagtgaagaagaccctggagcccaagtggaaccagaccttcatctacagccctgtgcaccggcgggagttccgggagaggatgctggagatcaccctgtgggaccaggcccgggtgcgggaggaggagagcgagttcctgggggagatcctgattgagctggagacagccctgctggatgatgagccccactggtacaagctgcagacccatgatgtgagcagcctgcccctgccccaccccagcccctacatgccccggcggcagctgcacggggagagccccacccggcggctgcagaggagcaagaggatcagtgacagcgaggtgtctgactatgactgtgatgatggcatcggcgtggtgtctgactacagacatgatggccgggacctgcagagcagcaccctgtctgtgcctgagcaggtgatgagcagcaaccactgcagccccagcggcagcccccaccgggtggatgtgattggccgcaccaggtcctggagccccagcgtgcccccaccccagagcagaaatgtggagcagggcctgcggggcaccaggaccatgacaggccactacaacaccatcagcaggatggacagacaccgggtgatggatgaccactacagcccagaccgggacagccacttcctgaccctgcccaggagccgctacagccagaccatcgaccaccaccacagagatggccgggactgtgaggccgctgaccggcagccctaccacaggagccgcagcacagagcagaggcccctgctggagaggaccaccaccaggagccgcagcacagagaggccagacaccaacctgatgaggtccatgcccagcctgatgacaggccgcagcgccccacccagccctgccctgagccgcagccaccccaggactggatctgtgcagaccagccccagcagcacccctgtggccggccggcggggccggcagctgccccagctgccccccaagggcaccctggacaggaaggccggcggcaagaagctgcggagcacagtgcagaggagcacagaaacaggcctggccgtggagatgaggaactggatgacccggcaggccagccgggagagcacagatggctccatgaacagctacagcagcgagggcaacctgatcttccctggggtgcggctggccagtgacagccagttcagtgacttcctggatggcctgggccctgcccagctggtgggccggcagaccctggccaccccagccatgggagacatccaggtgggcatgatggacaagaagggccagctggaggtggagatcatccgggcccggggcctggtggtgaagccaggcagcaagaccctgcctgccccctacgtgaaggtgtacctgctggacaacggggtgtgcatcgccaagaagaagaccaaggtggccaggaagaccctggagcccctgtaccagcagctgctgagctttgaggagagcccccagggcaaggtgctgcagatcatcgtgtggggagactatggccgcatggaccacaagagcttcatgggcgtggcccagatcctgctggatgagctggagctgagcaacatggtgattggctggttcaagctgttcccccccagcagcctggtggaccccaccctggcccccctgacccggcgggccagccagagcagcctggagagcagcacaggccccagctacagccgctcctag

SEQ ID NO: 308538 - DNA, 4236 bp, Artificial Sequence
  derived and/or modified sequence
atgtctgcccctgtgggcccccggggccgcctggcccccatcccagctgccagccagccccccctgcagcctgagatgccagacctgagccacctgacagaggaggagaggaagatcatcctggccgtgatggaccggcagaagaaggaggtgaaggaggagcacaagccccagctgacccagtggttccccttcagcggcatcacagagctggtgaacaacgtgctgcagccccagcagaagcagcagaatgagaaggagccccagaccaagctgcaccagcagtttgagatgtacaaggagcaggtgaagaagatgggagaggagagccagcagcagcaggagcagaagggagatgcccccacctgtggcatctgccacaagaccaagtttgctgatggctgcggccacaactgcagctactgccagaccaagttctgtgcccgctgtggcggccgggtgtccctgcggagcaacaaggtgatgtgggtgtgcaacctgtgcaggaagcagcaggagatcctgaccaagagcggggcctggttctacaacagcggcagcaacaccccccagcagcctgaccagaaggtgctgcggggcctgagaaatgaggaggccccccaggagaagaagcccaagctgcacgagcagacccagttccagggccccagcggggacctgtctgtgcctgctgtggagaagagccgcagccacggcctgacccggcagcacagcatcaagaatggcagcggcgtgaagcaccacatcgccagtgacatcgccagtgacaggaagaggagccccagcgtgtcccgggaccagaacagaagatatgaccagcgggaggagcgggaggagtacagccagtatgccaccagtgacacagccatgcccaggagccccagcgactatgctgacagaagaagccagcacgagccccagttctatgaagattctgaccacctgagctacagagacagcaacagaagaagccaccgccacagcaaggagtacatcgtggatgatgaagatgtggagagcagagatgaatatgagcggcagaggcgggaggaggagtaccagagccgctacagaagtgaccccaacctggcccgctaccctgtgaagccccagccctatgaggagcagatgagaattcatgctgaggtgtcccgggcccggcatgaaagaagacacagtgatgtgtccctggccaatgctgacctggaggacagccgcatctccatgctgaggatggaccggcccagccggcagaggagcatcagcgagaggagagctgccatggagaaccagaggagctacagcatggagaggacccgggaggcccagggccccagcagctatgcccagaggaccaccaaccacagcccccccaccccccggcgcagccccctgcccatcgacagaccagacctgcggaggacagacagcctgaggaagcagcaccacctggaccccagcagcgctgtgaggaagaccaagcgggagaagatggagaccatgctgagaaatgacagcctgagcagtgaccagagcgagagcgtgcggcccccaccacccaagccccacaagagcaagaagggcggcaagatgaggcagatcagcctgagcagcagcgaggaggagctggccagcaccccagagtacaccagctgtgatgatgtggagattgagagcgagagcgtgtctgagaagggggacagccagaagggcaagaggaagaccagcgagcaggccgtgctgagtgacagcaacaccaggtctgagcggcagaaggagatgatgtactttggaggccacagcctggaggaggacctggagtggagcgagccccagatcaaggacagcggcgtggacacctgcagcagcaccaccctgaatgaggagcacagccacagcgacaagcaccctgtgacctggcagcccagcaaggatggagaccggctgattggccgcatcctgctgaacaagaggctgaaggatggctctgtgccccgggacagcggggccatgctgggcctgaaggtggtgggcggcaagatgacagaaagtggccgcctgtgtgccttcatcaccaaggtgaagaagggcagcctggccgacacagtgggccacctgcggcctggagatgaggtgctggagtggaatggccgcctgctgcagggcgccacctttgaggaggtgtacaacatcatcctggagagcaagccagagccccaggtggagctggtggtgtcccggcccatcggggacatcccccgcatcccagacagcacccacgcccagctggagagcagcagcagcagctttgagagccagaagatggaccggcccagcatctctgtgaccagccccatgagccctggcatgctgagagatgtgccccagttcctgagcggccagctgagcatcaagctgtggtttgacaaggtgggccaccagctgattgtgaccatcctgggcgccaaggacctgcccagccgggaggatggccggcccaggaacccctacgtgaagatctacttcctgcctgacagaagtgacaagaacaagaggaggaccaagacagtgaagaagaccctggagcccaagtggaaccagaccttcatctacagccctgtgcacagaagagagttccgggagaggatgctggagatcaccctgtgggaccaggcccgggtgcgggaggaggagagcgagttcctgggggagatcctgattgagctggagacagccctgctggatgatgagccccactggtacaagctgcagacccatgatgtgagcagcctgcccctgccccaccccagcccctacatgccccggcggcagctgcatggagagagccccacccggcggctgcagaggagcaagaggatcagtgacagcgaggtgtctgactatgactgtgatgatggcattggagtggtgtctgactacagacatgatggccgggacctgcagagcagcaccctgtctgtgcctgagcaggtgatgagcagcaaccactgcagccccagcggcagcccccaccgggtggatgtgattggaagaaccaggtcctggagccccagcgtgcccccaccccagagcagaaatgtggagcagggcctgcggggcaccaggaccatgacaggccactacaacaccatcagcaggatggacagacaccgggtgatggatgaccactacagcccagaccgggaccgggactgtgaggccgctgaccggcagccctaccacaggagccgcagcacagagcagaggcccctgctggagaggaccaccaccaggagccgcagcacagagaggccagacaccaacctgatgaggtccatgcccagcctgatgacaggccgcagcgccccacccagccctgccctgagccgcagccaccccaggacaggctctgtgcagaccagccccagcagcacccctgtggccggcagaagaggccggcagctgccccagctgccccccaagggcaccctggacaggaaggccggcggcaagaagctgcggagcacagtgcagaggagcacagagaccggcctggccgtggagatgaggaactggatgacccggcaggccagccgggagagcacagatggctccatgaacagctacagcagcgagggcaacctgatcttccctggggtgcggctggccagtgacagccagttcagtgacttcctggatggcctgggccctgcccagctggtgggccggcagaccctggccaccccagccatgggagacatccaggtgggcatgatggacaagaagggccagctggaggtggagatcatccgggcccggggcctggtggtgaagccaggcagcaagaccctgcctgccccctacgtgaaggtgtacctgctggacaatggagtgtgcatcgccaagaagaagaccaaggtggccaggaagaccctggagcccctgtaccagcagctgctgagctttgaggagagcccccagggcaaggtgctgcagatcatcgtgtggggagactatggccgcatggaccacaagagcttcatgggcgtggcccagatcctgctggatgagctggagctgagcaacatggtgattggctggttcaagctgtttcctcccagcagcctggtggaccccaccctggcccccctgacccggcgggccagccagagcagcctggagagcagcacaggccccagctacagccgctcctag

SEQ ID NO: 308539 - DNA, 4161 bp, Artificial Sequence
  derived and/or modified sequence
atgagcgcccccgtgggcccccggggccggctggcccccatccccgctgcctcacagccccccttacagcctgagatgccagatctctcgcacctgaccgaagaagagaggaagataattctcgccgtgatggacaggcaaaagaaagaggttaaggaagagcacaaaccccaactcacacagtggttcccgttttctggaattacagagttggttaataacgttctccagccacagcaaaaacagcagaatgagaaggaaccgcagacgaagctgcatcagcagttcgaaatgtacaaggaacaggtcaagaagatgggagaagagagtcaacaacagcaggaacaaaagggcgatgccccaacatgtggaatatgccataagactaaatttgctgatggatgcggacacaattgcagctactgccagacaaagttctgtgcccggtgtggtggcagggtgagcctcaggagcaacaaggtcatgtgggtctgcaacttgtgtcggaagcagcaggagatcctgactaagagtggtgcatggttttataatagcggctccaatacgccccagcaacctgatcaaaaagttctgcgcggcctgcgaaacgaggaggcgccgcaagagaagaaaccaaaactgcatgaacagacacagtttcagggaccttccggggacttatcggtgcctgccgttgaaaaaagccgttcacatggactgacccggcaacactccattaaaaatgggtcgggcgttaaacatcacattgcctcggacattgcctcggatcggaagcgttctccatctgtcagcagggaccagaataggcgctatgaccagagggaggaacgggaggaatattctcagtacgccacctctgatacagccatgccaagaagtccatcagactacgcagatcgtcggagtcaacacgaaccacagttttacgaagatagcgatcacctcagctaccgcgattctaacagacggtcacataggcacagtaaagagtacatcgtcgatgatgaggatgtggagtctcgggacgaatacgaaagacagcggcgcgaagaggagtatcagtctcgttacaggagcgatcctaatttggcccggtaccccgttaaaccccagccatatgaggaacaaatgcggattcacgcggaggtgtctagggctcggcacgagcgtcgccactcagatgtctccttggcaaatgcggacctggaggattcaaggataagtatgctcaggatggatcggccttcaagacagcgatccattagcgagaggagagcagcaatggaaaaccagcgttcttactccatggagcggacccgggaagctcagggccccagctcctacgcgcagagaactacaaaccattcacctcccactcctaggaggtctccactgcccatcgaccgcccagaccttaggagaaccgatagcctgcgcaaacaacaccacttggatccctctagcgccgtgcgtaaaaccaagagggaaaagatggagacaatgttacggaatgacagcctaagctcagatcaaagcgaaagcgtccgcccgccgccaccaaagcctcacaagagtaagaaaggaggcaaaatgcgccagatctccctgtctagctccgaagaggaactagcttctactcctgagtacacatcctgtgacgatgtcgagattgagagcgagtcagtgagcgagaagggcgatatggattataactggttggaccacacaagctggcacagctccgaggccagcccaatgtctctccaccctgtcacatggcagcccagtaaggacggagatcgactgatcggcagaatcctgctcaataaacgcctcaaggacgggagcgtgccccgggactctggagcaatgctcggacttaaagtggtgggcggaaagatgacggagagtgggcgcctgtgtgccttcataacaaaggtcaagaaaggttcgctcgccgacaccgtaggacatcttagacccggtgacgaggtactggagtggaacgggcggctcctgcagggtgccactttcgaagaggtttacaatattatcctggaatctaagcctgagccccaggtcgagctggtagtttcccggccaatcggtgacatcccccggatccccgactctacccacgcacaactggaaagttcttcctcgagcttcgagtcacagaaaatggacagaccgagtatctctgtcacatcacccatgtctcccggaatgctgcgcgatgttccacaattcctgtccggccaactgtctatcaagctttggttcgataaggtggggcatcagctgattgttactatactgggagctaaggatctgccttctcgggaggatggacgccccagaaatccttatgtcaagatttacttcctgcctgaccggagcgataagaacaagcgtaggacaaagactgtgaaaaaaactctcgagccgaaatggaaccagacttttatctattctccagtgcatagaagggagttccgagagagaatgctggaaataactctttgggaccaggctcgggtgcgcgaagaggagtcggaattcttgggagaaatcctgattgagttggaaactgccctactagatgacgaacctcactggtacaagctgcagacccacgacgtgagttcattgcctttaccccacccgtcaccctatatgccacgcaggcagcttcatggagagagccccacacggagactgcaacgtagtaaaagaataagcgattccgaggttagcgactatgactgcgacgacgggattggcgttgtctctgattacaggcacgacggcagggatctgcaatcatctacgctttccgtgcctgaacaggtgatgtctagcaatcattgctctcctagcggttccccccacagagtcgatgtcattggtcggacccggtcttggagcccgtcagtcccacctccgcagtctcgcaacgttgagcagggcctgcgaggcactcgcactatgaccggacactataacacgatatctcgaatggatcggcatcgtgtcatggacgatcactactcgcccgacagagacagccactttcttacccttccccggagccgctattcacagaccatcgaccaccaccaccgtgatggcagagattgcgaagcagccgataggcaaccctaccatcgtagccgctctactgaacaacgccctctgttagagcgtactaccacaaggtccagaagtacagagaggcccgacacaaatctaatgcggtctatgccaagcctgatgactggccggtccgccccgccatcgcccgctttatcaaggagccacccgagaacagggtcagtacaaacatcaccctcctcaacccccgttgcaggccggcgcgggaggcagctcccccaactccctccaaagggcacactggacaggaaggctggtggtaagaaacttcgtagtacagtacagcggagcacagaaacgggacttgccgtagagatgcggaactggatgactaggcaggcctcccgagagtcaacagacggttccatgaacagctacagtagcgagggcaacctcattttcccgggggttcggctggccagtgattcacaattctccgactttttggacgggctcgggccggctcagcttgtaggtcgccagacactcgctacaccagccatgggcgacatacaagtggggatgatggacaagaaaggtcagctggaagtggaaattatccgggcacgtgggttagtggttaaaccggggtctaagactctgcccgcgccttacgttaaggtctatttgcttgataacggagtgtgcattgccaaaaaaaaaacaaaggttgccaggaagactttagagccactttatcagcagcttctcagcttcgaggaaagccctcagggcaaagtccttcaaattatcgtctggggcgactacgggaggatggaccacaaatccttcatgggcgtggcgcagattctcctcgatgaactggagttatctaatatggttataggttggttcaagttgtttcctccatcttctctggtggaccccacccttgctcctttaacccgcagagcatcccaatcttcactggagtcatcaacgggcccttcgtacagcaggtcctag

SEQ ID NO: 308540 - DNA, 4236 bp, Artificial Sequence
  derived and/or modified sequence
atgagcgcccccgtgggcccccggggccggctggcccccatccccgcagctagccagcctcccttacaacctgaaatgcccgacctgagccacctgactgaagaggaacggaaaatcatccttgctgtaatggaccggcagaagaaagaggtaaaagaggagcataaaccacagctcacacaatggttcccatttagtggcatcactgagctagtgaacaacgtgcttcagccccagcagaaacagcagaatgaaaaggaacctcagacaaaactccaccaacagttcgagatgtataaagagcaggtcaagaagatgggcgaggagtctcagcagcagcaggaacaaaagggcgacgctccgacttgcggaatctgtcacaaaacgaaatttgccgatgggtgtggccacaactgctcctactgtcaaaccaaattctgcgctcgatgtgggggaagagtttctctgagatcaaataaggtaatgtgggtgtgcaacctgtgtaggaaacagcaggagatactgactaaaagcggcgcgtggttctacaacagcggcagcaatacaccgcaacagcctgatcagaaggttttgcggggcctccgaaatgaagaagcacctcaggagaaaaagcctaaactgcatgagcagacgcagtttcagggcccgtcgggagacttgtccgtgccagctgttgagaaatcgcggtcacacggcctgacacgacagcattccatcaagaacggctctggggtcaagcatcatattgcgagcgatatcgcaagtgatagaaaacggtccccctcagtctctagagaccagaatcggagatacgatcagagagaggagcgagaggaatactcgcagtatgcaacatcggatacggctatgcccaggtctccaagtgattacgccgataggagaagtcaacacgaaccccaattctacgaggactccgaccacctgtcataccgggattcaaatcggcgctcacaccgccactcaaaggagtatattgtcgatgatgaggacgtggaatcccgggacgaatacgaacgccagagacgtgaggaggaataccaatcacgttatcgtagtgatcctaatctggcccgctatccagtgaaaccgcagccatacgaagagcagatgcggatccatgctgaggtgtcgcgagctcgccacgaaaggcgtcactcagacgttagtctggccaatgctgatctggaagactccagaatatccatgctacgaatggaccgtccttccagacaaaggagcattagcgaacgcagggcagcgatggagaaccagaggagctattccatggagaggacgcgagaggcccagggacctagcagctacgcgcagagaaccactaaccactctccgcctactccacggcgctctcctttgccaattgatcgtccggacttgcgaaggacggacagcctgaggaaacagcaccatctggaccccagcagtgccgtccggaagacaaagcgagagaaaatggagaccatgctgaggaatgattccctatcaagcgaccagtcggagagtgtccgccctccccccccaaagccgcacaagtccaaaaaaggtggcaaaatgcgtcagatctcactgagcagctccgaggaggagctggccagcacccctgagtacaccagctgcgatgatgtggaaatcgaatcagaaagcgtgtcagaaaagggtgactcccagaaggggaagcggaaaacatcagaacaagctgttctgagcgacagtaacactaggtcagaaaggcagaaggagatgatgtactttgggggtcacagtctcgaggaagacttagagtggtccgaaccccaaattaaagactccggggtggatacttgcagcagcaccacccttaatgaggaacattcacatagcgacaagcacccagtgacttggcagccatccaaggacggagacagacttattggtcggatcctgctcaacaagcgcctaaaggatggctctgttccaagggattctggggcaatgctcggactcaaagtagttggcggcaagatgaccgagagcggtcgcttatgtgcttttattacaaaagtgaaaaaaggttcattggctgatacagttggacacctcaggcccggcgacgaagttctggagtggaatgggaggctcttgcaaggagctacattcgaggaggtgtataacattatcttagagtcgaagccagaaccacaagttgaacttgtggtgtcccgtcctataggggacattccccgtatacctgattcaacacatgctcaactagagtcttcctccagttccttcgaaagtcagaagatggaccggccatcaatctccgtaaccagcccaatgagtccaggaatgctccgggatgtgcctcagtttttatctggacaactgagtataaagctatggttcgataaggtggggcaccagctgatagtgaccatcctcggcgccaaggatctgcctagtagggaggacggcagaccacggaacccttacgtgaagatttattttttgccagataggtccgataaaaataaaagaaggaccaagaccgtgaaaaagacgttggaacccaaatggaatcagacattcatatactcccccgtacaccggagagagtttagagagcggatgcttgaaatcaccttgtgggatcaagcaagagttcgggaggaggaaagtgagttcttaggggaaattctcatagagctggaaacggccttactcgatgatgagccccattggtataaactgcagacgcacgatgtttcgtctctgcccctcccccatcccagcccttacatgccgcgccgccagctccatggggagtccccgaccagaagattacagaggtctaagcgtatttccgactccgaggtttcggattatgattgtgatgatggaattggagtggtgtccgattaccgacatgacggacgagatctgcagtccagcacactgagtgtgccagaacaagtgatgagctcgaatcactgctccccatctggcagcccacaccgagtggacgtgataggacgcacccgctcgtggtccccatcagtgccccctccccagtcccgcaatgttgagcagggtctgagggggacacgaaccatgaccggtcattacaatacaatctctaggatggaccgccacagagtgatggatgaccattattcccccgatagggacagagactgcgaggccgccgaccggcagccttaccaccgcagcaggagtaccgagcagcgacctctgctagagcggactacaactcgatcacgctccaccgaacggccagataccaacctaatgcgcagtatgccatctctcatgacaggacgtagtgcaccgccgtccccagctctctccagatctcatccccggaccgggtctgtgcagacttccccaagctccacaccggtagctggccgccgaggacgacaattgcctcagctcccacccaaaggaacattagatagaaaggccggcggaaaaaagttgcggtccactgttcaacgatctaccgaaaccggcctggccgtcgaaatgcgtaattggatgacgcgtcaagcctcaagggagtcaactgacgggtcaatgaactcctactcttctgaaggcaatttaattttcccaggagtgcgtctggccagcgattcacagttttccgacttcctggacggcctgggccccgcccaactcgtggggcggcaaactttagccacacctgctatgggcgacatccaggtaggtatgatggataaaaaggggcaattagaggtggaaatcatccgcgccaggggactggtggtgaagccaggatctaaaaccttgcccgccccctacgtgaaggtgtatctgctagacaacggagtgtgcatagcaaaaaagaagaccaaggtcgccaggaagacactcgagccgttataccagcaattactgagtttcgaagagtcccctcaaggaaaagtgcttcaaatcatcgtgtggggagattacgggagaatggaccacaagtcatttatgggtgtggcgcaaattctgctggacgagctcgagctttccaacatggtcattgggtggtttaagctgttccctccatcctctcttgttgacccaacattagcgcctctcactaggagagcgagtcagagttccctagagagcagtaccggtccatcctatagtcgttcatag

SEQ ID NO: 308541 - DNA, 4161 bp, Artificial Sequence
  derived and/or modified sequence
atgagtgcacccgtgggtcctcgcggaagactggccccaatccccgctgcatcacagccaccattacaacccgagatgcccgacttatcacatctgacggaagaagagagaaaaataatactggccgtcatggaccgacagaaaaaggaggtgaaggaggagcataaacctcagttgacccaatggtttcccttcagcggaatcactgagctggtaaataatgttctccagcctcagcagaagcaacagaacgaaaaagaaccccaaacaaagctgcaccagcagttcgagatgtacaaggagcaggtgaagaagatgggagaggagtcacagcaacagcaggaacagaagggtgacgccccaacttgtggaatatgccataagacaaagtttgcggacggttgtgggcacaattgtagttattgtcagactaagttttgtgccagatgcggaggacgggtgagccttagaagcaacaaagtgatgtgggtatgcaatctctgtcggaagcagcaagagattctcacgaaaagcggggcatggttttataacagcggcagtaacacacctcagcagcccgaccagaaggtactgaggggattaaggaacgaagaagcgcctcaagagaaaaaaccaaagctgcatgaacagacacagttccaagggccaagtggggacctgagtgtccccgcagtggagaagtcacgtagccacggccttacaagacaacactcgattaaaaacgggagcggtgttaaacaccatattgcctccgacattgcttccgatcgcaagcggagcccctctgtgtccagggaccaaaaccgcaggtacgaccagcgggaagagcgagaagagtattctcaatatgccacaagcgacacggctatgccgaggtccccctccgactatgctgataggagaagccagcacgagcctcaattttacgaggactctgaccatctgagttatagagactcgaatcgacgctcccaccgccattccaaagagtacatagtggatgatgaagatgttgagagtcgcgacgagtacgaacggcagcgacgagaagaggagtaccaatctcgctaccggtctgaccctaatctggcacgctaccctgttaagccacagccttatgaagaacagatgagaatccacgctgaggtcagtcgcgctcgccacgagaggaggcatagcgacgtgtctctggctaacgcggacttagaggatagtcgaattagcatgttacggatggaccgtccaagccgccagagaagcatcagcgagcggagggcagccatggaaaatcagaggtcatacagcatggagaggacgagagaagctcagggaccctcgtcctacgcccagaggacaacgaaccactcgcctcccaccccaaggagatccccgttacccattgaccgacctgacttgagaagaacagatagtttacgtaaacaacatcatctcgatccctcaagtgctgttagaaagaccaagagagagaagatggaaactatgttgcgaaacgacagtctctcatctgatcagtccgaatctgtccgccctccaccacccaagccacacaagtccaaaaagggtggcaagatgcggcagatatctttgtcttcaagtgaggaggagctggcatccacacccgagtacacaagctgcgacgacgtggagatcgaaagtgagagcgtgtctgaaaaaggggatatggattacaattggctcgaccacaccagttggcactcctccgaagccagccccatgagcttgcatcccgtaacttggcagccatctaaggatggtgataggcttatcggacgtatactgttgaacaagcgactcaaggacggcagcgttcctagagacagtggggcaatgttgggtctcaaggtcgtgggcggtaaaatgactgagtcaggaagattgtgcgccttcatcactaaggtcaagaaaggctccctcgccgacactgtgggccatctgagaccaggagacgaagtgctggaatggaacggccgactgctgcagggcgcaacttttgaggaagtctacaatatcatcttggaaagcaaacctgagccacaggtggaactcgttgtgtcccggccaattggagacattccgcgaattccagacagtacacacgcccagctcgaaagttcttccagttccttcgaatcccagaaaatggataggccgagcatcagcgtaacatcgcctatgagccctggtatgcttcgggacgtccctcagttcctaagcggtcagctaagtatcaaattgtggttcgacaaggtaggacaccagctgatagttaccatacttggggcaaaggacctccctagccgggaagatggaagacctcgtaatccttacgtaaagatctacttcttgccagaccgaagtgataaaaataagcgtaggactaaaacagtaaaaaaaactctggagccgaagtggaatcaaacattcatctattcgcctgtccatcgcagagagtttcgtgagcgaatgctcgaaataacactctgggatcaggctcgcgtgcgagaggaagaaagcgagtttttgggcgagatcctcatcgaactggaaacagccctgcttgatgatgaaccccactggtacaaacttcagacgcacgatgtgagctcattgccactgccgcacccctctccctacatgcctaggagacagttgcacggcgaatccccaaccagacgtctccagcggagcaaacgcatttctgactctgaggtctctgattacgattgtgacgacggaataggagttgtatctgactatagacacgatggtcgtgatctgcagtccagtacgctgtccgtgccagagcaggtcatgagtagtaaccactgctccccatccggaagccctcacagggtcgacgtaatcgggaggactagatcctggtcaccctcagtgcctcctccacagtctaggaatgttgagcagggcctgaggggaacacgcaccatgacgggacactacaatacgataagtcggatggaccggcatcgtgtcatggatgaccactactcccccgaccgagactcccatttcctcaccctgcccaggtcccggtacagccagactatagatcatcaccaccgggacggaagggactgcgaagccgcagatagacaaccatatcatagatctcgatccaccgaacagcggccattgcttgaacggacaacaacccgcagccggagcacagagcgacctgataccaatttaatgcgcagcatgccatctcttatgacaggcagatctgcacccccatctccagctttgtctcgaagccatcctcgaacgggtagtgtacagacctctccatcttccacacctgtcgccggaaggcggggacgacaactgcctcagcttccacccaagggtactctggatagaaaagcaggcggaaaaaagctgcggtctactgtgcagcggtctaccgaaactggtctggccgtggagatgcggaattggatgacccggcaagctagccgtgagagtaccgatggttcaatgaattcatattcaagcgagggtaacctgatcttcccaggggtgcggcttgccagcgattcccaatttagcgactttctcgatgggttggggccagcacagttagtaggccgacagactttagctacacctgccatgggggatatccaagtggggatgatggacaagaagggccaactggaggtcgagattattcgggcaagaggcctggtggtgaagccagggagtaaaaccctgccggcaccatatgtcaaggtttatctgctggataatggtgtttgcatcgccaagaaaaagaccaaagtggctaggaagacactggaaccactgtatcagcaactcttatcttttgaggagtctcctcaaggcaaggtgttgcagatcatcgtttggggcgactatgggagaatggatcataagagctttatgggtgtcgcccagattctgctggacgagttggaattgtcaaatatggtaatcggatggtttaagctgtttcctccaagctcactcgtagaccctaccctggccccactcacaagaagggcttctcaaagtagccttgagtctagcacggggccttcatattcccggtcttag

SEQ ID NO: 308542 - DNA, 4236 bp, Artificial Sequence
  derived and/or modified sequence
atgagcgcacccgttggcccacgaggaaggctcgcacctattcccgctgcttcgcagccccctctgcagccagagatgcccgacctgtcccacctaactgaggaggagaggaagatcatcctggcggttatggacaggcagaaaaaggaggtaaaagaagaacataaaccgcagctgacccagtggttcccctttagcggaattacagaactggttaacaacgttcttcagccccagcagaagcagcagaatgaaaaggaacctcagaccaaacttcaccagcagtttgagatgtacaaggagcaggtcaaaaagatgggggaagaatctcagcagcagcaggagcagaagggcgatgctccaacttgcggcatctgtcacaagacaaagtttgccgacggttgcggacacaattgttcttattgtcagacgaaattctgtgcccgttgcggaggacgggtcagtttgaggagcaataaggtgatgtgggtgtgtaacctgtgtagaaagcaacaagagatactgaccaagagtggtgcttggttttataattccggcagtaacacccctcaacagcctgatcaaaaggtgctaagggggctccgcaatgaagaagcaccacaggaaaagaaaccaaagttgcacgagcagacacaatttcagggaccttctggcgacctgagcgtccctgctgtggaaaaatctcgaagccatggactgactcgccagcactctatcaagaatgggagcggtgtaaagcaccacattgcctcggacattgcaagtgataggaagaggtctccctctgtgtcacgtgaccagaatagacggtatgaccagagggaagagcgcgaagaatactcgcagtatgcgacttccgatacagctatgcccagaagtcctagtgattacgctgacagaaggagtcaacatgagcctcagttttacgaggactccgatcatttatcctacagggatagtaacagaaggagccatcgccatagcaaagagtatatcgtcgatgacgaagatgttgagtcgagagatgagtatgagcggcagaggcgggaagaagagtatcagtccaggtatcgtagtgaccctaatttggctcggtatcctgtgaagccccagccctacgaggagcagatgcgaatacacgctgaggtgtcccgagctcgtcatgaaagacgacattctgacgtgtcactggctaatgctgacctcgaggacagcaggatctctatgctcaggatggatcgcccatcgagacagcgcagcatcagtgaacgtagggcagctatggagaaccagcgctcctatagtatggagcgaaccagagaagctcaggggccttcttcctatgctcagagaactaccaaccattcaccccctacgccgagaaggtccccgttgcccatagacagacccgatttgagaaggactgactcccttaggaagcagcaccatctggatcctagctccgctgtccgcaaaacgaaacgtgaaaaaatggagacgatgttgagaaatgactctctgtcctcagatcaatccgaaagtgttcgacctcccccaccaaaaccccacaaatcaaagaaaggaggcaagatgcgtcagattagtctgagctcttcagaggaggaactagcttctacgccagagtatacatcatgtgacgacgtagaaattgagagtgagagcgtcagcgagaagggagattcacagaaagggaaacgcaagacgagcgagcaagcagtactctcggacagcaatactagaagcgagcgccaaaaggagatgatgtattttgggggacattcgctcgaggaagatttagagtggtctgagccccagattaaggattccggggtcgacacttgttcctcaactacactaaatgaggaacatagccactccgacaaacatcccgttacctggcaaccctccaaagatggcgatcgtctcatagggaggatactgttgaataagagattgaaggacggatctgtccctagagactccggagcgatgttgggtctgaaggtggtaggcggaaagatgaccgagtcaggcagactctgcgcgtttatcacaaaggtcaagaaagggagtttggccgatacagttgggcatctgcggccaggcgacgaagtgctggagtggaatggaagactgctccagggggctacttttgaggaagtttacaatattatccttgagtcaaaacccgaaccccaggtggaactggtggtttcgcggcctatcggcgatataccgagaatcccagatagcacacacgcacagctggagtcctcttcgagttcctttgaatctcagaagatggaccgcccatccattagcgtcacctctccaatgtccccaggcatgctcagagatgtgccgcagtttttgtctggacagctatccattaaattgtggttcgataaagttggacatcagctgatagtgaccattctaggggcaaaagatttaccaagccgcgaggacgggcgaccaaggaatccatacgtgaagatctatttcctccccgacagatccgataagaataagcggagaaccaaaacagtcaagaaaacactcgagccgaaatggaatcaaacctttatttacagcccggtgcaccggcgagagtttcgggagcgcatgttggaaattaccctgtgggaccaggccagagtgagagaagaagaatcggaattcttgggtgagatcctgatcgagcttgaaacggcactgcttgacgatgagccgcactggtacaaactgcaaacccacgacgtgtcatccctgccactcccccacccgtcaccctacatgccgcgtcgccagctccatggagagtccccaaccagacggcttcagcgctccaagcggatctccgatagtgaagtttctgactatgactgcgatgatgggattggggttgtcagtgattacagacacgacggtcgcgatctgcagtcaagtaccttgagtgtgcccgagcaggtgatgtcatctaaccactgttctcccagcgggagtcctcatcgggtggacgtcatcgggagaactcgatcgtggagcccaagcgtgcctccaccacagtcgcggaacgtagagcagggcctccgcggaacacgcactatgaccggccactataatacaatctcgcggatggataggcatagagtcatggacgaccactacagtcctgaccgagacagggattgtgaagccgcagacaggcaaccttaccacagatcacgatctacagagcaaaggcccctcctggagcgaacgactacacgaagtcgttcaacagaacgccctgacactaacctcatgagatcgatgcctagcctgatgaccggccgtagtgcccctccgtcgcccgctctgtccagaagccatccacgaaccggatctgtgcagacatcacctagctctacccccgttgccggtagaagaggtcggcagctcccacagctgccaccaaagggcaccctggataggaaagctggcggaaagaagctccggtcaaccgtccagcgcagtacagaaacaggcctggccgtggaaatgagaaactggatgactcgtcaagcaagtcgagagtcaaccgatggatctatgaactcttatagcagtgaaggcaacctcatttttccaggtgtgcgcctggcatccgattcccagttcagcgattttctggacggtctcggacccgctcagctggttgggcgacagacactggcaactcccgctatgggggatattcaggtaggcatgatggacaagaaaggacagctggaagtggagattattcgtgcacgcggactggtagtgaaacccggaagtaagaccctgccagcaccctatgtgaaggtatacttgcttgataacggagtgtgcattgccaaaaaaaaaaccaaggtggcaaggaaaactctggagccgctgtatcagcagctgctctcgttcgaagaaagcccccagggtaaggtgctccagattatagtgtggggggactatggcagaatggatcacaagagctttatgggagtggcgcagatccttctggatgagctcgagctctctaacatggtgattgggtggttcaaactctttccaccctcctctctcgttgatcccacactagctcctctcacacgaagagctagccagtcaagcctggaatctagtaccggcccatcgtactctagaagttag

SEQ ID NO: 308543 - DNA, 4161 bp, Artificial Sequence
  derived and/or modified sequence
atgtcggctcctgtcgggccccggggccgcctggctcccatcccggcggcctctcagccgcctctgcagcccgagatgcctgacctcagccacctcacggaggaggagaggaaaatcatcctggccgtcatggataggcagaagaaagaggtcaaagaagaacacaaaccacaactgacacagtggtttccctttagtggaatcactgaactggtaaataacgttcttcagccccagcaaaaacaacaaaatgaaaaggagccccagacaaaactgcatcagcagtttgaaatgtataaagagcaggtaaagaagatgggagaagaatcacagcaacagcaagaacagaagggtgatgcgccaacctgtggtatctgccacaaaacaaagtttgctgatggatgtggccataactgttcatattgccaaacaaagttctgtgctcgttgtggaggtcgagtgtcattacgctcaaacaaggttatgtgggtatgtaatttgtgccgaaaacaacaagaaatcctcactaaatcaggagcatggttttataatagtggatctaatacaccacagcaacctgatcaaaaggttcttcgagggctaagaaatgaggaggcacctcaggagaagaaaccaaaactacatgagcagacccagttccaaggaccctcaggtgacttatctgtacctgcagtggagaaaagtcgatctcatgggctcacaagacagcattctattaaaaatgggtcaggcgtgaagcatcacattgccagtgacatagcttcagacaggaaaagaagcccatctgtgtccagagatcagaatagaagatacgaccaaagggaagaaagagaggaatattcacagtatgctacttcggataccgcaatgcctagatctccatcagattatgctgataggcgatctcaacatgaacctcagttttatgaagactctgatcatttaagttatagggactccaacaggagaagtcataggcattccaaagaatatattgtagatgatgaggatgtggaaagcagagatgaatacgaaaggcaaaggagagaggaagagtaccagtcacgctaccgaagtgatccgaatttggcccgttatccagtaaagccacaaccctatgaagaacaaatgcggatccatgctgaagtgtcccgagcacggcatgagagaaggcatagtgatgtttctttggcaaatgctgatctggaagattccaggatttctatgctaaggatggatcgaccatcaaggcaaagatctatatcagaacgtagagctgccatggaaaatcagcgatcttattcaatggaaagaactcgagaggctcagggaccaagttcttatgcacaaaggaccacaaaccatagtcctcctacccccaggaggagtccactacccatagatagaccagacttgaggcgtactgactcactacggaaacagcaccacttagatcctagctctgctgtaagaaaaacaaaacgggaaaaaatggaaacaatgttaaggaatgattctctcagttcagaccagtcagagtcagtgagacctccaccaccaaagcctcataaatcaaagaaaggcggtaaaatgcgccagatttcgttgagcagttcagaggaggaattggcttccacgcctgaatatacaagttgtgatgatgttgagattgaaagtgagagtgtaagtgaaaaaggagacatggattacaactggttggatcatacgtcttggcatagcagtgaggcatccccaatgtctttgcaccctgtaacctggcaaccatctaaagatggagatcgtttaattggtcgcattttattaaataagcgtctaaaagatggaagtgtacctcgagattcaggagcaatgcttggcttgaaggttgtaggaggaaagatgactgaatcaggtcggctttgtgcatttattactaaagtaaaaaaaggaagtttagctgatactgtaggacatcttagaccaggtgatgaagtattagaatggaatggaagactactgcaaggagccacatttgaggaagtgtacaacatcattctagaatccaaacctgaaccacaagtagaacttgtagtttcaaggcctattggagatataccgcgaatacctgatagcacacatgcacaactggagtccagttctagctcctttgaatctcaaaaaatggatcgtccttctatttctgttacctctcccatgagtcctggaatgttgagggatgtcccacagttcttatcaggacaactttcaataaaactatggtttgacaaggttggtcaccaattaatagttacaattttgggagcaaaagatctcccttccagggaagatgggaggccaaggaatccttatgttaaaatttactttcttccagacagaagtgataaaaacaagagaagaactaaaacagtaaagaaaacattggaacccaaatggaaccaaacattcatttattctccagtccaccgaagagaatttcgggaacgaatgctagagattaccctttgggatcaagctcgtgttcgagaggaagaaagtgaattcttaggcgagattttaattgaattagaaacagcattattagatgatgagccacattggtacaaacttcagacgcatgatgtctcttcattgccacttccccacccttctccatatatgccacgaagacagctccatggagagagcccaacacggaggttgcaaaggtcaaagagaataagtgatagtgaagtctctgactatgactgtgatgatggaattggtgtagtatcagattatcgacatgatggtcgagatcttcaaagctcaacattatcagtgccagaacaagtaatgtcatcaaaccactgttcaccatcagggtctcctcatcgagtagatgttataggaaggactagatcatggtcacccagtgtccctcctccacaaagtcggaatgtggaacaggggcttcgagggacccgcactatgaccggacattataatacaattagccgaatggacagacatcgtgtcatggatgaccattattctccagatagagacagtcattttcttactctacctcgctccagatacagtcagaccattgaccatcatcacagggatggcagggattgtgaagcagcagatagacagccatatcacagatccagatcaacagaacaacggcctctccttgagcggaccaccacccgctccagatccactgaacgtcctgatacaaacctcatgaggtcgatgccttcattaatgactggaagatctgcccctccttcacctgccttatcgaggtctcatcctcgtactgggtctgtccagacaagcccatcaagtactccagtcgcaggacgaaggggccgacagcttccacagcttccaccaaagggaacgttggatagaaaagcaggaggtaaaaaactaaggagcactgtccaaagaagtacagaaacaggcctggccgtggaaatgaggaactggatgactcgacaggcaagccgagagtctacagatggtagcatgaacagctacagctcagaaggaaatctgattttccctggtgttcgcttggcctctgatagccagttcagtgatttcctggatggccttggccctgctcagctagtgggacgccagactctggcaacacctgcaatgggtgacattcaggtaggaatgatggacaaaaagggacagctggaggtagaaatcatccgggcccgtggccttgttgtaaaaccaggttccaagacactgccagcaccgtatgtaaaagtgtatctattagataacggagtctgcatagccaaaaagaaaacaaaagtggcaagaaaaacgctggaacccctttaccagcagctattatctttcgaagagagtccacaaggaaaagttttacagatcatcgtctggggagattatggccgcatggatcacaaatcttttatgggagtggcccagatacttttagatgaactagagctatccaatatggtgatcggatggttcaaacttttcccaccttcctccctagtagatccaaccttggcccctctgacaagaagagcttcccaatcatctctggaaagttcaactggaccttcttactctcgttcatag

SEQ ID NO: 308544 - DNA, 4236 bp, Artificial Sequence
  derived and/or modified sequence
atgtcggctcctgtcgggccccggggccgcctggctcccatcccggcggcctctcagccgcctctgcagcccgagatgcctgacctcagccacctcacggaggaggagaggaaaatcatcctggccgtcatggataggcagaagaaagaggtcaaagaagaacacaaaccacaactgacacagtggtttccctttagtggaatcactgaactggtaaataacgttcttcagccccagcaaaaacaacaaaatgaaaaggagccccagacaaaactgcatcagcagtttgaaatgtataaagagcaggtaaagaagatgggagaagaatcacagcaacagcaagaacagaagggtgatgcgccaacctgtggtatctgccacaaaacaaagtttgctgatggatgtggccataactgttcatattgccaaacaaagttctgtgctcgttgtggaggtcgagtgtcattacgctcaaacaaggttatgtgggtatgtaatttgtgccgaaaacaacaagaaatcctcactaaatcaggagcatggttttataatagtggatctaatacaccacagcaacctgatcaaaaggttcttcgagggctaagaaatgaggaggcacctcaggagaagaaaccaaaactacatgagcagacccagttccaaggaccctcaggtgacttatctgtacctgcagtggagaaaagtcgatctcatgggctcacaagacagcattctattaaaaatgggtcaggcgtgaagcatcacattgccagtgacatagcttcagacaggaaaagaagcccatctgtgtccagagatcagaatagaagatacgaccaaagggaagaaagagaggaatattcacagtatgctacttcggataccgcaatgcctagatctccatcagattatgctgataggcgatctcaacatgaacctcagttttatgaagactctgatcatttaagttatagggactccaacaggagaagtcataggcattccaaagaatatattgtagatgatgaggatgtggaaagcagagatgaatacgaaaggcaaaggagagaggaagagtaccagtcacgctaccgaagtgatccgaatttggcccgttatccagtaaagccacaaccctatgaagaacaaatgcggatccatgctgaagtgtcccgagcacggcatgagagaaggcatagtgatgtttctttggcaaatgctgatctggaagattccaggatttctatgctaaggatggatcgaccatcaaggcaaagatctatatcagaacgtagagctgccatggaaaatcagcgatcttattcaatggaaagaactcgagaggctcagggaccaagttcttatgcacaaaggaccacaaaccatagtcctcctacccccaggaggagtccactacccatagatagaccagacttgaggcgtactgactcactacggaaacagcaccacttagatcctagctctgctgtaagaaaaacaaaacgggaaaaaatggaaacaatgttaaggaatgattctctcagttcagaccagtcagagtcagtgagacctccaccaccaaagcctcataaatcaaagaaaggcggtaaaatgcgccagatttcgttgagcagttcagaggaggaattggcttccacgcctgaatatacaagttgtgatgatgttgagattgaaagtgagagtgtaagtgaaaaaggggacagtcaaaagggaaaaagaaaaactagtgagcaggcagttttgtcggactctaacaccaggtctgagagacaaaaggaaatgatgtactttggtggccactctttggaagaggatttggaatggtctgaacctcagattaaggactctggggtagatacgtgtagtagcacaacccttaacgaggagcatagccatagtgataagcaccctgtaacctggcaaccatctaaagatggagatcgtttaattggtcgcattttattaaataagcgtctaaaagatggaagtgtacctcgagattcaggagcaatgcttggcttgaaggttgtaggaggaaagatgactgaatcaggtcggctttgtgcatttattactaaagtaaaaaaaggaagtttagctgatactgtaggacatcttagaccaggtgatgaagtattagaatggaatggaagactactgcaaggagccacatttgaggaagtgtacaacatcattctagaatccaaacctgaaccacaagtagaacttgtagtttcaaggcctattggagatataccgcgaatacctgatagcacacatgcacaactggagtccagttctagctcctttgaatctcaaaaaatggatcgtccttctatttctgttacctctcccatgagtcctggaatgttgagggatgtcccacagttcttatcaggacaactttcaataaaactatggtttgacaaggttggtcaccaattaatagttacaattttgggagcaaaagatctcccttccagggaagatgggaggccaaggaatccttatgttaaaatttactttcttccagacagaagtgataaaaacaagagaagaactaaaacagtaaagaaaacattggaacccaaatggaaccaaacattcatttattctccagtccaccgaagagaatttcgggaacgaatgctagagattaccctttgggatcaagctcgtgttcgagaggaagaaagtgaattcttaggcgagattttaattgaattagaaacagcattattagatgatgagccacattggtacaaacttcagacgcatgatgtctcttcattgccacttccccacccttctccatatatgccacgaagacagctccatggagagagcccaacacggaggttgcaaaggtcaaagagaataagtgatagtgaagtctctgactatgactgtgatgatggaattggtgtagtatcagattatcgacatgatggtcgagatcttcaaagctcaacattatcagtgccagaacaagtaatgtcatcaaaccactgttcaccatcagggtctcctcatcgagtagatgttataggaaggactagatcatggtcacccagtgtccctcctccacaaagtcggaatgtggaacaggggcttcgagggacccgcactatgaccggacattataatacaattagccgaatggacagacatcgtgtcatggatgaccattattctccagatagagacagggattgtgaagcagcagatagacagccatatcacagatccagatcaacagaacaacggcctctccttgagcggaccaccacccgctccagatccactgaacgtcctgatacaaacctcatgaggtcgatgccttcattaatgactggaagatctgcccctccttcacctgccttatcgaggtctcatcctcgtactgggtctgtccagacaagcccatcaagtactccagtcgcaggacgaaggggccgacagcttccacagcttccaccaaagggaacgttggatagaaaagcaggaggtaaaaaactaaggagcactgtccaaagaagtacagaaacaggcctggccgtggaaatgaggaactggatgactcgacaggcaagccgagagtctacagatggtagcatgaacagctacagctcagaaggaaatctgattttccctggtgttcgcttggcctctgatagccagttcagtgatttcctggatggccttggccctgctcagctagtgggacgccagactctggcaacacctgcaatgggtgacattcaggtaggaatgatggacaaaaagggacagctggaggtagaaatcatccgggcccgtggccttgttgtaaaaccaggttccaagacactgccagcaccgtatgtaaaagtgtatctattagataacggagtctgcatagccaaaaagaaaacaaaagtggcaagaaaaacgctggaacccctttaccagcagctattatctttcgaagagagtccacaaggaaaagttttacagatcatcgtctggggagattatggccgcatggatcacaaatcttttatgggagtggcccagatacttttagatgaactagagctatccaatatggtgatcggatggttcaaacttttcccaccttcctccctagtagatccaaccttggcccctctgacaagaagagcttcccaatcatctctggaaagttcaactggaccttcttactctcgttcatag

SEQ ID NO: 308545 - DNA, 4161 bp, Artificial Sequence
  derived and/or modified sequence
atgagcgcccccgtgggccccagaggcagactggcccccatccccgccgccagccagccccccctgcagcccgagatgcccgacctgagccacctgaccgaggaggagagaaagatcatcctggccgtgatggacagacagaagaaggaggtgaaggaggagcacaagccccagctgacccagtggttccccttcagcggcatcaccgagctggtgaacaacgtgctgcagccccagcagaagcagcagaacgagaaggagccccagaccaagctgcaccagcagttcgagatgtacaaggagcaggtgaagaagatgggcgaggagagccagcagcagcaggagcagaagggcgacgcccccacctgcggcatctgccacaagaccaagttcgccgacggctgcggccacaactgcagctactgccagaccaagttctgcgccagatgcggcggcagagtgagcctgagaagcaacaaggtgatgtgggtgtgcaacctgtgcagaaagcagcaggagatcctgaccaagagcggcgcctggttctacaacagcggcagcaacaccccccagcagcccgaccagaaggtgctgagaggcctgagaaacgaggaggccccccaggagaagaagcccaagctgcacgagcagacccagttccagggccccagcggcgacctgagcgtgcccgccgtggagaagagcagaagccacggcctgaccagacagcacagcatcaagaacggcagcggcgtgaagcaccacatcgccagcgacatcgccagcgacagaaagagaagccccagcgtgagcagagaccagaacagaagatacgaccagagagaggagagagaggagtacagccagtacgccaccagcgacaccgccatgcccagaagccccagcgactacgccgacagaagaagccagcacgagccccagttctacgaggacagcgaccacctgagctacagagacagcaacagaagaagccacagacacagcaaggagtacatcgtggacgacgaggacgtggagagcagagacgagtacgagagacagagaagagaggaggagtaccagagcagatacagaagcgaccccaacctggccagataccccgtgaagccccagccctacgaggagcagatgagaatccacgccgaggtgagcagagccagacacgagagaagacacagcgacgtgagcctggccaacgccgacctggaggacagcagaatcagcatgctgagaatggacagacccagcagacagagaagcatcagcgagagaagagccgccatggagaaccagagaagctacagcatggagagaaccagagaggcccagggccccagcagctacgcccagagaaccaccaaccacagcccccccacccccagaagaagccccctgcccatcgacagacccgacctgagaagaaccgacagcctgagaaagcagcaccacctggaccccagcagcgccgtgagaaagaccaagagagagaagatggagaccatgctgagaaacgacagcctgagcagcgaccagagcgagagcgtgagaccccccccccccaagccccacaagagcaagaagggcggcaagatgagacagatcagcctgagcagcagcgaggaggagctggccagcacccccgagtacaccagctgcgacgacgtggagatcgagagcgagagcgtgagcgagaagggcgacatggactacaactggctggaccacaccagctggcacagcagcgaggccagccccatgagcctgcaccccgtgacctggcagcccagcaaggacggcgacagactgatcggcagaatcctgctgaacaagagactgaaggacggcagcgtgcccagagacagcggcgccatgctgggcctgaaggtggtgggcggcaagatgaccgagagcggcagactgtgcgccttcatcaccaaggtgaagaagggcagcctggccgacaccgtgggccacctgagacccggcgacgaggtgctggagtggaacggcagactgctgcagggcgccaccttcgaggaggtgtacaacatcatcctggagagcaagcccgagccccaggtggagctggtggtgagcagacccatcggcgacatccccagaatccccgacagcacccacgcccagctggagagcagcagcagcagcttcgagagccagaagatggacagacccagcatcagcgtgaccagccccatgagccccggcatgctgagagacgtgccccagttcctgagcggccagctgagcatcaagctgtggttcgacaaggtgggccaccagctgatcgtgaccatcctgggcgccaaggacctgcccagcagagaggacggcagacccagaaacccctacgtgaagatctacttcctgcccgacagaagcgacaagaacaagagaagaaccaagaccgtgaagaagaccctggagcccaagtggaaccagaccttcatctacagccccgtgcacagaagagagttcagagagagaatgctggagatcaccctgtgggaccaggccagagtgagagaggaggagagcgagttcctgggcgagatcctgatcgagctggagaccgccctgctggacgacgagccccactggtacaagctgcagacccacgacgtgagcagcctgcccctgccccaccccagcccctacatgcccagaagacagctgcacggcgagagccccaccagaagactgcagagaagcaagagaatcagcgacagcgaggtgagcgactacgactgcgacgacggcatcggcgtggtgagcgactacagacacgacggcagagacctgcagagcagcaccctgagcgtgcccgagcaggtgatgagcagcaaccactgcagccccagcggcagcccccacagagtggacgtgatcggcagaaccagaagctggagccccagcgtgccccccccccagagcagaaacgtggagcagggcctgagaggcaccagaaccatgaccggccactacaacaccatcagcagaatggacagacacagagtgatggacgaccactacagccccgacagagacagccacttcctgaccctgcccagaagcagatacagccagaccatcgaccaccaccacagagacggcagagactgcgaggccgccgacagacagccctaccacagaagcagaagcaccgagcagagacccctgctggagagaaccaccaccagaagcagaagcaccgagagacccgacaccaacctgatgagaagcatgcccagcctgatgaccggcagaagcgccccccccagccccgccctgagcagaagccaccccagaaccggcagcgtgcagaccagccccagcagcacccccgtggccggcagaagaggcagacagctgccccagctgccccccaagggcaccctggacagaaaggccggcggcaagaagctgagaagcaccgtgcagagaagcaccgagaccggcctggccgtggagatgagaaactggatgaccagacaggccagcagagagagcaccgacggcagcatgaacagctacagcagcgagggcaacctgatcttccccggcgtgagactggccagcgacagccagttcagcgacttcctggacggcctgggccccgcccagctggtgggcagacagaccctggccacccccgccatgggcgacatccaggtgggcatgatggacaagaagggccagctggaggtggagatcatcagagccagaggcctggtggtgaagcccggcagcaagaccctgcccgccccctacgtgaaggtgtacctgctggacaacggcgtgtgcatcgccaagaagaagaccaaggtggccagaaagaccctggagcccctgtaccagcagctgctgagcttcgaggagagcccccagggcaaggtgctgcagatcatcgtgtggggcgactacggcagaatggaccacaagagcttcatgggcgtggcccagatcctgctggacgagctggagctgagcaacatggtgatcggctggttcaagctgttcccccccagcagcctggtggaccccaccctggcccccctgaccagaagagccagccagagcagcctggagagcagcaccggccccagctacagcagaagctag

SEQ ID NO: 308546 - DNA, 4236 bp, Artificial Sequence
  derived and/or modified sequence
atgagcgcccccgtgggccccagaggcagactggcccccatccccgccgccagccagccccccctgcagcccgagatgcccgacctgagccacctgaccgaggaggagagaaagatcatcctggccgtgatggacagacagaagaaggaggtgaaggaggagcacaagccccagctgacccagtggttccccttcagcggcatcaccgagctggtgaacaacgtgctgcagccccagcagaagcagcagaacgagaaggagccccagaccaagctgcaccagcagttcgagatgtacaaggagcaggtgaagaagatgggcgaggagagccagcagcagcaggagcagaagggcgacgcccccacctgcggcatctgccacaagaccaagttcgccgacggctgcggccacaactgcagctactgccagaccaagttctgcgccagatgcggcggcagagtgagcctgagaagcaacaaggtgatgtgggtgtgcaacctgtgcagaaagcagcaggagatcctgaccaagagcggcgcctggttctacaacagcggcagcaacaccccccagcagcccgaccagaaggtgctgagaggcctgagaaacgaggaggccccccaggagaagaagcccaagctgcacgagcagacccagttccagggccccagcggcgacctgagcgtgcccgccgtggagaagagcagaagccacggcctgaccagacagcacagcatcaagaacggcagcggcgtgaagcaccacatcgccagcgacatcgccagcgacagaaagagaagccccagcgtgagcagagaccagaacagaagatacgaccagagagaggagagagaggagtacagccagtacgccaccagcgacaccgccatgcccagaagccccagcgactacgccgacagaagaagccagcacgagccccagttctacgaggacagcgaccacctgagctacagagacagcaacagaagaagccacagacacagcaaggagtacatcgtggacgacgaggacgtggagagcagagacgagtacgagagacagagaagagaggaggagtaccagagcagatacagaagcgaccccaacctggccagataccccgtgaagccccagccctacgaggagcagatgagaatccacgccgaggtgagcagagccagacacgagagaagacacagcgacgtgagcctggccaacgccgacctggaggacagcagaatcagcatgctgagaatggacagacccagcagacagagaagcatcagcgagagaagagccgccatggagaaccagagaagctacagcatggagagaaccagagaggcccagggccccagcagctacgcccagagaaccaccaaccacagcccccccacccccagaagaagccccctgcccatcgacagacccgacctgagaagaaccgacagcctgagaaagcagcaccacctggaccccagcagcgccgtgagaaagaccaagagagagaagatggagaccatgctgagaaacgacagcctgagcagcgaccagagcgagagcgtgagaccccccccccccaagccccacaagagcaagaagggcggcaagatgagacagatcagcctgagcagcagcgaggaggagctggccagcacccccgagtacaccagctgcgacgacgtggagatcgagagcgagagcgtgagcgagaagggcgacagccagaagggcaagagaaagaccagcgagcaggccgtgctgagcgacagcaacaccagaagcgagagacagaaggagatgatgtacttcggcggccacagcctggaggaggacctggagtggagcgagccccagatcaaggacagcggcgtggacacctgcagcagcaccaccctgaacgaggagcacagccacagcgacaagcaccccgtgacctggcagcccagcaaggacggcgacagactgatcggcagaatcctgctgaacaagagactgaaggacggcagcgtgcccagagacagcggcgccatgctgggcctgaaggtggtgggcggcaagatgaccgagagcggcagactgtgcgccttcatcaccaaggtgaagaagggcagcctggccgacaccgtgggccacctgagacccggcgacgaggtgctggagtggaacggcagactgctgcagggcgccaccttcgaggaggtgtacaacatcatcctggagagcaagcccgagccccaggtggagctggtggtgagcagacccatcggcgacatccccagaatccccgacagcacccacgcccagctggagagcagcagcagcagcttcgagagccagaagatggacagacccagcatcagcgtgaccagccccatgagccccggcatgctgagagacgtgccccagttcctgagcggccagctgagcatcaagctgtggttcgacaaggtgggccaccagctgatcgtgaccatcctgggcgccaaggacctgcccagcagagaggacggcagacccagaaacccctacgtgaagatctacttcctgcccgacagaagcgacaagaacaagagaagaaccaagaccgtgaagaagaccctggagcccaagtggaaccagaccttcatctacagccccgtgcacagaagagagttcagagagagaatgctggagatcaccctgtgggaccaggccagagtgagagaggaggagagcgagttcctgggcgagatcctgatcgagctggagaccgccctgctggacgacgagccccactggtacaagctgcagacccacgacgtgagcagcctgcccctgccccaccccagcccctacatgcccagaagacagctgcacggcgagagccccaccagaagactgcagagaagcaagagaatcagcgacagcgaggtgagcgactacgactgcgacgacggcatcggcgtggtgagcgactacagacacgacggcagagacctgcagagcagcaccctgagcgtgcccgagcaggtgatgagcagcaaccactgcagccccagcggcagcccccacagagtggacgtgatcggcagaaccagaagctggagccccagcgtgccccccccccagagcagaaacgtggagcagggcctgagaggcaccagaaccatgaccggccactacaacaccatcagcagaatggacagacacagagtgatggacgaccactacagccccgacagagacagagactgcgaggccgccgacagacagccctaccacagaagcagaagcaccgagcagagacccctgctggagagaaccaccaccagaagcagaagcaccgagagacccgacaccaacctgatgagaagcatgcccagcctgatgaccggcagaagcgccccccccagccccgccctgagcagaagccaccccagaaccggcagcgtgcagaccagccccagcagcacccccgtggccggcagaagaggcagacagctgccccagctgccccccaagggcaccctggacagaaaggccggcggcaagaagctgagaagcaccgtgcagagaagcaccgagaccggcctggccgtggagatgagaaactggatgaccagacaggccagcagagagagcaccgacggcagcatgaacagctacagcagcgagggcaacctgatcttccccggcgtgagactggccagcgacagccagttcagcgacttcctggacggcctgggccccgcccagctggtgggcagacagaccctggccacccccgccatgggcgacatccaggtgggcatgatggacaagaagggccagctggaggtggagatcatcagagccagaggcctggtggtgaagcccggcagcaagaccctgcccgccccctacgtgaaggtgtacctgctggacaacggcgtgtgcatcgccaagaagaagaccaaggtggccagaaagaccctggagcccctgtaccagcagctgctgagcttcgaggagagcccccagggcaaggtgctgcagatcatcgtgtggggcgactacggcagaatggaccacaagagcttcatgggcgtggcccagatcctgctggacgagctggagctgagcaacatggtgatcggctggttcaagctgttcccccccagcagcctggtggaccccaccctggcccccctgaccagaagagccagccagagcagcctggagagcagcaccggccccagctacagcagaagctag

SEQ ID NO: 308547 - DNA, 1422 bp, Artificial Sequence
  derived and/or modified sequence
atgctgagacccgtgatcgaggaggagatcagcatgctgggcgagatcacccacctgcagaccatcagcgaggacctgaagagcctgaccatggacccccacaagctgcccagcagcagcgagcaggtgatcctggacctgaagggcagcgactacagctggagctaccagaccccccccagcagccccagcaccaccatgagcagaaagagcagcgtgtgcagcagcctgaacagcgtgaacagcagcgacagcagaagcagcggcagccacagccacagccccagcagccactacagatacagaagcagcaacctggcccagcaggcccccgtgagactgagcagcgtgagcagccacgacagcggcttcatcagccaggacgccttccagagcaagagccccagccccatgccccccgaggcccccaaccagagaagaaaggagaagagagagcccgaccccaacggcggcggccccaccaccgccagcggcccccccgccgccgccgaggaggcccagagacccagaagcatgaccgtgagcgccgccaccagacccggcgaggagatggaggcctgcgaggagctggccctggccctgagcagaggcctgcagctggacacccagagaagcagcagagacagcctgcagtgcagcagcggctacagcacccagaccaccaccccctgctgcagcgaggacaccatccccagccaggtgagcgactacgactacttcagcgtgagcggcgaccaggaggccgaccagcaggagttcgacaagagcagcaccatccccagaaacagcgacatcagccagagctacagaagaatgttccaggccaagagacccgccagcaccgccggcctgcccaccaccctgggccccgccatggtgacccccggcgtggccaccatcagaagaacccccagcaccaagcccagcgtgagaagaggcaccatcggcgccggccccatccccatcaagacccccgtgatccccgtgaagacccccaccgtgcccgacctgcccggcgtgctgcccgccccccccgacggccccgaggagagaggcgagcacagccccgagagccccagcgtgggcgagggcccccagggcgtgaccagcatgcccagcagcatgtggagcggccaggccagcgtgaacccccccctgcccggccccaagcccagcatccccgaggagcacagacaggccatccccgagagcgaggccgaggaccaggagagagagccccccagcgccaccgtgagccccggccagatccccgagagcgaccccgccgacctgagccccagagacaccccccagggcgaggacatgctgaacgccatcagaagaggcgtgaagctgaagaagaccaccaccaacgacagaagcgcccccagattcagctag

SEQ ID NO: 308548 - DNA, 1422 bp, Artificial Sequence
  derived and/or modified sequence
atgttaagaccagtgatagaggaagagatcagtatgcttggtgagataacacacctgcagacaatcagtgaggacttgaaatctctgacaatggacccccataaattgccatcaagttcagagcaggtgatcctcgatctgaagggctccgactactcatggtcgtatcaaacgccgccgtcatccccatctaccaccatgagccgtaaatctagtgtgtgtagcagcctgaacagtgtgaatagttccgacagcagatccagtggatcccattcccacagccccagcagtcattatagatatagaagtagcaaccttgcccagcaggcacctgtccggctttcttccgtttcatcacacgattcgggcttcatctcccaggatgctttccagtccaaatcaccctcacccatgcctcccgaggcgccaaaccaacggcggaaggagaagcgcgagcccgaccctaatggaggcggccccacaacagcctccggtcctccagcagcagccgaggaagcccagagaccccgcagtatgacagttagtgctgccacgaggcctggtgaggagatggaagcctgtgaagagttggcacttgccctgtctcgggggctacagctggacacacaaaggtcaagcagggactccctacagtgcagtagcggctacagcacccaaactacgacaccttgttgcagcgaagatacgatacccagccaggtctccgattacgattacttttctgtatcaggagaccaggaggcggatcagcaagaatttgacaagagctctacgattccaaggaatagcgatatttcccaatcgtaccggcgaatgtttcaggccaaacgccctgcatctacggccggactccccacaaccctggggcccgcgatggttaccccaggcgttgcgacaataagaagaacaccgtctaccaaaccgagcgttcgtcggggcaccatcggagccggtcccattccgatcaaaaccccagtgatcccggtgaagacacctacagtccccgatctgccaggagtgctgcccgctccccccgatgggcctgaggagcggggagagcatagcccagaaagcccctcagtgggggagggacctcagggggtgacttccatgccatccagcatgtggagtgggcaggcaagtgtcaaccctccactcccaggtcctaaacccagcattccggaggagcatcgacaagccattcccgagagtgaggcagaggatcaagaaagagagccaccctctgcaaccgtgtcccccggacagatcccagaaagcgatccagcagatctgtcccctagggacaccccccagggggaagacatgctgaatgctatcagacgcggggtaaagctcaaaaaaacgaccactaacgatagatcagcaccgcgcttcagctag

SEQ ID NO: 308549 - DNA, 1422 bp, Artificial Sequence
  derived and/or modified sequence
atgctgcggcctgtgattgaggaggagatctccatgctgggggagatcacccacctgcagaccatcagcgaggacctgaagagcctgaccatggacccccacaagctgcccagcagcagcgagcaggtgatcctggacctgaagggcagtgactacagctggagctaccagaccccacccagcagccccagcaccaccatgagcaggaagagctctgtgtgcagcagcctgaacagcgtgaacagcagtgacagccgcagcagcggcagccacagccacagccccagcagccactaccgctaccgcagcagcaacctggcccagcaggcccctgtgcggctgagctctgtgagcagccatgacagcggcttcatcagccaggatgccttccagagcaagagccccagccccatgcctcctgaggcccccaaccagaggaggaaggagaagcgggagccagaccccaacggcggcggccccaccacagccagcggccccccagctgctgctgaggaggcccagaggcccaggtccatgacagtgtctgctgccaccaggcctggagaggagatggaggcctgtgaggagctggccctggccctgagccggggcctgcagctggacacccagaggagcagccgggacagcctgcagtgcagcagcggctacagcacccagaccaccaccccctgctgcagcgaggacaccatccccagccaggtgtctgactatgactacttctctgtgtctggggaccaggaggccgaccagcaggagtttgacaagagcagcaccatccccaggaacagcgacatcagccagagctacagaaggatgttccaggccaagaggcctgccagcacagctggcctgcccaccaccctgggccctgccatggtgaccccaggagtggccaccatccggaggacccccagcaccaagcccagcgtgcggcggggcaccatcggggccggccccatccccatcaagacccctgtgattcctgtgaagacccccaccgtgcctgacctgcccggggtgctgcctgcccccccagatggccctgaggagcggggggagcacagccctgagagccccagcgtgggggagggcccccagggcgtgacctccatgcccagctccatgtggagcggccaggcctctgtgaacccccccctgcccggccccaagcccagcatccctgaggagcaccggcaggccatccctgagagcgaggccgaggaccaggagcgggagccccccagcgccaccgtgtccccaggccagatccctgagagtgaccctgctgacctgagcccccgggacaccccccagggcgaggacatgctgaatgccatccggcggggcgtgaagctgaagaagaccaccaccaatgacagaagtgccccccgcttctcctag

SEQ ID NO: 308550 - DNA, 1422 bp, Artificial Sequence
  derived and/or modified sequence
atgctgcggcccgtgatcgaggaggagatcagcatgctgggcgagattacacatttgcaaacaatatcagaggatctcaaatcattaacaatggacccacataaattaccatcaagctcagagcaggtgatactggatctgaaaggtagcgattattcctggtcttatcagaccccaccttccagcccgtcaactacaatgtcgagaaagtcttccgtgtgttccagtctgaactccgtgaatagcagtgattcccggtcctctggatcccactctcactcccctagctcccactatcggtatcgcagctccaatttggcacagcaggcaccagtcaggctctcaagcgtttcttcgcacgactctggtttcatcagtcaagacgcattccagtctaagagcccgagcccaatgcctcccgaggcgccaaatcagagacgtaaagaaaagagggaacctgatccaaatggtggcgggcccacaaccgcatctggccccccggccgccgccgaggaagctcagaggcctcgttcgatgactgtgtctgccgctactcggcctggggaggagatggaagcctgtgaagagctggctcttgctctcagtcggggcctccaactagacacccagaggagttcaagggacagccttcagtgctcctcagggtactcaacgcaaactaccaccccttgttgcagcgaagatacaattccttcacaggtgagcgattacgattattttagcgtgagtggagaccaggaagccgatcagcaggagttcgacaagtcaagcacaattcccagaaactctgacatctcgcagtcctaccgccgaatgttccaagccaagaggccggcttccaccgcggggctgcccactacactgggccctgcgatggttacacctggcgttgctaccatcaggagaacacccagcactaaaccaagcgttcggagaggtactattggcgcaggcccaatccccatcaaaacacctgtcattcctgtcaagaccccgacagtcccagacctaccaggcgtccttcccgcacctcccgatggtccagaagagcgtggagaacacagtcccgagtctccatctgtcggcgaaggaccacagggcgtgacctcaatgccctcaagtatgtggagtgggcaggcttccgtaaaccctcccttacccgggccaaagccatcaatccctgaagaacataggcaagccatacctgaatccgaggcagaggatcaggaacgggagcccccctctgcaaccgtatctccgggacagatcccggagagcgatcccgcagacctcagtccacgggacacccctcaaggagaggacatgctgaatgccattagaagaggcgtgaagctgaaaaagaccaccaccaacgaccgtagtgctcctaggttctcctag

SEQ ID NO: 308551 - DNA, 1422 bp, Artificial Sequence
  derived and/or modified sequence
atgcttcggcctgtgatagaggaagaaatttcgatgctcggggagatcactcatcttcaaacaatctcggaggaccttaaatctttaacaatggacccacacaaacttccatccagctctgagcaggttattctggatttgaaagggtcggactatagctggagctatcagacacctccaagttcgcccagcacaacaatgtcccgaaagtccagtgtttgcagctccctgaattctgtcaatagcagcgactcaagatcttcaggatcccactctcattcacccagttcccattatagataccggagtagtaacttagcacagcaggcaccggtcagactctcaagcgtttcctcccatgactctggcttcattagccaggacgcatttcagtccaaatctccatcccctatgccacccgaggcccctaatcagaggcgaaaggagaagagggagccagatccaaacgggggtggcccaacaacggcctccggaccacctgccgcagctgaggaggcccaacgcccacgttctatgacagtgtccgccgcaacgcgtcctggcgaagagatggaggcatgcgaggaactggcgctggctctctcaagagggctgcagttggacactcagcggagttcacgggattccctccagtgtagctcgggatacagtacccagaccacaacaccttgttgtagcgaggacacaatccctagtcaggtgagcgattatgactacttctccgtatctggcgaccaagaagcggaccaacaagagttcgataaaagctctacaattccgcgtaattccgatatctcacagtcctaccggcgtatgttccaagctaaacgcccagcgtcaactgccggactgcccacaactctgggtccagccatggtgacaccgggagtcgcaaccatcaggcgtactccatcgacaaagccatctgtgagacgcggaacaataggggcaggcccaatcccaatcaagacgcccgtaattccggtgaagacaccgacggtgcctgatctgcccggagtcctgccagcacctccagacggcccagaggagcggggtgagcatagcccagaaagcccatccgtcggtgagggtccccagggagttacctctatgccttcttccatgtggagcgggcaggcatcagtgaacccaccacttcctggacctaagccatctatccctgaggaacacaggcaggccatccctgaatctgaggcagaggaccaggaacgtgaacccccaagcgccaccgttagtcctggccagatccccgagtccgatcctgctgatctttctccaagagacactccacaaggcgaagacatgctcaatgccattagacgaggggtcaaactcaagaaaaccacaactaacgatcgcagtgcacctcgattctcttag

SEQ ID NO: 308552 - DNA, 438 bp, Artificial Sequence
  derived and/or modified sequence
agagcaagcaatagaatagaagcaggaagaattttcgagtgttccaccatgctggattgtcaaagggggatctgtctgatcagcagctaaaaaaggatttgtgtggctagtttgtcagctatcgttagaaacaaatgatagaggagataagcggcggggtgctcagcatgtgcttaggtttacatcaagatgtaatgttggtttgggttaacagaggagatttatctctgaggcaataaatttattgctaattgtgggggtttttgttttgatgagtgatgtatggtatttgtatttacatcactggtgaagataaagagaagctgctgagctctaatatgaactgcagaagctgtggacagttacaagttgctgatatgtgttcaagatgagtgggatgggagaaaatacctctgacccctccagggcagagacaag

SEQ ID NO: 308553 - protein, 201 aa, Artificial Sequence
  derived and/or modified sequence
MENGFTMCQTGRQHPVACGLHLSGGKEDLNDLRMEGVTTLVPSGSKFNQGRPTYPAEPQAKVTLNICSRCARLQGDNLEERTEESLPILHSPDEKIPDSFDSLPGTEEALMEEGDEFEKASKLTGPGEASSGVGHSLKNYMEEDESLKQLQVVHQPWILPSDTESEGVEAEQEKHLLNQNLCGWDSEFCIFHTLASFLIYK

SEQ ID NO: 308554 - protein, 129 aa, Artificial Sequence
  derived and/or modified sequence
MASHPQTRIQAYLEKNKIGPLFEELMTKLITETPDQPIPFLIDHLQSKQGNRGQLQRTLSGSAALWAESEKSESKGTRRDFRSYDKPWQLNAKKPKKSKSDLAVSNISPPSPDSKSCKEVSYSNAIQSM

SEQ ID NO: 308555 - DNA, 606 bp, Artificial Sequence
  derived and/or modified sequence
atggagaacggcttcaccatgtgccagaccggcagacagcaccccgtggcctgcggcctgcacctgagcggcggcaaggaggacctgaacgacctgagaatggagggcgtgaccaccctggtgcccagcggcagcaagttcaaccagggcagacccacctaccccgccgagccccaggccaaggtgaccctgaacatctgcagcagatgcgccagactgcagggcgacaacctggaggagagaaccgaggagagcctgcccatcctgcacagccccgacgagaagatccccgacagcttcgacagcctgcccggcaccgaggaggccctgatggaggagggcgacgagttcgagaaggccagcaagctgaccggccccggcgaggccagcagcggcgtgggccacagcctgaagaactacatggaggaggacgagagcctgaagcagctgcaggtggtgcaccagccctggatcctgcccagcgacaccgagagcgagggcgtggaggccgagcaggagaagcacctgctgaaccagaacctgtgcggctgggacagcgagttctgcatcttccacaccctggccagcttcctgatctacaagtag

SEQ ID NO: 308556 - DNA, 390 bp, Artificial Sequence
  derived and/or modified sequence
atggccagccacccccagaccagaatccaggcctacctggagaagaacaagatcggccccctgttcgaggagctgatgaccaagctgatcaccgagacccccgaccagcccatccccttcctgatcgaccacctgcagagcaagcagggcaacagaggccagctgcagagaaccctgagcggcagcgccgccctgtgggccgagagcgagaagagcgagagcaagggcaccagaagagacttcagaagctacgacaagccctggcagctgaacgccaagaagcccaagaagagcaagagcgacctggccgtgagcaacatcagcccccccagccccgacagcaagagctgcaaggaggtgagctacagcaacgccatccagagcatgtag

SEQ ID NO: 308557 - DNA, 2281 bp, Artificial Sequence
  derived and/or modified sequence
aagaaaatgaaacagaattgaaaatggtcttgtaaaattccacttggggtggcgatgctttgtggcttgaagtgtaagggatgagaacagcatgtgaattccaagaaagcaacacagaatggaaaatggatttacaatgtgtcagacagggaggcaacatcctgtggcatgtggcttgcatctcagcggtgggaaagaggatcttaatgatttaagaatggagggagtaacaaccctggtaccttctgggagcaaatttaaccaaggccgtcctacttaccctgctgagcctcaggccaaggtcacactgaacatctgttcaaggtgtgccaggcttcaaggagacaacctggaagaaaggacagaagagtcactaccaatactccattctccagatgaaaaaatcccagattcattcgattccttgcctgggactgaagaagcactaatggaggagggtgacgaatttgagaaagcatctaaactaacaggacctggagaagcctccagtggagtaggacactcactgaaaaactacatggaagaagatgaatccttaaagcaattgcaggtagttcatcaaccatggatcttgccaagtgacacagaaagtgaaggagtggaagcagaacaagagaaacacctactaaatcagaatctctgtggctgggactctgaattctgcatttttcatactttggcttctttcctcatctataaataagtttgaatataaaatgtgagtctggagaaaaaggaaggctaaaatttgaagaaatatacatggagaagacatgcaagacagtgtattagtcggttttcacactgctataaagaactgcctgagactgggtaattgtaaagaaaaaaggtttaattgactcacagttccccatgtctggggaggcctcaggaaacttacagtcatggcagaaggaaaaggagaagcaagcactttcttctaaggagagagagagagcagtgaaagccacacatttttaaaccatcagctctcgtgagaactcattatcaagagaacaacaagggggatatctgcccccatgatccaactacctcccaccaggcccctcttctgacacatggggattacaatttgacatgagatttgggtggggacactgagccaaataatatcagacaggtcctccagactgtgggttcaatgcttacaaaatcaaaacacaaaacatttagaatcaatttagccagtaccctctaattacattttagatttttaaaaacacaaataaataagctaaaaacacacaagcaaacaaacaaccaaaccaaaccaaaccaacaaaacaacacaaatgtcccaaataaagaaataatagccaaagtcacagatgaaagctaatgctgtcataaaacattaagacttccccacttgggtttgggtcctagttcttcctgaggtcttaatgtctgtaacaataggtaatttggccctgggtctccttaaggcagggagattgagatgatgacacggtatagagcctgtcacctgcaaggactgactcaggtataaaaagggaaataaaatacctgtactctctaactgtggaacaagccatgaaatttgctattggtattagactttgaacgaaaaatgtaaagatacacatagggaatcaaactctcagctctgtactttggttattcggttcaaacttaaactatctgtattgtcagaaaccccacattataataacaattggccagcttcattaaaattcacagggtcctctcatgtgtaaatgtaagaactggggcatttagaactcccaaagatttaaatatcaactcctgctgaagacgagctctcaatcaaattacaagctgcctgaaaagttatagtaaaacaacagagtcagcaaatgctaaaaacactagaattagaatgatgagaaaggaaagaaataagacaatcagaaagagaccatattaaaagtatgcttaagatatttaaagatatagatcaggcgcaatggctcacgtctgtaatcccagcactttcggaggccaaggcgggcagatcacgaggtcaggagatcgagaccatcctggctaacacggtgaaacgccgtctctactaaaaatacaaaaaattagtcgggcgtggtggcacacgcctgtaatcccagctactcgggaggctgaggcaggagaatcgtttgaacccgggaggtggaggttgcagtgagccgagatcacaccactgcactccagcctgggtgacagagtgagactccatctc

SEQ ID NO: 308558 - DNA, 1948 bp, Artificial Sequence
  derived and/or modified sequence
acagccgcgcgttctccctgcactctcttcgcggtcccatctgttccccatggcgtctcatccgcaaacccggatccaggcttacctggagaagaacaagatcggtcccctgtttgaggaattaatgaccaagttaataactgagacacctgaccagccaatcccatttctcattgaccatcttcagtctaaacaagggaaccgtggacaacttcaaagaactttgtctggatctgcagctctatgggcagaaagtgaaaaatcagaatccaaaggaacaagaagggatttcagaagctatgataaaccttggcaattaaatgcaaagaagcctaaaaaatcaaaaagtgaccttgctgtgtctaatatttctccaccatcaccggactccaaatcatgtaaggaagtctcttattcaaatgctattcaaagcatgtaagtttatgttgttaagaaaatgaagaaaaggtattaattgaagcccaacttttcatctgatatttctggcctttaatcttagtgaatttcacttttactccgcatttacattgatcttcattcatacgtatgtatttgcttgcttatattctcaaacatgtgtaattcacttggacccttttgagtataatattccttgaagaatataaactgcatggagcgggtctcttgtttctcatagccaattgtagcattacatcatattgaaagcagtagctacctatatttaatgaagtatgtaaaagcaaattaaatctcttagaatagaagcaaagaagatttctattcaaaacatttcataaaatttcttaaaaaatatttcatctgggattttcctgaagtcctactcattaatttgtgatggaagtccctatattctcttcactactactgtaatatctttgtttttatgttactacaaaggaatgactgaggttgggtattttataaagaaaaaaggtttatttggcttacggttctgcagactgtacaagaagcatgacactagcatctgcttcttgtgagagccgcaggaagcttccactcatggcagaaggtgaaggggtgcacgcatcatatggcgagaggaaggagaaagagatagcagagggaggtgccaggctctttttaacagtcagatcttgtaagaaccaacagagtgagaagtcactccttaccatgaggacagcaccaagccactcatgagggattgacccccataacccaaataccttccaccaggccccacctccgatattggtgatcaaatttaccatgtgatttggagaggacaaatatccaagctataccacctaagtatcccttctctctcaatggcctactgctttggtagctactgggattctccagtgctctgctatccccacatatgtataaacatgtcaaaaatctcaggagcctctagcaaatcacagctattcttggaagaaaagagaacttgcaagctgttcttcttatacatcaattccttgtgcttgttacagggtgagatgtttgattttagtttcaacagagaaaggagtaggcagaaaatatttatctttgtttgaaaatgtttgaaaaaccactatgtgctaactggaatctgcatctgggtcatttgtgaaagcaactaaatttaactttgtgagcagcttcatttacatagtggtactcataaaaagtattgcattaaccacaccaagttcttgtgagaattatatgaagtgttaacaacttaaaatgttcttcagaaattgtgattgtaaccaaattgtcctgcttcatcagtttggtatatagaattaggtcccaacattttaaaaaatatacaagtttaaaatttgcatgtcttttttacaacagtatagccagtaatatccagcacagtgcctgtttcaattaataaatgctaaatgataaaaatgaataaaggaagaaataaaaaatg

SEQ ID NO: 308559 - DNA, 606 bp, Artificial Sequence
  derived and/or modified sequence
atggagaacggcttcactatgtgtcagaccggacgccagcatcccgtcgcatgtggtctacacttgtccggaggaaaggaggacctaaacgatctgcgcatggaaggagtgaccacactggttcctagcggaagcaagtttaatcaagggcggccgacatatcccgctgagccccaagcaaaggtcaccttgaacatatgttctaggtgcgcccggctccagggagacaacctggaagagcggacggaggaatcgcttccaattctgcacagcccagatgagaaaatcccagattccttcgactcactgccgggaacggaagaggctctgatggaagaaggtgatgagtttgagaaggcctcaaagctgacggggcccggtgaggctagcagcggggtcggacacagtctaaaaaactacatggaggaggacgagtccctcaagcagctgcaggtggtgcatcagccatggatcctcccatcagacaccgagtctgaaggcgtggaggccgagcaggagaaacatctgttgaatcaaaatttatgtggttgggatagcgaattctgcatattccatactcttgcttccttcttaatctataaatag

SEQ ID NO: 308560 - DNA, 390 bp, Artificial Sequence
  derived and/or modified sequence
atggcctctcaccctcagacccgcatccaagcatatctggaaaagaacaaaatcggccccctgttcgaggagctcatgacaaaattaatcactgaaacaccagatcaaccaatcccgttcctgatcgatcatctccagtccaagcagggcaaccggggacagctacaacggaccctgagtggctcggcagccttatgggcagagagtgagaagtccgagtcgaagggaacaaggagagattttaggtcttatgacaagccgtggcagctaaatgccaagaagcctaaaaagtccaagtccgatctcgcggtgtcaaatatttccccgccttcccccgactctaaatcgtgcaaggaagtttcttatagcaatgctattcagagtatgtag

SEQ ID NO: 308561 - DNA, 606 bp, Artificial Sequence
  derived and/or modified sequence
atggagaatggcttcaccatgtgccagacaggccggcagcaccctgtggcctgtggcctgcacctgagcggcggcaaggaggacctgaatgacctgaggatggagggcgtgaccaccctggtgcccagcggcagcaagttcaaccagggccggcccacctacccagctgagccccaggccaaggtgaccctgaacatctgcagccgctgtgcccggctgcagggcgacaacctggaggagaggacagaggagagcctgcccatcctgcacagcccagatgagaagatcccagacagctttgacagcctgcccggcacagaggaggccctgatggaggagggagatgaatttgagaaggccagcaagctgaccggccctggagaggccagcagtggagtgggccacagcctgaagaactacatggaggaggatgagagcctgaagcagctgcaggtggtgcaccagccctggatcctgcccagcgacacagaaagtgaaggagtggaggccgagcaggagaagcacctgctgaaccagaacctgtgtggctgggacagcgagttctgcatcttccacaccctggccagcttcctgatctacaagtag

SEQ ID NO: 308562 - DNA, 390 bp, Artificial Sequence
  derived and/or modified sequence
atggccagccacccccagacccgcatccaggcctacctggagaagaacaagattggccccctgtttgaggagctgatgaccaagctgatcacagagaccccagaccagcccatccccttcctgattgaccacctgcagagcaagcagggcaacagaggccagctgcagaggaccctgagcggcagcgctgccctgtgggccgagagcgagaagtctgagagcaagggcacccggcgggacttccgctcctatgacaagccctggcagctgaatgccaagaagcccaagaagagcaagagtgacctggccgtgagcaacatcagcccccccagcccagacagcaagagctgcaaggaggtgtcctacagcaatgccatccagagcatgtag

SEQ ID NO: 308563 - DNA, 606 bp, Artificial Sequence
  derived and/or modified sequence
atggagaacggcttcaccatgtgccagaccggccggcagcaccccgtcgcctgcgggctgcaccttagcggaggcaaggaggaccttaacgacctaaggatggagggggtgactacactcgttccatcggggtctaaatttaatcagggcagaccaacatacccagcagagccgcaggccaaagtgaccctgaacatttgttctcggtgtgcacgactgcagggggacaacctagaggagcgtactgaggaaagcctcccaatcctgcattctcccgatgaaaagatccccgattctttcgactccctgcctggtacagaggaggccctgatggaggagggcgatgagttcgaaaaggccagcaagttaacaggaccgggggaagcaagcagcggagtggggcactcactgaaaaactatatggaggaggatgagtcattaaagcagcttcaggttgtacatcaaccttggatcctgccatccgacacggagtcagaaggcgtggaagcggagcaggagaagcacttattgaaccaaaatctgtgcggatgggatagcgaattttgcatctttcacaccctcgccagcttcctgatttataaatag

SEQ ID NO: 308564 - DNA, 390 bp, Artificial Sequence
  derived and/or modified sequence
atggccagccacccccagacccggatccaggcctacctggagaagaataaaattggacccctgttcgaggagctgatgaccaaactgatcactgagacgcccgatcagccaatcccttttttgatcgaccacctccaaagtaagcaaggaaatcgcggtcagttgcagaggactctaagtggatcagccgctctgtgggccgagtccgaaaagtctgaaagcaaaggaactcggcgggactttcgatcctatgacaagccctggcagttgaacgctaaaaaaccaaagaagagcaagtctgacttagccgtgagtaatatttcgcctccctctccagactccaaatcctgtaaggaagtatcctactcaaatgctattcaaagtatgtag

SEQ ID NO: 308565 - DNA, 606 bp, Artificial Sequence
  derived and/or modified sequence
atggaaaacgggtttaccatgtgccaaactggcagacagcaccctgttgcatgcggtctgcatctgagcggaggcaaggaggacctcaatgatctccgaatggagggagtgaccaccttggtaccgtctggttcaaaattcaatcagggaagacccacctaccctgccgaaccccaggctaaggtaacgctgaatatttgctctaggtgtgccagactccagggcgataatctcgaggagagaacagaggaatctctgcccatactgcactctcccgatgaaaaaataccagattctttcgattctcttccaggtacggaggaggctcttatggaggagggggacgagtttgaaaaagcgagcaaactgaccggcccaggggaagctagttccggcgtgggacatagcctcaaaaactatatggaggaggatgagagtttgaaacagctacaggtagtccaccagccctggattttgcccagcgacactgaaagtgaaggggtggaggccgagcaggagaaacatctgctgaatcagaatctgtgtggatgggattccgaattctgtattttccacactcttgccagctttctgatctataagtag

SEQ ID NO: 308566 - DNA, 390 bp, Artificial Sequence
  derived and/or modified sequence
atggccagccatcctcaaaccagaatccaagcttacctcgagaagaacaaaataggtcccctctttgaagaactgatgacaaaactcattacagaaactccggatcagccaatcccgttcctaatcgatcacttgcaatcaaaacaggggaatagaggacagctgcaacgaactctgagcggctcagcagcactttgggctgagtcagaaaaatctgagtccaaagggaccagaagagactttcgctcatacgacaagccctggcagttgaatgctaagaaaccaaagaaatcgaaatccgatttggccgtatcgaatattagccccccttcgcctgattcaaaatcctgtaaggaagtgagctactctaacgcaattcagtctatgtag

SEQ ID NO: 308567 - DNA, 258 bp, Artificial Sequence
  derived and/or modified sequence
atgaccggcaagacccagaccagcaacgtgaccaacaagaacgaccccaagagcatcaacagcagagtgttcatcggcaacctgaacaccgccatcgtgaagaaggtggacatcgaggccatcttcagcaagtacggcaagatcgtgggctgcagcgtgcacaagggctacgccttcgtgcagtacatgagcgagagacacgccagagccgccgtggccggcgagaacgccagagtgatcgccggccagcccctgtag

SEQ ID NO: 308568 - DNA, 258 bp, Artificial Sequence
  derived and/or modified sequence
atgaccgggaaaactcagactagcaacgtaactaataagaacgatccgaaatcgattaacagccgggtcttcattggaaatttgaacaccgcaatcgtgaagaaggtggatatagaagctatcttttcaaagtatggtaagattgttggatgctctgtgcataagggctatgcattcgtgcaatatatgagcgagcggcacgctcgggccgcagtcgccggtgagaatgctcgggtcatcgccggccagcccctgtag

SEQ ID NO: 308569 - DNA, 258 bp, Artificial Sequence
  derived and/or modified sequence
atgaccggaaagacccagacctctaacgtcaccaataaaaatgatccaaaaagtattaattcccgcgtcttcattggcaatctgaacacagcaattgtgaaaaaggtggacatcgaagccatcttttcaaagtacggaaagattgtggggtgcagcgtccataagggatacgcgttcgtgcaatacatgagcgagcggcacgcacgggctgctgtggccggcgagaatgcccgggtcatcgctggacaacctttatag

SEQ ID NO: 308570 - DNA, 258 bp, Artificial Sequence
  derived and/or modified sequence
atgaccgggaagacccagaccagcaatgtgaccaacaagaatgaccccaagagcatcaacagcagggtcttcatcggcaacctgaacacagccatcgtgaagaaggtggacatcgaggccatcttcagcaaatatggcaagatcgtgggctgcagcgtgcacaagggctacgcctttgtgcagtacatgtctgaaagacatgcccgggctgctgtggccggagaaaatgcccgggtgattgctggccagcccctgtag

SEQ ID NO: 308571 - DNA, 258 bp, Artificial Sequence
  derived and/or modified sequence
atgaccggcaagacccagaccagcaacgtgaccaacaagaacgaccctaagagcatcaattcccgcgtcttcatcggcaacctgaacaccgccatcgtcaaaaaggtcgatatcgaagccatcttctccaagtacggaaagatcgtgggttgttcggtgcataagggttacgcatttgttcagtacatgagcgagagacatgctcgagctgccgtggccggtgaaaatgctcgagtcatcgctggacagcccctgtag

SEQ ID NO: 308572 - DNA, 258 bp, Artificial Sequence
  derived and/or modified sequence
atgaccggcaagacccagaccagcaacgtgaccaacaagaacgacccgaaatctatcaacagtcgcgtcttcattggcaacttgaacacagccattgtgaagaaagtcgacatcgaggctatttttagcaagtacggtaaaattgtcggctgctctgtgcataagggatacgccttcgtccagtacatgtctgagcgccatgctcgtgccgctgtggccggagagaatgcccgcgtgatcgctgggcagccgctctag

SEQ ID NO: 308573 - DNA, 258 bp, Artificial Sequence
  derived and/or modified sequence
atgacagggaagactcagacatctaatgtgaccaataaaaatgatcccaagtccatcaattcccgcgtgttcatcggaaatctgaatacagctatcgtgaagaaggttgacatcgaagccatcttctctaagtatgggaagatcgttgggtgttccgttcacaagggttacgcctttgtccagtacatgtccgagcgccacgcccgtgctgcggttgccggagaaaatgctagggtcattgctggccagcccctgtag

SEQ ID NO: 308574 - DNA, 258 bp, Artificial Sequence
  derived and/or modified sequence
atgacagggaagacacagactagtaatgtcaccaataagaacgatcctaagtcaatcaattctagagtgttcattggcaaccttaatacagctatcgtcaagaaggtcgatatcgaagctattttcagcaaatacggtaaaatcgttggatgcagcgttcataagggttatgccttcgttcagtatatgtctgaacgtcacgctcgcgctgccgtggcaggcgaaaacgctcgtgtaattgccggacagccactgtag

SEQ ID NO: 308575 - protein, 79 aa, Artificial Sequence
  derived and/or modified sequence
MGPVSLLPKYQKLNTWNGDLAKMTHLQAGLSPETIEKARLELNENPDVLHQDIQQVRDMIITRPDIGFLRTDDAFILRF

SEQ ID NO: 308576 - protein, 172 aa, Artificial Sequence
  derived and/or modified sequence
MKYSCCALVLAVLGTELLGSLCSTVRSPRFRGRIQQERKNIRPNIILVLTDDQDVELGSLQVMNKTRKIMEHGGATFINAFVTTPMCCPSRSSMLTGKYVHNHNVYTNNENCSSPSWQAMHEPRTFAVYLNNTGYRTAFFGKYLNEYNGSYIPPGWREWLGLIKNSRFYNYT

SEQ ID NO: 308577 - protein, 76 aa, Artificial Sequence
  derived and/or modified sequence
MKYSCCALVLAVLGTELLGSLCSTVRSPRFRGRIQQERKNIRPNIILVLTDDQDVELGSLQVMNKTRKIMEHGGAT

SEQ ID NO: 308578 - protein, 85 aa, Artificial Sequence
  derived and/or modified sequence
MKYSCCALVLAVLGTELLGSLCSTVRSPRFRGRIQQERKNIRPNIILVLTDDQDVELGSLQVMNKTRKIMEHGGATFINAFVTTP

SEQ ID NO: 308579 - protein, 56 aa, Artificial Sequence
  derived and/or modified sequence
MKYSCCALVLAVLGTELLGSLCSTVRSPRFRGRIQQERKNIRPNIILVLTDDQDVE

SEQ ID NO: 308580 - DNA, 90 bp, Artificial Sequence
  derived and/or modified sequence
atgaagtacagctgctgcgccctggtgctggccgtgctgggcaccgagctgctgggcagcctgtgcagcaccgtgagaagccccagatag

SEQ ID NO: 308581 - DNA, 171 bp, Artificial Sequence
  derived and/or modified sequence
atgaagtacagctgctgcgccctggtgctggccgtgctgggcaccgagctgctgggcagcctgtgcagcaccgtgagaagccccagattcagaggcagaatccagcaggagagaaagaacatcagacccaacatcatcctggtgctgaccgacgaccaggacgtggagtag

SEQ ID NO: 308582 - DNA, 90 bp, Artificial Sequence
  derived and/or modified sequence
atgaaatactcttgctgcgctctagtgctggcggttctgggtaccgaactcctgggttccctgtgttcaaccgtgagatcacctagatag

SEQ ID NO: 308583 - DNA, 171 bp, Artificial Sequence
  derived and/or modified sequence
atgaagtacagctgctgtgcccttgtgctggcagttctcggcaccgaactgctgggatcattatgcagtactgtaagaagtccaaggttccgggggaggattcagcaggagcgaaaaaacatccggccaaatatcatcctggtgctcaccgacgatcaggatgtagagtag

SEQ ID NO: 308584 - DNA, 90 bp, Artificial Sequence
  derived and/or modified sequence
atgaagtacagctgctgtgccctggtgctggccgtgctgggcacagagctgctgggcagcctgtgcagcacagtgcgcagccccaggtag

SEQ ID NO: 308585 - DNA, 171 bp, Artificial Sequence
  derived and/or modified sequence
atgaagtacagctgctgtgccctggtgctggccgtgctgggcacagagctgctgggcagcctgtgcagcacagtgcgcagcccccgcttccggggccgcatccagcaggagaggaagaacatccggcccaacatcatcctggtgctgacagatgaccaggatgtggagtag

SEQ ID NO: 308586 - DNA, 90 bp, Artificial Sequence
  derived and/or modified sequence
atgaagtacagctgctgcgccctggtgctggccgtgctgggcaccgaactgctgggatccctgtgctctacagtgaggagtccccgatag

SEQ ID NO: 308587 - DNA, 171 bp, Artificial Sequence
  derived and/or modified sequence
atgaagtacagctgctgcgccctggtgctggccgtgctgggcaccgagctacttggttctctttgcagtacagtgcggtcacctagatttcgaggcagaatccagcaggagcgcaagaacattaggcccaacattatcctggtcctgaccgatgatcaggacgtggaatag

SEQ ID NO: 308588 - DNA, 90 bp, Artificial Sequence
  derived and/or modified sequence
atgaagtacagctgttgtgctttggttctggccgtcctagggacagaactgttggggtcactctgcagtacagttcgttctcccagatag

SEQ ID NO: 308589 - DNA, 171 bp, Artificial Sequence
  derived and/or modified sequence
atgaagtactcttgctgcgccttggtcctcgctgtcttggggacagagctgctgggcagcctctgcagtacggtcagatcacccaggttccgtgggagaatccagcaggagcgcaaaaacatccgaccgaatatcatcctggttctgaccgatgaccaggacgtggaatag

SEQ ID NO: 308590 - DNA, 519 bp, Artificial Sequence
  derived and/or modified sequence
atgaagtacagctgctgcgccctggtgctggccgtgctgggcaccgagctgctgggcagcctgtgcagcaccgtgagaagccccagattcagaggcagaatccagcaggagagaaagaacatcagacccaacatcatcctggtgctgaccgacgaccaggacgtggagctgggcagcctgcaggtgatgaacaagaccagaaagatcatggagcacggcggcgccaccttcatcaacgccttcgtgaccacccccatgtgctgccccagcagaagcagcatgctgaccggcaagtacgtgcacaaccacaacgtgtacaccaacaacgagaactgcagcagccccagctggcaggccatgcacgagcccagaaccttcgccgtgtacctgaacaacaccggctacagaaccgccttcttcggcaagtacctgaacgagtacaacggcagctacatcccccccggctggagagagtggctgggcctgatcaagaacagcagattctacaactacacctag

SEQ ID NO: 308591 - DNA, 231 bp, Artificial Sequence
  derived and/or modified sequence
atgaagtacagctgctgcgccctggtgctggccgtgctgggcaccgagctgctgggcagcctgtgcagcaccgtgagaagccccagattcagaggcagaatccagcaggagagaaagaacatcagacccaacatcatcctggtgctgaccgacgaccaggacgtggagctgggcagcctgcaggtgatgaacaagaccagaaagatcatggagcacggcggcgccacctag

SEQ ID NO: 308592 - DNA, 258 bp, Artificial Sequence
  derived and/or modified sequence
atgaagtacagctgctgcgccctggtgctggccgtgctgggcaccgagctgctgggcagcctgtgcagcaccgtgagaagccccagattcagaggcagaatccagcaggagagaaagaacatcagacccaacatcatcctggtgctgaccgacgaccaggacgtggagctgggcagcctgcaggtgatgaacaagaccagaaagatcatggagcacggcggcgccaccttcatcaacgccttcgtgaccaccccctag

SEQ ID NO: 308593 - DNA, 519 bp, Artificial Sequence
  derived and/or modified sequence
atgaagtacagttgctgtgcactggtgctggctgtgttgggaacagaactcctaggcagcctctgttctactgtccgtagtccacgtttcagaggtagaatccagcaggagcgcaaaaatattcgccctaacatcattttagtcttaactgacgatcaggatgtggaactggggtctctccaggtgatgaataaaacccggaaaatcatggagcacggcggcgccacgtttatcaatgcatttgtaacgacaccaatgtgttgtcctagccgcagctctatgctgaccgggaagtacgtacataatcacaacgtttatactaacaacgaaaattgcagctctccttcatggcaagcaatgcatgagccccgaacctttgcagtgtatttgaacaataccggctaccggacagcctttttcggaaaatatctgaacgagtacaatggaagctatatccctcccggctggcgcgagtggttggggttgattaagaatagtaggttttacaactacacctag

SEQ ID NO: 308594 - DNA, 231 bp, Artificial Sequence
  derived and/or modified sequence
atgaaatacagttgttgtgctctcgtcctggccgtcctgggaaccgaactattaggctcactttgcagtacagtgcgatcaccccgattcagaggcaggatacagcaggagagaaaaaatatcaggccaaacatcatcctggttctcacggacgaccaagatgtagaactggggtcactgcaggtaatgaacaaaactcgcaagattatggagcatggaggcgccacatag

SEQ ID NO: 308595 - DNA, 258 bp, Artificial Sequence
  derived and/or modified sequence
atgaagtattcttgctgtgcgctagtccttgcagttctgggcactgagcttttaggcagtctttgctcaacggtacgctcgccccgttttcgggggaggatccagcaggaacggaaaaacattcgccccaacattatcctggttttgacagatgaccaggatgtcgagcttgggtccttacaagtgatgaacaaaacacggaagatcatggaacatgggggcgccacattcataaatgcgtttgtgactaccccctag

SEQ ID NO: 308596 - DNA, 519 bp, Artificial Sequence
  derived and/or modified sequence
atgaagtacagctgctgtgccctggtgctggccgtgctgggcacagagctgctgggcagcctgtgcagcacagtgcgcagcccccgcttccggggccgcatccagcaggagaggaagaacatccggcccaacatcatcctggtgctgacagatgaccaggatgtggagctgggcagcctgcaggtgatgaacaagaccaggaagatcatggagcacggcggggccaccttcatcaatgcctttgtgaccacccccatgtgctgccccagccgcagctccatgctgaccgggaagtatgtgcacaaccacaacgtgtacaccaacaatgaaaactgcagcagccccagctggcaggccatgcatgagcccaggacctttgctgtgtacctgaacaacacaggctacagaacagccttcttcggcaagtacctgaatgagtacaacggcagctacatccccccaggctggagggagtggctgggcctcatcaagaacagccgcttctacaactacacctag

SEQ ID NO: 308597 - DNA, 231 bp, Artificial Sequence
  derived and/or modified sequence
atgaagtacagctgctgtgccctggtgctggccgtgctgggcacagagctgctgggcagcctgtgcagcacagtgcgcagcccccgcttccggggccgcatccagcaggagaggaagaacatccggcccaacatcatcctggtgctgacagatgaccaggatgtggagctgggcagcctgcaggtgatgaacaagaccaggaagatcatggagcacggcggggccacctag

SEQ ID NO: 308598 - DNA, 258 bp, Artificial Sequence
  derived and/or modified sequence
atgaagtacagctgctgtgccctggtgctggccgtgctgggcacagagctgctgggcagcctgtgcagcacagtgcgcagcccccgcttccggggccgcatccagcaggagaggaagaacatccggcccaacatcatcctggtgctgacagatgaccaggatgtggagctgggcagcctgcaggtgatgaacaagaccaggaagatcatggagcacggcggggccaccttcatcaatgcctttgtgaccaccccctag

SEQ ID NO: 308599 - DNA, 519 bp, Artificial Sequence
  derived and/or modified sequence
atgaagtacagctgctgcgccctggtgctggccgtgctgggcaccgagctgcttggaagcctttgctcaacagtccgcagccctcggttccgcggcaggatacagcaggaaaggaaaaacattcgaccaaacattatcctagtcttaaccgacgaccaggacgttgaactggggtcccttcaagtgatgaacaaaacccgtaagattatggagcatggaggagccacttttatcaacgcgttcgtaactactccaatgtgctgccccagccgatcttccatgttgacgggaaagtacgtgcacaatcataacgtttacacaaataacgaaaactgcagcagcccttcttggcaggccatgcacgagcctcgcacattcgcggtctacctgaacaatacagggtatcggaccgcgttcttcggtaaatacttgaacgagtataacggaagttacatcccccctggttggcgggaatggctcggcctgattaaaaactctagattttacaattacacctag

SEQ ID NO: 308600 - DNA, 231 bp, Artificial Sequence
  derived and/or modified sequence
atgaagtacagctgctgcgccctggtgctggccgtgctgggcaccgaactcttgggttccctgtgtagcactgttcggagccctcgttttagaggcagaattcaacaggaacgaaagaatatcagacccaatattatcctggtacttacagatgaccaggatgtcgagctcggatctctgcaggtaatgaataaaacacgcaagattatggagcatggcggggctacatag

SEQ ID NO: 308601 - DNA, 258 bp, Artificial Sequence
  derived and/or modified sequence
atgaagtacagctgctgcgccctggtgctggccgtgctgggcaccgaactgcttggttccctctgctcgaccgtacgctctcccaggtttcgaggtcgcatacagcaagagaggaagaacatcagacccaatataattttggtcctgactgatgaccaggatgtcgaactgggttctctgcaggtgatgaataaaaccagaaagatcatggagcatgggggcgcaaccttcatcaatgcctttgtcaccacaccttag

SEQ ID NO: 308602 - DNA, 519 bp, Artificial Sequence
  derived and/or modified sequence
atgaagtactcttgctgtgctctggtgcttgccgtcctgggcacagagctccttgggtccctgtgctctaccgtcagatccccacgcttcagaggaaggatccagcaggaaagaaaaaatatccgcccaaatataattcttgtcttgacagacgatcaggatgtagagctgggcagcttgcaggtcatgaacaaaactaggaagataatggagcacggaggcgctaccttcatcaacgcgttcgttacaacccccatgtgctgccctagtaggtcaagtatgctaacgggcaagtacgtgcacaatcacaatgtctacacgaacaacgagaattgcagttctccttcttggcaggcaatgcacgaaccaagaacattcgctgtttacctaaacaataccgggtataggaccgcattttttggaaaatacctcaacgagtataacggatcctatattcccccaggttggcgagagtggcttggtctcatcaagaactctcgcttctacaactacacctag

SEQ ID NO: 308603 - DNA, 231 bp, Artificial Sequence
  derived and/or modified sequence
atgaagtatagctgttgtgccttagtgctggccgtgctgggaacagagcttctgggtagtctctgctcaaccgtgcgcagccccagatttagaggacggatacagcaggaacgtaagaatataagacccaatattattctcgtgttaactgacgaccaggacgtcgaactgggctcattgcaggtgatgaataagactcgaaaaatcatggagcacgggggtgccacatag

SEQ ID NO: 308604 - DNA, 258 bp, Artificial Sequence
  derived and/or modified sequence
atgaagtacagctgctgcgcattagtactggctgtcctcggaaccgaacttctgggatccctgtgcagcacagtgcgatctccaaggtttcgtgggagaatccagcaagagaggaagaatattcggcctaacataatcttggtgctgaccgacgaccaggacgtggaattgggtagcttgcaagtgatgaacaaaacccgcaagattatggagcatggaggagcaacatttataaacgcctttgtcaccactccatag

SEQ ID NO: 308605 - DNA, 806 bp, Artificial Sequence
  derived and/or modified sequence
aggttacttgactgggagttctcagacctccagtttcagccctgccctcagcctccaatccgtaagagacacccagccccagcaattggattgggcagcccgtcttgacacaccactgtgctgagtgcttgaggacgtgtttcaacagatggttggggttagtgtgtgtcatcacattcgagtggggattaagagaaggaaggctgccttgctggagctgtgtggtcttctccaagtgagagtcgcaggcaatagaactactttgcttttggaggaaaaggaggaattcattttcagcagacacaagaaaagcagtttttttttcagggattcttcacttctcttgaacaaggaactcactcagagactaacacaaaggaagtaatttcttacctggtcattatttagtctacaataagttcatccttcttcagtgtgaccagtaaattcttcccatactcttgaagagagcataattggaatggagaggtgctgacggccacccaccatcatctaaagaagataaacttggcaaatgacatgcaggttcttcaaggcagaataattgcagaaaatcttcaaaggaccctatctgcagatgttctgaatacctctgagaatagagattgattattcaaccaggatacctaattcaagaactccagaaatcaggagacggagacattttgtcagttttgcaacattggaccaaatacaatgaagtattcttgctgtgctctggttttggctgtcctgggcacagaattgctgggaagcctctgttcgactgtcagatccccgaggtt

SEQ ID NO: 308606 - DNA, 630 bp, Artificial Sequence
  derived and/or modified sequence
ggagtttggatttcattttagtctcaccgtctccgtttttctctgactgcccagaactccagaaatcaggagacggagacattttgtcagttttgcaacattggaccaaatacaatgaagtattcttgctgtgctctggttttggctgtcctgggcacagaattgctgggaagcctctgttcgactgtcagatccccgaggttcagaggacggatacagcaggaacgaaaaaacatccgacccaacattattcttgtgcttaccgatgatcaagatgtggagctggggtccctgcaagtcatgaacaaaacgagaaagattatggaacatgggggggccaccttcatcaatgcctttgtgactacacccatgtgctgcccgtcacggtcctccatgctcaccgggaagtatgtgcacaatcacaatgtctacaccaacaacgagaactgctcttccccctcgtggcaggccatgcatgagcctcggacttttgctgtatatcttaacaacactggctacagaacagccttttttggaaaatacctcaatgaatataatggcagctacatcccccctgggtggcgagaatggcttggattaatcaagaattctcgcttctataattacact

SEQ ID NO: 308607 - DNA, 460 bp, Artificial Sequence
  derived and/or modified sequence
atataatatgctgttgcaagagactacttcagatcgaaaatctgtttttaaaatcattgactgatatttcctttgtatttttttctcccccttccaggaccctatctgcagatgttctgaatacctctgagaatagagattgattattcaaccaggatacctaattcaagaactccagaaatcaggagacggagacattttgtcagttttgcaacattggaccaaatacaatgaagtattcttgctgtgctctggttttggctgtcctgggcacagaattgctgggaagcctctgttcgactgtcagatccccgaggttcagaggacggatacagcaggaacgaaaaaacatccgacccaacattattcttgtgcttaccgatgatcaagatgtggagctggggtccctgcaagtcatgaacaaaacgagaaagattatggaacatgggggggccacctt

SEQ ID NO: 308608 - DNA, 585 bp, Artificial Sequence
  derived and/or modified sequence
tctcttttagcatagttttgaatggaatgctagcacggcacacttgtcaaagccagttgttgctgtcctatcaatgctgctattgtacggctgacagatgacggtgctgacggccacccaccatcatctaaagaagataaacttggcaaatgacatgcaggttcttcaaggcagaataattgcagaaaatcttcaaaggaccctatctgcagatgttctgaatacctctgagaatagagattgattattcaaccaggatacctaattcaagaactccagaaatcaggagacggagacattttgtcagttttgcaacattggaccaaatacaatgaagtattcttgctgtgctctggttttggctgtcctgggcacagaattgctgggaagcctctgttcgactgtcagatccccgaggttcagaggacggatacagcaggaacgaaaaaacatccgacccaacattattcttgtgcttaccgatgatcaagatgtggagctggggtccctgcaagtcatgaacaaaacgagaaagattatggaacatgggggggccaccttcatcaatgcctttgtgactacacc

SEQ ID NO: 308609 - DNA, 593 bp, Artificial Sequence
  derived and/or modified sequence
cctgtgctatctgtgccttaccagtctcaccaacaataagcctggtgactgacaatcgagagggggctctgtccacgtaggtgccggcacaagctgaggacatgagtgggacagaggaaccagccttgcacggaggaagcaccttttccttctggtgattgattgatgggggacagtgaggaggttttcagagactggaaaaaattgtcccagtcacttactatgaagtctttgtcagcagaaaagactctccggggtagagaatgatataatgcagatgacaaatgacaggaccctatctgcagatgttctgaatacctctgagaatagagattgattattcaaccaggatacctaattcaagaactccagaaatcaggagacggagacattttgtcagttttgcaacattggaccaaatacaatgaagtattcttgctgtgctctggttttggctgtcctgggcacagaattgctgggaagcctctgttcgactgtcagatccccgaggttcagaggacggatacagcaggaacgaaaaaacatccgacccaacattattcttgtgcttaccgatgatcaagatgtggagc

SEQ ID NO: 308610 - DNA, 594 bp, Artificial Sequence
  derived and/or modified sequence
atgggctgctgcaccggacgttgctccctgatttgcctgtgcgctctccagctggtgagtgcactcgaaagacaaatctttgatttcctcggatttcagtgggccccaattctggggaactttctccacattatcgttgtgatcctggggctgttcggcacgatccagtacagaccaaggtacattatggtgtatacagtgtggacagctctgtgggtgacctggaatgtgttcattatctgcttctacctggaggttggcgggctgagcaaagacaccgacctgatgacctttaacatttctgttcaccggtcctggtggagagaacatgggcccggatgcgtgcggcgcgtgctccctccctcagcccacggcatgatggacgactatacttatgtctcagtgaccggatgcattgtggactttcagtacctagaagttatccactccgctgtccaaatcctgttaagtctggttgggttcgtctatgcttgctatgtgatctcaatatctatggaggaagaggatacatactcctgcgacttgcaagtctgcaagcacctgtttattcagatgttgcagatcatcgagtag

SEQ ID NO: 308611 - DNA, 594 bp, Artificial Sequence
  derived and/or modified sequence
atgggctgctgtacggggagatgtagtctgatctgcttgtgtgctcttcagctggtcagtgcgctcgagcgccaaatctttgactttctaggcttccagtgggccccgatcctcggcaactttctacacattatcgtggtgatcttaggacttttcggaaccatccagtatcgccctaggtacatcatggtgtacactgtgtggactgccttgtgggtcacatggaatgtgtttatcatctgcttctatctagaggtgggcggtttgtcaaaggacacagatttgatgacattcaatataagcgtacatcggagttggtggcgggaacatggacccggatgcgttagacgagtgctcccgccatcggcccatggcatgatggatgactacacctatgtctctgttacaggatgcattgtggacttccagtatctcgaggtcatacacagcgcagtccagatcttgctatctctcgtgggatttgtgtacgcttgttatgttattagcataagcatggaagaggaagacacatattcttgtgatctccaggtatgcaagcacctattcatccagatgctgcagatcatcgagtag

SEQ ID NO: 308612 - DNA, 486 bp, Artificial Sequence
  derived and/or modified sequence
atgggatgttgtaccggacgatgctctcttatctgcctgtgtgctttgcagctggtgagttgggtgtttgaccggcagatcttcttgttgagctttcagtgggcgcctatcctcggcaattttttgcacataatcgtggttattctgggtttgttcggcacaatacagtatcgccctaggtacataatggtctacaccgtttggactgcattgtgggtcacctggaatgtattcatcatatgtttttatttggaagtcggcggtttgtccaaagatacggacctgatgaccttcaacatctctgtgcatcgttcctggtggagggagcatggacccggctgtgttcggcgtgtgctacctccaagcgctcacggtatgatggacgattacacttacgtgagcgtcactgggtgcattgtggattttcagtatcttgaagtgattcactctgccgtgcagatcctcctctccatcttctttctctag

SEQ ID NO: 308613 - DNA, 594 bp, Artificial Sequence
  derived and/or modified sequence
atgggctgctgcaccggccgctgcagcctcatctgcctgtgtgccctgcagctggtgtctgccctggagcggcagatctttgacttcctgggcttccagtgggcccccatcctgggcaacttcctgcacatcatcgtggtgatcctgggcctgtttggcaccatccagtaccggccccgctacatcatggtgtacacagtgtggacagccctgtgggtgacctggaatgtgttcatcatctgcttctacctggaggtgggcggcctgagcaaggacacagacctgatgaccttcaacatctctgtgcaccgctcctggtggagggagcacggccctggctgtgtgcggcgggtgctgccccccagcgcccacggcatgatggatgactacacctacgtgtctgtgacaggctgcatcgtggacttccagtacctggaggtgatccacagcgctgtgcagatcctgctgagcctggtgggctttgtgtatgcctgctacgtgatcagcatctccatggaggaggaggacacctacagctgtgacctgcaggtgtgcaagcacctgttcatccagatgctgcagatcatcgagtag

SEQ ID NO: 308614 - DNA, 486 bp, Artificial Sequence
  derived and/or modified sequence
atgggctgctgcaccggccgctgcagcctcatctgcctgtgtgccctgcagctggtgtcctgggtgtttgaccggcagatcttcctgctgtccttccagtgggcccccatcctgggcaacttcctgcacatcatcgtggtgatcctgggcctgtttggcaccatccagtaccggccccgctacatcatggtgtacacagtgtggacagccctgtgggtgacctggaatgtgttcatcatctgcttctacctggaggtgggcggcctgagcaaggacacagacctgatgaccttcaacatctctgtgcaccgctcctggtggagggagcacggccctggctgtgtgcggcgggtgctgccccccagcgcccacggcatgatggatgactacacctacgtgtctgtgacaggctgcatcgtggacttccagtacctggaggtgatccacagcgctgtgcagatcctgctgagcatcttcttcctgtag

SEQ ID NO: 308615 - DNA, 594 bp, Artificial Sequence
  derived and/or modified sequence
atgggctgctgcaccggacgctgctcgctcatctgcctctgcgcgctgcagttggtctcagcattagagaggcagatctttgacttccttggtttccagtgggcgcctattcttggaaattttctacacataatagttgtcatattgggtttgtttgggaccattcagtacagacctcgatacataatggtgtatacagtgtggactgccctctgggtcacctggaatgtgttcattatctgcttttatttggaagtaggtggactctcaaaggacaccgatctaatgacattcaatatctctgtacatcggtcatggtggagagaacatgggcctggttgtgtcagaagagtgctgcctccctcagcccatggcatgatggacgattacacgtacgtctctgtcacaggctgcatcgttgacttccagtacctggaggtcatccacagtgctgtccaaatactactctctttggtgggttttgtgtatgcctgttatgtgatcagtatttccatggaagaagaagacacatattcatgtgatctgcaagtatgcaaacatctttttatccagatgctgcaaattattgaataa

SEQ ID NO: 308616 - DNA, 1988 bp, Artificial Sequence
  derived and/or modified sequence
agccgcgagcggcggccgcggggccgaggagcctgggccgggccgggcggggactactccggagtcaggaggcagcagcggcggaggacgaggatctctggcagtcagcgccgctcggacgccgccggcaccatgggctgctgcaccggacgctgctcgctcatctgcctctgcgcgctgcagttggtctcagcattagagaggcagatctttgacttccttggtttccagtgggcgcctattcttggaaattttctacacataatagttgtcatattgggtttgtttgggaccattcagtacagacctcgatacataatggtgtatacagtgtggactgccctctgggtcacctggaatgtgttcattatctgcttttatttggaagtaggtggactctcaaaggacaccgatctaatgacattcaatatctctgtacatcggtcatggtggagagaacatgggcctggttgtgtcagaagagtgctgcctccctcagcccatggcatgatggacgattacacgtacgtctctgtcacaggctgcatcgttgacttccagtacctggaggtcatccacagtgctgtccaaatactactctctttggtgggttttgtgtatgcctgttatgtgatcagtatttccatggaagaagaagacacatattcatgtgatctgcaagtatgcaaacatctttttatccagatgctgcaaattattgaataagcaagaattagtaagatattatcaccaaattgtcacatcagtcaagcctcatgtgcttcctaagaactgaggtgatgcattattttagagtgtcattctaaaccccagattcaacatcttcctaatctttctagtgcagtctaatatataaattttatgaaaagcataggtttttttttaaccagcagtgctctttgagaatttacattgattcctaaagattgccattgctttgtataaaatgttataaattatcttagcatcttacctggaatttccactaaattcaccaatttatgatttgtgaaatctgattttactttttgaaaattttcatgtgaatttcccattttcagtgttgtagcacctctctcttcctctaagatcctgcaagctcatcaaaagccatgatcttattataccagcagttttatttattcaatctttcaacaagtagttattgaacttctataatgtgccaggctctggagctcgccttacaccaaacagacacaatcgatccattcgaagtgtcgtaattacacattgagggaccaactagaccttttctcattgtaaacttggagcaaaagtaaattcattaaaataaatttacattatagtgccacaaaaaaatgaacagaaccagaaagcattttttacaaaaattaacagaacagtgtgatagaggggaaaaggatgtgagatcatggtgccctaccttcaatagggtggccagaaaacacctctctgaagaagcagcatttgagctgagacctgaagaacgaggagtcagtgatgcagagaacctcaggagatgccttccaatctgagaaaagaggtgtacaagcaacatggtgccggcacctgctcagcttttggaaaggactcaggaagcttttactcatgatggaaggcaaagcgggaggaggcacatcacatagcaagagtggaagcaagagagacgtcatgctcttttaagcaatcagctctcaggtgaactaatagagtgagaactcactcatttctgtggggagggcatcaagctatttataatggatccatcctcatgacacaaacactgctatctcccacctctaacactggagatgacacttgaacatgagatttggaggggacaaatatcaaaactatatcatatggtttgcagatattttcttccatccttgagttatcttttcattttgttaattgtttcctttgctgtgctgaagctttgtttaatgaaatcccatttgtct

SEQ ID NO: 308617 - DNA, 1114 bp, Artificial Sequence
  derived and/or modified sequence
acacacacacacccggacccagacagcccactccactttccagacgcccacctcctacatactcccctcccctaaacagacattcacccactcgccatctgtagcctccttccaaccccccgccccgcccgcctggctccccctccccaagaaacagacctgcacagtgggacgcagggacccccgccagacgctcgggtcgtgcgcaccgcactgacctcggcccgccccgccgggaaactaacaaaggcgggcgcgagccccgagccctggagccgcgagcggcggccgcggggccgaggagcctgggccgggccgggcggggactactccggagtcaggaggcagcagcggcggaggacgaggatctctggcagtcagcgccgctcggacgccgccggcaccatgggctgctgcaccggacgctgctcgctcatctgcctctgcgcgctgcagttggtgtcatgggtatttgataggcagatctttctcctcagtttccagtgggcgcctattcttggaaattttctacacataatagttgtcatattgggtttgtttgggaccattcagtacagacctcgatacataatggtgtatacagtgtggactgccctctgggtcacctggaatgtgttcattatctgcttttatttggaagtaggtggactctcaaaggacaccgatctaatgacattcaatatctctgtacatcggtcatggtggagagaacatgggcctggttgtgtcagaagagtgctgcctccctcagcccatggcatgatggacgattacacgtacgtctctgtcacaggctgcatcgttgacttccagtacctggaggtcatccacagtgctgtccaaatactactctctatatttttcctataggtttctgctgtggagccgtactcactgcagaccctgaaggaggaggaatacctgctttctgcccctcagtggtctcagctgccgttcttctcacatatgcatcatccatacacatcaagatgttttgcggctttatgtcagtatgagtaatcttggtcttactgtgtagatattctaacccttgaaggaaatgtcaaatgatactcttcagacaacgtactgg

SEQ ID NO: 308618 - DNA, 594 bp, Artificial Sequence
  derived and/or modified sequence
atgggctgctgcaccggccggtgcagcctgatctgcctgtgcgccctgcagttggtttctgctctcgaacggcagattttcgactttcttggcttccaatgggccccaatcctggggaacttcctccatatcattgtagtgattctgggcctcttcggcacaatacagtacaggcccagatacataatggtctacaccgtttggaccgccttgtgggtgacctggaacgttttcatcatctgtttttatcttgaggttgggggcctgtccaaagataccgatttaatgaccttcaacatttccgtgcacagatcttggtggcgggaacacggaccaggctgtgttagaagagtgctgcccccctccgcacatgggatgatggacgattatacttacgtgtctgtgacgggatgtattgttgatttccagtacttagaggtgatccactctgcagtgcagatcctattatcactggtgggtttcgtgtatgcatgttatgtgatatccataagtatggaggaagaggacacatactcgtgtgacttgcaggtctgtaaacacctcttcattcagatgctgcagataatagagtag

SEQ ID NO: 308619 - DNA, 594 bp, Artificial Sequence
  derived and/or modified sequence
atgggctgctgcaccggccggtgcagcctgatctgcctgtgcgccctgcaacttgtctccgctctggaacgccagatttttgatttcctgggctttcaatgggcacctattctcgggaatttcttacatattatcgtcgttatcctgggcctcttcggaacaatccagtacaggcctcggtatattatggtgtatacggtttggaccgccctttgggtgacatggaacgtttttatcatttgcttttaccttgaggtggggggcctcagcaaagacactgacttaatgaccttcaatattagcgtgcacaggtcttggtggcgggagcatgggcccggttgcgttaggcgagtgctcccacctagcgcacatggcatgatggatgattatacctacgtgtcagtgactggttgcatcgtggatttccaatacttggaggtgatccatagcgctgtacagatccttctgagtctcgtgggctttgtatatgcttgttacgtgatttccatttccatggaggaagaggacacatactcttgtgatcttcaggtatgtaaacacttgtttattcagatgctgcaaattatcgagtag

SEQ ID NO: 308620 - DNA, 486 bp, Artificial Sequence
  derived and/or modified sequence
atgggctgctgcaccggccggtgcagcctgatctgcctgtgcgccctgcagctggtctcatgggtgttcgatcgtcagatcttcttactttcctttcagtgggcccctatattaggaaattttctgcacattatcgtggttatcctggggcttttcgggaccattcagtatagaccacgttacataatggtgtataccgtgtggaccgctctctgggtaacttggaatgtgtttattatctgtttctacctggaggttgggggactgtctaaggatacagatctcatgacgttcaacatttccgtgcatcgatcatggtggagagagcacggtccaggctgtgtgcggagagtgctgcccccttctgcacatgggatgatggacgactacacctacgtgtccgtgacaggctgcatagtcgacttccagtacctggaggtgatacattcggctgtccagatcctcttgagcattttcttcctgtag

SEQ ID NO: 308621 - DNA, 594 bp, Artificial Sequence
  derived and/or modified sequence
atgggatgttgcacagggagatgttcacttatatgcctctgcgcgctccagcttgtgagtgcactggaacgtcagattttcgattttctcggcttccagtgggctcctatcctgggcaattttctgcacattatcgtggtgattttgggccttttcggaaccatccaatataggcccagatatatcatggtgtacactgtgtggacagccctttgggtgacgtggaatgtgtttatcatctgcttttacttagaggtgggtggactgtctaaagatacagacttgatgacattcaatatctcggtgcatagatcttggtggagggagcacggaccaggatgcgtgagacgtgtcctgccccctagcgcccacggcatgatggacgactatacgtacgtatctgtaactggatgtatcgtggactttcaatatctggaagttatccactctgctgtacaaattctgctcagcctggtggggttcgtctatgcctgttatgtcatctcaattagtatggaggaagaggatacttacagctgcgatttgcaggtgtgtaaacacctattcattcaaatgctccagatcatagagtag

SEQ ID NO: 308622 - DNA, 594 bp, Artificial Sequence
  derived and/or modified sequence
atgggctgctgcacaggacgctgtagcttgatctgcctatgcgcactacagctggtatccgccctggagcgacaaatcttcgacttcctcggctttcagtgggcacctatactggggaacttcctgcatataattgtggtgatactcggcttgtttggcaccatccagtacagaccgcgatatattatggtctacaccgtctggacagcattgtgggtgacctggaatgtctttatcatctgcttttatttggaggtgggaggactgtcaaaagatacagaccttatgacctttaacatcagcgtccatcggtcctggtggcgtgaacatggccctgggtgcgttagacgagtgctccctccaagcgcccacgggatgatggacgactatacatacgtgtctgttacaggctgcatcgtggattttcaataccttgaagtcatccattcagctgtccaaatcttactgtccttagttggctttgtgtatgcttgttacgttatctccatctcaatggaagaagaggacacgtactcatgtgacctgcaagtgtgcaaacatctgtttatccagatgctccagatcatcgagtag

SEQ ID NO: 308623 - DNA, 486 bp, Artificial Sequence
  derived and/or modified sequence
atgggttgctgtaccggacgctgttctttgatatgtctgtgtgctttacagctggtaagctgggtgtttgaccgtcagatcttcctgctctcattccagtgggctccaatcctcggcaacttccttcacataatcgtggtgattctcggcctcttcgggacaattcagtaccgtccccgatacataatggtttatacagtttggaccgccctgtgggtgacctggaacgtttttattatttgtttctatctggaggtgggaggcttaagtaaggacactgacctgatgacatttaacataagtgtgcatcgatcatggtggagagaacacggacctggttgcgttcgccgtgtcttgccccctagcgcgcatggcatgatggatgactatacatacgtgtcagtcactggctgcattgttgacttccaatacctggaggtaattcacagcgccgtgcagattctcctgtccatattcttcctgtag

SEQ ID NO: 308624 - DNA, 594 bp, Artificial Sequence
  derived and/or modified sequence
atgggctgctgcaccggcagatgcagcctgatctgcctgtgcgccctgcagctggtgagcgccctggagagacagatcttcgacttcctgggcttccagtgggcccccatcctgggcaacttcctgcacatcatcgtggtgatcctgggcctgttcggcaccatccagtacagacccagatacatcatggtgtacaccgtgtggaccgccctgtgggtgacctggaacgtgttcatcatctgcttctacctggaggtgggcggcctgagcaaggacaccgacctgatgaccttcaacatcagcgtgcacagaagctggtggagagagcacggccccggctgcgtgagaagagtgctgccccccagcgcccacggcatgatggacgactacacctacgtgagcgtgaccggctgcatcgtggacttccagtacctggaggtgatccacagcgccgtgcagatcctgctgagcctggtgggcttcgtgtacgcctgctacgtgatcagcatcagcatggaggaggaggacacctacagctgcgacctgcaggtgtgcaagcacctgttcatccagatgctgcagatcatcgagtag

SEQ ID NO: 308625 - DNA, 486 bp, Artificial Sequence
  derived and/or modified sequence
atgggctgctgcaccggcagatgcagcctgatctgcctgtgcgccctgcagctggtgagctgggtgttcgacagacagatcttcctgctgagcttccagtgggcccccatcctgggcaacttcctgcacatcatcgtggtgatcctgggcctgttcggcaccatccagtacagacccagatacatcatggtgtacaccgtgtggaccgccctgtgggtgacctggaacgtgttcatcatctgcttctacctggaggtgggcggcctgagcaaggacaccgacctgatgaccttcaacatcagcgtgcacagaagctggtggagagagcacggccccggctgcgtgagaagagtgctgccccccagcgcccacggcatgatggacgactacacctacgtgagcgtgaccggctgcatcgtggacttccagtacctggaggtgatccacagcgccgtgcagatcctgctgagcatcttcttcctgtag

SEQ ID NO: 308626 - DNA, 1227 bp, Artificial Sequence
  derived and/or modified sequence
atgaatactactgataacggcgtgaactgtctgtgcgccatttgcggcgacagagccaccggtaagcactacggggcttccagctgcgacggctgcaaaggatttttcaggcgcagtataagaaagagccacgtatactcctgtaggttttctagacagtgtgtggtcgataaggacaagcggaatcagtgccgttactgtcggttaagaaaatgttttcgggcggggatgaaaaaagaagcggtgcagaatgaacgagacagaatcagcacaaggaggtcaaccttcgacgggtctaatattccctcaatcaacacgctggcacaggcggaggtccgctctaggcagatcagtgtgtcaagccccggctctagcacagacataaacgtcaagaaaatcgcatccataggagatgtctgcgaaagtatgaaacagcagctgctcgttttagtggagtgggctaagtacattccagccttttgtgagcttccgttagatgaccaggtggccttacttagagcacacgccggagaacacttactgttgggtgcaactaaacggtcaatgatgtataaggatatcctcctgctgggaaataattatgtgattcatcgcaatagctgcgaggtggaaatctctagggtggctaaccgtgtccttgacgagctggtccggcccttccaggagatacagatagatgacaatgaatatgcgtgtctcaaggccatagtctttttcgaccctgatgccaaagggctctccgaccccgttaaaataaagaatatgcgctttcaggtgcaaatcggtctcgaagattatatcaatgaccgtcagtacgactcgcgggggcgtttcggggaactgctgctcctgctgcctactttacagtccattacttggcaaatgattgagcagattcagttcgttaagctctttggtatggtgaagatcgataaccttctgcaggagatgctgctcgggggagcctccaacgacggttcccacctgcatcatcccatgcacccacatttgtcacaggatcccctgactggccaaaccatcttgctcgggcctatgagcacattggttcatgctgatcagatttctaccccagagaccccactgccgagtcccccacaaggcagtgggcaagaacaatacaagatcgctgccaatcaggctagtgtgattagccaccaacacctctcaaagcaaaagcagctgtag

SEQ ID NO: 308627 - DNA, 1227 bp, Artificial Sequence
  derived and/or modified sequence
atgaacaccacagacaacggggtgaactgcctgtgtgccatctgtggggaccgggccaccgggaagcactacggggccagcagctgtgatggctgcaagggcttcttcagaagaagcatcaggaagagccacgtgtacagctgccgcttcagccggcagtgtgtggtggacaaggacaagaggaaccagtgccgctactgccgcctgaggaagtgcttccgggccggcatgaagaaggaggccgtgcagaatgaaagagaccgcatcagcacccggcgcagcacctttgatggcagcaacatccccagcatcaacaccctggcccaggccgaggtgcgcagccggcagatctctgtgagcagccctggcagcagcacagacatcaacgtgaagaagatcgccagcattggagatgtgtgtgagagcatgaagcagcagctgctggtgctggtggagtgggccaagtacatcccagccttctgtgagctgcccctggatgaccaggtggccctgctgcgggcccacgccggggagcacctgctgctgggcgccaccaagaggtccatgatgtacaaggacatcctgctgctgggcaacaactacgtgatccacaggaacagctgtgaggtggagatcagccgggtggccaacagagtgctggatgagctggtgcggcccttccaggagatccagattgatgacaatgaatatgcctgcctgaaggccatcgtgttctttgatcctgatgccaagggcctgagtgaccctgtgaagatcaagaacatgaggttccaggtgcagatcggcctggaggactacatcaatgaccggcagtatgacagccggggccgctttggagagctgctgctgctgctgcccaccctgcagagcatcacctggcagatgattgagcagatccagtttgtgaagctgtttggcatggtgaagattgacaacctgctgcaggagatgctgctgggcggggccagcaatgatggcagccacctgcaccaccccatgcacccccacctgagccaggaccccctgaccggccagaccatcctgctgggccccatgagcaccctggtgcatgctgaccagatcagcaccccagagacccccctgcccagccccccccagggcagcggccaggagcagtacaagattgctgccaaccaggccagcgtcatcagccaccagcacctgagcaagcagaagcagctgtag

SEQ ID NO: 308628 - DNA, 1227 bp, Artificial Sequence
  derived and/or modified sequence
atgaacaccaccgacaacggcgtgaactgcctgtgcgccatctgcggagacagggcaactgggaagcattatggggcctcctcgtgtgatggatgtaagggctttttcagacggtccattaggaaaagtcacgtctattcctgccggtttagtcgacagtgtgtggtagacaaagacaagcggaaccaatgcaggtattgcaggctccggaagtgctttcgtgccggaatgaagaaagaggccgtccagaatgaacgtgatagaatttccacacgccgctcgactttcgatggctcaaatattcctagcatcaatactctcgcccaggccgaggtgcggagtcgccagatctccgtgagctctccagggagctcaaccgatatcaacgttaagaaaatcgctagcattggtgatgtgtgcgaaagcatgaagcagcagctgctcgtgctcgtggaatgggccaagtatatcccagctttttgtgagcttcctctcgatgaccaggttgccctgctaagggcccatgccggcgagcatctcctcctaggtgcaacaaagcgcagtatgatgtacaaagacatcctactcctgggtaataactatgtgatccatcgtaattcttgtgaggtcgaaatctccagggtggctaacagggttcttgatgaactcgtaaggcctttccaagagatccaaatagacgacaacgaatatgcttgtctgaaagctatagtgttttttgatcccgacgccaaaggcctgagtgaccctgtaaagataaaaaatatgaggttccaagtgcaaatcgggctggaagattatattaacgatagacaatacgatagtagaggaaggtttggagaactgctgctgcttttgcctaccctacaatccattacgtggcaaatgatagagcagatacagttcgtcaagctgttcggaatggtcaaaatcgataacttacttcaggaaatgttgctgggaggcgcttcgaatgacggctcccacttgcatcacccaatgcacccacatctgtcgcaggatcccctaacgggacagacgatactgctgggaccaatgagcactctcgtgcacgcagaccagattagcaccccggagaccccccttccaagtccaccacagggaagtggtcaggagcagtataagatcgcagcaaaccaggcatccgtgatctctcatcagcacctgagtaagcagaagcaactgtag

SEQ ID NO: 308629 - DNA, 1227 bp, Artificial Sequence
  derived and/or modified sequence
atgaataccaccgacaatggagttaactgtttatgcgccatatgtggagatagggccacaggaaagcattatggagccagcagttgcgacggttgtaaaggattttttaggcgaagcatcaggaagtctcacgtatatagctgtagattttccagacaatgtgtagtcgacaaggataaacggaatcagtgcagatactgccgcctacgcaagtgttttcgagctggcatgaagaaagaggccgtccagaatgagcgcgacagaattagtacaagacgttctactttcgatggttctaacattccctcaataaacaccctcgctcaggctgaggtgaggtcaagacaaatttcagtttcctctcccggtagctctaccgatattaatgtgaagaagattgcaagcattggcgacgtgtgtgagtctatgaagcagcagttgctggtactggtggaatgggctaaatacattccagccttctgcgagctcccattggatgatcaggtagcgttgctaagggcccatgccggtgagcacctgctgctcggtgctaccaagcgttccatgatgtataaggacatcttgctattaggaaacaactatgtgattcatagaaactcatgtgaggtagagatcagtagagtggcgaacagagtcctggacgagttggtcaggcctttccaagaaatccagatcgatgacaacgagtacgcatgcctgaaagcaattgtcttcttcgatccggatgccaaggggcttagcgacccagtcaagatcaagaacatgcgcttccaagtacagatcggactggaggattatattaatgacaggcagtacgactctcgaggcaggttcggggagctacttctgttgttaccgactctgcagagtatcacatggcagatgatcgagcagatccaatttgttaaattattcggtatggtgaagattgataatctgttacaggagatgttgctaggcggtgccagcaatgacggtagccacctgcatcatcccatgcatccccacctgtctcaggacccgttaaccggacaaaccattctgttaggccctatgtctaccctggtccacgcagatcagatctccacacctgagacccccctgccctcgccgcctcagggcagcggtcaggagcagtataagatcgctgctaatcaagcgagtgtcatctcccaccaacacctctcaaaacaaaaacaactctag

SEQ ID NO: 308630 - DNA, 1227 bp, Artificial Sequence
  derived and/or modified sequence
atgaacaccaccgacaacggcgtgaactgcctgtgcgccatctgcggcgacagagccaccggcaagcactacggcgccagcagctgcgacggctgcaagggcttcttcagaagaagcatcagaaagagccacgtgtacagctgcagattcagcagacagtgcgtggtggacaaggacaagagaaaccagtgcagatactgcagactgagaaagtgcttcagagccggcatgaagaaggaggccgtgcagaacgagagagacagaatcagcaccagaagaagcaccttcgacggcagcaacatccccagcatcaacaccctggcccaggccgaggtgagaagcagacagatcagcgtgagcagccccggcagcagcaccgacatcaacgtgaagaagatcgccagcatcggcgacgtgtgcgagagcatgaagcagcagctgctggtgctggtggagtgggccaagtacatccccgccttctgcgagctgcccctggacgaccaggtggccctgctgagagcccacgccggcgagcacctgctgctgggcgccaccaagagaagcatgatgtacaaggacatcctgctgctgggcaacaactacgtgatccacagaaacagctgcgaggtggagatcagcagagtggccaacagagtgctggacgagctggtgagacccttccaggagatccagatcgacgacaacgagtacgcctgcctgaaggccatcgtgttcttcgaccccgacgccaagggcctgagcgaccccgtgaagatcaagaacatgagattccaggtgcagatcggcctggaggactacatcaacgacagacagtacgacagcagaggcagattcggcgagctgctgctgctgctgcccaccctgcagagcatcacctggcagatgatcgagcagatccagttcgtgaagctgttcggcatggtgaagatcgacaacctgctgcaggagatgctgctgggcggcgccagcaacgacggcagccacctgcaccaccccatgcacccccacctgagccaggaccccctgaccggccagaccatcctgctgggccccatgagcaccctggtgcacgccgaccagatcagcacccccgagacccccctgcccagccccccccagggcagcggccaggagcagtacaagatcgccgccaaccaggccagcgtgatcagccaccagcacctgagcaagcagaagcagctgtag

SEQ ID NO: 308631 - protein, 177 aa, Artificial Sequence
  derived and/or modified sequence
MFHVSFRYIFGLPPLILVLLPVASSDCDIEGKDGKQYESVLMVSIDQLLDSMKEIGSNCLNNEFNFFKRHICDANKEGMFLFRAARKLRQFLKMNSTGDFDLHLLKVSEGTTILLNCTGQVKGRKPAALGEAQPTKSLEENKSLKEQKKLNDLCFLKRLLQEIKTCWNKILMGTKEH

SEQ ID NO: 308632 - protein, 71 aa, Artificial Sequence
  derived and/or modified sequence
MFHVSFRYIFGLPPLILVLLPVASSDCDIEGKDGKQYESVLMVSIDQLLNQPYKKKEKRTERKQQSAMSNN

SEQ ID NO: 308633 - DNA, 531 bp, Artificial Sequence
  derived and/or modified sequence
atgttccacgtttcctttcgttatattttcgggctgcccccgttaatcctggtgcttttgcccgtggcaagctcagattgtgacatagaaggtaaagatggaaagcagtacgaatccgtcctaatggtcagcattgaccagctcctggacagtatgaaggagattgggtcaaactgcctcaacaacgaattcaactttttcaagcggcacatttgtgatgctaacaaggagggcatgtttctgttccgcgctgctaggaagctcagacaattcctcaagatgaatagcacgggggacttcgacctgcacctcctgaaagtttctgaaggaaccacaatcctactaaattgtacggggcaagtgaagggacggaaacctgcggcactcggcgaagcacagccaacaaagagtcttgaagaaaacaagtccctcaaggagcagaaaaagcttaacgacctgtgtttccttaaaagacttttgcaggagataaagacctgttggaacaaaattctcatgggtacaaaggaacac

SEQ ID NO: 308634 - DNA, 531 bp, Artificial Sequence
  derived and/or modified sequence
atgttccacgtctctttccgctacattttcggactgccgcctctcatcctcgtcctgctgccggtcgcgagcagcgattgcgacatagagggcaaagatggtaagcagtatgagagcgtgctgatggtttctattgaccaacttctcgactcgatgaaggagatcgggtctaactgcttgaacaacgagttcaacttcttcaaacggcatatttgcgatgcgaataaagaaggcatgttcctctttcgcgcggctcgaaagctgcggcagtttcttaagatgaattcaacaggtgatttcgacctgcacctactgaaggtgtccgaaggtacgaccattctcctgaactgcactggccaagtgaagggacggaagcctgccgctctgggtgaggctcagcctacgaagtccctcgaagagaataaatcattgaaagagcagaaaaaactgaatgatctgtgtttcctgaagaggctgttgcaagagatcaagacctgctggaacaaaattctcatggggacgaaggagcac

SEQ ID NO: 308635 - DNA, 531 bp, Artificial Sequence
  derived and/or modified sequence
atgtttcacgtgagctttcgctacatcttcgggctgcccccgctgatcttggtgcttctcccagttgcatcatccgactgtgatatcgaaggcaaggacggcaagcagtacgagtccgttttgatggtgtcgatcgaccaactgctggactcgatgaaggaaatcggatcgaactgtctgaacaacgaattcaacttcttcaagaggcacatctgcgacgctaataaggaaggtatgtttctgttcagggcggcgcggaagctccgccagtttctcaagatgaattcaactggagacttcgatctccaccttctcaaggtgagcgagggaacgactattctgctgaattgcaccggacaggtgaaagggcggaagccagctgcacttggcgaagcccaaccgaccaagtcgctcgaagaaaacaagtcgctgaaggagcagaagaaactgaatgatctttgcttcctgaaacggctcctgcaagaaatcaagacctgctggaacaaaatcctcatgggaactaaagaacac

SEQ ID NO: 308636 - DNA, 531 bp, Artificial Sequence
  derived and/or modified sequence
atgtttcacgtgagcttccggtacattttcggtctaccgccacttatcctggtgcttctgccagttgcctctagtgactgtgatattgagggcaaggacggcaaacaatacgagagcgttctcatggtttcaattgaccaactcctggactcaatgaaggaaattgggtccaactgtttgaacaatgaatttaatttttttaagcgccacatttgcgacgcgaataaagaagggatgtttctctttcgcgccgctcgcaaactgcgacagttcctgaaaatgaactccactggggactttgacctccatcttctgaaggtgagcgaaggcactactatcctgctgaactgcacaggccaagtaaagggacgcaagcccgccgccttaggagaggcccaaccaaccaagtcgttggaagagaataagagtctcaaggagcaaaagaagctgaatgacctgtgcttcctgaaaagacttctccaagaaatcaaaacgtgctggaacaaaatactcatgggaaccaaggagcat

SEQ ID NO: 308637 - DNA, 531 bp, Artificial Sequence
  derived and/or modified sequence
atgttccatgtctcattcaggtatattttcggtctgcctcccttgatcctcgtcttgctgccagtagcttcttcggattgtgatattgaggggaaagatggcaagcagtacgagtcagttcttatggtgagcatagaccagctgttagactccatgaaagagatagggtccaactgtctcaacaacgaatttaatttttttaaaaggcacatatgtgacgcaaataaggaaggcatgttcttgtttcgcgctgcacggaaactccgccagtttctgaaaatgaactcgactggcgacttcgacctccacttgctgaaggtatccgaaggaaccactattttgcttaattgtaccggacaagtcaaaggcaggaagcccgcagccttgggagaggctcagcccacaaagtctctggaagagaataaatcattaaaagaacagaagaaactcaatgatctgtgctttctgaagaggctgctgcaggaaataaagacttgttggaacaagattcttatgggtacaaaagaacac

SEQ ID NO: 308638 - DNA, 531 bp, Artificial Sequence
  derived and/or modified sequence
atgttccacgtttcctttcggtacatctttggactgccaccattaatactggtccttctgcccgtagcgtcatccgattgtgacatcgagggtaaggacgggaaacagtacgagtcagtgcttatggtgagcatcgatcagctccttgatagcatgaaggagatcgggagtaattgcctgaataacgagttcaactttttcaaacgccacatctgcgacgccaacaaagagggtatgtttcttttcagggccgcgcggaagctgagacagtttcttaaaatgaactcgactggtgattttgatctgcacctgctgaaagtgagtgaaggcacaacaattctgctgaattgcaccggacaagttaagggccggaagccagccgcactgggtgaggcccagccgacaaaatccttggaggagaataaatcgctgaaagagcaaaagaaattgaatgatctttgtttcctgaagcgccttctgcaggaaatcaaaacttgctggaataaaatcctgatgggcacaaaagagcac

SEQ ID NO: 308639 - DNA, 531 bp, Artificial Sequence
  derived and/or modified sequence
atgtttcacgtgtcattccggtacatctttggactgcctcctcttattctcgttctgcttccagtcgcgtcctcggattgtgacattgagggtaaagatgggaagcaatacgagagcgtccttatggtgtctatcgaccagctccttgattccatgaaggagatcggttctaactgcctcaataacgagtttaactttttcaaacgtcatatttgtgatgccaacaaggagggcatgttcctgtttagagctgcacgaaagttgaggcagtttctgaagatgaacagcactggtgatttcgatcttcacttgctcaaggtgtcggaaggtactaccatcctgctcaattgtactggtcaggtgaagggacgcaagcctgctgcacttggcgaagcacagccaaccaaatcactggaagagaacaaaagccttaaagaacagaagaaacttaatgatctttgctttcttaaaagactgctccaagagattaagacctgctggaataagatactgatgggaactaaggaacat

SEQ ID NO: 308640 - DNA, 531 bp, Artificial Sequence
  derived and/or modified sequence
atgtttcatgtgagcttcagatatatctttggtcttccaccactgattcttgtactgttgcctgtggcctcctccgactgtgatattgaggggaaagatggaaagcaatacgagtctgtgctaatggttagtatcgatcagctcctcgactcaatgaaggagattggatctaattgcctcaacaatgagttcaatttctttaagcgacacatatgtgacgccaacaaggaggggatgttcctgtttcgtgcggctagaaaattgagacagtttctaaagatgaacagtacaggcgactttgacctgcaccttctgaaagtgagtgaagggacaaccatcctgctcaactgcaccgggcaggttaaaggccgcaaacccgccgccctcggagaagctcagcccaccaagagccttgaggagaataagtcattgaaggaacagaagaagctgaacgacctttgctttctgaagaggctgctccaagaaatcaagacttgctggaataaaattttaatgggaactaaggagcat

SEQ ID NO: 308641 - DNA, 531 bp, Artificial Sequence
  derived and/or modified sequence
atgtttcatgtgagcttcagatatatctttgggctccctccactgattcttgtgctgcttcctgtggcgtccagcgattgcgacatagagggcaaggacggtaagcaatatgagagcgtgcttatggtcagcatcgaccagctcctggacagtatgaaggaaatcggctccaactgtctcaataacgaatttaatttctttaagaggcatatatgcgacgccaacaaagagggtatgttcctgtttcgagcagcaagaaaactgagacagttcctaaaaatgaattcaaccggcgacttcgacctacatcttctcaaggtgagcgaggggacaaccattctgctgaattgtactgggcaggtgaagggaagaaaaccagcagcactcggggaagcacagcccaccaaaagcctggaagagaataagtcgctgaaggagcagaaaaaactgaacgatctgtgttttctcaagcgactactgcaagaaattaagacctgctggaacaaaatcctgatgggaacaaaagaacac

SEQ ID NO: 308642 - DNA, 531 bp, Artificial Sequence
  derived and/or modified sequence
atgtttcacgtctcattccgatacattttcggtctgcctccactgattctcgttcttctgcccgtcgcatcgtcggattgcgatattgaaggcaaagatggtaagcaatacgaatcggtcctgatggtgtccatcgaccaactcctggatagcatgaaagaaatcggttcaaattgcctgaacaacgagtttaacttctttaagcgtcatatttgtgatgcgaacaaggaggggatgtttctctttcgcgcagcccggaagctgaggcaatttcttaagatgaactcaaccggcgatttcgatcttcacctgcttaaagtgtcagaaggcacgactatactgctgaactgtaccggtcaggtgaagggaagaaagccagcagcactgggagaagcccaacccactaagtccttggaggagaacaagtcactcaaagagcagaaaaagctgaacgatctgtgtttccttaaacggcttctgcaggaaatcaaaacctgctggaataagatcctcatgggcactaaagaacac

SEQ ID NO: 308643 - DNA, 531 bp, Artificial Sequence
  derived and/or modified sequence
atgttccacgtctcatttcggtacatctttggacttccgcccctcattttggtgctcctcccagtggcctcctcagactgcgatattgaaggaaaggacggaaaacagtacgaatccgtgctgatggtgtcaatagatcagttgctcgactccatgaaggagattggctcaaactgtctgaacaatgaattcaacttctttaaacgccatatttgtgatgcaaacaaagaaggtatgtttctttttagggcagcaagaaagttgagacaattcttgaaaatgaactccactggagatttcgatctgcacctgttgaaggtgagcgaagggaccaccatccttttgaattgcacgggccaggtcaagggacgaaagcctgctgcccttggtgaagcccaaccaaccaagtccctggaggagaacaagagtctgaaggagcagaagaagttgaacgatctgtgttttttgaaaaggctgctgcaagaaatcaagacttgttggaataagatcctcatgggaactaaggaacat

SEQ ID NO: 308644 - DNA, 531 bp, Artificial Sequence
  derived and/or modified sequence
atgtttcatgtttcgttcaggtacatttttggactgcctcccctcatacttgtgctgctgccggtcgcctcatccgactgtgatattgagggcaaggacgggaagcaatacgaatcagtcctgatggtgagcattgatcaacttttggactcgatgaaggagatcgggagcaactgtctgaataacgagtttaacttctttaagaggcatatatgtgatgctaataaggaggggatgtttctgttcagggccgcacggaagttgcgacaatttctgaagatgaactccaccggtgactttgatctccacctgctgaaggtgtccgaaggaaccaccattctgctcaattgtacgggtcaggtgaagggtcgcaaacctgcagcactgggggaagcacagcctactaaaagcctggaagaaaacaagtccctgaaagaacagaagaagctcaatgatctgtgtttccttaaaagactcctgcaagagataaagacttgttggaataagattctgatgggcacgaaggaacat

SEQ ID NO: 308645 - DNA, 531 bp, Artificial Sequence
  derived and/or modified sequence
atgtttcacgtgagctttagatacatttttggcctgcccccactgatcctcgtcctgttgcctgtggcctccagcgattgtgatattgaaggtaaggacggaaagcagtacgaatcggtgcttatggtgtccatcgatcagttgcttgattccatgaaggaaattggaagcaattgtctgaataacgagtttaactttttcaagcgtcatatctgtgacgctaacaaagagggtatgtttctgtttagggcggcaagaaagctgcggcagtttctgaagatgaattctacgggtgattttgacctgcaccttctgaaggtgtccgaagggaccactatactgctcaactgcacggggcaagtgaaagggcgaaagcctgcagcactgggcgaagcgcagcccaccaagagccttgaagaaaacaaatctctgaaagaacagaagaaacttaatgatctgtgcttccttaagcggctccttcaagaaatcaagacttgttggaacaagattctcatgggaacgaaggagcac

SEQ ID NO: 308646 - DNA, 531 bp, Artificial Sequence
  derived and/or modified sequence
atgttccacgtgagcttcagatacatcttcggcctgccaccgctgatcttggtgctgttgcctgtcgcttcctccgactgcgatatagaaggcaaggatggaaagcaatacgagtcggtcctgatggtgtcaatcgaccaactgcttgattccatgaaagagatcggctcgaattgcctgaacaacgaattcaacttctttaagagacacatctgcgatgcgaataaggaaggaatgtttctcttccgggctgctcggaaactgcggcagttcctcaagatgaactccaccggagacttcgacctgcatctcttgaaagtcagcgagggaactaccatcctgctgaactgtactgggcaggtgaagggtcgcaagccggcagcgttgggagaggcgcagcccaccaagtcgctggaggaaaacaaatctttgaaggaacagaaaaaactgaatgacctgtgttttctgaagaggctgctgcaagagattaagacctgctggaacaagatcctgatgggaactaaggaacac

SEQ ID NO: 308647 - DNA, 531 bp, Artificial Sequence
  derived and/or modified sequence
atgtttcacgtgtcgttccgctacatatttggccttcctccactcatccttgtgctgctgcctgtggctagctcggactgtgacattgaaggcaaggatgggaagcagtacgagtcggtgcttatggtgtcgattgaccagctgctggatagcatgaaggagattggttcaaattgtctgaacaatgagtttaacttctttaagaggcacatttgcgatgctaacaaagagggcatgtttttgttccgcgcggcgcggaagctgcggcagttcctgaaaatgaactcaaccggagattttgatctgcatctgttgaaagtctccgagggaacgactatcttgctgaattgcaccggacaggtgaaagggagaaagccagcagcccttggagaagcacagccaactaagtcacttgaagaaaacaaatcgcttaaggaacaaaagaaactgaacgatctgtgttttttgaagcgcttgcttcaagagatcaagacctgttggaataagattctgatggggacgaaggagcat

SEQ ID NO: 308648 - DNA, 531 bp, Artificial Sequence
  derived and/or modified sequence
atgttccatgtatcctttcgctatattttcggcctgccgcccctgatcctcgttctgctacctgtggcatccagcgactgcgacatcgagggaaaagacggcaagcaatatgagtcggtcctaatggtgtcaattgatcagttgcttgactcgatgaaggagattggctcgaactgccttaacaatgaatttaacttctttaaacggcacatttgcgacgccaacaaggaaggcatgttcttatttcgggccgcgcgaaagctgaggcagttcctcaagatgaactccactggcgactttgatcttcatctactgaaagtctccgagggtacgaccattctacttaactgcacgggccaggtcaagggcagaaagccggcagctctgggcgaagcacagccaacaaaatctctggaagagaataagagtttgaaggagcagaaaaaactaaatgacctatgttttctgaagcgcttgcttcaagagataaagacctgctggaacaagatcttaatgggaacgaaggagcat

SEQ ID NO: 308649 - DNA, 531 bp, Artificial Sequence
  derived and/or modified sequence
atgtttcatgtgagctttcgctatatatttggactgccccctctgatactcgttctcctaccagtcgcttcctccgactgtgacatcgagggaaaagatggcaagcagtacgaaagtgtgctgatggtctcaatcgaccaactgctggatagcatgaaggagatcggatccaactgccttaataacgagtttaacttctttaaaagacacatatgtgacgcaaacaaggaaggaatgtttcttttccgggccgcaagaaaactgaggcagttcttgaagatgaatagtacaggggactttgatctgcacctcttgaaagtctctgaagggaccaccattctgctgaactgtaccggacaggtcaagggtaggaagcccgccgccttgggcgaggcccagcctacaaagagtctggaagagaataaatccctgaaggaacagaagaaacttaatgacctgtgctttttgaagcggcttctccaggagatcaagacatgttggaataagattttaatgggcacaaaggagcat

SEQ ID NO: 308650 - DNA, 531 bp, Artificial Sequence
  derived and/or modified sequence
atgtttcacgtgtcattcaggtacatcttcgggctcccaccacttatcctggtcctgctcccggtggcttcgtccgattgtgatattgaggggaaggacggtaaacagtacgagtcagtgttgatggtgagcatcgaccaactcctggactcaatgaaggaaataggatcaaactgcctgaataacgaattcaacttctttaagagacatatctgcgatgccaataaggaaggcatgttccttttccgggccgcacgtaaactccgacagttcctgaagatgaactccactggcgattttgacctccacctgcttaaagtctcggagggcacgaccattctgctcaactgtactggacaagtgaagggacgcaagcctgctgccttgggagaggcgcagccgaccaaatccctcgaagagaataagtccctcaaggaacagaagaagttgaacgatctgtgcttcctgaagcggctcctccaggaaatcaaaacttgctggaacaagattctcatgggtaccaaagagcac

SEQ ID NO: 308651 - DNA, 531 bp, Artificial Sequence
  derived and/or modified sequence
atgttccacgtgagtttcaggtacatcttcggcctcccccccctgatcctggtgttgttaccggttgcttcttctgattgtgatattgaaggcaaggacggcaagcagtatgaaagcgtgctgatggtgtcaattgaccagttgctggattccatgaaagaaatcggctcaaactgtctgaacaacgaattcaacttctttaaaagacatatctgcgacgcgaacaaggagggaatgtttctctttagagccgccagaaagcttagacagtttttaaaaatgaactccacgggtgacttcgatcttcaccttctcaaagtgtccgagggtactactattctgctgaattgtacaggccaggtcaaaggaagaaaacccgcagctttgggggaggcccaaccgaccaaaagtttggaggagaataagagcctaaaggagcaaaaaaaattgaatgatctgtgttttctgaaacgtcttctgcaggagataaagacctgctggaacaagattctgatgggcacaaaggagcac

SEQ ID NO: 308652 - DNA, 531 bp, Artificial Sequence
  derived and/or modified sequence
atgtttcatgtgtccttcagatacatctttggccttccgccattgattctggtgcttcttcccgtggcatccagcgattgcgatatcgagggtaaggatggaaagcaatacgaatcggtcctgatggtgtccattgaccagctgcttgattcgatgaaagaaattggatccaactgcctgaataacgagtttaacttctttaagcgccacatttgcgatgccaataaagagggaatgttcctctttagagccgcacggaaactgcggcagtttcttaagatgaactcgactggcgatttcgatctgcacctgctgaaggtgtcggagggtaccaccatccttctgaactgtaccggacaagtcaaggggcgcaagcccgcagcgctgggggaagcacagccgactaagagcctcgaagaaaacaagtcacttaaagaacagaaaaaactcaacgatctttgttttctgaagagattgcttcaagaaatcaaaacgtgttggaacaagattctgatggggactaaagaacat

SEQ ID NO: 308653 - DNA, 531 bp, Artificial Sequence
  derived and/or modified sequence
atgttccacgtgtcattcagatacatttttggcttgccacctctgatcctggtacttcttccagtagcctcatcggactgtgatatcgagggaaaggatggaaagcaatacgagagcgttctgatggttagcattgatcaattgttagattctatgaaggagattggaagtaattgtcttaataatgagttcaatttttttaagcgtcacatttgtgatgcgaataaagagggcatgttcttgttccgagctgcccgaaaactccgtcaattcttgaaaatgaactcaacgggtgattttgatctccatcttctgaaagtgtcagaaggaaccactatacttctcaactgcactggacaggtgaagggacgaaagccggcggcacttggtgaagcacagccaactaaatctttagaagaaaataagagtcttaaagaacaaaagaaacttaatgatttgtgttttttaaaacgacttcttcaggaaatcaaaacatgctggaataagattttgatggggacgaaggagcat

SEQ ID NO: 308654 - DNA, 531 bp, Artificial Sequence
  derived and/or modified sequence
atgtttcacgtgtcatttcggtacatcttcggactgccacctctcatcctggtgctgctgcccgtcgcgtcgtccgactgtgacatcgaaggtaaggatggtaaacagtacgaatcagtgcttatggtttcgattgatcaactgcttgatagcatgaaggagatcggatcgaattgtctcaataacgagtttaacttctttaaacgacacatctgtgatgcgaacaaagaaggaatgttcctctttagggcggctaggaagctgcgccaattcctcaaaatgaacagcaccggagatttcgatctgcacctgctgaaggtgtcagagggtaccactattctgctgaactgcaccggccaagtgaaggggcggaagccagccgcacttggggaggcacagccgaccaagagcctcgaagaaaacaagagccttaaagagcaaaagaagctcaacgacttgtgcttcctcaaaagattgttgcaggagatcaaaacgtgttggaataagatcctgatgggaactaaggagcat

SEQ ID NO: 308655 - DNA, 531 bp, Artificial Sequence
  derived and/or modified sequence
atgttccatgtcagctttagatacatttttgggctgcctcccctgattctcgtcctgcttcccgtggcatcgagcgattgtgacatcgagggtaaggatggaaagcagtatgaatccgtgttgatggtttcgattgaccagctcctggattcgatgaaagagatcggttcgaactgcttgaacaacgaattcaacttctttaagcgtcatatttgcgatgcaaataaggaaggtatgttcctcttcagagccgcacgaaagctgcggcaattccttaagatgaactccactggcgattttgatctccatctgctgaaggtgtcagaaggcactactattctcctgaattgtactggacaagtgaagggccgaaagccagccgcacttggagaagcccaacccactaagtctcttgaagaaaacaagagcctgaaggagcagaaaaagctcaacgacctctgttttctgaagcgcctgctccaagagattaagacttgttggaataagatactgatgggaaccaaagaacac

SEQ ID NO: 308656 - DNA, 531 bp, Artificial Sequence
  derived and/or modified sequence
atgtttcacgttagcttcaggtacatctttggactgccccctctgatcctggttctgctgccggttgcgtcctctgactgcgatattgaaggaaaagacgggaagcaatacgaatcagtgctcatggttagcatagaccaacttctcgattcgatgaaagagattggtagcaattgtttgaataacgagttcaatttctttaagagacacatttgtgatgcaaacaaggaaggcatgtttctcttcagggccgccagaaaactgcggcagttcctcaaaatgaattccaccggcgactttgatctacatctactgaaagtgagcgaaggcactactatcctgctgaactgcacaggccaggtgaagggaaggaagcccgccgcactgggcgaagcccagcctaccaaatcactggaggagaataagtcgctcaaggagcagaaaaagctaaacgacttgtgcttcctgaagcggttactgcaggagattaaaacctgctggaacaagattctcatggggacaaaggagcat

SEQ ID NO: 308657 - DNA, 531 bp, Artificial Sequence
  derived and/or modified sequence
atgtttcatgtctcgttccgctacatctttggcctcccacctctgatcctcgtgctgttgccagtggcttcctcggattgtgacattgagggcaaggacgggaaacaatacgaaagcgtccttatggtatcaatcgatcagcttctcgacagcatgaaggaaattggtagtaactgcctcaataacgaattcaatttctttaagaggcacatttgtgatgcaaacaaggaaggaatgtttctttttcgcgccgcacgaaaactgcgacagtttctcaaaatgaactcaactggggattttgacttgcacctcctcaaggtgtcagaaggaaccactatacttctgaactgcaccggacaagtgaagggtcgtaagccggccgcacttggagaagctcagccaacgaaatcccttgaagagaataagtcgcttaaagagcaaaagaaactgaatgatctgtgttttcttaagcggctgctccaagagataaagacttgctggaacaaaatcctcatgggaaccaaggagcat

SEQ ID NO: 308658 - DNA, 531 bp, Artificial Sequence
  derived and/or modified sequence
atgtttcatgtatcgtttcgatatatatttggtctaccgccgctaatactagttttactaccggttgcgtcgtcggattgtgatatagaaggtaaagatggtaaacaatatgaatcggtattaatggtatcgatagatcaactactagattcgatgaaagaaataggttcgaattgtttaaataatgaatttaatttttttaaacgtcatatatgtgatgcgaataaagaaggtatgtttttatttcgagcggcgcgtaaattacgacaatttctaaaaatgaattcgacgggtgattttgatctacatctactaaaagtatcggaaggtacgacgatattattaaattgtacgggtcaagttaaaggtcgaaaaccggcggcgttaggtgaagcgcaaccgacgaaatcgctagaagaaaataaatcgttaaaagaacaaaaaaaactaaatgatttatgttttttaaaacgtctactacaagaaataaaaacgtgttggaataaaatactaatgggtacgaaagaacat

SEQ ID NO: 308659 - DNA, 531 bp, Artificial Sequence
  derived and/or modified sequence
atgtttcatgtgtcatttagatatatcttcggtctcccaccgctgattctggtgttgctgcctgttgcctccagtgattgtgacatcgagggtaaggacgggaagcagtacgagtcagtgttgatggtttcaatcgaccagttgctggatagcatgaaggagattgggagtaattgtctgaacaatgagtttaattttttcaaaagacatatatgcgacgccaataaggagggcatgttcctgtttcgagctgcaagaaaactgagacaattcctgaagatgaattctacaggcgactttgacctgcatttgctgaaagtgtccgaggggaccacaatactgctcaactgtaccgggcaggtgaaggggaggaagcccgccgcactgggagaagctcagccaaccaaatccctcgaagagaataagagcctcaaggagcagaaaaaattgaacgatttgtgtttcctgaaaagactgctccaggaaattaagacttgttggaataagatcctgatgggcactaaagagcat

SEQ ID NO: 308660 - DNA, 531 bp, Artificial Sequence
  derived and/or modified sequence
atgtttcatgttagtttccggtatatttttggccttcctccccttatcttagttcttctgccggtggcgtcaagtgactgtgatattgaaggaaaagatggcaaacaatacgagtcagttctgatggtttcgattgatcaactgttagactccatgaaagagattggcagtaattgcctgaataacgaattcaactttttcaaaaggcatatttgtgatgcaaataaagaggggatgtttttgtttagagcggcaagaaagcttcgacaatttttgaaaatgaactcaacaggcgactttgatcttcaccttctgaaggtctccgaaggaacaacaattttattaaactgtacaggccaggttaagggaaggaaaccagccgcactgggagaagcacagccgactaagagcctggaagaaaacaagtcactcaaggaacaaaaaaaattgaatgacttatgttttcttaaacgcctgctgcaagaaatcaaaacatgttggaataagattctcatggggacaaaggaacac

SEQ ID NO: 308661 - DNA, 531 bp, Artificial Sequence
  derived and/or modified sequence
atgttccacgtatcctttaggtacatctttggactgccaccgctgatcttagtcctgctgcccgtggctagcagcgactgtgatattgagggtaaggatggcaaacagtatgaaagcgtgctgatggtgtccatcgaccagctgctcgacagcatgaaggagattgggagtaattgtctgaacaacgagtttaacttcttcaagcggcatatctgcgacgccaacaaggagggaatgttcctttttcgggccgccagaaaactgcgacagttcctgaaaatgaatagtaccggagactttgacttacacctcctgaaggtctcagagggaacaacaattctgttgaactgcactgggcaggttaaaggacgcaagccagccgcattgggggaggcccagccgaccaagagcttggaggaaaacaaaagcctgaaggagcagaagaagcttaacgacctgtgtttcctcaaacggctactccaagagatcaaaacttgttggaacaagattctcatggggactaaagaacac

SEQ ID NO: 308662 - DNA, 531 bp, Artificial Sequence
  derived and/or modified sequence
atgtttcatgtcagctttcgctacatttttggcctcccaccgctgattttggtgcttcttcctgtggcctcgagcgattgtgacattgaaggtaaggatggcaagcaatatgagtccgtccttatggtgtccattgatcagctgttggattcgatgaaggaaattggcagcaattgtctgaataacgaattcaactttttcaagcggcatatttgcgatgcgaataaggaaggtatgtttctttttcgcgcagcacgaaaactgagacaattcttgaaaatgaactccaccggggactttgacctgcaccttcttaaagtctccgaaggtaccaccattcttcttaactgtaccggacaggtgaagggccgtaaacctgccgctcttggggaagcacagccaaccaagagcctcgaggagaacaagtcgctgaaagaacagaagaagctcaatgatctgtgtttccttaagagactgcttcaggagataaagacttgttggaacaagattcttatgggtaccaaagagcac

SEQ ID NO: 308663 - DNA, 531 bp, Artificial Sequence
  derived and/or modified sequence
atgttccacgtgtccttccgctacatcttcgggttgccgccgctgattttggtgctccttccagtggcctcctctgactgcgacattgaaggaaaggatggaaagcagtacgagtcggtcttgatggtatccatagaccaactgctcgatagcatgaaggaaatcgggagcaactgtttgaataacgaattcaacttcttcaaacggcacatttgcgacgcgaacaaggaaggtatgttcctgtttagagcggccaggaaactcagacagttcctcaagatgaactcgactggtgacttcgacctgcacctcctcaaggtttctgagggtactaccatcctccttaactgtaccgggcaggtgaaaggacgcaagcctgcagcactgggcgaagctcaaccaaccaagtcgctcgaggagaacaagtcacttaaagagcagaaaaagctgaatgatctgtgctttctcaaacgactgctgcaagaaatcaagacctgctggaataagatcctgatgggcacgaaggagcat

SEQ ID NO: 308664 - DNA, 531 bp, Artificial Sequence
  derived and/or modified sequence
atgttccatgtctcgttccgctacatcttcgggctcccgccgctcatcctggtcctgttgccagtcgcgtcctccgattgcgacatcgaagggaaagatgggaagcagtacgaatcagtgctgatggtgtcaatcgaccagctgctggattcgatgaaggaaatcggctcgaactgtctgaacaacgagtttaacttctttaaacggcatatctgcgacgccaacaaggagggaatgtttttgttccgggcggcacgcaagctgagacaattcctgaagatgaactcgactggtgacttcgacctgcatctcctgaaagtctccgaagggactaccatcctgcttaactgcacggggcaggtcaagggccgcaaaccggccgctctgggagaggcccaaccgactaagtcccttgaggagaataagtctctgaaggagcaaaagaagttgaatgatttgtgcttcctcaaacgcctgttgcaggaaatcaagacttgctggaataagatcctgatgggaaccaaggaacac

SEQ ID NO: 308665 - DNA, 531 bp, Artificial Sequence
  derived and/or modified sequence
atgttccatgtaagcttcagatacattttcgggctgccaccgctgattctggtcctgcttccagtggccagctccgattgcgatattgagggcaaagacggcaagcagtatgagtccgtgctaatggtcagcatcgatcaactgctggattcgatgaaagagatcggcagcaattgcctgaacaatgaattcaacttctttaaaaggcatatatgtgatgccaataaggagggaatgtttctgtttcgagcagcacgaaagctaaggcagtttctaaagatgaatagcacaggtgactttgacctgcaccttttaaaggtgagcgaaggcaccactatcctgttaaactgtactgggcaagtcaagggccgcaagcctgccgcgctgggagaggcacagcctactaagtccctggaggaaaataaatccctgaaggagcagaagaaactcaacgatctatgttttcttaagaggttgctccaagaaattaaaacctgttggaacaaaatacttatgggtactaaggagcac

SEQ ID NO: 308666 - DNA, 531 bp, Artificial Sequence
  derived and/or modified sequence
atgtttcacgtgagcttccgttacatttttgggctcccccctctaattttggtcctgctcccagtcgcctccagtgattgcgatatagaggggaaggacgggaaacagtacgagagcgttttgatggtgagcatagaccagctgctagacagtatgaaggaaattggtagtaactgtctgaacaatgaatttaacttctttaagagacatatctgcgatgctaacaaggaaggaatgttcctgttccgggccgcgaggaaactccgtcagttcttgaagatgaattctacaggcgattttgatctgcacctactaaaagtgagcgagggtactacaatcttgctaaactgtaccggccaggtcaaaggacgaaaacccgccgccctgggggaggcacagccaactaaatctctggaggagaacaagtcactaaaagaacagaagaagcttaatgatctctgtttcctaaaacgcttgctccaagagatcaaaacctgctggaataagattctgatgggcaccaaagaacat

SEQ ID NO: 308667 - DNA, 531 bp, Artificial Sequence
  derived and/or modified sequence
atgtttcacgtttcgtttagatacatttttggattgcctccacttattctcgtccttttgccggtggccagctcggactgcgacatcgagggtaaagatggcaagcagtacgagtcagtgcttatggtgtcaatagatcaactgctggatagtatgaaggaaattggatcgaactgccttaacaacgagtttaacttcttcaaaagacacatttgtgatgcaaacaaggaaggaatgtttctctttcgcgcagcccggaaacttcggcagttcctgaagatgaattcaaccggggattttgatctgcatctccttaaggtgtccgaaggaacgactattcttctgaactgcaccggtcaagtgaagggtcgcaaacctgctgccctgggcgaggcccaaccaaccaagtcgctcgaagagaacaagtcgctgaaagaacaaaagaagctgaacgatctctgttttctcaaaagactccttcaggagattaagacctgttggaacaaaattctcatgggtaccaaagagcat

SEQ ID NO: 308668 - DNA, 531 bp, Artificial Sequence
  derived and/or modified sequence
atgttccacgttagtttcagatacatctttggacttcctccactaatcctcgtcttgttgcctgtggcaagttccgattgtgatatagaaggaaaggacggaaaacagtatgagtcagttcttatggtttctattgatcaacttttggactcaatgaaagaaataggaagtaattgcctaaacaatgagtttaattttttcaagagacatatatgcgatgctaataaagaaggaatgttcttgttcagggctgcacgtaaattaagacaattcctcaagatgaacagcaccggggactttgatttgcacctcttgaaggttagcgaaggtaccacgattcttctcaattgcaccgggcaggtgaagggtaggaaacctgccgctctgggagaagctcagccaactaaatcccttgaggagaacaagagcttgaaggaacaaaagaaattgaatgacctttgctttttgaagcggcttttgcaagaaatcaaaacatgttggaataaaatacttatgggtactaaggagcac

SEQ ID NO: 308669 - DNA, 531 bp, Artificial Sequence
  derived and/or modified sequence
atgtttcacgttagtttcagatatatatttgggctacctcctctgatcctggtcctgctgcccgtcgcaagctccgattgcgatatagaaggtaaggacgggaaacagtacgagtctgtactgatggtcagcattgatcagctgctggattccatgaaggaaatcggaagtaactgtctcaacaacgaattcaactttttcaagcggcacatttgtgacgccaataaggaaggcatgtttctgttcagggccgctcgaaaactccgacagtttctgaagatgaactctaccggagatttcgacctccacctcctcaaagtgagtgagggcactaccatactccttaactgcactggccaggtgaaggggaggaaacctgccgctctgggagaggcccaaccaactaagagcctggaggaaaacaagtccctgaaagaacagaaaaaactgaacgacctgtgtttcctgaagcgcctgctgcaggagattaagacttgttggaataaaattctaatgggaacaaaggaacac

SEQ ID NO: 308670 - DNA, 531 bp, Artificial Sequence
  derived and/or modified sequence
atgttccacgtgagttttagatacatctttggcctcccacccctgattctggtgttgctgcctgtggcatcatctgactgcgatatcgaaggcaaagacggaaaacagtatgaaagtgtcctgatggtgagcattgaccaattgctcgatagtatgaaagaaataggtagcaactgcctcaataatgaatttaatttttttaagaggcatatttgtgatgctaataaggagggcatgttccttttccgggctgccaggaagctgcggcaattcttgaagatgaatagcactggcgattttgaccttcacctgctcaaagtgagcgagggcaccactatcctgctcaactgcacagggcaggtgaagggtcgcaaaccagcagccttaggggaagcccaacctacaaagagcctcgaagagaataaatcccttaaggaacaaaaaaagcttaacgatctgtgttttctcaagaggcttttgcaggaaattaagacatgttggaacaaaatactgatgggaactaaagaacat

SEQ ID NO: 308671 - DNA, 531 bp, Artificial Sequence
  derived and/or modified sequence
atgttccacgtgtccttccggtatattttcgggctgccccctttgatccttgtgttgctcccagtggcttccagtgactgcgacatcgagggtaaggacgggaagcagtatgagagcgtgcttatggtctctatcgatcagctgcttgactccatgaaagaaatcggttccaactgtcttaacaacgaatttaactttttcaagcgccatatttgtgatgcgaataaggagggcatgttcctgttccgcgcagcgagaaaactgcgtcagttcctgaagatgaactccacaggagacttcgacctgcacctgctcaaggtctctgaggggacgaccatcttgttgaattgcaccggtcaggtcaagggacgcaagcccgcggccctcggagaggcccagcccaccaagagcctggaagaaaataaatctttgaaggagcagaagaagttgaatgatttgtgctttctcaagcgcttgcttcaggagatcaagacctgttggaacaaaatcctgatgggcaccaaggaacat

SEQ ID NO: 308672 - DNA, 531 bp, Artificial Sequence
  derived and/or modified sequence
atgttccatgtctcgttccgctacatcttcggcctgccaccgctgatcctcgtgctcctgccggtggcttcttcggattgcgatatagaagggaaagacgggaaacagtacgagtcagtcctcatggtaagcatcgaccaattgttggactctatgaaagaaattggatccaactgtcttaacaacgaattcaactttttcaaaagacacatctgcgatgctaataaggagggtatgtttctgttccgggctgcgaggaagttgaggcagtttctgaaaatgaatagcaccggcgatttcgatctccatcttctcaaggtttcggagggcactaccatcctgctcaactgcactggacaagtgaagggccggaagcccgcagccttgggggaggcccagccaactaagtccctggaagagaataagtcactcaaggaacagaagaagctgaacgacttgtgcttcctgaagagactgctccaagagatcaagacctgttggaacaagatcctgatgggaacgaaagagcac

SEQ ID NO: 308673 - DNA, 531 bp, Artificial Sequence
  derived and/or modified sequence
atgttccacgtcagcttccgttacatattcggcctgccccctttgatcctcgtcttgcttccggtggcatcgtcagattgtgacatcgaaggaaaggatgggaagcagtacgagagcgtgctgatggtttctatagatcagttgctcgacagcatgaaggaaattggcagcaactgtctgaacaatgaattcaacttctttaaacgccacatctgtgatgctaacaaggaaggcatgtttttatttcgggccgcaaggaagttgaggcagttcctgaaaatgaacagcacgggggacttcgatttgcatctgttgaaagtcagtgagggcaccaccatcctgctaaactgtacagggcaggtaaaggggcgcaagcctgcagccttaggtgaggcccaaccaaccaaatccctcgaggaaaacaaatccttaaaagagcaaaagaagctcaatgatttgtgctttttaaagcggctgctccaagagatcaagacctgctggaacaagatactcatggggaccaaggagcac

SEQ ID NO: 308674 - DNA, 531 bp, Artificial Sequence
  derived and/or modified sequence
atgttccacgtctcatttagatacatattcgggctgccccccctcatcttggtgctcctgcctgtagcttcttccgactgcgatattgaggggaaggatggcaagcagtacgaatcagtgctcatggtgtccatcgaccagttgctggatagtatgaaagaaattggttctaattgcctcaataacgaattcaacttctttaagagacatatttgtgacgccaacaaagaggggatgttcttatttcgcgctgcacgcaaactgcgacagttcctcaagatgaatagcacaggcgactttgatcttcacctcttaaaggtctcggaaggaacaaccatcctgttgaattgcaccggccaggtgaaggggagaaaacctgctgccctcggcgaggctcagcctacaaagtctcttgaagaaaataaatctctcaaggaacaaaagaagctgaacgatctttgcttcctgaaacgccttctgcaggagatcaaaacatgctggaacaaaatcctgatggggacaaaagagcac

SEQ ID NO: 308675 - DNA, 531 bp, Artificial Sequence
  derived and/or modified sequence
atgtttcatgtttcattccgatatattttcggtcttcctcctttaattttagttcttttgcctgtagcatcatctgattgtgatattgagggtaaagatggtaagcaatatgaaagtgttttaatggtaagtatcgatcaattacttgattcaatgaaagaaattggttctaattgtcttaataatgaatttaatttttttaagagacatatctgtgacgctaataaagaaggtatgtttttatttcgagcagcaagaaaacttagacaattcttaaaaatgaattcaacgggagatttcgatttgcatttattaaaagtttcagaaggaacaacaatacttttaaattgtacaggacaagttaaaggaagaaaaccagcagctcttggagaagcacaacctacaaagagtcttgaagaaaataaatcacttaaagagcaaaaaaagcttaatgatttgtgttttcttaaaagactattacaagaaattaagacatgttggaataaaattcttatgggtactaaggagcat

SEQ ID NO: 308676 - DNA, 531 bp, Artificial Sequence
  derived and/or modified sequence
atgtttcatgttagtttccgctacatttttggcctgccgcccctgatcctagttctccttccagttgctagtagcgattgtgacatcgaaggaaaagatggcaaacaatacgagagtgttcttatggtatcaattgaccaacttctggattcaatgaaggagatcgggtcgaattgcctgaacaacgaattcaacttcttcaagcgacatatctgcgatgctaataaagaaggcatgttcttgtttcgtgctgcccgaaagctacgtcaattcttgaagatgaattccaccggcgatttcgatcttcatttgctcaaggtcagcgaagggaccaccattctactaaactgtacaggtcaggtcaaaggtcgaaagcccgctgcattgggcgaggcccagcctacaaagtctctcgaagaaaacaaaagtctaaaagagcaaaaaaagttgaacgatctctgtttcttgaagcgactgctccaagaaattaaaacttgctggaacaagatcctgatgggaacgaaggaacat

SEQ ID NO: 308677 - DNA, 531 bp, Artificial Sequence
  derived and/or modified sequence
atgtttcacgtgagctttagatacatttttggactccccccacttatccttgtccttctgccagtggcctcgtcggactgtgatattgaaggaaaagatggcaagcagtacgaatcagtgcttatggtcagcattgatcagctgctggattcgatgaaggaaattggctccaattgtctgaataacgagtttaacttctttaaacggcatatctgcgatgccaataaggagggaatgtttctgtttcgcgcagcacggaagctccgccagttcctgaagatgaattcgactggtgattttgacctgcatctgttgaaggtgtccgagggaacgacgatccttctcaactgtactgggcaagttaaaggtcgcaaaccagcagccctgggcgaagcgcaacctactaagtcacttgaagagaacaaatcactgaaagaacagaaaaagttgaacgacctgtgttttctgaaacgacttcttcaggagattaagacttgttggaacaagatcttgatgggaaccaaggagcac

SEQ ID NO: 308678 - DNA, 531 bp, Artificial Sequence
  derived and/or modified sequence
atgtttcatgtgtcgtttcggtacattttcggactgccaccactcattctggtgctgcttcctgtggcatcgtcagactgtgacatagaagggaaggatggaaagcaatacgaatccgtgctgatggtgtcaattgatcaactgctggacagcatgaaggagatcggatccaactgtcttaacaatgagtttaactttttcaagagacatatatgtgatgctaacaaggaagggatgttcctctttagggctgcgcgtaaactgagacaatttctcaaaatgaactcaactggggactttgatcttcatcttctcaaggtgtcggaaggcaccacgattcttctgaactgcaccggacaggtgaaaggacggaaacctgcagcactgggagaagcacaaccaactaagtcacttgaagagaacaagtccctgaaagaacagaagaaacttaatgacctttgttttctgaagcgactcttgcaggaaatcaagacctgttggaacaagatccttatgggaaccaaggaacac

SEQ ID NO: 308679 - DNA, 531 bp, Artificial Sequence
  derived and/or modified sequence
atgtttcatgtctccttccggtacattttcgggctgccgccactcatcctcgttcttctgccagtggcatcttccgattgcgacatcgaaggaaaggacgggaagcagtacgaatcagtccttatggtgagcattgaccagctcctggattcgatgaaggagattggttccaactgcctgaataacgaattcaacttctttaagaggcatatttgtgatgcaaataaggagggaatgtttcttttcagagccgcgcggaaactgagacagtttctgaagatgaactccacgggagactttgacctgcatttgctgaaagtgagcgaaggaaccaccatcctccttaattgtactggacaagtgaaagggcggaagcctgccgcattgggggaggctcaaccaactaagagccttgaggaaaacaagtcgctgaaagaacaaaagaagctcaacgatctttgtttcttgaagagacttctgcaagagattaagacttgttggaacaagatacttatgggtaccaaggaacat

SEQ ID NO: 308680 - DNA, 531 bp, Artificial Sequence
  derived and/or modified sequence
atgttccacgtgagtttccgctacatctttggcctgccaccactgattctggtcttactgccagtggccagttcggactgcgatatagaaggtaaggacgggaagcagtacgaatctgtgctgatggtgtcaattgaccaattgctcgattctatgaaagagatcgggagtaactgcctgaataatgagttcaactttttcaagcgacacatttgcgacgctaacaaggaaggaatgtttctgttccgggccgcccggaagttaagacagtttttgaaaatgaactctactggagatttcgatctccatctattgaaggtgagtgagggcacaacaatcctcctaaactgcaccgggcaagtcaagggccggaagccggctgccttgggagaggcgcagcccaccaagtcgttagaagagaacaaaagcctaaaggagcaaaagaaacttaacgacctctgctttctaaagcgcttactgcaagaaattaagacttgctggaataagattctgatgggaacaaaggagcac

SEQ ID NO: 308681 - DNA, 531 bp, Artificial Sequence
  derived and/or modified sequence
atgttccatgtgagctttaggtacattttcggcctgccccccctcatactcgtgcttctgcccgtcgctagttctgattgtgacatcgagggtaaagacgggaaacagtatgaatccgtgttgatggtatcaatcgaccagctgcttgactcaatgaaggagatcggttcaaattgtctgaataatgagttcaacttcttcaaacgacatatttgcgacgcaaataaggaagggatgttcctgtttagagccgcaaggaagttgaggcagttcttgaaaatgaacagtacgggcgatttcgatctgcacttgctgaaagtctctgaaggcacaacgattctcctcaactgcaccgggcaggtgaagggccgcaaacccgcagccctcggcgaggcgcaaccgactaaatcacttgaagagaataaatctttgaaggaacaaaagaaactcaacgacctctgttttctgaagaggttgctgcaggagataaaaacttgttggaataagattctcatgggcacaaaagaacat

SEQ ID NO: 308682 - DNA, 531 bp, Artificial Sequence
  derived and/or modified sequence
atgttccatgtctcgttccgttacattttcggcctgccaccgctcattctggtgctcttgccagtggcctcgagcgattgtgacatcgaaggcaaggatgggaagcagtacgaaagcgtgctgatggtgtcgatcgaccagttgctggattcgatgaaggaaatcggatctaattgcctcaacaacgagttcaatttcttcaaacggcatatctgcgatgccaataaggaaggaatgttcctcttcagagccgcgagaaagctgcggcaatttctcaagatgaattcgaccggagacttcgacctgcacctgcttaaagtgtcggagggtaccaccatcttgcttaactgcaccggacaggtgaagggacgcaaaccagctgcgctgggcgaagcgcagccgaccaagtcacttgaggaaaacaagtccctcaaggaacagaaaaaactgaacgacctgtgcttcctgaagcggctgctgcaggaaatcaagacgtgctggaacaagattctgatggggaccaaggagcac

SEQ ID NO: 308683 - DNA, 531 bp, Artificial Sequence
  derived and/or modified sequence
atgtttcacgttagcttccgttacatctttggcctgcccccgctcatcctggtccttttgcctgtcgcgtcctcagattgtgacatcgagggcaaggatggcaagcagtacgagagtgtgctgatggtgagcatcgaccaactgctagactctatgaaggaaataggcagtaactgtcttaataatgagttcaacttctttaaaaggcacatctgtgatgctaataaggaaggtatgttcttatttagggccgccaggaaactccggcagttcctgaagatgaactccaccggagattttgacctgcacctcttgaaagttagcgaaggcaccacaattctcctgaactgtaccgggcaggttaaggggcgcaagcccgctgccctcggagaggctcagccaaccaagtccctagaagagaacaaatcgttgaaggagcaaaagaagcttaacgacttgtgctttctcaagagactgctccaggaaattaagacctgctggaataagattttaatgggcactaaagagcac

SEQ ID NO: 308684 - DNA, 531 bp, Artificial Sequence
  derived and/or modified sequence
atgttccacgtaagtttcagatatatattcgggcttccacctctcatcttagtgctgctccctgtggcatcctctgattgcgacattgaagggaaagatgggaaacagtatgaatcagtgctgatggtttccatcgatcagctcctcgattcaatgaaagagatcggatccaattgtctgaacaacgaattcaacttcttcaaaaggcacatatgtgatgccaataaagaagggatgttcctctttcgagcggcacgcaaactgagacaattcctcaaaatgaattctactggggattttgacctgcatttactcaaggtgtctgaagggactacaatcctgctcaattgcacaggacaggttaaaggaagaaaacccgctgctctgggggaagcccagcctactaaatccctagaagagaacaaatcacttaaagagcagaaaaaactgaacgatctttgttttctgaaacggctgctgcaagaaattaaaacatgctggaataaaatcttgatgggaacaaaagaacac

SEQ ID NO: 308685 - DNA, 531 bp, Artificial Sequence
  derived and/or modified sequence
atgtttcatgtcagtttcaggtacatattcggactgcctcccctcatactggtcttgcttccggttgctagttccgactgtgacatcgagggcaaggacgggaaacagtatgagtcggtgctcatggtgtcaatcgaccagctcctcgacagcatgaaggagatcggctctaactgtctgaacaacgagtttaacttcttcaaaaggcacatctgcgacgctaataaggaaggtatgtttctcttcagggccgcccgcaaactgaggcagtttctgaagatgaactcgactggagacttcgatctgcatctgctcaaagtgtcagaaggtactacaatcttactgaactgcacaggccaggtgaagggccgcaagcccgcagcgcttggagaggctcagcccacaaagagcctagaggagaataaatccctgaaagagcagaaaaaactcaatgacttgtgcttcctcaaacgtctgctccaagaaataaaaacatgttggaacaaaatacttatggggaccaaggaacac

SEQ ID NO: 308686 - DNA, 531 bp, Artificial Sequence
  derived and/or modified sequence
atgtttcatgtgtctttcagatatatcttcggtctcccaccacttatcctggttctgctccccgtagcttccagcgattgcgatattgaaggaaaagacggtaaacaatacgagagcgtcctgatggtcagcattgatcagcttcttgatagtatgaaggagataggtagcaactgcttgaacaatgagttcaacttcttcaaaaggcatatctgtgatgccaacaaagagggtatgttcttgttccgtgctgccaggaagctgagacaattcctgaaaatgaatagtactggcgacttcgacttgcatcttctcaaggtaagcgaaggtaccacaatactgctgaattgtaccggccaggtaaaaggtcgcaaacccgccgccctgggagaagctcaacccaccaagtctttggaggagaataagtctctcaaggagcagaagaagctgaacgacctgtgctttttgaagaggttgttgcaggaaattaagacctgttggaataaaattctgatgggaactaaagagcac

SEQ ID NO: 308687 - DNA, 531 bp, Artificial Sequence
  derived and/or modified sequence
atgttccatgtctcgtttagatatatatttggattacctcctctgatcctggtgctcttacctgtggcatcaagcgactgtgatattgaaggcaaggatgggaagcagtacgaatctgtcttaatggttagtattgatcaattgttagatagtatgaaagagataggttctaattgtctcaacaacgagttcaacttcttcaagcgtcatatctgcgacgctaacaaggaaggtatgttcctattccgtgccgcgcgtaaactgaggcaattcctcaaaatgaactctactggcgattttgacctccacctcctaaaggttagtgagggcactacaattcttctgaactgtacaggccaggtgaaggggcgtaagcccgcagcgctcggagaagcccagcctactaagtctttggaggagaacaagtcattaaaggagcagaagaaactgaacgacctttgttttctgaagaggctccttcaggagattaaaacgtgctggaataagattctgatgggaacaaaggagcac

SEQ ID NO: 308688 - DNA, 531 bp, Artificial Sequence
  derived and/or modified sequence
atgttccatgtcagttttaggtacattttcggattgccacccctcatcctggtccttttaccagtggcaagctcagactgtgacatcgaaggtaaggatggcaaacaatatgagtccgtactcatggtgtctattgaccagttactggattcaatgaaagagataggtagcaactgtctgaacaacgagttcaacttcttcaaaaggcatatctgcgatgctaataaggagggcatgttcctgtttagagctgcccgcaagctcaggcaattcttaaaaatgaactctaccggcgacttcgatctgcacctgttgaaagtgtcagagggcaccactatactgctgaattgcactgggcaggtcaaagggcgcaagcccgcggctctgggcgaggctcagccaacaaagagtctcgaggaaaacaaatctcttaaagaacagaaaaagttgaatgacctgtgctttctaaaacggcttctccaggaaattaaaacatgttggaacaagatcctgatgggtacaaaggagcat

SEQ ID NO: 308689 - DNA, 531 bp, Artificial Sequence
  derived and/or modified sequence
atgttccatgtgtcctttcgctacatcttcggtctgcctccgcttatcctggtgttgctgcctgtcgcctcctcggattgcgatatcgaaggcaaggacggaaagcaatacgaatcggtgctgatggtgtccattgatcagctgttggactccatgaaggagatcgggtcgaactgcctgaacaatgagttcaacttcttcaagaggcacatttgcgacgcgaataaggagggcatgttcctgtttcgcgccgcccggaagctgcgacaattcctgaaaatgaacagcacgggagacttcgaccttcaccttctgaaggtgtcggagggaaccacgatcctgctcaactgcactggacaagtcaagggccggaagccggcggcactcggggaggcccagccgaccaaatcattggaggaaaataagtcgcttaaggagcagaagaaactgaacgacctgtgcttcctcaagaggctgctgcaagaaattaagacttgctggaacaagatcctgatgggtaccaaagagcac

SEQ ID NO: 308690 - DNA, 531 bp, Artificial Sequence
  derived and/or modified sequence
atgttccacgtttcctttcggtacatcttcgggctgccaccgctgattcttgtgctcctccctgtggcttcatcggactgcgacatcgagggaaaggacgggaagcagtacgaatcggtcctcatggtcagcatcgatcagctgctggacagcatgaaggaaatcggatccaattgcctgaacaacgagttcaacttttttaaaaggcatatctgtgatgccaataaggaaggaatgttcttgttccgcgccgcaagaaagctgcggcaattccttaagatgaactctacgggtgacttcgatctccacctgttgaaagtgtcagaaggaactaccatcctgcttaattgtaccggccaggtgaagggccgcaagccggccgcgctgggcgaggcgcaacccactaagtcgctggaggaaaacaagtccctcaaagagcagaagaagctgaacgatctgtgcttcctcaaaagactgttgcaagaaattaaaacctgctggaataagatcctcatgggaactaaagaacat

SEQ ID NO: 308691 - DNA, 531 bp, Artificial Sequence
  derived and/or modified sequence
atgtttcatgtgagcttccgttacatatttggattgccgcctcttatccttgtgctcctcccagtggcatcgtcagactgtgatatcgaaggtaaggatggtaagcaatacgaatcagttctgatggtgagcattgatcagcttctggattccatgaaagaaattggttcgaattgtcttaacaacgaattcaacttcttcaagagacacatttgcgacgcaaacaaggaaggaatgttcctgtttagagctgccaggaagttgcggcaatttctgaagatgaactccaccggagattttgatttgcatcttcttaaggtgtccgaaggtacgaccattctgctgaactgtaccggtcaggtgaaaggaagaaagccagccgcacttggagaagcacagcctaccaagtcgctggaagagaataagtcccttaaagaacagaagaaactgaacgatctgtgttttcttaaaagattgcttcaagaaatcaagacctgttggaacaagattttgatgggtaccaaggagcat

SEQ ID NO: 308692 - DNA, 531 bp, Artificial Sequence
  derived and/or modified sequence
atgttccatgtttccttcagatacattttcggtcttccccctcttattctggtcctgctgcccgtggcatctagtgactgcgatatcgaaggcaaagacggtaagcagtatgagtctgtattgatggtgtcaattgatcagctcctggattccatgaaagagataggttctaattgcctcaacaatgagtttaattttttcaaacgccatatttgtgacgcaaataaagaaggtatgttcttgttcagggccgcacggaagttgcggcaatttctgaagatgaacagtactggagactttgacttgcacttgctgaaagttagtgaaggcacaaccatcctgctgaactgcacggggcaagtgaaggggaggaaacccgctgctttgggagaggcccagcctacgaaatctttggaagagaacaagtctctcaaggagcagaagaagctgaatgacctgtgttttctcaagagattgcttcaggagatcaagacctgttggaacaagatccttatgggtacgaaggaacac

SEQ ID NO: 308693 - DNA, 531 bp, Artificial Sequence
  derived and/or modified sequence
atgtttcatgtgagtttcagatatatttttggattaccacctctgatattggtgcttctcccagtagcttctagtgattgcgatatcgaagggaaggatggaaagcagtatgaatcagtgctcatggtctccatcgatcagttactagattctatgaaagaaatcgggtctaactgtctcaataatgaatttaatttcttcaaaagacatatctgtgatgccaataaagaagggatgtttttgtttagagcagcccggaaactccggcagtttctcaaaatgaatagtactggggatttcgatttacatctcctcaaagtgtcagaaggaactacaatcctgctgaactgcacagggcaggtgaaaggaaggaagccagctgccctgggggaagcacagcccactaaatccctcgaagagaacaaaagtcttaaagaacagaaaaaattgaatgatttatgtttcctgaaacggctccttcaggagattaaaacttgctggaataaaatacttatgggaacaaaagagcac

SEQ ID NO: 308694 - DNA, 531 bp, Artificial Sequence
  derived and/or modified sequence
atgttccacgtgtcgttcagatatatttttggcctgccacccctgattctagtgttgctaccagtagcatcctcagactgtgatattgagggaaaggatggcaagcagtacgagagcgtgctgatggtgtcaatcgaccagttactggattctatgaaggaaatcggcagcaactgcctcaataatgaatttaactttttcaaacgtcacatctgcgacgcaaacaaggaaggaatgttccttttccgtgctgcacgaaaactcagacagttcctgaagatgaattccactggcgattttgatctgcacttgctgaaggtctctgagggaacaactatacttctgaattgcacgggtcaggtcaagggccggaaaccggctgcactcggggaggctcagcccactaagtccctggaagagaacaagtctctcaaggaacagaaaaaattgaatgatctttgtttcctcaaacgtctgctccaagaaatcaaaacgtgttggaacaagatactcatgggaacgaaagaacac

SEQ ID NO: 308695 - DNA, 531 bp, Artificial Sequence
  derived and/or modified sequence
atgttccacgtgagttttaggtatatttttggattaccgcctctgattctggtcttactccccgtggcttctagcgattgtgacatcgagggtaaagacgggaaacagtacgaatcggtgctgatggttagtatcgatcaacttctagactcgatgaaggaaatcggcagcaactgtctgaacaatgagtttaacttcttcaaacgccacatatgtgacgcgaacaaagaaggaatgtttcttttcagggcagcccgaaagctccgccaatttctgaaaatgaactccaccggagactttgacctgcacttactgaaggtgtccgagggaacaactatcctactgaattgcactggccaagttaaaggacgcaaaccggctgcgctcggcgaggcccagcctacaaagtctttggaagaaaacaagagcttgaaggagcaaaaaaaactcaacgatctttgcttcctgaaacggctccttcaggagatcaagacatgctggaacaaaattctcatgggcactaaggagcac

SEQ ID NO: 308696 - DNA, 531 bp, Artificial Sequence
  derived and/or modified sequence
atgtttcacgtcagcttcaggtatattttcggtttaccacccttgattctggtactgctgcctgttgcctcaagcgattgcgacatcgagggtaaagatggaaaacagtacgaaagcgtgctcatggtcagcatcgaccaattactggatagtatgaaagagatcggctctaactgcctgaacaatgagtttaactttttcaagaggcatatttgcgacgcaaacaaggaagggatgttccttttccgggccgcccgcaagttgcgacaatttctcaaaatgaactcaactggggattttgatctgcacctccttaaggtgagtgagggaactaccattcttttaaactgtacaggacaggtaaaagggcggaagccagccgcactcggggaagcccaaccgactaagagcctagaagagaataagagcctcaaagaacaaaagaagctgaacgatctgtgcttcctgaaacgcttgcttcaggagattaagacttgttggaacaagatactcatgggcacaaaggagcat

SEQ ID NO: 308697 - DNA, 531 bp, Artificial Sequence
  derived and/or modified sequence
atgtttcatgtgagcttcaggtacatattcgggttgcctccactcatcctagtgctgctccctgtggcatctagtgactgcgatatagaaggtaaggatgggaagcagtacgaatccgtcctgatggtgtccatagaccagttgctagactctatgaaggaaattggctctaattgcttgaacaatgaatttaatttcttcaagagacacatatgcgatgcgaacaaagaagggatgtttctcttcagggcagcccgcaagctgcggcaattcttgaagatgaactccacaggcgatttcgacttgcacctcctgaaggtttccgagggcacaactatattactgaactgtaccggccaggttaaggggaggaaaccggctgccctgggcgaagcccagccaactaaatctctggaagagaacaagagcttgaaagaacagaaaaagctgaatgatctgtgcttcttaaagcgtcttttgcaagagataaagacatgttggaacaagatcttaatgggcacaaaggagcac

SEQ ID NO: 308698 - DNA, 531 bp, Artificial Sequence
  derived and/or modified sequence
atgttccatgtgagcttccgctacatcttcggactcccaccactcatcttggtcctcctgccggtcgcgagctcagattgcgacatcgaaggcaaggacggaaaacagtacgagtcagtgctcatggtgtccatcgaccagctgctggactccatgaaagaaatcggatccaattgcttgaataacgagttcaacttcttcaagcgccacatctgcgacgccaacaaggaggggatgtttctgttcagggctgctagaaagctgcgccaattcctgaagatgaactcaactggagatttcgacctgcaccttctcaaagtgtctgaaggaaccactatcctgctcaactgcacgggccaggttaagggacggaaaccagccgccctgggtgaggctcagccgaccaagtcgctggaggagaacaagtcactgaaggaacagaaaaaacttaacgatctgtgtttcttgaagagacttcttcaagagatcaagacttgctggaataagatcctcatgggaaccaaagaacac

SEQ ID NO: 308699 - DNA, 531 bp, Artificial Sequence
  derived and/or modified sequence
atgttccatgtgagctttcgctacatctttggactccccccactgatcctggtcctccttccggtcgcgtcatcggactgcgatatcgagggtaaagacggaaagcagtacgagtccgtgctcatggtcagtatcgaccaactgttggactctatgaaggagatcggttccaactgcctgaacaacgagttcaatttcttcaagcggcatatctgtgacgctaacaaagaaggcatgttcctcttccgcgcagcaagaaaattgcggcaatttctgaagatgaactcgactggagacttcgacctgcatctcctcaaggtgagcgaggggacgactatcctgctcaactgcaccgggcaggtgaagggacggaaacccgctgccctcggagaagcccaaccgaccaaatccctggaagaaaacaaatcactgaaggaacagaagaagttgaatgacctctgtttccttaagagactgctgcaagaaatcaagacctgctggaacaagatcctcatgggaaccaaggaacat

SEQ ID NO: 308700 - DNA, 531 bp, Artificial Sequence
  derived and/or modified sequence
atgttccacgtgagcttcaggtacatctttggcctgcccccgctgatcctggtgcttctccctgtagcctccagcgactgcgacatcgaaggcaaggatggaaaacagtacgaatcagtgctgatggtttcgatcgaccagctgctcgacagcatgaaggagattggctccaactgtctgaacaatgagtttaactttttcaaacggcatatatgtgatgcgaacaaagagggtatgttcctgttccgggctgctagaaagctgcgacaattcctgaagatgaatagcactggcgatttcgacctgcatttgcttaaggtgtccgaaggaactacgatcctgctgaattgcaccgggcaggtgaagggcagaaaaccagccgcactcggagaagctcagccgactaagagcctggaggagaacaagtctctcaaggaacagaagaaactgaatgacttgtgcttcctgaagcgccttctgcaagaaatcaagacctgttggaacaagatcctcatgggtaccaaagaacac

SEQ ID NO: 308701 - DNA, 531 bp, Artificial Sequence
  derived and/or modified sequence
atgttccatgtgagcttccgctacattttcggactgccacctcttatcctcgtgctgctgcctgtggcctctagcgattgtgatatcgagggcaaggatggcaaacagtacgaaagcgtattgatggttagcatcgaccaacttcttgacagcatgaaggagatcgggagcaactgcttgaacaacgaatttaacttcttcaaaaggcacatttgcgatgctaacaaagaaggaatgtttctttttagagctgctagaaagctgcggcagtttctgaaaatgaactcaacaggcgacttcgaccttcacctgctgaaggtgagcgagggcaccactatcctgctgaattgcactggacaggtgaaggggagaaaacctgcagctctgggagaagcccagcccaccaagtctctcgaggagaacaagtcgctcaaggaacagaagaagctgaatgacctctgctttctgaagaggctgctgcaggaaatcaagacctgctggaataaaatccttatgggaacaaaagaacat

SEQ ID NO: 308702 - DNA, 531 bp, Artificial Sequence
  derived and/or modified sequence
atgttccatgtctcctttagatacatctttggactcccacctcttatacttgtcctgctgcccgtagccagtagcgactgtgatattgaaggtaaagacggcaagcaatacgagagcgttctgatggtctcaattgaccagctcctcgactctatgaaggagatcggaagtaactgtctcaacaatgaatttaactttttcaaaaggcacatctgcgatgccaacaaggaaggaatgtttttgttcagggctgctaggaaactgagacaattcttgaaaatgaacagtaccggagacttcgacctccacctgcttaaagtcagcgagggcacaacaatcctgctgaattgtaccggacaagttaaaggacgcaaacccgctgcgctgggcgaggcgcagcccactaagtccctggaagagaacaagtcccttaaggagcaaaagaagctcaacgacctctgttttcttaagagactcctgcaagagatcaagacatgctggaacaaaatcctcatgggcactaaggagcat

SEQ ID NO: 308703 - DNA, 531 bp, Artificial Sequence
  derived and/or modified sequence
atgtttcacgtgtcttttagatatatatttgggctcccaccacttattctagtccttctgcctgtcgccagttccgattgcgatatcgagggcaaggatggaaaacaatatgagtcagtgctaatggtgagcatcgatcagctgctggacagcatgaaggagatagggtcaaactgcctgaacaatgagtttaacttttttaaaaggcacatctgtgatgccaacaaagagggaatgtttctttttagggcggctcgtaagcttagacaatttctaaagatgaatagcacaggggatttcgatctgcaccttctgaaggtgtccgaaggtacgacaatactgctgaactgtactggacaggtgaagggccgcaagccagctgctctgggagaggcccagcccaccaagagtctcgaggaaaataaaagtttaaaagagcagaaaaaactgaatgatttgtgcttcttaaagcgcctccttcaagaaatcaaaacctgttggaacaaaattttgatggggaccaaggagcac

SEQ ID NO: 308704 - DNA, 531 bp, Artificial Sequence
  derived and/or modified sequence
atgtttcacgtctcctttaggtacatcttcgggttgcccccattgatccttgtgcttttaccggttgcaagctcggactgcgacatagagggtaaggacggaaaacagtacgaatctgtactaatggtgagtatagatcaattgttagacagtatgaaagaaatcgggagtaattgcctcaacaacgaattcaactttttcaaacgacatatctgcgacgccaataaggagggaatgtttctgtttagggcagcacgcaaattaagacagtttctaaagatgaattccacgggtgatttcgatctccacctgctgaaggtatcagaagggacaaccatcctcctcaattgtaccgggcaggttaaagggcgtaagcccgccgcccttggggaggcacagccaacaaagtcattggaggagaacaaaagtttgaaggaacagaaaaaactcaacgatctatgctttctgaaacgactgctacaggagataaaaacctgttggaacaagatccttatgggcactaaggaacat

SEQ ID NO: 308705 - DNA, 531 bp, Artificial Sequence
  derived and/or modified sequence
atgttccacgtctcctttaggtatatctttggactgccgccactaattctggttctgttgccagttgcaagttccgactgcgacattgaggggaaggatggcaaacagtacgaaagcgttttgatggtgtcgatcgatcaattgctcgattccatgaaggagatcgggagcaattgccttaataatgagtttaacttcttcaagaggcacatctgtgatgccaataaagagggcatgttcctgttcagagccgctcgtaaattgcggcagttcctcaagatgaactctactggggacttcgacttacaccttctgaaggtgagcgagggaacgaccatcttgctgaattgtacaggccaggtaaaaggtcgtaaacctgcagccttgggtgaggcacaacctactaaatccctggaggagaataagagcctgaaggaacagaagaagcttaacgatttatgtttcctgaagcggctactacaggagattaagacatgctggaacaaaatcctaatgggaactaaggagcac

SEQ ID NO: 308706 - DNA, 531 bp, Artificial Sequence
  derived and/or modified sequence
atgttccacgtttcctttcggtacatcttcggcctgccccctctcatcctagtacttctcccagttgcctccagcgactgcgacatcgagggaaaagatggcaaacagtatgaatctgtgctcatggtgtccatcgaccagctgctagattccatgaaggaaatcggcagtaactgtctcaacaacgaattcaacttttttaagcggcatatttgcgacgccaataaagaagggatgtttttatttagggcggcaagaaaactgcgacagtttcttaagatgaatagcactggcgatttcgacttgcacttgttgaaggtgagcgaagggacgacaatcctcctaaattgcaccggtcaggtcaagggtcgtaaacccgcggcacttggcgaggcccagccaacaaagtccctggaggagaataagagcttaaaggagcagaaaaaactgaatgatctttgtttccttaagcggctgctgcaggagattaaaacttgttggaacaagatcctcatgggcaccaaagagcac

SEQ ID NO: 308707 - DNA, 531 bp, Artificial Sequence
  derived and/or modified sequence
atgttccacgtgtcattccgttacatatttggacttcctcctctcattctcgtccttctcccagtggcatccagcgattgtgacattgagggaaaggacggaaaacaatacgaaagcgtgctgatggtgtcgattgatcagctgctggattccatgaaggagattggatcgaactgtttgaataatgagttcaatttctttaagcgtcatatatgtgatgcaaacaaagaaggtatgtttctgtttagagcagctagaaagttgcgacagttcctgaagatgaacagcaccggtgacttcgacctccatcttttgaaagtgtccgaaggaactactatcctgctgaactgtacgggtcaagtgaaaggacgtaagcctgccgcgctcggggaggcacaacctaccaagtcgcttgaggagaacaagtcactgaaggagcagaagaagctgaacgatctgtgttttctcaagaggcttctgcaagaaatcaaaacctgctggaacaaaatccttatgggaactaaagaacat

SEQ ID NO: 308708 - DNA, 531 bp, Artificial Sequence
  derived and/or modified sequence
atgtttcatgtgtccttcaggtacatttttgggcttcctccgctcattttggtgctgcttcccgtcgcatcgtccgattgtgacatagaaggaaaagatggcaagcaatacgaatctgtgctgatggtttcaattgatcagcttctggactccatgaaggagataggttccaattgtctgaacaacgagtttaacttcttcaagagacacatttgtgacgctaacaaagaagggatgtttctttttagggcagcaaggaaacttcgccagtttcttaagatgaattcgactggcgattttgatcttcacctgctgaaggtgtccgagggaaccactattctgctgaactgtaccggtcaagtgaaaggcagaaagccagctgcccttggagaagcacaacccaccaagtcccttgaggagaacaagagcctcaaggaacaaaagaagctgaacgacctctgttttctgaagcgtttgctccaagaaatcaagacttgttggaacaaaattctgatgggcactaaagaacac

SEQ ID NO: 308709 - DNA, 531 bp, Artificial Sequence
  derived and/or modified sequence
atgttccatgtgtcgtttaggtacatctttgggctcccaccgctcattctcgtcctgcttccagtggcgtcctcagattgcgacattgaagggaaagacggcaagcagtacgaatcggttctcatggtcagtatcgatcaactgctggatagcatgaaggagatcgggtcaaactgcctgaataatgaattcaatttctttaagcgacacatctgtgatgcgaacaaagaggggatgttcttgttccgcgccgcacggaaactgaggcaattcttgaagatgaactcgactggagactttgatctgcacctcctgaaggtcagcgaaggaaccaccatcctgctgaattgtaccggtcaagtgaagggaaggaagccggcagcactgggagaagctcagcctaccaagtctctggaagagaataagagcttgaaggagcagaagaaactcaatgatctctgcttcctcaagcgccttctccaggagatcaaaacgtgctggaacaagatcctgatgggtaccaaggaacat

SEQ ID NO: 308710 - DNA, 531 bp, Artificial Sequence
  derived and/or modified sequence
atgttccatgtcagctttaggtacatttttgggctcccacctctgattttagttctgttaccagttgccagcagcgactgcgatatcgaaggcaaggatggaaagcaatatgaatcagtgctgatggtgtcaattgaccagttgttggatagcatgaaagaaatcggcagcaattgtctgaacaacgaatttaacttctttaaacgacacatctgtgatgctaacaaagaaggcatgttcctgtttagggccgcacgcaagctccggcaattcctgaagatgaactcaacgggagacttcgatttacacttgttgaaagtctcagaaggcacaactatccttctgaattgcacagggcaagtgaaaggtagaaaaccagccgcactgggagaggctcagccaaccaagtccctggaagaaaacaaatcactgaaggagcagaaaaaattgaacgacttatgctttctcaagcgcctgcttcaagagataaagacctgttggaacaaaattctgatggggacaaaggaacat

SEQ ID NO: 308711 - DNA, 531 bp, Artificial Sequence
  derived and/or modified sequence
atgttccacgtgagcttccggtacatctttggactgccgccactgattctggtcctgctccctgtggcaagctcagactgtgacatcgaggggaaggatgggaaacagtacgaatcggtgctcatggtcagcatagatcagttgctggactccatgaaagaaattggatcaaattgcctgaacaacgagtttaacttcttcaaacgccacatttgcgacgccaataaggaaggcatgttcttgttcagagccgcaaggaagctcagacagttccttaagatgaatagcactggggactttgatctccaccttctgaaagtgtcggaaggaacgaccatcttgcttaattgtactggccaggtgaagggacggaagccggcggccctcggagaagctcaacccaccaagtccctcgaagagaataagagcctcaaagagcaaaagaagttgaacgacctgtgcttccttaagcggctgctgcaggaaatcaagacctgctggaataagatcctcatgggaactaaagagcac

SEQ ID NO: 308712 - DNA, 531 bp, Artificial Sequence
  derived and/or modified sequence
atgtttcatgtctcattccgatatatcttcggattacctcccttgattctggttctgctgcctgtggctagctctgattgtgacatcgagggcaaggatggcaagcaatacgaatccgtactcatggtctctatcgatcaactgctcgactctatgaaggagataggcagcaactgcctgaataacgagttcaacttttttaagcggcacatttgcgacgcaaataaagaaggtatgttcctcttcagagcagcacggaaactgcggcagtttctgaaaatgaatagcacaggcgacttcgacttgcatttgctgaaggtcagcgagggaaccaccattctcttgaattgcaccggccaagttaagggccgtaaacccgccgccctgggagaggcccaaccaaccaagtccctagaggagaacaagtcgctcaaggagcagaaaaagctaaatgacctatgcttcctcaaaaggctgcttcaggagataaagacatgctggaataagatcctgatgggcacgaaggaacac

SEQ ID NO: 308713 - DNA, 531 bp, Artificial Sequence
  derived and/or modified sequence
atgtttcacgtatcattcagatatatattcggtctccccccactgatcctagtgctgctacccgtagcaagctccgactgtgatatagagggcaaggacggaaagcaatatgaaagtgtcctcatggtgagcatcgaccagctgttggactccatgaaggagattggtagcaattgtctcaataatgagtttaatttttttaagaggcatatatgcgacgcgaacaaggaaggaatgttccttttcagggctgcaaggaaactgcggcagtttctgaagatgaattccacaggtgacttcgatctccatttactgaaagtttccgaggggaccaccattctgctgaattgcaccgggcaggtgaagggccgcaaaccagcagctctgggcgaagcccagccaactaagtcgttggaagaaaacaaatcattaaaagaacagaagaagctgaacgacttatgttttctcaaaagactgctccaagagatcaagacatgctggaacaaaatcttgatgggaaccaaagagcat

SEQ ID NO: 308714 - DNA, 531 bp, Artificial Sequence
  derived and/or modified sequence
atgtttcacgtctcgttccgttacatctttggacttccgccattgatccttgtgctcctcccggtcgcttcgagcgactgtgacattgaaggcaaggacggaaagcagtacgaatcagtgctgatggtgtcgattgatcaactgctggactcgatgaaagaaatagggtccaattgccttaacaacgaattcaatttcttcaagcggcacatctgtgatgccaataaagagggaatgttcctcttccgcgcagcacggaaattgcggcagtttctgaagatgaacagcaccggagacttcgaccttcatctccttaaggtgagcgagggtactactattctcctcaattgcaccggacaggtgaaaggaagaaagccagccgctctgggtgaagcccagccgaccaaatccctcgaggaaaacaagagcctgaaggaacagaagaaactgaatgacttgtgtttcctgaagcggcttctccaagagatcaagacttgctggaacaaaatcctgatgggaaccaaggaacac

SEQ ID NO: 308715 - DNA, 531 bp, Artificial Sequence
  derived and/or modified sequence
atgtttcacgtgtcctttagatacatcttcggactgccacctctcatcctggtgctcctgccggtggcctcgtcggactgcgacatcgagggcaaggatggaaaacaatacgaatccgtcctgatggtgagcatcgaccagctcctggattcgatgaaggagatcggtagcaattgtctgaacaatgagttcaatttcttcaagagacatatctgtgacgccaataaggagggtatgttcctcttccgagcagctcggaagttgcgccagttcctgaagatgaactcgaccggcgacttcgacttgcaccttctgaaagtctcagagggaaccaccattctgctgaactgcaccggacaagtgaagggtcgaaaaccagccgccctgggcgaggcacaacctactaagtccctcgaagaaaacaagagcctgaaggagcaaaagaagttgaatgacctgtgctttctgaagcgcctgctgcaggagatcaaaacctgctggaacaagatcctcatgggaacgaaagagcac

SEQ ID NO: 308716 - DNA, 531 bp, Artificial Sequence
  derived and/or modified sequence
atgttccacgtgtcgttccgctacattttcgggctcccgccactcatccttgtgctgctgccggtggcgagcagcgattgcgacattgaagggaaagacggcaagcagtacgaatcggtcttgatggtgtcaatcgaccaactcctcgattctatgaaggaaatcggctcaaactgcctgaacaacgagtttaacttctttaagaggcacatctgcgacgctaacaaagagggaatgttccttttcagggccgctcggaaacttcggcaatttctcaaaatgaactcgactggcgatttcgatctgcacctgctcaaggtgagcgagggaactaccatcctgctgaactgtacgggacaggtgaaaggtcggaaacctgccgccctcggagaggcgcaacccactaaaagtttggaagaaaacaaatcgttgaaggagcaaaagaaactcaacgatctgtgcttcctgaagcgcctcctgcaggaaatcaagacctgctggaataagatcctgatgggtaccaaggaacat

SEQ ID NO: 308717 - DNA, 531 bp, Artificial Sequence
  derived and/or modified sequence
atgttccatgtgagtttccgatacatcttcggtttacctcctcttattttggttctgttgcccgtggcatcaagcgactgtgatatagaggggaaagatggcaagcagtacgaatccgtcctaatggtgtctatcgaccagctcctcgattccatgaaggagatcggctctaactgtctgaacaatgagtttaacttctttaaacgacatatatgcgatgcaaacaaggaaggaatgttcttgttccgagctgccaggaagttacgacaattcctgaagatgaactccactggcgacttcgacctgcatctgttgaaagtgtccgagggaacaactatccttttaaattgcacggggcaggtaaaaggcagaaagcctgcggccctgggagaggcccagcctacaaaaagtctagaggaaaacaaatccctgaaggagcagaagaagctcaacgacctgtgttttttgaaaaggctcctgcaggagatcaagacgtgttggaataaaatcctgatgggcacgaaagagcat

SEQ ID NO: 308718 - DNA, 531 bp, Artificial Sequence
  derived and/or modified sequence
atgttccacgtgtcctttcgctacatctttggactgcctccactcattctggtgctgctcccggtcgcctcctcggactgcgatatcgaggggaaagacggaaaacagtacgaatcggtcctgatggtatcgatcgaccagctcctggacagcatgaaggaaatcggttcaaattgcctcaataacgagttcaactttttcaagaggcacatttgcgatgcaaacaaggaaggaatgttcctcttccgtgctgcgagaaagctccggcagttcctcaagatgaattccaccggcgacttcgatctgcatcttcttaaagtctctgagggaaccactatcttgctgaactgcactggccaggtcaagggccggaaaccggcggcgctgggcgaagcccaaccaaccaaaagcctggaggaaaacaaatcacttaaagaacaaaagaagctgaacgacctctgtttcttgaaacggctcctgcaggaaatcaaaacctgctggaacaaaatcctcatgggtaccaaggagcat

SEQ ID NO: 308719 - DNA, 531 bp, Artificial Sequence
  derived and/or modified sequence
atgtttcacgtaagttttcggtatatcttcggattgcccccactgatcctcgttttgctgcctgtggccagcagcgactgtgacatcgaaggtaaggacggcaagcaatacgagtctgtcctcatggtttccattgaccaacttctggattctatgaaggagattggatctaattgcttgaacaacgaatttaacttctttaaacgacatatctgtgacgccaacaaagagggcatgttcctgttccgcgccgccaggaagttgagacagttcctgaaaatgaactcaactggcgatttcgatttgcacctcctgaaggtctctgaaggcactacaattcttctgaactgcaccggtcaggtgaaaggacggaagcccgccgcactgggcgaagcccagccgaccaagagtctggaggagaacaaaagcctgaaagagcagaaaaagctgaacgatctgtgctttcttaagaggttgctgcaagagattaagacctgttggaataagatcctgatggggactaaagagcac

SEQ ID NO: 308720 - DNA, 531 bp, Artificial Sequence
  derived and/or modified sequence
atgtttcacgtgagcttcagatatatctttggtctgcctcctctgatcttagtccttttacctgtggcatcatccgactgtgacatagaagggaaggacggcaaacaatacgaatccgtactgatggtgagcattgaccagctgctcgactcgatgaaagagatcgggtcaaactgccttaacaacgaattcaacttttttaagcgccacatttgcgatgccaataaggagggcatgttcctatttcgggctgcacgaaagttgcggcagtttttgaaaatgaactcaactggtgattttgatctgcatctcttgaaggtgtctgagggcacgacaatcctactgaattgtacaggacaggtgaagggccggaagccggcagcactgggggaggcacaacccaccaagtccctggaagagaacaagtccctcaaggagcagaagaagctcaacgatttgtgtttccttaaaagactacttcaggagatcaaaacctgctggaacaaaattctgatgggtaccaaagagcat

SEQ ID NO: 308721 - DNA, 531 bp, Artificial Sequence
  derived and/or modified sequence
atgttccatgtttcctttaggtatattttcggactacctccgttgatacttgtgttgctaccagtcgcttcctcagattgtgacatcgaaggaaaagatgggaaacagtatgagagtgtccttatggtgagtatagatcaactgttggatagtatgaaggagatcggatccaactgtctaaataacgagtttaatttctttaagagacatatatgcgacgcaaacaaggagggaatgtttctattcagagccgctcgtaagctaagacaatttcttaaaatgaactcaactggcgactttgatttgcatctccttaaggtgtctgagggcacaacaattcttcttaactgtacaggacaagtaaagggacgtaaaccagctgcattaggtgaggcccaaccaacaaaaagcctagaggaaaacaaatcacttaaagagcagaagaagcttaatgacttgtgcttcctaaagagactgttgcaagaaatcaagacgtgttggaacaagattcttatgggaactaaggagcac

SEQ ID NO: 308722 - DNA, 531 bp, Artificial Sequence
  derived and/or modified sequence
atgtttcatgtgagtttcaggtacatattcggactgccgcccctgatcctggtgttactgcctgtcgcatcctccgactgcgatatagaaggcaaggatgggaaacagtacgagagcgtgctcatggtgagcatcgaccagctcctcgattcgatgaaggaaataggctccaactgcctcaacaatgaatttaatttcttcaagcgccacatctgcgatgccaacaaggaaggtatgttcctttttcgggccgcgagaaagctgaggcagtttctgaaaatgaactcaaccggggacttcgatctccatctgttaaaggtttccgaggggacaactatcctcttaaactgtacgggacaagtgaaagggcgaaaacctgcagccctgggggaggcccagcctacaaaatccttagaagagaacaaaagtctaaaagaacagaagaagttgaatgatctgtgtttcctgaagagactcctgcaggagataaaaacttgctggaataagattctgatgggaaccaaagagcat

SEQ ID NO: 308723 - DNA, 531 bp, Artificial Sequence
  derived and/or modified sequence
atgttccacgtctctttccggtatatcttcggactcccaccacttatcctggtccttttgcctgtggcttctagcgattgcgatatcgaagggaaggatggaaagcagtatgaatcagttctgatggtttcaattgatcaactcctcgatagcatgaaggagatcggctccaattgcttaaacaatgaatttaacttcttcaaacgccatatctgtgatgctaacaaagaaggcatgttcttgttcagagcggccaggaagttgaggcaattccttaaaatgaacagcacaggtgattttgatcttcatttgctgaaggtgtcggagggcacgactatcctgctcaactgtaccggacaggttaagggacgtaagcctgcagctctcggcgaagcccaaccaactaagagcctggaggagaacaaatcactgaaggagcaaaaaaaattgaacgacttgtgcttcctcaagcggctcctccaggagataaagacatgctggaacaagatcctgatgggcactaaagaacac

SEQ ID NO: 308724 - DNA, 531 bp, Artificial Sequence
  derived and/or modified sequence
atgttccatgtgtccttcagatacatcttcggccttccgccactgatcctggtcttgctccctgtggccagctcggactgtgacatcgaagggaaggatggtaagcagtacgaatcagtgctcatggtgtccattgatcaacttctggattctatgaaggagatcggatcaaactgtctgaacaacgaattcaattttttcaagcgccatatctgcgatgcgaacaaggaggggatgtttctgttccgcgcggcccggaaactgaggcagtttctcaaaatgaattccactggcgacttcgacctccacctgttgaaggtttcggagggaaccaccatcctgttgaactgcacgggacaggtcaagggacggaagcccgccgctctgggcgaggcacaaccgactaaaagcctcgaagaaaataaatcgctcaaagaacagaagaagctgaatgacctgtgcttccttaagagactgctgcaagaaattaagacttgctggaacaagatcctcatgggaaccaaagagcac

SEQ ID NO: 308725 - DNA, 531 bp, Artificial Sequence
  derived and/or modified sequence
atgtttcatgttagctttagatacatatttggcctgcccccgctgattttggtgttgttaccagttgctagtagcgactgtgacatcgaaggtaaagacggcaagcaatatgagagcgtcttaatggtatcaatcgatcagttgctggattctatgaaagagatcggatctaactgcttgaacaacgagtttaattttttcaaaagacatatctgcgatgccaataaagagggaatgttcctatttcgggcagcaagaaagctgcgacagttcctgaagatgaattccactggcgatttcgatctgcacttgttgaaggtgtccgagggcaccacaatcctgctgaactgcacagggcaggtgaaaggccggaagccagctgccctgggagaagcccagcccacaaagtcacttgaggaaaacaagtcgctgaaggagcagaaaaagctcaacgacctatgcttcttgaaacgtctcctgcaggagatcaagacatgctggaataaaattcttatggggacgaaggagcac

SEQ ID NO: 308726 - DNA, 531 bp, Artificial Sequence
  derived and/or modified sequence
atgttccatgtgtcatttagatacatcttcgggcttccgcccctgatcctcgtcctgcttcctgtcgctagttcagactgtgatattgaggggaaggacggaaaacaatacgaatccgtcctgatggtctccatcgaccagctcctggatagcatgaaagaaatcgggtccaattgcctcaacaatgagtttaatttctttaagaggcatatatgcgatgctaataaagaggggatgttcctgtttagggcagctagaaaattgaggcagttccttaagatgaattccacgggggactttgatttgcatctcttaaaagtttccgagggcacaacaattcttttaaattgtacagggcaagttaaagggcgaaagccggccgctttgggcgaggcacagcccacaaagtctctggaagaaaataagtccttaaaggagcaaaaaaagctgaacgacctgtgtttcctgaagcgactcctacaggagataaaaacatgctggaacaagatcctcatggggactaaagagcac

SEQ ID NO: 308727 - DNA, 531 bp, Artificial Sequence
  derived and/or modified sequence
atgtttcacgtttccttccgatatatctttggccttcctccactcattctggttctgcttcctgtggcaagctctgactgcgatattgaaggaaaggacggcaaacagtacgaatcggtgcttatggtgtccattgatcaactgctggattcaatgaaagagattggctccaactgcctgaataatgagttcaacttcttcaagcgccatatttgcgacgctaacaaagagggcatgtttttgtttagagccgctaggaaattaagacagtttctaaaaatgaacagcactggtgatttcgatctgcacctcctgaaggtatcggaaggcactaccattctactgaattgtacaggtcaggtaaaagggcggaagccagctgcgttgggagaggctcagccaactaagtctcttgaggagaataagtcactgaaagaacaaaagaagcttaatgacctgtgtttcctgaagagacttctccaggagatcaagacctgctggaacaaaatcctgatgggtactaaggagcac

SEQ ID NO: 308728 - DNA, 531 bp, Artificial Sequence
  derived and/or modified sequence
atgttccatgtgtctttccgctatatattcgggctgcctccgttgattctggttctgctccccgttgcgtcatctgattgtgacatagaggggaaagacgggaagcagtacgagtcagtgctgatggtatcgattgatcagctcctggactccatgaaggagataggctccaactgcctcaacaatgaattcaacttttttaaaagacacatctgtgatgccaacaaagagggaatgttcttgttcagggccgcgagaaagttgagacagttcctgaagatgaactctaccggggatttcgaccttcacctgctcaaagtttccgagggcaccacgatcctgctgaattgcaccggacaggttaaaggccgtaagcccgccgcactgggggaagcgcaacctacgaagagcctggaggagaataagtcattgaaggaacagaagaagctgaacgatctgtgtttcttaaagcgactgttgcaggaaattaagacttgctggaacaaaatcctaatgggcacgaaagaacac

SEQ ID NO: 308729 - DNA, 531 bp, Artificial Sequence
  derived and/or modified sequence
atgttccacgtgtctttcaggtacatttttggattgcctccattgatcctggtactccttccagttgcatcttcagactgcgacattgaaggcaaggacggcaagcagtacgaaagcgtgctgatggtctctattgatcagttgcttgacagcatgaaagagataggctccaattgtttgaacaacgaatttaatttcttcaagcgtcacatatgcgacgctaacaaagagggcatgttcttgttcagggctgctcgtaagctgaggcagttccttaagatgaactcaactggagactttgatctccatcttctgaaagttagtgaaggtaccactatcttgctgaattgtactggtcaggttaagggacgcaagcctgcagcactcggagaggcccaaccaacaaagagtctcgaggaaaacaaaagccttaaagaacaaaagaaactcaacgatttgtgctttctgaaacgccttctgcaggaaatcaaaacctgctggaataaaatcctgatgggaactaaggagcat

SEQ ID NO: 308730 - DNA, 531 bp, Artificial Sequence
  derived and/or modified sequence
atgttccatgtcagttttaggtacatttttgggctcccgcctctgatactggtccttctgccagttgcttcttctgattgcgatattgagggcaaagacggcaaacagtatgaatccgtgctcatggtcagtatagatcagctgctggattcgatgaaggaaatcggctcaaactgcctcaataacgagttcaatttcttcaaaaggcacatttgcgacgccaataaagaaggaatgtttttattcagggccgcaaggaagcttcgccagttcttgaagatgaatagtaccggtgacttcgatcttcacctcctgaaggtctccgagggcacaacaattttactgaattgcaccgggcaggttaagggtagaaaacctgcggccctgggggaagctcagcctacaaagagccttgaagaaaacaaatctctgaaggagcagaagaagttgaacgatttatgcttccttaagaggttgctgcaggaaatcaagacatgttggaacaaaattctgatgggaaccaaagaacat

SEQ ID NO: 308731 - DNA, 531 bp, Artificial Sequence
  derived and/or modified sequence
atgttccacgtctcgttccgctacatttttggtttgcccccccttatcctggtccttttgcccgtcgcatccagtgattgcgatatcgagggcaaggacggcaagcagtacgaaagcgtgttgatggtaagcattgaccagctcctcgatagcatgaaggagatcggctccaactgtctgaacaacgagtttaacttcttcaaacgccatatctgcgacgcaaacaaggagggcatgttccttttccgtgcggcccgcaagctccgccagttccttaaaatgaattccaccggcgactttgacctgcacctgctcaaggtcagtgagggtacaacaattctacttaattgcactggacaggtgaagggccgcaagccagctgccctgggcgaagcccagccgacgaagagcctagaagagaacaagtccttgaaagagcagaaaaagctcaacgatttgtgtttcctcaagcggttgctgcaggagatcaagacttgctggaacaagatccttatgggcacaaaggagcac

SEQ ID NO: 308732 - DNA, 531 bp, Artificial Sequence
  derived and/or modified sequence
atgtttcatgtatcgtttcgttatatatttggtttaccgccgctaatattagtattattaccggttgcgtcgtcggattgtgatatagaaggtaaagatggtaaacaatatgaatcggttttaatggtatcgatagatcaactactagattcgatgaaagaaataggttcgaattgtctaaataatgaatttaatttttttaaacgacatatatgtgatgcgaataaagaaggtatgtttttatttcgagcggcgcgaaaattacgacaatttctaaaaatgaattcgacgggtgattttgatttacatctactaaaagtatcggaaggtacgacgatactattaaattgtacgggtcaagttaaaggtcgtaaaccggcggcgctaggtgaagcgcaaccgacgaaatcgttagaagaaaataaatcgctaaaagaacaaaaaaaattaaatgatttatgttttctaaaacgattactacaagaaataaaaacgtgttggaataaaatactaatgggtacgaaagaacat

SEQ ID NO: 308733 - DNA, 531 bp, Artificial Sequence
  derived and/or modified sequence
atgtttcatgtgtccttcagatacatcttcggtctacctccacttatcttggtgcttctccctgtcgcatcgagcgattgcgatatagagggcaaagatggcaagcaatacgagtcagtattgatggtttcaatcgatcaactattagactccatgaaagaaattggatccaactgtttgaacaacgaatttaacttcttcaaaaggcacatctgcgacgccaacaaggaggggatgttcttgtttagggctgcccgcaagctacgccagtttctgaaaatgaactccactggagatttcgatctacacctcctcaaggtaagcgagggcactactatcctgctcaattgtaccggccaggtcaagggccgaaagccagccgcactcggcgaggcccaaccaaccaagtcccttgaagagaataagtctctcaaggaacaaaagaaactgaacgatttgtgcttccttaagcgtctcctgcaggagattaagacctgttggaacaaaatattgatgggcacgaaagaacat

SEQ ID NO: 308734 - DNA, 531 bp, Artificial Sequence
  derived and/or modified sequence
atgtttcatgtttcatttagatatatttttggtttacctccattaattcttgttttgcttccagttgcatcttcagattgtgatattgagggaaaagatggaaagcaatatgaatcagttcttatggtttcaattgatcaacttttagattcaatgaaggaaattggaagtaattgtttaaataatgaattcaattttttcaaaagacatatttgtgatgcaaataaagaaggaatgttcctttttagagctgcaaggaaacttcgtcaatttcttaaaatgaattctactggagattttgatttacatcttttaaaagtttctgaaggaactacaattttacttaactgtacaggacaagtaaaaggaagaaaacctgctgctttaggagaagcacaaccaacaaaatctttagaagagaataagagtttaaaggaacaaaagaagttaaatgatttatgttttttaaaaagattacttcaagaaattaaaacctgttggaataaaattcttatgggaacaaaggaacat

SEQ ID NO: 308735 - DNA, 531 bp, Artificial Sequence
  derived and/or modified sequence
atgtttcacgttagctttcgttacatttttgggttgcctcctctgatattagtgctgttacccgtcgcctccagcgattgtgacattgagggtaaggatggaaaacagtacgaaagtgtgctgatggtgtcaattgatcagctcctggatagcatgaaggagatcgggtccaattgtctgaacaatgaattcaacttcttcaaaaggcacatttgtgatgccaataaagaaggaatgttcctctttcgggccgcacgaaaactccgccagtttctgaagatgaactccaccggcgactttgatctccaccttttgaaggtcagcgagggcaccacaatcctcctcaactgtacagggcaggtgaaggggcgcaagcccgctgccttaggtgaagcacagcccactaaaagtttagaagagaataagagcctgaaagaacagaaaaaactcaatgatttgtgctttctcaagaggctcttgcaggaaatcaaaacatgttggaacaagatcctgatggggaccaaagagcac

SEQ ID NO: 308736 - DNA, 531 bp, Artificial Sequence
  derived and/or modified sequence
atgttccacgtttccttccggtacatctttggcctccctcccctcattctggtgttactgccagttgccagttctgattgcgatattgaaggaaaagacggcaaacaatacgagagtgtgcttatggtaagtattgatcaactcttggacagcatgaaggagatcggaagcaactgtttaaacaatgagttcaacttcttcaaacgccatatctgcgacgcaaacaaggaaggcatgtttctgtttagagcggctcgaaaactccggcagtttctgaagatgaattccacaggcgacttcgatctgcacctgcttaaggtgagtgaagggactaccattctgctgaactgcacaggccaggttaaggggcggaaaccagctgctctcggcgaagctcagccaacaaagagccttgaggagaataagtccttgaaagaacagaagaagctcaatgacttgtgcttcctcaaacggctgttgcaagagattaagacatgttggaataagattctgatggggaccaaggagcac

SEQ ID NO: 308737 - DNA, 531 bp, Artificial Sequence
  derived and/or modified sequence
atgttccatgtttcatttaggtacatttttggtctgccgcctctgatcctggtgttgctgccggtggctagctctgactgcgatattgagggcaaggacggcaaacaatacgaatccgttttgatggtgagtatcgatcaactgcttgacagcatgaaggagataggctcgaattgcctgaataacgagtttaacttttttaagaggcacatttgtgacgcaaataaagaagggatgtttctgtttcgtgcggcgcggaagttgcgacagtttctgaagatgaatagcaccggcgacttcgatcttcatttactgaaggtttctgagggtaccactattctgctgaattgcactggtcaggttaaaggcaggaagccggctgcactgggggaggcgcagccgaccaagtcactggaggagaacaagtctctgaaagagcagaaaaaactcaacgacctgtgttttctgaagcgcctgctccaagaaattaaaacctgctggaacaagatactgatgggtaccaaggagcac

SEQ ID NO: 308738 - DNA, 531 bp, Artificial Sequence
  derived and/or modified sequence
atgttccacgtttccttcaggtacatctttggccttccacctttgatcctcgtgctgctgccagttgcttctagtgattgtgatatcgagggtaaggacggcaaacagtacgagtctgttctgatggtatcaatcgaccagctcttggactccatgaaagagattggtagtaactgccttaacaatgagttcaatttctttaagagacacatttgcgatgcgaacaaagagggaatgttcctgttccgcgccgcccgcaaactgcgccaattcctgaagatgaactctacgggtgatttcgacctccatctgttgaaggtttctgaaggcaccaccatacttctgaactgcacgggtcaagtcaagggtcgcaagccggcagccctcggtgaggcccaacccaccaagagtctggaggaaaacaaatcccttaaggaacagaaaaagctcaacgacctttgtttccttaaaaggctgctgcaagagatcaaaacttgttggaacaagattctcatgggtaccaaagagcac

SEQ ID NO: 308739 - DNA, 531 bp, Artificial Sequence
  derived and/or modified sequence
atgtttcatgtctcttttcggtatatcttcgggctcccccctctgatcctcgtcctgcttcctgtcgctagctctgattgcgatattgagggaaaggacggaaaacaatacgagagcgtgctgatggtgtctatcgaccagctgctggactccatgaaggaaattgggagtaattgtcttaataatgaatttaatttttttaaacgccatatttgtgatgctaacaaagagggtatgtttctctttcgcgccgccagaaagctgcgccagttcctgaaaatgaatagtaccggagacttcgatctgcacctgttgaaagtttctgaaggaacaacgatcctcctgaattgcaccgggcaggtgaaggggaggaagcccgcagctctcggagaggcgcagccaaccaagagcctggaagaaaataagagcctgaaagagcagaagaagctgaatgacctctgcttcctgaaacgacttcttcaggagattaagacttgctggaacaagatactgatgggtactaaagaacat

SEQ ID NO: 308740 - DNA, 531 bp, Artificial Sequence
  derived and/or modified sequence
atgtttcacgtgtcatttcggtacatcttcggtctgccacctttaattttagtgcttctcccggttgcaagctcagactgcgacattgaagggaaggatggcaagcagtatgagtctgtgctgatggtctccatcgatcagttgcttgattccatgaaggagatcggctcgaactgtcttaacaatgagttcaatttctttaaacgccacatctgtgatgcaaacaaggagggcatgtttctgtttcgagcagccagaaagctccggcagtttttgaaaatgaactccacaggtgactttgacctccacctgcttaaggtgagtgaaggcactaccattctgcttaattgcaccggacaggtgaaggggcggaagccagcagcactgggggaggctcagccaacaaagtctctcgaggagaacaagtctctcaaggaacagaagaagttaaatgacctctgcttcctgaaaaggctcttacaagagataaagacatgttggaataaaattctcatggggactaaagagcac

SEQ ID NO: 308741 - DNA, 531 bp, Artificial Sequence
  derived and/or modified sequence
atgtttcacgtgagtttccgttacattttcgggctgccacctctaatcctagtgctgctgcctgttgcttcctcagactgcgacatcgagggtaaagacggcaagcaatatgagagcgtactgatggtgagcatcgaccagttgctagacagcatgaaagaaatagggtctaattgtctgaataacgaatttaacttcttcaaacgacatatctgtgatgccaataaggagggcatgtttctctttcgtgctgctcggaagttgcgacaatttctgaaaatgaactcaacaggcgactttgaccttcaccttctcaaagttagcgagggcacgaccattctgttgaactgcacgggccaagtaaaagggaggaaaccagccgctttgggggaagcccagccaaccaagtctttggaggagaacaagagtctgaaagagcagaagaagctgaacgacctttgcttcctgaagagactcctgcaggagatcaaaacttgttggaacaagattctgatgggcacaaaggagcac

SEQ ID NO: 308742 - DNA, 531 bp, Artificial Sequence
  derived and/or modified sequence
atgttccatgttagcttcagatatattttcggcctacctccattaatcctcgtgctgctgcctgtggcttcgtcggattgtgatatcgaagggaaagacggcaaacaatatgaaagcgtgctgatggtgagtattgaccagctgctggattccatgaaagagattggttctaattgtttgaacaacgaatttaatttcttcaaacggcatatttgtgacgccaacaaggaaggcatgttcctgttcagagcggctcgaaagctgcgtcagtttctgaagatgaactccaccggagatttcgacctgcacctgttgaaagtttcagagggcaccacgattctgcttaactgtaccggccaggtcaaagggagaaaaccagccgcactgggagaagcccagcctacaaaaagcttggaggagaacaaatctctgaaggagcaaaagaaattgaatgatctgtgctttctgaagaggctcttgcaagagataaagacatgttggaataagattcttatgggcacgaaggaacac

SEQ ID NO: 308743 - DNA, 531 bp, Artificial Sequence
  derived and/or modified sequence
atgtttcacgtgagctttagatatatcttcggtcttcccccactgatcctcgtgctgctgcccgtcgcatcaagcgattgtgacatagagggaaaagatggaaaacaatacgaatctgttctgatggtgagcatcgaccagcttcttgacagtatgaaggagattggatcaaactgcctgaacaatgagttcaacttctttaaaagacacatctgtgacgcaaacaaggagggcatgttcttgtttagagccgcccgaaaactgcggcaatttcttaaaatgaacagtacgggagatttcgatctccatctactgaaggtgagcgagggaactactatcctgttgaactgtaccggccaggttaaaggcaggaaacccgccgctctgggcgaggctcaaccgacaaaatcacttgaggagaataagtccctgaaagaacaaaaaaagctgaacgatctgtgcttcctcaaaaggttgttacaggagatcaagacctgctggaacaaaatcctcatgggaactaaggagcac

SEQ ID NO: 308744 - DNA, 531 bp, Artificial Sequence
  derived and/or modified sequence
atgttccacgtgagctttaggtacatatttggtctgcctcctttgatcctcgtactcctccctgtggcctcatcggactgcgacatcgaaggaaaggacggtaaacagtacgagagtgtcctgatggtgtctattgaccagctgctggactcaatgaaggagattggatctaactgtttaaacaacgagtttaacttcttcaaacgccacatttgtgacgctaataaagaggggatgttcctgtttagggcagcgaggaagctgcgacagtttctgaagatgaactccaccggcgactttgacctccacctgttaaaagtaagcgaaggcacgacaatcctgctcaactgcacaggacaggtgaaggggagaaagcctgcggccctcggcgaagcacaacccaccaaatcgctggaggagaataaatcgctcaaagagcaaaagaagttgaatgatctgtgctttctgaagcgtctgctgcaggagatcaaaacatgttggaataaaatcctgatgggtacaaaagagcac

SEQ ID NO: 308745 - DNA, 531 bp, Artificial Sequence
  derived and/or modified sequence
atgtttcacgtcagttttcggtacatctttgggctacccccactgatcctcgttctgctgcccgtcgcatccagtgactgtgatatcgaagggaaagatggaaagcagtatgaatctgttttaatggtgagtatcgatcaactcctcgattcgatgaaagaaatagggtccaactgcctaaacaacgaattcaatttctttaaacggcacatatgcgatgctaacaaagaagggatgttcctgtttagggcagccagaaaattacggcagtttctgaaaatgaatagtacaggggattttgacttgcatctgttgaaagtctccgaagggacaacaatcttactaaattgtacaggacaggtcaaaggaaggaaacccgctgctcttggggaagcacagcccacgaaatccctggaggaaaacaaatcattaaaagagcagaaaaaactcaacgatctgtgctttctgaaacgactcctccaggaaatcaaaacttgttggaataaaattttaatgggaacaaaagagcac

SEQ ID NO: 308746 - DNA, 531 bp, Artificial Sequence
  derived and/or modified sequence
atgttccacgtgtcatttaggtatattttcggccttcctccgctcatcctggtgttgctcccagtggcctcatccgattgtgatatagagggtaaggatggcaaacagtatgagtctgtcctcatggtgtcaatcgatcagctgctggattcaatgaaggagatcgggtctaattgtctcaataacgagtttaatttctttaaaagacacatttgcgatgctaataaagagggaatgttcctcttccgagcggcccggaagctaagacaattcctaaaaatgaatagcacgggggatttcgaccttcatctacttaaggtcagcgaaggcaccacaattcttctgaactgcacaggccaggtcaagggtcggaaaccagctgctttgggtgaggcccaacccacaaagagcctcgaagaaaataagtctctcaaggaacagaagaagctaaacgacctctgcttcctgaagagacttctccaggagatcaagacctgctggaacaaaatactcatgggcacgaaggagcac

SEQ ID NO: 308747 - DNA, 531 bp, Artificial Sequence
  derived and/or modified sequence
atgtttcacgtgagcttcaggtatattttcggattgcccccactaatcctggttcttctaccagtggccagtagcgattgtgatattgaaggcaaggacggtaagcagtatgaaagtgtgctcatggtctcaatcgaccagcttcttgatagcatgaaggaaatcgggtctaactgtctgaacaacgaattcaacttcttcaagcgacatatctgcgatgctaacaaagaaggcatgtttctgtttagagccgctagaaaactgagacagtttctcaagatgaattccaccggcgactttgacttacacctgctgaaggtctctgaaggaacgaccattctgctgaactgtaccggccaagtaaagggcaggaagccagcagctctgggcgaagcacaaccaaccaaatcgctcgaggagaacaaatccctcaaagagcagaaaaaattgaatgacctgtgtttcctaaaaaggctgctgcaagaaatcaagacatgctggaataagatcctgatggggacaaaggagcac

SEQ ID NO: 308748 - DNA, 531 bp, Artificial Sequence
  derived and/or modified sequence
atgtttcatgtctcatttagatatatttttggcctgccaccactaatcctggtgttgctaccggtggcatcaagtgactgtgacattgaagggaaggatggcaagcagtacgaatccgtcctgatggtgtcaatcgatcagttgcttgactctatgaaggagatcggatccaattgcctgaataacgagtttaacttttttaagagacacatttgcgacgctaataaggaagggatgtttctcttccgagctgcccggaaactcaggcagttcctgaagatgaattccacaggggacttcgacctacacttgctgaaggtatcagaagggacaaccatccttctgaattgtaccggccaggtgaagggtcgcaaacctgcagcactcggagaggcccagccaactaaaagcctggaagagaacaagtcccttaaggaacaaaagaaactcaatgatctctgcttccttaagcggctactacaggaaattaagacatgctggaataaaatcctgatgggcactaaggaacac

SEQ ID NO: 308749 - DNA, 531 bp, Artificial Sequence
  derived and/or modified sequence
atgttccacgtctctttcagatatatattcggactcccaccactgatacttgtccttttgcccgtggcttccagcgactgcgacattgagggtaaggatgggaagcagtacgagtccgtgttgatggtgtcaatagatcagctgttagattccatgaaggagataggatccaattgcttgaataacgagttcaatttctttaaaagacacatctgtgatgcaaataaggaggggatgtttctcttccgggccgcaaggaaactgcgccagtttcttaagatgaacagtacaggagactttgatctgcacctcctgaaggttagtgagggcacgaccatattactcaactgcacagggcaagtaaaaggccgcaagcctgcagccctgggtgaggcacagccaacaaagagcctcgaagagaacaagagtctcaaagaacagaagaagctcaatgatctatgcttcctcaagagacttctccaggagatcaaaacatgttggaacaaaatcttgatgggaacaaaagaacac

SEQ ID NO: 308750 - DNA, 531 bp, Artificial Sequence
  derived and/or modified sequence
atgtttcacgtctccttccgctacatattcggactgcctcccctgatattagttctcctgcctgttgcatctagcgactgcgacatcgagggtaaggacggaaaacagtacgagtccgtgctcatggttagcattgatcaattgttagactcaatgaaggaaatcggcagtaattgtctgaacaatgagttcaatttcttcaagcggcacatatgtgacgccaataaagagggtatgtttctgttccgggcagccaggaagctgcgtcagtttctaaaaatgaactctacaggagacttcgacctgcaccttctgaaggtgagcgaaggtactacaattctgttaaattgcacagggcaggtaaaaggcaggaagcctgcagccctaggagaggcacaacccaccaaaagcttagaggaaaacaagtcactgaaggagcagaagaagctgaacgacctttgttttttgaaacggctgctacaggagatcaagacatgctggaataagatactaatgggtactaaggaacat

SEQ ID NO: 308751 - DNA, 531 bp, Artificial Sequence
  derived and/or modified sequence
atgttccatgtgtcctttcgatatatcttcggtctgcccccgttaattctagtgttgttgccagtggcctcatccgactgcgatattgaggggaaagacggaaaacagtatgagtccgttctgatggtctcgattgaccagttgttagacagcatgaaggaaataggcagcaattgtctaaataatgagttcaacttctttaaaagacatatctgtgatgccaataaggaaggcatgtttctctttagagccgccaggaagctacgacagttcctaaaaatgaactctactggtgacttcgacttgcaccttctcaaagtgtccgagggcactacaatactgcttaattgtactgggcaggttaaaggccgaaaaccagctgccctcggggaagcccagccaacgaagagcctcgaggagaacaagagccttaaggagcagaagaagttgaacgatctttgttttctaaaacgtcttctacaggagattaagacatgctggaacaagatactgatgggtaccaaagagcac

SEQ ID NO: 308752 - DNA, 531 bp, Artificial Sequence
  derived and/or modified sequence
atgttccatgtatcatttcgatacatctttggactacctccattaatcctggtgcttttgccggtagcttctagcgattgtgacatcgagggaaaagacggaaaacagtatgagtcggtgcttatggtttcaattgaccaacttcttgattccatgaaagaaatcggctcaaattgcttaaacaacgaatttaatttttttaaacgccacatctgtgatgcgaataaagaaggaatgtttctgtttcgcgccgcccgcaaattgagacaatttctcaaaatgaacagtacaggagattttgacttacatcttttgaaagtttctgaggggaccacgattttgctgaattgtacgggccaggttaaagggcgcaaaccagctgcgcttggtgaagcacaaccgacaaaatcgcttgaggaaaataagagtctgaaggagcaaaaaaagttaaatgacctttgctttctaaaacgcctgcttcaagaaattaagacatgttggaacaaaatcttaatgggcacaaaggaacat

SEQ ID NO: 308753 - DNA, 531 bp, Artificial Sequence
  derived and/or modified sequence
atgttccatgtttctttccgatacatattcggccttccacccttgatactagtgctcttgcctgtagcctctagtgactgtgatatcgaagggaaggacggcaaacagtacgaatcagtcctcatggtttctatcgaccagctgctcgactccatgaaagagatcggaagcaactgcctaaataatgaattcaacttcttcaaacgccacatctgcgacgcaaacaaggagggaatgttcctattccgcgccgcacggaagttaaggcagttcctgaaaatgaattcaaccggcgacttcgatttacatctcctaaaggttagcgaggggacgaccatattgctgaattgcactgggcaggtgaagggccggaaacccgctgccttgggcgaggcacaaccaacaaagagcctggaggagaataagtccctcaaggaacagaagaagctgaacgacctgtgcttcttaaaaaggctcctgcaggaaattaaaacctgttggaataagattctcatgggcaccaaggagcat

SEQ ID NO: 308754 - DNA, 531 bp, Artificial Sequence
  derived and/or modified sequence
atgtttcatgtttcttttcggtatatcttcggactacctccactcatactagttctcctgccagtagcttcctcagattgtgatatagaagggaaagacgggaaacagtatgaatctgttctaatggtttcaatcgatcagctactggactcaatgaaagaaattgggagtaactgtctcaacaacgagttcaacttcttcaaaagacatatctgtgatgccaataaagaaggaatgtttttgttccgagctgcccggaagcttaggcagttcctgaaaatgaatagtacaggagactttgaccttcatcttctgaaggtcagtgaaggaactacaatcctgctaaactgcacaggacaggttaaagggaggaaacctgcggcattaggagaagcacagccaactaaaagtctcgaagagaataagagtttaaaagaacagaaaaaactgaacgatctgtgcttcctcaaaagactcctccaggaaattaaaacgtgttggaataaaattctaatgggaacaaaagagcat

SEQ ID NO: 308755 - DNA, 531 bp, Artificial Sequence
  derived and/or modified sequence
atgttccatgttagttttcggtacatctttggtttgccccctctgatcttggtcctccttccagtcgcaagttctgattgcgacatagagggaaaggacggaaagcagtatgagtctgtcctgatggtgagcatagatcagctcctcgacagcatgaaggagatcggatccaactgcctcaacaatgaatttaattttttcaagcgccacatatgtgatgccaacaaggagggcatgtttcttttccgggctgctaggaaactgcgccagtttctgaagatgaactcaacaggagatttcgacctgcatcttctgaaggtctctgagggcaccacaatcttgttgaattgcaccggacaagtcaagggtagaaaacccgccgctctgggagaggctcagccaactaagagcctggaagagaacaagagcctgaaagaacagaagaagctgaatgatctctgcttcctcaaacgactgctgcaagagataaaaacctgttggaacaagattctcatggggactaaggagcat

SEQ ID NO: 308756 - DNA, 531 bp, Artificial Sequence
  derived and/or modified sequence
atgttccatgtctctttccgatatattttcggactgccccccctgatcctcgtccttcttccggtcgcgagcagcgattgcgatattgagggtaaagatggtaagcaatatgagtcagtgcttatggtatctatcgatcagctgttagatagcatgaaagaaattgggtctaactgcctgaataatgaattcaatttctttaagcggcatatctgcgacgctaacaaagaggggatgtttctgttcagggctgctcggaaactcagacagttcctcaagatgaactcaactggggacttcgacctgcatctcctcaaggtgagcgagggcactaccatcctactgaattgcaccggccaggtgaaggggcgtaagcccgccgccctaggcgaagcccaacccacaaaatccttggaggaaaataaatctctcaaagaacagaaaaagctgaatgatttatgtttcctaaagcgcctcctccaggagataaaaacctgctggaacaagatcctgatgggaaccaaagaacat

SEQ ID NO: 308757 - DNA, 531 bp, Artificial Sequence
  derived and/or modified sequence
atgtttcatgttagctttcggtacatcttcgggctgccaccactcatcctcgtgttgctgccagtagcctcatccgattgtgacatcgaaggaaaagacggcaaacaatacgaatctgtactcatggtttctattgatcaactcttggacagcatgaaggaaattggctccaactgcctgaataacgagttcaatttctttaagcggcatatctgcgacgctaataaggagggcatgtttcttttccgggccgccaggaaacttcgccaatttctcaagatgaactcgaccggcgactttgacctgcacctgcttaaagtgtcagagggcacaactattctcctcaactgcacaggacaggtgaagggtaggaagcccgccgccctgggcgaggcccagccaactaaatcacttgaggaaaataagagcctgaaagagcagaaaaagctcaatgacttgtgcttcttaaagagactcctacaggagatcaagacatgttggaataagattctgatgggcactaaggagcat

SEQ ID NO: 308758 - DNA, 531 bp, Artificial Sequence
  derived and/or modified sequence
atgttccatgtctcattcaggtatattttcggattgccccccctcatccttgtactgttgccagtggcaagcagcgattgtgatatcgaggggaaggatggaaaacagtatgagtcagttcttatggtgagcatcgatcagctgctcgacagtatgaaggagattgggagtaattgtctgaacaacgagttcaacttttttaaaagacacatctgcgatgccaacaaggagggcatgtttttattccgagccgctcgcaagttaagacagttcctgaaaatgaactctactggcgacttcgatctccatcttctgaaggtttctgagggaaccactatactcctgaactgcacggggcaggttaagggtcggaaacctgctgcattgggggaagcacagcctaccaaatctctggaagagaataagtctctgaaggagcagaaaaagctgaacgatctgtgctttctgaagcgtctgctacaggagatcaaaacttgctggaacaagattctcatggggacgaaggaacac

SEQ ID NO: 308759 - DNA, 531 bp, Artificial Sequence
  derived and/or modified sequence
atgtttcacgtttctttcaggtacatctttggattaccccccctaattctggtcctgcttccagtcgcgtcatctgactgcgatattgaaggaaaggacggaaaacagtacgaatccgtgctgatggtcagtatagatcagctgctggattcgatgaaagaaattgggagtaattgcttaaataatgagttcaatttttttaagcggcatatctgcgatgccaataaggagggcatgttcctgtttagggccgcgagaaaactgagacagtttttgaaaatgaactcaacaggcgatttcgacctgcacttattgaaggtctctgagggtaccactatccttctcaattgcacaggtcaagttaagggcaggaaaccagccgcattgggcgaagcacagccaactaagtctctggaggaaaacaagagcctcaaagagcagaaaaagttgaacgatctctgtttcttaaagaggctgttgcaagagataaagacatgctggaacaaaatattaatgggtacgaaggagcac

SEQ ID NO: 308760 - DNA, 531 bp, Artificial Sequence
  derived and/or modified sequence
atgtttcatgttagttttcgctatattttcggactccctccattgatcttggtcctcttgccagtcgcatcatctgattgcgacattgagggaaaagatggtaagcaatacgaatctgtcctcatggtttcgattgatcaattgcttgactcgatgaaggagattggatctaactgtcttaacaacgagttcaatttcttcaaacgtcacatctgcgatgcgaacaaagaaggtatgttcctgttccgtgctgcgcgcaaattgcgacagttcttaaagatgaactcaactggagatttcgatttgcatttattgaaggtctctgaaggaaccaccattctcctaaactgcaccggccaagtgaagggtcgaaaaccagccgcactcggagaagcacaaccaaccaaaagtcttgaagaaaacaaatctctcaaagagcagaaaaagttaaatgatctgtgttttctgaaacgccttcttcaggaaattaagacctgttggaataaaatactcatgggaacaaaagagcac

SEQ ID NO: 308761 - DNA, 531 bp, Artificial Sequence
  derived and/or modified sequence
atgtttcatgtttccttccgctacatcttcggtctgcccccccttatcctggtgctgcttcctgtggcctccagtgattgcgacatcgaaggcaaggatggcaagcagtacgaatcggtgttgatggtttcaatagatcagttgctcgactccatgaaggaaataggctcgaattgcctcaacaatgagtttaatttcttcaaacggcacatatgcgatgcaaataaagagggtatgttcctcttccgcgcggccagaaagctccgccaattcttgaagatgaatagcaccggagatttcgatcttcatttgctgaaagtctcggagggcactacaatcttgcttaattgcactggtcaggtgaaaggcagaaagccagctgccctgggcgaagcccagccaaccaagtccttggaggaaaacaagagtttaaaggaacagaagaaactcaatgatctttgctttttgaagcgtttgctccaggaaatcaaaacgtgctggaacaagattctgatgggaaccaaggagcac

SEQ ID NO: 308762 - DNA, 531 bp, Artificial Sequence
  derived and/or modified sequence
atgttccacgtttctttccggtatatcttcggcttgccccctctgatccttgtgctcctgccagtcgcatcctcagactgtgatattgagggaaaagacggcaagcagtacgagagcgtgctgatggtctctatcgaccagcttctggacagtatgaaggaaattggcagcaactgcctgaacaacgagttcaacttttttaagagacatatttgtgacgctaacaaagagggcatgttcctcttcagggcagcccgaaaactgagacagttcctgaaaatgaattctaccggggacttcgatctgcacctgctgaaggtgtcagagggtacaacaatccttcttaactgtacagggcaggtgaagggcagaaagccagctgccctgggagaggcacagcccacgaagagtttagaggaaaataaatcacttaaggagcaaaaaaaactcaacgacctctgctttctaaaaaggctgcttcaggaaatcaagacctgctggaataagattctcatgggaactaaagaacat

SEQ ID NO: 308763 - DNA, 531 bp, Artificial Sequence
  derived and/or modified sequence
atgttccatgtcagtttcaggtatatctttgggctgcctcccttaatcctggtgctgttgcctgtggcctcgtccgactgcgatattgagggcaaggacggtaagcagtatgagtccgtgcttatggtgtctatcgatcaattgctcgactctatgaaggaaataggttctaactgtctgaataatgaatttaacttttttaagcggcacatttgtgacgctaataaggagggcatgttcttatttcgggccgcccggaaattgcggcagtttctgaaaatgaatagcacaggagatttcgatttgcatctgctgaaagtcagtgagggaaccacaatcctgctgaattgcactggacaggtcaagggaaggaaacccgctgctctgggcgaagctcagcccaccaagagcctggaggagaataagtcgctcaaagaacagaaaaagctgaatgatctctgttttttgaaaaggctgcttcaggagatcaaaacctgctggaacaagattctgatgggtacaaaggagcat

SEQ ID NO: 308764 - DNA, 531 bp, Artificial Sequence
  derived and/or modified sequence
atgttccacgtttcattcaggtacatcttcgggctgccgcctcttattctggtgctgctgccagtggcaagcagcgattgcgacattgagggtaaggatggaaagcagtatgagtctgtgttgatggtgtccatcgatcagctgctggattccatgaaggagattgggtctaactgcttgaacaatgaattcaatttttttaagaggcacatctgcgatgcgaacaaagagggcatgtttctgttccgcgctgcgcgtaagttgagacagtttctcaagatgaactcgacaggagattttgatctgcatctgcttaaggtaagtgagggcacgacaattctgctgaattgtactgggcaggtgaaggggaggaagcccgccgccctaggggaggctcaacccacaaaatcacttgaggaaaacaagtcgcttaaggaacagaagaaactcaacgatctgtgctttctgaagaggctcctgcaggaaataaaaacatgctggaacaaaatccttatgggcaccaaggagcac

SEQ ID NO: 308765 - DNA, 531 bp, Artificial Sequence
  derived and/or modified sequence
atgttccacgtgtctttccgctacatcttcggcttgccacccctaatcttggttttactccccgtggccagcagcgactgcgatatagaaggcaaagatggtaagcagtatgaaagtgtgctcatggtctcaatcgatcagctcctggattcgatgaaagagatcggttctaactgtctcaacaatgaatttaattttttcaagcggcatatttgtgacgccaacaaggaggggatgttcctctttagagctgcaaggaagctacgacagttcctcaaaatgaacagtacaggagacttcgacctgcaccttctgaaagtgtcagagggtaccaccattttgcttaactgtacaggacaggttaaagggcgtaagcctgctgccctcggagaggcacaacctactaagtccctcgaggagaataaaagcctgaaagagcagaagaagcttaacgatctgtgcttcctgaaacggctcctgcaggaaatcaaaacgtgttggaacaaaattctgatgggcacaaaggaacat

SEQ ID NO: 308766 - DNA, 531 bp, Artificial Sequence
  derived and/or modified sequence
atgttccatgtctccttcagatacatattcgggctcccaccgcttatcttggtgctgctgccagtggcaagctccgactgtgatattgaaggcaaggacggaaaacagtacgagtcagttttgatggtgagcatagaccagttgctcgacagtatgaaagaaattggctctaactgcctgaacaacgagtttaattttttcaaacggcatatatgtgacgccaacaaagaaggaatgttcctcttccgcgcagctagaaaactgaggcagttcctcaagatgaacagtacgggcgattttgacttgcacttgcttaaagtgagcgaaggcaccaccattttgctgaactgcaccggccaggttaagggtcggaaacccgctgctctgggggaggctcagcctactaaaagtctggaggagaataaaagccttaaggagcagaagaaattgaacgacctgtgtttcctgaagagactgctgcaggagataaagacgtgttggaataagatcctcatgggaacaaaggagcac

SEQ ID NO: 308767 - DNA, 531 bp, Artificial Sequence
  derived and/or modified sequence
atgttccacgtgtcattcagatacatattcggcctgccgccactcattcttgtcctgttgcctgtcgcctcttcagattgtgacatcgagggcaaggatgggaagcagtatgagtccgtactgatggtttctatcgatcagctgctagactctatgaaggaaataggatccaattgtctcaacaatgaattcaacttctttaagaggcacatctgcgacgcaaataaagagggcatgttcctctttagggccgctcgcaagctgcgtcagttcctgaaaatgaactctactggtgattttgatcttcacctgctgaaagtgtcagaggggactacaatcctgttgaactgtaccggtcaggtgaagggacgaaagcctgccgctctgggtgaggctcagccaaccaagtctctagaagagaacaaaagtctcaaggagcagaaaaagctgaacgacctttgttttctcaagcggctgctgcaggagattaaaacctgctggaataagatcctcatggggacaaaagaacat

SEQ ID NO: 308768 - DNA, 531 bp, Artificial Sequence
  derived and/or modified sequence
atgtttcatgtgagctttagatacatttttggcctaccccctctgattctcgtattgttacctgttgcatcaagtgactgtgacatagagggtaaagatggaaagcagtatgaatccgtattgatggtctccatcgatcagttactggatagcatgaaggagatcggctctaactgcttgaacaacgagttcaacttttttaagaggcacatctgcgacgctaacaaagaggggatgtttctgtttagagctgctcgcaaactgcggcaatttcttaaaatgaactccactggggactttgacttacacctgcttaaggtgagcgaaggaaccacgattctattgaattgcaccggacaggtgaaagggcgcaaacccgctgctctgggcgaagctcagcccacaaaatcgttggaagaaaataagtctctgaaggagcagaagaagcttaatgatttatgtttcttgaagcgcctgctccaggagattaagacgtgctggaataagatcctgatggggaccaaagaacat

SEQ ID NO: 308769 - DNA, 531 bp, Artificial Sequence
  derived and/or modified sequence
atgttccatgtgtcctttcgctacatctttggtcttcctcccttaattttggtgttgctcccggtggcgagcagcgactgtgacatagagggcaaagacggaaaacagtatgagagcgtactaatggtgagcattgatcagttgctggatagcatgaaagaaatcggatccaattgcctgaataatgaattcaattttttcaagcggcatatctgcgatgcaaataaagaggggatgttcctgttccgagcggctcgaaagctacgccagttcctgaagatgaactcgactggtgactttgatctccatctgctgaaggtgagcgagggtaccaccatccttcttaattgcaccggacaggtgaagggcaggaagcctgctgcactgggcgaggcgcagccaacgaagtcactggaggagaacaaatctctgaaggagcagaaaaaactcaatgatctgtgtttcctgaaaaggctgctccaggagataaaaacctgctggaataaaatcctcatggggaccaaagagcac

SEQ ID NO: 308770 - DNA, 531 bp, Artificial Sequence
  derived and/or modified sequence
atgttccacgtgagcttccgctacatcttcggcctgccccccctgatcctggtgctgctgcccgtggccagcagcgactgcgacatcgagggcaaggacggcaagcagtacgagagcgtgctgatggtgagcatcgaccagctgctggacagcatgaaggagatcggcagcaactgcctgaacaacgagttcaacttcttcaagcgccacatctgcgacgccaacaaggagggcatgttcctgttccgcgccgcccgcaagctgcgccagttcctgaagatgaacagcaccggcgacttcgacctgcacctgctgaaggtgagcgagggcaccaccatcctgctgaactgcaccggccaggtgaagggccgcaagcccgccgccctgggcgaggcccagcccaccaagagcctggaggagaacaagagcctgaaggagcagaagaagctgaacgacctgtgcttcctgaagcgcctgctgcaggagatcaagacctgctggaacaagatcctgatgggcaccaaggagcac

SEQ ID NO: 308771 - DNA, 677 bp, Artificial Sequence
  derived and/or modified sequence
gggaaataagagagaaaagaagagtaagaagaaatataagagccaccatgtttcacgtgtcatttcggtatatctttgggctgcctccgcttatcctcgtactcctccccgtggcctcctcagactgcgacattgaggggaaagacgggaagcagtacgaatcggtacttatggtcagcatcgaccagctcttggactcgatgaaggaaatcgggtcgaattgtctgaacaatgagttcaacttcttcaagcgacatatctgtgatgctaacaaagagggaatgttcctgtttagagcggcgagaaaactgcgccagtttttgaagatgaattcaaccggtgatttcgatcttcacctgcttaaagtgtccgagggtacaactatcctccttaactgcacgggacaggtcaagggacggaaaccggcagcgctcggagaagcccaacccacaaagtcgctggaggaaaacaagagcttgaaggaacagaagaaattgaatgatctctgcttcttgaaaaggttgcttcaagagattaagacgtgttggaataagattttgatgggcacgaaagagcattgataagctgccttctgcggggcttgccttctggccatgcccttcttctctcccttgcacctgtacctcttggtctttgaataaagcctgagtaggaag

SEQ ID NO: 308772 - DNA, 534 bp, Artificial Sequence
  derived and/or modified sequence
atgttccacgtgagcttcagatacatcttcggcctgccccccctgatcctggtgctgctgcccgtggccagcagcgactgcgacatcgagggcaaggacggcaagcagtacgagagcgtgctgatggtgagcatcgaccagctgctggacagcatgaaggagatcggcagcaactgcctgaacaacgagttcaacttcttcaagagacacatctgcgacgccaacaaggagggcatgttcctgttcagagccgccagaaagctgagacagttcctgaagatgaacagcaccggcgacttcgacctgcacctgctgaaggtgagcgagggcaccaccatcctgctgaactgcaccggccaggtgaagggcagaaagcccgccgccctgggcgaggcccagcccaccaagagcctggaggagaacaagagcctgaaggagcagaagaagctgaacgacctgtgcttcctgaagagactgctgcaggagatcaagacctgctggaacaagatcctgatgggcaccaaggagcactag

SEQ ID NO: 308773 - DNA, 534 bp, Artificial Sequence
  derived and/or modified sequence
atgttccacgtcagctttcgatatatttttggactgcccccacttattcttgtgttattgcctgtggcatcttcagactgcgatatcgaggggaaagatgggaagcagtacgaatcagtcttgatggtgtccattgatcaactcctcgactccatgaaagaaattggttctaattgtctaaacaatgagttcaactttttcaagcgccacatttgtgacgccaataaggagggaatgtttttgtttcgggccgctcgtaagctgaggcagttcctgaagatgaactccacaggcgattttgatttacacctgctaaaggtgtcggagggcaccactatattgctgaattgcaccgggcaagtgaaagggagaaagccagccgcgctgggggaggctcaacctactaagtcactcgaggaaaacaaatctctgaaggagcagaagaagctcaatgatttatgcttccttaagagattattgcaggagatcaagacttgctggaacaagattctcatggggactaaagagcactag

SEQ ID NO: 308774 - DNA, 534 bp, Artificial Sequence
  derived and/or modified sequence
atgtttcatgtgtccttccgctacatcttcggcctgcccccactcatcctggtgctgctgcctgtggccagcagtgactgtgacatcgagggcaaggatggcaagcagtatgaatctgtgctgatggtgtccattgaccagctgctggacagcatgaaggagatcggcagcaactgcctgaacaatgagttcaacttcttcaagaggcacatctgtgatgccaacaaggagggcatgttcctgttccgggccgccaggaagctgcggcagttcctgaagatgaacagcactggagactttgacctgcacctgctgaaggtgtctgagggcaccaccatcctgctgaactgcaccggccaggtgaagggcaggaagccagctgccctgggggaggcccagcccaccaagagcctggaggagaacaagagcctgaaggagcagaagaagctgaatgacctgtgcttcctgaagaggctgctgcaggagatcaagacctgctggaacaagatcctgatgggcaccaaggagcactag

SEQ ID NO: 308775 - DNA, 534 bp, Artificial Sequence
  derived and/or modified sequence
atgttccacgtgagcttccggtacatcttcggcctgccccccctgatacttgttctcctccctgttgccagttcagactgcgacatcgagggcaaagatggtaagcagtacgaaagtgtcctcatggtgtctatcgaccaactgctcgacagcatgaaggagattggttcaaattgtctgaacaacgagttcaacttctttaagcggcacatctgcgacgctaacaaggaaggcatgttcctgttccgggctgcgcggaagcttcggcaatttctgaagatgaactcaacaggggattttgaccttcacttattaaaagtgagcgagggtactaccatactcctcaactgcacaggccaagtgaaaggtcgaaaaccggctgcactcggcgaggcacagcccaccaagagcctggaggaaaacaagtctcttaaggaacagaagaaactgaatgatttgtgcttcctcaagaggttgttgcaggagatcaagacatgctggaataagatactcatgggtacgaaagagcactag

SEQ ID NO: 308776 - DNA, 534 bp, Artificial Sequence
  derived and/or modified sequence
atgttccacgtgtcattccgctacatcttcggcctgccgccacttatactagtgttacttcccgtggccagctccgactgtgatatcgagggtaaggacggaaaacaatatgagtcggtgctgatggtgagcattgaccaactgcttgattctatgaaagagatcggatccaattgtctgaataatgagttcaacttttttaaacgacatatatgcgatgccaataaagaaggaatgttcctgttccgggctgcacggaagctccgacagtttttgaaaatgaatagcacaggggatttcgacctccatttactgaaagtttctgagggcacaactatactgcttaactgcactggtcaggtcaaggggcgtaagccagctgccctgggggaagctcagcctacgaaatcgcttgaggagaacaagtcactcaaggaacaaaagaagctcaatgatctttgcttcctcaagcgcttgctgcaagagatcaagacatgctggaacaagatcttgatgggcaccaaggaacattag

SEQ ID NO: 308777 - DNA, 2076 bp, Artificial Sequence
  derived and/or modified sequence
acatccgcggcaacgcctccttggtgtcgtccgcttccaataacccagcttgcgtcctgcacacttgtggcttccgtgcacacattaacaactcatggttctagctcccagtcgccaagcgttgccaaggcgttgagagatcatctgggaagtcttttacccagaattgctttgattcaggccagctggtttttcctgcggtgattcggaaattcgcgaattcctctggtcctcatccaggtgcgcgggaagcaggtgcccaggagagaggggataatgaagattccatgctgatgatcccaaagattgaacctgcagaccaagcgcaaagtagaaactgaaagtacactgctggcggatcctacggaagttatggaaaaggcaaagcgcagagccacgccgtagtgtgtgccgccccccttgggatggatgaaactgcagtcgcggcgtgggtaagaggaaccagctgcagagatcaccctgcccaacacagactcggcaactccgcggaagaccagggtcctgggagtgactatgggcggtgagagcttgctcctgctccagttgcggtcatcatgactacgcccgcctcccgcagaccatgttccatgtttcttttaggtatatctttggacttcctcccctgatccttgttctgttgccagtagcatcatctgattgtgatattgaaggtaaagatggcaaacaatatgagagtgttctaatggtcagcatcgatcaattattggacagcatgaaagaaattggtagcaattgcctgaataatgaatttaacttttttaaaagacatatctgtgatgctaataaggaaggtatgtttttattccgtgctgctcgcaagttgaggcaatttcttaaaatgaatagcactggtgattttgatctccacttattaaaagtttcagaaggcacaacaatactgttgaactgcactggccaggttaaaggaagaaaaccagctgccctgggtgaagcccaaccaacaaagagtttggaagaaaataaatctttaaaggaacagaaaaaactgaatgacttgtgtttcctaaagagactattacaagagataaaaacttgttggaataaaattttgatgggcactaaagaacactgaaaaatatggagtggcaatatagaaacacgaactttagctgcatcctccaagaatctatctgcttatgcagtttttcagagtggaatgcttcctagaagttactgaatgcaccatggtcaaaacggattagggcatttgagaaatgcatattgtattactagaagatgaatacaaacaatggaaactgaatgctccagtcaacaaactatttcttatatatgtgaacatttatcaatcagtataattctgtactgatttttgtaagacaatccatgtaaggtatcagttgcaataatacttctcaaacctgtttaaatatttcaagacattaaatctatgaagtatataatggtttcaaagattcaaaattgacattgctttactgtcaaaataattttatggctcactatgaatctattatactgtattaagagtgaaaattgtcttcttctgtgctggagatgttttagagttaacaatgatatatggataatgccggtgagaataagagagtcataaaccttaagtaagcaacagcataacaaggtccaagatacctaaaagagatttcaagagatttaattaatcatgaatgtgtaacacagtgccttcaataaatggtatagcaaatgttttgacatgaaaaaaggacaatttcaaaaaaataaaataaaataaaaataaattcacctagtctaaggatgctaaaccttagtactgagttacattgtcatttatatagattataacttgtctaaataagtttgcaatttgggagatatatttttaagataataatatatgtttaccttttaattaatgaaatatctgtatttaattttgacactatatctgtatataaaatattttcatacagcattacaaattgcttactttggaatacatttctcctttgataaaataaatgagctatgtattaa

SEQ ID NO: 308778 - DNA, 1055 bp, Artificial Sequence
  derived and/or modified sequence
tccgtgcacacattaacaactcatggttctagctcccagtcgccaagcgttgccaaggcgttgagagatcatctgggaagtcttttacccagaattgctttgattcaggccagctggtttttcctgcggtgattcggaaattcgcgaattcctctggtcctcatccaggtgcgcgggaagcaggtgcccaggagagaggggataatgaagattccatgctgatgatcccaaagattgaacctgcagaccaagcgcaaagtagaaactgaaagtacactgctggcggatcctacggaagttatggaaaaggcaaagcgcagagccacgccgtagtgtgtgccgccccccttgggatggatgaaactgcagtcgcggcgtgggtaagaggaaccagctgcagagatcaccctgcccaacacagactcggcaactccgcggaagaccagggtcctgggagtgactatgggcggtgagagcttgctcctgctccagttgcggtcatcatgactacgcccgcctcccgcagaccatgttccatgtttcttttaggtatatctttggacttcctcccctgatccttgttctgttgccagtagcatcatctgattgtgatattgaaggacagcatgaaagaaattggtagcaattgcctgaataatgaatttaacttttttaaaagacatatctgtgatgctaataaggaaggtatgtttttattccgtgctgctcgcaagttgaggcaatttcttaaaatgaatagcactggtgattttgatctccacttattaaaagtttcagaaggcacaacaatactgttgaactgcactggccaggttaaaggaagaaaaccagctgccctgggtgaagcccaaccaacaaagagtttggaagaaaataaatctttaaaggaacagaaaaaactgaatgacttgtgtttcctaaagagactattacaagagataaaaacttgttggaataaaattttgatgggcactaaagaacactgaaaaatatggagtggcaatatagaaacacgaactttagctgcatcctcc

SEQ ID NO: 308779 - DNA, 534 bp, Artificial Sequence
  derived and/or modified sequence
atgtttcacgtgtcatttaggtacattttcggtctgcctcctcttatactggtactgctccctgtggcttcttccgattgcgatattgaaggaaaggatggcaaacaatacgagtcagttctgatggtctccattgaccagctgctagatagtatgaaagagatcggttcaaattgcctgaataatgagtttaatttcttcaagaggcacatctgtgacgctaataaggaaggtatgttcctgttccgtgctgctcggaagctgcgacaattcctaaaaatgaattcaacgggagattttgacttacatctgctgaaagtaagcgaaggcacgacaattctgctaaactgtactggacaagtaaagggtcggaaacccgcagcccttggtgaagctcagcctaccaagagtctggaggagaacaagagcctgaaagaacagaagaagctcaacgatctgtgtttccttaagcgcctcctgcaagagattaaaacatgttggaacaagatcttaatgggaactaaagagcactag

SEQ ID NO: 308780 - DNA, 534 bp, Artificial Sequence
  derived and/or modified sequence
atgttccatgtctcatttcgatatatcttcggactgccccccctaatcctagtgctactccccgtcgcgagcagcgattgcgacatcgagggaaaggacggtaaacagtatgagagtgtcctcatggtgagtatagatcaattgcttgacagtatgaaggaaattggatcaaactgcctgaataatgagtttaattttttcaaacgccatatctgcgacgccaataaagaaggaatgtttctgtttcgagccgcacgtaaactcaggcagttccttaaaatgaattccaccggtgatttcgacttacatctgctgaaagtaagcgaaggcacgacaattctgctaaactgtactggacaagtaaagggtcggaaacccgcagcccttggtgaagctcagcctaccaagagtctggaggagaacaagagcctgaaagaacagaagaagctcaacgatctgtgtttccttaagcgcctcctgcaagagattaaaacatgttggaacaagatcttaatgggaactaaagagcactag

SEQ ID NO: 308781 - RNA, 677 nt, Artificial Sequence
  derived and/or modified sequence
gggaaauaagagagaaaagaagaguaagaagaaauauaagagccaccauguuucacgugucauuucgguauaucuuugggcugccuccgcuuauccucguacuccuccccguggccuccucagacugcgacauugaggggaaagacgggaagcaguacgaaucgguacuuauggucagcaucgaccagcucuuggacucgaugaaggaaaucgggucgaauugucugaacaaugaguucaacuucuucaagcgacauaucugugaugcuaacaaagagggaauguuccuguuuagagcggcgagaaaacugcgccaguuuuugaagaugaauucaaccggugauuucgaucuucaccugcuuaaaguguccgaggguacaacuauccuccuuaacugcacgggacaggucaagggacggaaaccggcagcgcucggagaagcccaacccacaaagucgcuggaggaaaacaagagcuugaaggaacagaagaaauugaaugaucucugcuucuugaaaagguugcuucaagagauuaagacguguuggaauaagauuuugaugggcacgaaagagcauugauaagcugccuucugcggggcuugccuucuggccaugcccuucuucucucccuugcaccuguaccucuuggucuuugaauaaagccugaguaggaag

SEQ ID NO: 308782 - RNA, 534 nt, Artificial Sequence
  derived and/or modified sequence
auguuucacgugucauuuagguacauuuucggucugccuccucuuauacugguacugcucccuguggcuucuuccgauugcgauauugaaggaaaggauggcaaacaauacgagucaguucugauggucuccauugaccagcugcuagauaguaugaaagagaucgguucaaauugccugaauaaugaguuuaauuucuucaagaggcacaucugugacgcuaauaaggaagguauguuccuguuccgugcugcucggaagcugcgacaauuccuaaaaaugaauucaacgggagauuuugacuuacaucugcugaaaguaagcgaaggcacgacaauucugcuaaacuguacuggacaaguaaagggucggaaacccgcagcccuuggugaagcucagccuaccaagagucuggaggagaacaagagccugaaagaacagaagaagcucaacgaucuguguuuccuuaagcgccuccugcaagagauuaaaacauguuggaacaagaucuuaaugggaacuaaagagcacuag

SEQ ID NO: 308783 - RNA, 534 nt, Artificial Sequence
  derived and/or modified sequence
auguuccaugucucauuucgauauaucuucggacugcccccccuaauccuagugcuacuccccgucgcgagcagcgauugcgacaucgagggaaaggacgguaaacaguaugagaguguccucauggugaguauagaucaauugcuugacaguaugaaggaaauuggaucaaacugccugaauaaugaguuuaauuuuuucaaacgccauaucugcgacgccaauaaagaaggaauguuucuguuucgagccgcacguaaacucaggcaguuccuuaaaaugaauuccaccggugauuucgacuuacaucugcugaaaguaagcgaaggcacgacaauucugcuaaacuguacuggacaaguaaagggucggaaacccgcagcccuuggugaagcucagccuaccaagagucuggaggagaacaagagccugaaagaacagaagaagcucaacgaucuguguuuccuuaagcgccuccugcaagagauuaaaacauguuggaacaagaucuuaaugggaacuaaagagcacuag

SEQ ID NO: 308784 - protein, 16 aa, Artificial Sequence
  derived and/or modified sequence
VSEGTTILLNCTGQVK

SEQ ID NO: 308785 - protein, 37 aa, Artificial Sequence
  derived and/or modified sequence
MFHVSFRYIFGLPPLILVLLPVASSDCDIEGQHERNW

SEQ ID NO: 308786 - DNA, 1940 bp, Artificial Sequence
  derived and/or modified sequence
cacacttgtggcttccgtgcacacattaacaactcatggttctagctcccagtcgccaagcgttgccaaggcgttgagagatcatctgggaagtcttttacccagaattgctttgattcaggccagctggtttttcctgcggtgattcggaaattcgcgaattcctctggtcctcatccaggtgcgcgggaagcaggtgcccaggagagaggggataatgaagattccatgctgatgatcccaaagattgaacctgcagaccaagcgcaaagtagaaactgaaagtacactgctggcggatcctacggaagttatggaaaaggcaaagcgcagagccacgccgtagtgtgtgccgccccccttgggatggatgaaactgcagtcgcggcgtgggtaagaggaaccagctgcagagatcaccctgcccaacacagactcggcaactccgcggaagaccagggtcctgggagtgactatgggcggtgagagcttgctcctgctccagttgcggtcatcatgactacgcccgcctcccgcagaccatgttccatgtttcttttaggtatatctttggacttcctcccctgatccttgttctgttgccagtagcatcatctgattgtgatattgaaggtaaagatggcaaacaatatgagagtgttctaatggtcagcatcgatcaattattgaatcagccctacaaaaagaaagaaaaaagaacagaaaggaagcagcaatcagctatgagcaataattagacattcgtttgctagctctagcacatgtgaccatgaagagtaactgtgaaccatattgactttctctcctgaaaagaaaaatatgaaaaaaattcagaagaaaactgtcctatcacaaagaatacagaaattgggacagcatgaaagaaattggtagcaattgcctgaataatgaatttaacttttttaaaagacatatctgtgatgctaataaggaaggtatgtttttattccgtgctgctcgcaagttgaggcaatttcttaaaatgaatagcactggtgattttgatctccacttattaaaagtttcagaaggcacaacaatactgttgaactgcactggccaggttaaaggaagaaaaccagctgccctgggtgaagcccaaccaacaaagagtttgaaaataaatctttaaaggaacagaaaaaactgaatgacttgtgtttcctaaagagactattacaagagataaaaacttgttggaataaaattttgatgggcactaaagaacactgaaaaatatggagtggcaatatagaaacacgaactttagctgcatcctccaagaatctatctgcttatgcagtttttcagagtggaatgcttcctagaagttactgaatgcaccatggtcaaaacggattagggcatttgagaaatgcatattgtattactagaagatgaatacaaacaatggaaactgaatgctccagtcaacaaactatttcttatatatgtgaacatttatcaatcagtataattctgtactgatttttgtaagacaatccatgtaaggtatcagttgcaataatacttctcaaacctgtttaaatatttcaagacattaaatctatgaagtatataatggtttcaaagattcaaaattgacattgctttactgtcaaaataattttatggctcactatgaatctattatactgtattaagagtgaaaattgtcttcttctgtgctggagatgttttagagttaacaatgatatatggataatgccggtgagaataagagagtcataaaccttaagtaagcaacagcataacaaggtccaagatacctaaaagagatttcaagagatttaattaatcatgaatgtgtaacacagtgccttcaataaatggtatagcaaatgttttgacatgaaaaaaggacaatttcaaaaaaa

SEQ ID NO: 308787 - protein, 89 aa, Artificial Sequence
  derived and/or modified sequence
MKYTKQNFMMSVLGIIIYVTDLIVDIWVSVRFFHEGQYVFSALALSFMLFGTLVAQCFSYSWFKADLKKAGQESQHCFLLLHCLQGGVF

SEQ ID NO: 308788 - DNA, 270 bp, Artificial Sequence
  derived and/or modified sequence
atgaagtacaccaagcagaacttcatgatgagcgtgctgggcatcatcatctacgtgaccgacctgatcgtggacatctgggtgagcgtgagattcttccacgagggccagtacgtgttcagcgccctggccctgagcttcatgctgttcggcaccctggtggcccagtgcttcagctacagctggttcaaggccgacctgaagaaggccggccaggagagccagcactgcttcctgctgctgcactgcctgcagggcggcgtgttctag

SEQ ID NO: 308789 - DNA, 270 bp, Artificial Sequence
  derived and/or modified sequence
atgaagtacactaaacagaattttatgatgtccgtgttgggcattattatctacgtcactgacctgatcgtggatatctgggtgagtgtgcgcttttttcatgagggacagtatgtgttttctgctcttgcattatcttttatgctatttggaacacttgttgctcagtgcttctcctacagttggtttaaagctgatctgaaaaaggccggccaggagtcccagcattgtttcctgctgctacactgtctccaaggcggcgttttttag

SEQ ID NO: 308790 - DNA, 270 bp, Artificial Sequence
  derived and/or modified sequence
atgaagtacaccaagcagaacttcatgatgtctgtgctgggcatcatcatctacgtgacagacctgattgtggacatctgggtgtctgtgcgcttcttccacgagggccagtatgtgttttctgccctggccctgtccttcatgctgtttggcaccctggtggcccagtgcttctcctacagctggttcaaggctgacctgaagaaggccggccaggagagccagcactgcttcctgctgctgcactgcctgcagggcggcgtcttctag

SEQ ID NO: 308791 - DNA, 270 bp, Artificial Sequence
  derived and/or modified sequence
atgaagtacaccaagcagaacttcatgatgagcgtgctgggcatcatcatctacgtcaccgatttaatcgttgacatatgggtcagcgtgcgcttttttcacgagggtcagtacgtgttctctgctcttgcactcagtttcatgcttttcggaacgcttgtagcgcagtgcttttcttactcctggtttaaggcggatcttaagaaggcggggcaggaatcccagcactgcttcctgctcctgcactgcctccagggaggagttttttag

SEQ ID NO: 308792 - DNA, 270 bp, Artificial Sequence
  derived and/or modified sequence
atgaaatataccaaacagaacttcatgatgagcgtcctgggcataattatctacgtgaccgatcttatagtggatatatgggtgtccgtacgattttttcatgaggggcaatacgtttttagtgctctcgctctctcatttatgttatttggtacgctggtggcccagtgtttctcttatagctggttcaaagcagatttgaagaaagccggacaggagtctcagcactgttttttgctgttgcattgcctgcagggcggtgtgttctag

SEQ ID NO: 308793 - DNA, 716 bp, Artificial Sequence
  derived and/or modified sequence
agatatttctgatgaagaaaacgatctgctcttacctattttatgaatcagcagcatagtgtatcagagtggctaatgacatctgcttttgaagaagaagtaaaatattcacaagatgaagatttttccagaagggactttgagtcaaagatggctttttatatttgacaagtcttgtcatctgtaatgaagatcattgtgaaacagaagattgattaaagccttgtaacattggacctagattagagatttagaaaagaaagtcaaaattagtcactttagtgttagtgttcccatttcataatatttattctttcttctaaatagatttagggagtagaaattaaaattcaatgctataccaaagggtatactaatatttgtttggctttttttccctttttgtgagggagaaaaaagtagataacgaaaagctatagtcattcgtaatgaaatatactaaacagaattttatgatgtcagttcttggcattataatctacgtaactgatttaattgtggacatatgggtatctgtcagatttttccatgaaggacagtatgtttttagtgctttagcgttaagctttatgctttttggaacacttgtggctcagtgttttagttattcttggttcaaggctgatttaaagaaagcaggccaagaaagtcagcattgttttcttctacttcattgcttgcaaggaggagttttt

SEQ ID NO: 308794 - protein, 512 aa, Artificial Sequence
  derived and/or modified sequence
MGCIKSKGKDSLSDDGVDLKTQPVRNTERTIYVRDPTSNKQQRPVPESQLLPGQRFQTKDPEEQGDIVVALYPYDGIHPDDLSFKKGEKMKVLEEHGEWWKAKSLLTKKEGFIPSNYVAKLNTLETEEWFFKDITRKDAERQLLAPGNSAGAFLIRESETLKGSFSLSVRDFDPVHGDVIKHYKIRSLDNGGYYISPRITFPCISDMIKHYQKQADGLCRRLEKACISPKPQKPWDKDAWEIPRESIKLVKRLGAGQFGEVWMGYYNNSTKVAVKTLKPGTMSVQAFLEEANLMKTLQHDKLVRLYAVVTREEPIYIITEYMAKGSLLDFLKSDEGGKVLLPKLIDFSAQIAEGMAYIERKNYIHRDLRAANVLVSESLMCKIADFGLARVIEDNEYTAREGAKFPIKWTAPEAINFGCFTIKSDVWSFGILLYEIVTYGKIPYPGRTNADVMTALSQGYRMPRVENCPDELYDIMKMCWKEKAEERPTFDYLQSVLDDFYTATEGQYQQQP

SEQ ID NO: 308795 - protein, 150 aa, Artificial Sequence
  derived and/or modified sequence
MGCIKSKGKDSLSDDGVDLKTQPVRNTERTIYVRDPTSNKQQRPVPESQLLPGQRFQTKDPEEQGDIVVALYPYDGIHPDDLSFKKGEKMKVLEEHGEWWKAKSLLTKKEGFIPSNYVAKLNTLETEEWFFKDITRKDAERQLLAPGNSA

SEQ ID NO: 308796 - DNA, 1539 bp, Artificial Sequence
  derived and/or modified sequence
atgggctgcatcaagagcaagggcaaggacagcctgagcgacgacggcgtggacctgaagacccagcccgtgagaaacaccgagagaaccatctacgtgagagaccccaccagcaacaagcagcagagacccgtgcccgagagccagctgctgcccggccagagattccagaccaaggaccccgaggagcagggcgacatcgtggtggccctgtacccctacgacggcatccaccccgacgacctgagcttcaagaagggcgagaagatgaaggtgctggaggagcacggcgagtggtggaaggccaagagcctgctgaccaagaaggagggcttcatccccagcaactacgtggccaagctgaacaccctggagaccgaggagtggttcttcaaggacatcaccagaaaggacgccgagagacagctgctggcccccggcaacagcgccggcgccttcctgatcagagagagcgagaccctgaagggcagcttcagcctgagcgtgagagacttcgaccccgtgcacggcgacgtgatcaagcactacaagatcagaagcctggacaacggcggctactacatcagccccagaatcaccttcccctgcatcagcgacatgatcaagcactaccagaagcaggccgacggcctgtgcagaagactggagaaggcctgcatcagccccaagccccagaagccctgggacaaggacgcctgggagatccccagagagagcatcaagctggtgaagagactgggcgccggccagttcggcgaggtgtggatgggctactacaacaacagcaccaaggtggccgtgaagaccctgaagcccggcaccatgagcgtgcaggccttcctggaggaggccaacctgatgaagaccctgcagcacgacaagctggtgagactgtacgccgtggtgaccagagaggagcccatctacatcatcaccgagtacatggccaagggcagcctgctggacttcctgaagagcgacgagggcggcaaggtgctgctgcccaagctgatcgacttcagcgcccagatcgccgagggcatggcctacatcgagagaaagaactacatccacagagacctgagagccgccaacgtgctggtgagcgagagcctgatgtgcaagatcgccgacttcggcctggccagagtgatcgaggacaacgagtacaccgccagagagggcgccaagttccccatcaagtggaccgcccccgaggccatcaacttcggctgcttcaccatcaagagcgacgtgtggagcttcggcatcctgctgtacgagatcgtgacctacggcaagatcccctaccccggcagaaccaacgccgacgtgatgaccgccctgagccagggctacagaatgcccagagtggagaactgccccgacgagctgtacgacatcatgaagatgtgctggaaggagaaggccgaggagagacccaccttcgactacctgcagagcgtgctggacgacttctacaccgccaccgagggccagtaccagcagcagccctag

SEQ ID NO: 308797 - DNA, 453 bp, Artificial Sequence
  derived and/or modified sequence
atgggctgcatcaagagcaagggcaaggacagcctgagcgacgacggcgtggacctgaagacccagcccgtgagaaacaccgagagaaccatctacgtgagagaccccaccagcaacaagcagcagagacccgtgcccgagagccagctgctgcccggccagagattccagaccaaggaccccgaggagcagggcgacatcgtggtggccctgtacccctacgacggcatccaccccgacgacctgagcttcaagaagggcgagaagatgaaggtgctggaggagcacggcgagtggtggaaggccaagagcctgctgaccaagaaggagggcttcatccccagcaactacgtggccaagctgaacaccctggagaccgaggagtggttcttcaaggacatcaccagaaaggacgccgagagacagctgctggcccccggcaacagcgcctag

SEQ ID NO: 308798 - DNA, 1539 bp, Artificial Sequence
  derived and/or modified sequence
atgggctgtattaagagcaaaggaaaggattcactctccgacgatggcgtggatctgaagacacagcccgttcgtaatacggaacgcaccatctacgtgagagaccctacctcaaacaagcaacagcgcccggtcccagagtcccagctgctgcctggccagcgcttccagacgaaagaccctgaagaacagggtgacatcgtagtcgccttatacccgtacgacggaattcatccagacgacctttccttcaagaagggagagaaaatgaaggtgttggaggagcatggcgagtggtggaaggccaaaagtctattaaccaaaaaggagggtttcatcccttcaaactacgtggcaaaactcaacaccctggaaaccgaggagtggtttttcaaagacattaccaggaaggacgcggagagacagctgctcgcccccggcaattctgccggcgcattcttgatacgggagtctgagacactgaaggggtctttctctctgagcgtgcgcgattttgaccctgtgcacggtgacgtaatcaaacattacaaaatacgatctctggataatggtggctactatattagcccccgcatcactttcccctgcataagtgatatgattaaacattatcaaaaacaggccgacggcctgtgtcgtcgcctggagaaagcctgtatctcaccgaagccgcagaaaccatgggataaagatgcgtgggaaatacccagagaaagcatcaaactggtaaagcgcctgggggccggacagtttggagaagtttggatgggatactacaacaatagtaccaaggtggctgtcaagacgctcaagcccgggacgatgagcgtgcaggcattcctcgaggaggcaaatctgatgaagacccttcagcacgataagctcgtccgtctatacgcagtagtgacacgcgaagagcccatctacatcatcacagaatatatggcaaaggggtccctgctggacttcctgaagtctgacgagggagggaaggtgcttttaccgaaactgattgattttagcgcccagattgccgaggggatggcttacattgaaaggaagaattacatccatcgcgacctaagagctgccaatgtcctggtgagcgagtcactgatgtgcaaaattgctgacttcggccttgcacgagtgatcgaggacaatgagtacactgcaagagaaggagccaaattccctattaagtggaccgctcccgaggccatcaacttcggatgcttcaccattaagagcgatgtatggtcattcggcatccttctgtatgaaattgtgacctacggcaaaattccctaccccggccgaaccaatgccgatgtgatgaccgccctatctcaaggatatcggatgcctagggtggaaaactgtcccgatgaattgtacgatatcatgaagatgtgctggaaggagaaagccgaggagcgacccaccttcgactatcttcaaagtgtgttagacgacttttacacggctactgaaggccagtatcagcaacagccttag

SEQ ID NO: 308799 - DNA, 453 bp, Artificial Sequence
  derived and/or modified sequence
atgggctgtattaagtctaagggaaaagactccctctctgatgatggtgtagacctgaagacgcaaccggtgagaaacacagagagaaccatttacgttagagacccaacaagtaacaaacagcagcgtcctgtgcccgagagccagctgcttccaggccagaggttccagactaaggatccagaagaacagggcgatatagtggtggctctgtatccttatgacggaattcatccggatgacttaagctttaagaagggggaaaagatgaaagtgcttgaggagcatggggaatggtggaaagctaagagcctgttaaccaagaaagagggttttatcccctctaactatgtcgccaagcttaacaccctggaaaccgaagagtggtttttcaaggatataacccggaaggatgcagaacgccaactacttgcccccggtaactcagcctag

SEQ ID NO: 308800 - DNA, 1539 bp, Artificial Sequence
  derived and/or modified sequence
atgggctgcatcaagagcaagggcaaggacagcctgagtgatgatggagtggacctgaagacccagcctgtgaggaacacagagaggaccatctacgtgcgggaccccaccagcaacaagcagcagaggcctgtgcctgagagccagctgctgcccggccagcgcttccagaccaaggaccctgaggagcagggcgacatcgtggtggccctgtacccctatgatggcatccacccagatgacctgtccttcaagaagggggagaagatgaaggtgctggaggagcacggggagtggtggaaggccaagagcctgctgaccaagaaggagggcttcatccccagcaactacgtggccaagctgaacaccctggagacagaggagtggttcttcaaggacatcaccaggaaggatgctgagcggcagctgctggcccctggcaacagcgctggggccttcctgatccgggagagcgagaccctgaagggcagcttcagcctgtctgtgcgggactttgatcctgtgcatggagatgtgatcaagcactacaagatccgcagcctggacaatggaggctactacatcagcccccgcatcaccttcccctgcatcagtgacatgatcaagcactaccagaagcaggctgatggcctgtgccggcggctggagaaggcctgcatcagccccaagccccagaagccctgggacaaggatgcctgggagatcccccgggagagcatcaagctggtgaagaggctgggcgccggccagtttggagaggtgtggatgggctactacaacaacagcaccaaggtggccgtgaagaccctgaagccaggcaccatgtctgtgcaggccttcctggaggaggccaacctgatgaagaccctgcagcacgacaagctggtgcggctgtatgctgtggtgacccgggaggagcccatctacatcatcacagagtacatggccaagggcagcctgctggacttcctgaagagtgatgagggcggcaaggtgctgctgcccaagctgattgacttcagcgcccagattgctgagggcatggcctacatcgagaggaagaactacatccaccgggacctgcgggccgccaacgtgctggtgtctgagagcctgatgtgcaagattgctgactttggcctggcccgggtgattgaagataatgagtacacagcccgggagggcgccaagttccccatcaagtggacagcccctgaggccatcaactttggctgcttcaccatcaagagtgatgtgtggagctttggcatcctgctgtatgagatcgtgacctacggcaagatcccctacccaggccgcaccaatgctgatgtgatgacagccctgagccagggctacaggatgccccgggtggagaactgcccagatgagctgtatgacatcatgaagatgtgctggaaggagaaggccgaggagcggcccacctttgactacctgcagagcgtgctggatgacttctacacagccacagagggccagtaccagcagcagccctag

SEQ ID NO: 308801 - DNA, 453 bp, Artificial Sequence
  derived and/or modified sequence
atgggctgcatcaagagcaagggcaaggacagcctgagtgatgatggagtggacctgaagacccagcctgtgaggaacacagagaggaccatctacgtgcgggaccccaccagcaacaagcagcagaggcctgtgcctgagagccagctgctgcccggccagcgcttccagaccaaggaccctgaggagcagggcgacatcgtggtggccctgtacccctatgatggcatccacccagatgacctgtccttcaagaagggggagaagatgaaggtgctggaggagcacggggagtggtggaaggccaagagcctgctgaccaagaaggagggcttcatccccagcaactacgtggccaagctgaacaccctggagacagaggagtggttcttcaaggacatcaccaggaaggatgctgagcggcagctgctggcccctggcaacagcgcctag

SEQ ID NO: 308802 - DNA, 1539 bp, Artificial Sequence
  derived and/or modified sequence
atgggctgcatcaagagcaagggcaaggacagcctgagcgacgacggagtcgacttaaaaacgcagcctgtcaggaatacagaacgaacaatctacgtcagggaccccacatctaataagcagcagagaccggtccccgaatctcagttgctgcctgggcagaggttccaaacgaaagatcccgaggaacagggcgacatcgtcgtggcgctgtatccatatgacggaatacatcctgatgacctctccttcaaaaaaggagagaagatgaaggtgttggaggaacacggagaatggtggaaagctaaatccctcttaaccaagaaagagggattcataccgtcaaactacgtcgcgaaacttaataccctggagactgaggagtggttcttcaaggacattactcgaaaagacgctgagaggcagttgttggcccccgggaactctgcaggcgcatttctgatcagagagtccgaaacacttaaaggctctttctccctgtctgtgcgcgactttgatccagtacatggggacgttatcaagcattacaaaattcgctccttggacaatggcggctactacatcagcccccggatcacctttccatgtattagtgatatgattaagcattatcagaagcaggctgacggactgtgcaggagacttgagaaagcttgcatctctcctaagccacaaaaaccttgggacaaagacgcctgggaaatccctcgggaatcgattaagttagttaaaagacttggcgcgggacaatttggtgaggtgtggatggggtattacaacaatagcactaaggtggctgtgaaaactctgaaaccaggaacaatgagcgtgcaagccttcctggaggaagccaacctgatgaagaccctgcagcatgacaaacttgtgcgcctatatgccgtggtgactagagaggaacccatctatattattacagaatatatggccaaaggcagcttattagactttctgaaatctgacgagggaggcaaagtactgctgcccaagctgatcgattttagcgcccagatcgccgagggcatggcgtatatcgagagaaaaaactatatccacagagacctccgagccgcaaacgtactggtgtctgagtctctcatgtgcaagattgcggacttcgggctggccagggtgatcgaggataacgagtatactgcaagagaaggagccaagttccccatcaagtggactgcacctgaggccatcaacttcggctgttttacaattaaaagcgacgtgtggagcttcggcatcctgctctacgagattgtaacatatggtaagattccctacccaggccgcacgaacgcggatgtgatgacagcattaagccaaggctatagaatgccacgggtagaaaactgccctgacgaactgtacgatatcatgaaaatgtgctggaaagagaaagctgaagaacgacccacattcgattatttgcagagtgttcttgacgacttctacaccgccacggagggtcagtaccaacaacaaccttag

SEQ ID NO: 308803 - DNA, 453 bp, Artificial Sequence
  derived and/or modified sequence
atgggctgcatcaagagcaagggcaaggacagcctgagcgacgacggagtggacctaaagacccagcctgtccggaatacagagcgcacaatatacgttagggatcctacatctaataagcagcaaagaccagtcccagagtctcaattgttgccaggacagaggtttcagacgaaggaccccgaagagcaaggagatatcgtggttgctttgtatccttatgacggcatacacccagatgatttaagcttcaagaagggggagaaaatgaaggttcttgaagagcacggcgaatggtggaaggctaagtcgctgttgaccaaaaaggagggtttcattccgagcaattatgttgcaaaattgaacacattggaaactgaggagtggtttttcaaggatatcacaagaaaggacgctgaacgccagttgctggctcctgggaattctgcttag

SEQ ID NO: 308804 - DNA, 1539 bp, Artificial Sequence
  derived and/or modified sequence
atgggctgcatcaaaagcaaggggaaagacagcctgagcgacgatggcgtggacctcaagacccagccggtcagaaatactgagcgcaccatctacgttagagatcctacctccaacaaacagcaacgaccagtacccgagtctcagcttctgccaggacaacggttccaaacaaaggacccagaggagcagggtgacattgtcgttgcgctgtatccttatgacggtatccatcctgatgacttatcttttaagaagggagaaaagatgaaagttttggaagaacacggcgagtggtggaaggcgaaatccctgctgacaaagaaggaaggcttcattcctagtaattatgtagccaaactcaataccttggaaacagaggagtggttttttaaagatataacccggaaagacgccgagcgacaattactggcccctggcaactctgctggagccttcctgattagggaaagcgagaccctcaaggggtcgtttagccttagtgtgagggattttgatccagtccatggtgacgtgatcaagcactacaaaataaggagtctcgataatgggggttattacataagcccacgtattacattcccctgcatctcggacatgattaaacattaccagaaacaggccgatgggctgtgtcggaggctggaaaaggcctgcatctcccctaaaccgcagaagccctgggataaggatgcctgggagatcccaagagaatctataaagctggtgaagagactcggtgctgggcagttcggagaggtctggatgggctactataacaatagtacaaaagtcgcagttaaaactcttaagccagggacaatgtccgtgcaggccttcctggaagaagcaaatctgatgaaaacactgcaacatgataaactcgtgcgactctacgcggtcgtgactagagaagaacctatctacattattacagagtatatggctaaaggatcactcctcgatttcttgaaaagcgacgagggaggcaaggtgctcttacccaagctgattgactttagcgcacagatagccgaaggcatggcctatattgaacggaaaaactatattcacagggacctgcgagccgctaatgtgctcgtgtctgaaagtctgatgtgtaaaattgccgattttggcctggcccgtgtgatcgaggacaacgaatacaccgcccgagagggtgccaagttcccaatcaaatggaccgcccctgaagctattaacttcggttgtttcactatcaaaagtgatgtttggtccttcggcatcctgctgtacgaaatcgtcacttatggaaagataccctatcctggaaggactaatgccgacgtgatgacagcactgagtcagggctacaggatgccgagagtggaaaattgtcccgacgagctctacgacatcatgaagatgtgctggaaggaaaaggcagaagaaagaccgactttcgactacctacagtcggtcctcgacgatttctataccgctacggagggacaataccagcagcagccttag

SEQ ID NO: 308805 - DNA, 453 bp, Artificial Sequence
  derived and/or modified sequence
atgggctgcatcaaaagtaaagggaaggatagcctgtctgacgacggagtggaccttaaaacgcaacccgtgcgcaacacagaaaggactatttatgtgcgggatcccacaagcaataaacagcagagacccgtccccgagtcacagctccttcccggacagcgatttcagactaaagatcctgaggagcagggagatatcgtggtcgctctgtacccctacgacggcatccatcctgacgacctgagcttcaagaaaggagagaaaatgaaagtcttggaggaacacggggagtggtggaaggccaagtcactgctgactaaaaaggagggctttatccctagcaattacgtggctaagcttaacactttggagactgaagagtggttcttcaaggatattaccaggaaggacgcagagcggcagctgctcgcccctgggaattccgcatag

SEQ ID NO: 308806 - DNA, 2297 bp, Artificial Sequence
  derived and/or modified sequence
tcggccgagcccagagacagccagttcctctcccgccgcgccgggccgcgctgccgctcgctccccggccgtggcgcctccgggccagacgcgctgcagcctccagcccgcggcaagcggggcggccgcgccacccccggccccgcgccagcagcccctcgccgcgcgtccagcgttcccggccagcagcctccccatacgcaggtcctgctgggccgccccgtcgcgccccccactctgaactcaagtcaccgtggagctccgccgccccgaaactttcaccgcgagcgggaaatatgggatgtataaaatcaaaagggaaagacagcttgagtgacgatggagtagatttgaagactcaaccagtacgtaatactgaaagaactatttatgtgagagatccaacgtccaataaacagcaaaggccagttccagaatctcagcttttacctggacagaggtttcaaactaaagatccagaggaacaaggagacattgtggtagccttgtacccctatgatggcatccacccggacgacttgtctttcaagaaaggagagaagatgaaagtcctggaggagcatggagaatggtggaaagcaaagtcccttttaacaaaaaaagaaggcttcatccccagcaactatgtggccaaactcaacaccttagaaacagaagagtggtttttcaaggatataaccaggaaggacgcagaaaggcagcttttggcaccaggaaatagcgctggagctttccttattagagaaagtgaaacattaaaaggaagcttctctctgtctgtcagagactttgaccctgtgcatggtgatgttattaagcactacaaaattagaagtctggataatgggggctattacatctctccacgaatcacttttccctgtatcagcgacatgattaaacattaccaaaagcaggcagatggcttgtgcagaagattggagaaggcttgtattagtcccaagccacagaagccatgggataaagatgcctgggagatcccccgggagtccatcaagttggtgaaaaggcttggcgctgggcagtttggggaagtctggatgggttactataacaacagtaccaaggtggctgtgaaaaccctgaagccaggaactatgtctgtgcaagccttcctggaagaagccaacctcatgaagaccctgcagcatgacaagctcgtgaggctctacgctgtggtcaccagggaggagcccatttacatcatcaccgagtacatggccaagggcagtttgctggatttcctgaagagcgatgaaggtggcaaagtgctgcttccaaagctcattgacttttctgctcagattgcagagggaatggcatacatcgagcggaagaactacattcaccgggacctgcgagcagctaatgttctggtctccgagtcactcatgtgcaaaattgcagattttggccttgctagagtaattgaagataatgagtacacagcaagggaaggtgctaagttccctattaagtggacggctccagaagcaatcaactttggatgtttcactattaagtctgatgtgtggtcctttggaatcctcctatacgaaattgtcacctatgggaaaattccctacccagggagaactaatgccgacgtgatgaccgccctgtcccagggctacaggatgccccgtgtggagaactgcccagatgagctctatgacattatgaaaatgtgctggaaagaaaaggcagaagagagaccaacgtttgactacttacagagcgtcctggatgatttctacacagccacggaagggcaataccagcagcagccttagagcacagggagacccgtccatttggcaggggtggctgcctcatttagagaggaaaagtaaccatcactggttgcacttatgatttcatgtgcggggatcatctgccgtgcctggatcctgaaatagaggctaaattactcaggaagaacaccctctaaatgggaaagtattctgtactcttagatggattctccactcagttgcaacttggacttgtcctcagcagctggtaatcttgctctgcttgacaacatctgagtgcagccgtttgagaagaaaacatctattctctccaaaaatgcacccaactagctctatgtttacaaatggacataggactcaaagtttcagagaccattgcaatgaatccccaataattgcagaactaaactcatttataaagctaaaataaccggatatatacatagcatgacatttctttgtgctttggcttacttgttt

SEQ ID NO: 308807 - DNA, 550 bp, Artificial Sequence
  derived and/or modified sequence
ggcagtgcttcagaattacacatcacatggggagcagcatgctcccactgtgccccagaagagtttcccggacagtgtccagagaatctgttcggaaatatgggatgtataaaatcaaaagggaaagacagcttgagtgacgatggagtagatttgaagactcaaccagtacgtaatactgaaagaactatttatgtgagagatccaacgtccaataaacagcaaaggccagttccagaatctcagcttttacctggacagaggtttcaaactaaagatccagaggaacaaggagacattgtggtagccttgtacccctatgatggcatccacccggacgacttgtctttcaagaaaggagagaagatgaaagtcctggaggagcatggagaatggtggaaagcaaagtcccttttaacaaaaaaagaaggcttcatccccagcaactatgtggccaaactcaacaccttagaaacagaagagtggtttttcaaggatataaccaggaaggacgcagaaaggcagcttttggcaccaggaaatagcgctg

SEQ ID NO: 308808 - protein, 410 aa, Artificial Sequence
  derived and/or modified sequence
MAKRSRSEDEDDDLQYADHDYEVPQQKGLKKLWNRVKWTRDEDDKLKKLVEQHGTDDWTLIASHLQNRSDFQCQHRWQKVLNPELIKGPWTKEEDQRVIELVQKYGKKRKMRVGHSPGSELRDGSLNDGGNMALKHTPLKTLPFSPSQFFNTCPGNEQLNIENPSFTSTPICGQKALITTPLHKETTPKDQKENVGFRTPTIRRSILGTTPRTPTPFKNALAAQEKKYGPLKIVSQPLAFLEEDIREVLKEETGTDLFLKEEDEPAYKSCKQENTASGKKVRKSLVLDNWEKEESGTQLLTEDISDMQSENRFTTSLLMIPLLEIHDNRCNLIPEKQDINSTNKTYTLTKKKPNPNTSKVVKLEKNLQSNCEWETVVYGKTEDQLIMTEQARRYLSTYTATSSTSRALIL

SEQ ID NO: 308809 - protein, 456 aa, Artificial Sequence
  derived and/or modified sequence
MGITLIWCLALVLIKWITSKRRGAISYDSSDQTALYIRMLGDVRVRSRAGFESERRGSHPYIDFRIFHSQSEIEVSVSARNIRRLLSFQRYLRSSRFFRGTAVSNSLNILDDDYNGQAKCMLEKVGNWNFDIFLFDRLTNGNSLVSLTFHLFSLHGLIEYFHLDMMKLRRFLVMIQEDYHSQNPYHNAVHAADVTQAMHCYLKEPKLANSVTPWDILLSLIAAATHDLDHPGVNQPFLIKTNHYLATLYKNTSVLENHHWRSAVGLLRESGLFSHLPLESRQQMETQIGALILATDISRQNEYLSLFRSHLDRGDLCLEDTRHRHLVLQMALKCADICNPCRTWELSKQWSEKVTEEFFHQGDIEKKYHLGVSPLCDRHTESIANIQIGFMTYLVEPLFTEWARFSNTRLSQTMLGHVGLNKASWKGLQREQSSSEDTDAAFELNSQLLPQENRLS

SEQ ID NO: 308810 - DNA, 1371 bp, Artificial Sequence
  derived and/or modified sequence
atgggcataacactgatctggtgcttagctctggtgttaatcaagtggatcaccagcaaaaggaggggagctatttcctacgatagctccgaccaaaccgccttatacattaggatgctgggtgacgtccgcgtgcggtctcgtgccggctttgagagcgagcgccgtggatctcacccatatattgacttccgcatctttcactcgcaaagcgagattgaggtatcagtctctgcaaggaatattcgtaggttgttaagcttccagcggtaccttcgaagctcaaggttttttcgagggacagcggtcagtaattcccttaatattctcgacgacgattataacgggcaggccaaatgtatgctggagaaggttggcaactggaacttcgatatattcctgtttgatcgattgacaaacggcaatagcctggtgtctctgactttccacctgtttagcctgcatggcttgatagagtattttcatttggatatgatgaaattaaggagattcctggtaatgattcaagaagactaccacagtcaaaatccttatcataacgccgtacatgcggcggacgtaactcaggctatgcactgctacctgaaggaacccaagttagctaacagtgtcaccccctgggacattctgttgtcactgatcgctgcagcaactcatgacttggatcaccccggagtgaaccagccattcctcatcaaaacgaaccattacttggctacactgtacaaaaacacatctgtgcttgaaaatcaccattggcgatctgccgtagggctactacgagagagcggactctttagccacctcccattggagagcagacagcagatggaaacacaaattggcgcactgatcctagcaacagacatatctcgacagaatgagtacctcagcttatttcgtagccacctcgataggggtgatctgtgtttggaggatacacggcacaggcatctggtgctgcaaatggccttgaagtgcgccgacatatgcaatccttgtcggacttgggagctctctaagcaatggtcagagaaggtgaccgaagagttcttccaccagggggacattgagaaaaaatatcatctaggcgtgagcccactttgcgatagacacaccgagagcatcgccaacatacaaatcggcttcatgacatatcttgttgagccccttttcaccgaatgggcacgcttttctaatacgcggctgtcacaaacgatgctagggcacgtcggcctaaataaggcttcgtggaagggcctacaaagggagcaaagctcttccgaagataccgatgccgcattcgagcttaatagccaacttctgccgcaggaaaataggctgagctag

SEQ ID NO: 308811 - DNA, 1371 bp, Artificial Sequence
  derived and/or modified sequence
atgggcatcaccctcatctggtgcctggccctggtgctgatcaagtggatcaccagcaagagaagaggagccatctcctatgacagcagtgaccagacagccctgtacatccgcatgctgggagatgtgcgggtgcgcagcagagctggctttgaaagtgaaagaagaggcagccacccctacatcgacttccgcatcttccacagccagagcgagattgaggtgtctgtgtctgccaggaacatccggcggctgctgtccttccagcgctacctgcggagcagccgcttcttccggggcacagctgtgagcaacagcctgaacatcctggatgatgactacaacggccaggccaagtgcatgctggagaaggtgggcaactggaactttgacatcttcctgtttgaccggctgaccaacggcaacagcctggtgtccctgaccttccacctgttcagcctgcacggcctcatcgagtacttccacctggacatgatgaagctgcggcgcttcctggtgatgatccaggaggactaccacagccagaacccctaccacaatgctgtgcatgctgctgatgtgacccaggccatgcactgctacctgaaggagcccaagctggccaacagcgtgaccccctgggacatcctgctgagcctgattgctgctgccacccatgacctggaccaccctggggtgaaccagcccttcctgatcaagaccaaccactacctggccaccctgtacaagaacacctctgtgctggagaaccaccactggaggtctgctgtgggcctgctgcgggagagcggcctcttcagccacctgcccctggagagccggcagcagatggagacccagatcggggccctgatcctggccacagacatcagccggcagaatgagtacctgagcctcttccgcagccacctggacagaggagacctgtgcctggaggacaccaggcaccgccacctggtgctgcagatggccctgaagtgtgccgacatctgcaacccctgcaggacctgggagctgagcaagcagtggagcgagaaggtgacagaggagttcttccaccagggcgacatcgagaagaagtaccacctgggcgtgagccccctgtgtgacagacacacagagagcatcgccaacatccagatcggcttcatgacctacctggtggagcccctcttcacagagtgggcccgcttcagcaacacccggctgagccagaccatgctgggccacgtgggcctgaacaaggcctcctggaagggcctgcagcgggagcagagcagcagcgaggacacagatgctgcctttgagctgaacagccagctgctgccccaggagaaccggctgtcctag

SEQ ID NO: 308812 - DNA, 1371 bp, Artificial Sequence
  derived and/or modified sequence
atgggcatcaccctgatctggtgcctggccctggtgctgatcaagtggattacctctaagcgacgcggagccatatcctacgacagcagcgatcaaactgccctgtatattagaatgcttggagacgtgagggtccggagcagagcgggatttgagtccgagcggagaggctcacatccttacattgactttcgaatctttcattctcagagtgagatcgaggtgagtgtatcagcgagaaacatccggagattgttgtcttttcagcgctatttacggagttctcgcttttttaggggaaccgctgtgtccaacagcctgaacatcttggatgacgactataatggacaggccaagtgcatgctggagaaagttggcaactggaacttcgatatctttctattcgataggctgacgaatggaaattcactggtcagcctgacattccacctctttagcctccacgggcttattgagtacttccatttggacatgatgaagctcagaaggttcctggttatgatacaagaggattatcacagccagaacccataccataatgccgtgcatgccgcggatgtgacccaggccatgcactgttatctgaaggaacctaaacttgctaatagtgtaactccctgggacatactgctgtccctcattgcagcagctacccacgacctcgatcatcccggagtaaatcagccatttttgatcaaaactaatcactatctggccacactatataagaatacatctgtgcttgagaatcaccattggagaagcgctgtcggtctcctccgggagagtgggctcttcagccacctaccgctggagtcccggcagcagatggaaactcagatcggcgcattgatcctagccaccgacatttcccgacagaatgaatatctcagcttattccggtctcatctggacagaggcgacctttgtctagaggacacccgccaccgacatctggtgttacagatggctctcaaatgcgccgacatctgtaatccctgccgtacgtgggagctctcaaagcagtggtccgagaaggttaccgaggagttttttcaccagggagacattgagaaaaaataccacctgggggtttcccctctctgtgatcgtcacaccgagagcattgctaatatccagattggttttatgacctacctggtcgagcccttgttcacagaatgggcccgtttctctaacacgcggttgagccagacaatgttgggtcacgtcggcttaaacaaggcttcttggaagggcctccagcgagaacagagctccagtgaggatactgacgccgcctttgagctcaatagccaacttctgccccaagagaaccggctgtcctag

SEQ ID NO: 308813 - DNA, 2425 bp, Artificial Sequence
  derived and/or modified sequence
ggaaggcagctgcttgaggtccaaggcagtcagtgtcccctctcttttgcctcgggacagctggtatttatcagactcctaagaagttttccttgctccctagtagaagagagagattatgcagcgggcttttgattgatccaatgggaattacattgatctggtgtctggccttggttcttatcaagtggatcacctctaagaggcgtggagctatttcctatgacagttctgatcagactgcattatacattcgtatgctaggagatgtacgtgtaaggagccgagcaggatttgaatcagaaagaagaggttctcacccatatattgattttcgtattttccactctcaatctgaaattgaagtgtctgtctctgcaaggaatatcagaaggctactaagtttccagcgatatcttagatcttcacgcttttttcgtggtactgcggtttcaaattccctaaacattttagatgatgattataatggacaagccaagtgtatgctggaaaaagttggaaattggaattttgatatctttctatttgatagactaacaaatggaaatagtctagtaagcttaacctttcatttatttagtcttcatggattaattgagtacttccatttagatatgatgaaacttcgtagatttttagttatgattcaagaagattaccacagtcaaaatccttaccataacgcagtccacgctgcggatgttactcaggccatgcactgttacttaaaggaacctaagcttgccaattctgtaactccttgggatatcttgctgagcttaattgcagctgccactcatgatctggatcatccaggtgttaatcaacctttccttattaaaactaaccattacttggcaactttatacaagaatacctcagtactggaaaatcaccactggagatctgcagtgggcttattgagagaatcaggcttattctcacatctgccattagaaagcaggcaacaaatggagacacagataggtgctctgatactagccacagacatcagtcgccagaatgagtatctgtctttgtttaggtcccatttggatagaggtgatttatgcctagaagacaccagacacagacatttggttttacagatggctttgaaatgtgctgatatttgtaacccatgtcggacgtgggaattaagcaagcagtggagtgaaaaagtaacggaggaattcttccatcaaggagatatagaaaaaaaatatcatttgggtgtgagtccactttgcgatcgtcacactgaatctattgccaacatccagattggttttatgacttacctagtggagcctttatttacagaatgggccaggttttccaatacaaggctatcccagacaatgcttggacacgtggggctgaataaagccagctggaagggactgcagagagaacagtcgagcagtgaggacactgatgctgcatttgagttgaactcacagttattacctcaggaaaatcggttatcataacccccagaaccagtgggacaaactgcctcctggaggtttttagaaatgtgaaatggggtcttgaggtgagagaacttaactcttgactgccaaggtttccaagtgagtgatgccagccagcattatttatttccaagatttcctctgttggatcatttgaacccacttgttaattgcaagacccgaacatacagcaatatgaatttggctttcatgtgaaaccttgaatatgcaaagcccagcaggagagaatccgaaaggagtaacaaaggaagttttgatatgtgccacgactttttcaaagcatctaatcttcaaaacgtgaaacttgaattgttcagcaacaatctcttggaatttaaccagtctgatgcaacaatgtgtatcttgtaccttccactaagttctctctgagaaaatggaaatgtgaagtgcccagcctctgctgcctctggcaagacaatgtttacaaatcaactctgaaaatattggttctaaattgccttggagcatgattgtgaaggaaccactcaaacaaatttaaagatcaaactttagactgcagctctttccccctggtttgcctttttcttctttggatgccaccaaagcctcccatttgctatagttttatttcatgcactggaaactgagcatttatcgtagagtaccgccaagctttcactccagtgccgtttggcaatgcaattttttttagcaattagtttttaatttggggtgggaggggaagaacaccaatgtcctagctgtattatgattctgcagtgaagacattgcatgttgttttcactactgtacacttgacctgcacatgcgagaaaaaggtggaatgtttaaaacaccataatcagctcagggtatttgccaatctgaaataaaagtgggatggg

SEQ ID NO: 308814 - DNA, 1371 bp, Artificial Sequence
  derived and/or modified sequence
atgggcatcaccttaatctggtgcctggcacttgtccttattaagtggatcacaagcaaacgaagaggagcaatatcctacgactcttccgaccagacagccctttacattaggatgctgggcgacgtgcgggtccggtcccgggcagggttcgagtctgaacgcaggggaagtcatccctacatcgattttcggattttccatagtcaatctgaaattgaggtgagcgtttctgcaagaaatattaggagactgctttctttccagcgatacctgcgatcatcacggttcttccggggtacggctgtctctaactcgctgaacattctggacgatgactacaacggtcaggcaaaatgtatgttggagaaagtgggcaactggaattttgacatcttcttattcgaccgcctgactaacggcaactcgcttgttagtctgacatttcatctgttctctttacacggactgatagaatattttcatctcgatatgatgaaattaaggaggttcttggtgatgattcaggaggactatcatagccagaacccctaccacaatgccgtgcacgccgctgacgtgacacaggccatgcattgttatcttaaggagcccaagctggctaattccgtaacgccatgggacatcttgctctccctgatcgccgcagccactcacgatctcgaccatcccggtgtgaatcagcctttcctgatcaaaacaaatcactacctggccaccctatacaaaaatactagcgtcctggagaatcatcactggcgctcagccgtaggactgctgcgcgaatccggactgttctcccatctgcccttagaatctcgtcagcagatggaaacacagatcggcgcactgatcctggccactgatatcagtcggcagaacgaatacctttccctattcagatcacacctggacaggggcgacctttgtctcgaggacacacgccaccgacatttggtgttacagatggccttaaaatgcgccgatatctgcaacccctgtcgcacttgggagctcagtaaacaatggtcagagaaggtgactgaggaattttttcatcaaggtgacattgagaaaaaataccacctgggggtcagcccattatgcgaccgacatactgagtccatcgctaatatacagattgggttcatgacatacctcgtcgaacccctgttcactgagtgggctcgattctcgaacacaagactatcccagaccatgctcggacatgtggggttgaacaaagcttcttggaagggtctccaaagggagcagtctagcagcgaagataccgacgctgctttcgagctaaattcacagctactgcctcaggagaacagactcagctag

SEQ ID NO: 308815 - DNA, 1371 bp, Artificial Sequence
  derived and/or modified sequence
atgggcatcaccctgatctggtgcctggccctggtgctgatcaagtggatcaccagcaagagaagaggcgccatcagctacgacagcagcgaccagaccgccctgtacatcagaatgctgggcgacgtgagagtgagaagcagagccggcttcgagagcgagagaagaggcagccacccctacatcgacttcagaatcttccacagccagagcgagatcgaggtgagcgtgagcgccagaaacatcagaagactgctgagcttccagagatacctgagaagcagcagattcttcagaggcaccgccgtgagcaacagcctgaacatcctggacgacgactacaacggccaggccaagtgcatgctggagaaggtgggcaactggaacttcgacatcttcctgttcgacagactgaccaacggcaacagcctggtgagcctgaccttccacctgttcagcctgcacggcctgatcgagtacttccacctggacatgatgaagctgagaagattcctggtgatgatccaggaggactaccacagccagaacccctaccacaacgccgtgcacgccgccgacgtgacccaggccatgcactgctacctgaaggagcccaagctggccaacagcgtgaccccctgggacatcctgctgagcctgatcgccgccgccacccacgacctggaccaccccggcgtgaaccagcccttcctgatcaagaccaaccactacctggccaccctgtacaagaacaccagcgtgctggagaaccaccactggagaagcgccgtgggcctgctgagagagagcggcctgttcagccacctgcccctggagagcagacagcagatggagacccagatcggcgccctgatcctggccaccgacatcagcagacagaacgagtacctgagcctgttcagaagccacctggacagaggcgacctgtgcctggaggacaccagacacagacacctggtgctgcagatggccctgaagtgcgccgacatctgcaacccctgcagaacctgggagctgagcaagcagtggagcgagaaggtgaccgaggagttcttccaccagggcgacatcgagaagaagtaccacctgggcgtgagccccctgtgcgacagacacaccgagagcatcgccaacatccagatcggcttcatgacctacctggtggagcccctgttcaccgagtgggccagattcagcaacaccagactgagccagaccatgctgggccacgtgggcctgaacaaggccagctggaagggcctgcagagagagcagagcagcagcgaggacaccgacgccgccttcgagctgaacagccagctgctgccccaggagaacagactgagctag

SEQ ID NO: 308816 - protein, 517 aa, Artificial Sequence
  derived and/or modified sequence
MDFRTACEETKTGICLLQDGNQEPFKVRLHLAKDILMIQEQDVICVSGEPFYSGERTVTIRRQTVGGFGLSIKGGAEHNIPVVVSKISKEQRAELSGLLFIGDAILQINGINVRKCRHEEVVQVLRNAGEEVTLTVSFLKRAPAFLKLPLNEDCACAPSDQSSGTSSPLCDSGLHLNYHPNNTDTLSCSSWPTSPGLRWEKRWCDLRLIPLLHSRFSQYVPGTDLSRQNAFQVIAVDGVCTGIIQCLSAEDCVDWLQAIATNISNLTKHNIKKINRNFPVNQQIVYMGWCEAREQDPLQDRVYSPTFLALRGSCLYKFLAPPVTTWDWTRAEKTFSVYEIMCKILKDSDLLDRRKQCFTVQSESGEDLYFSVELESDLAQWERAFQTATFLEVERIQCKTYACVLESHLMGLTIDFSTGFICFDAATKAVLWRYKFSQLKGSSDDGKSKIKFLFQNPDTKQIEAKELEFSNLFAVLHCIHSFFAAKVACLDPLFLGNQATASTAASSATTSKAKYTT

SEQ ID NO: 308817 - protein, 92 aa, Artificial Sequence
  derived and/or modified sequence
MDFRTACEETKTGICLLQDGNQEPFKVRLHLAKDILMIQEQDVICVSGEPFYSGERTVTIRRQTVGGFGLSIKGGAEHNIPVVVSKISKEQR

SEQ ID NO: 308818 - DNA, 1554 bp, Artificial Sequence
  derived and/or modified sequence
atggacttcagaaccgcctgcgaggagaccaagaccggcatctgcctgctgcaggacggcaaccaggagcccttcaaggtgagactgcacctggccaaggacatcctgatgatccaggagcaggacgtgatctgcgtgagcggcgagcccttctacagcggcgagagaaccgtgaccatcagaagacagaccgtgggcggcttcggcctgagcatcaagggcggcgccgagcacaacatccccgtggtggtgagcaagatcagcaaggagcagagagccgagctgagcggcctgctgttcatcggcgacgccatcctgcagatcaacggcatcaacgtgagaaagtgcagacacgaggaggtggtgcaggtgctgagaaacgccggcgaggaggtgaccctgaccgtgagcttcctgaagagagcccccgccttcctgaagctgcccctgaacgaggactgcgcctgcgcccccagcgaccagagcagcggcaccagcagccccctgtgcgacagcggcctgcacctgaactaccaccccaacaacaccgacaccctgagctgcagcagctggcccaccagccccggcctgagatgggagaagagatggtgcgacctgagactgatccccctgctgcacagcagattcagccagtacgtgcccggcaccgacctgagcagacagaacgccttccaggtgatcgccgtggacggcgtgtgcaccggcatcatccagtgcctgagcgccgaggactgcgtggactggctgcaggccatcgccaccaacatcagcaacctgaccaagcacaacatcaagaagatcaacagaaacttccccgtgaaccagcagatcgtgtacatgggctggtgcgaggccagagagcaggaccccctgcaggacagagtgtacagccccaccttcctggccctgagaggcagctgcctgtacaagttcctggccccccccgtgaccacctgggactggaccagagccgagaagaccttcagcgtgtacgagatcatgtgcaagatcctgaaggacagcgacctgctggacagaagaaagcagtgcttcaccgtgcagagcgagagcggcgaggacctgtacttcagcgtggagctggagagcgacctggcccagtgggagagagccttccagaccgccaccttcctggaggtggagagaatccagtgcaagacctacgcctgcgtgctggagagccacctgatgggcctgaccatcgacttcagcaccggcttcatctgcttcgacgccgccaccaaggccgtgctgtggagatacaagttcagccagctgaagggcagcagcgacgacggcaagagcaagatcaagttcctgttccagaaccccgacaccaagcagatcgaggccaaggagctggagttcagcaacctgttcgccgtgctgcactgcatccacagcttcttcgccgccaaggtggcctgcctggaccccctgttcctgggcaaccaggccaccgccagcaccgccgccagcagcgccaccaccagcaaggccaagtacaccacctag

SEQ ID NO: 308819 - DNA, 1554 bp, Artificial Sequence
  derived and/or modified sequence
atggacttccggacagcttgcgaagagactaagaccggcatctgtctgctccaggatggaaaccaggagccattcaaggtgcgactgcatctcgctaaagacattctgatgattcaggaacaggatgtgatttgtgtgagtggggagccattctactccggcgagagaactgtgactataagacgacagactgtcggtggattcggcctgtcaataaaaggcggcgcggaacacaacattcctgtggtcgtttctaagatcagcaaggaacagagagcagagctgtccggtctgttgttcatcggagatgccattctgcaaataaatggtattaacgtgcgtaaatgtcggcacgaagaggtggttcaggtcttacggaacgccggcgaggaagtgaccctcaccgtctcttttttgaagagagccccagcttttctgaagcttcctttgaacgaagactgcgcctgtgcaccgtcggatcagagcagcgggacaagttcccctctatgcgactccggcctccacctgaattatcatccaaataacacagatacactctcatgctcgtcttggccaaccagccccggactcagatgggagaagagatggtgtgacctccgactaatccccctgctgcactctcgattttcccagtacgtccccggcacagacttgtcccgccagaacgcattccaggtgatagctgtggatggcgtgtgtacgggcatcattcaatgcctttctgctgaggactgtgtggattggctgcaggcaatcgcgacaaacatcagtaatctcacaaaacataacattaagaagatcaatagaaattttcccgtgaaccagcagatcgtttacatgggttggtgcgaagcaagggaacaggacccgcttcaagacagggtatacagccctacgttcctcgcactgagggggtcttgcctgtataagttccttgctcctccggtcacaacatgggactggacacgcgcggaaaagactttctccgtctacgaaatcatgtgtaagatcctaaaagacagcgatctcttagatcgcagaaagcaatgttttaccgttcaatctgagtcgggcgaagatctctactttagtgttgagctagagagcgacctggcacagtgggaacgcgccttccagactgctactttccttgaagttgaacggatccaatgcaaaacatacgcgtgtgtgctcgaatcccacctgatggggctcaccattgacttctctaccggattcatctgcttcgacgccgcgactaaggccgtcctgtggagatacaagttcagtcaactgaaaggctcgagtgatgacggcaaaagcaagatcaagttcctgttccagaaccctgatacaaagcaaatcgaagccaaggagctcgagtttagcaacctgtttgctgtcctgcactgtattcatagcttcttcgccgcgaaggtggcctgtctggatcccctattcctcgggaaccaagcaactgcatccacagccgcctcctcagctaccacctccaaggccaagtacactacatag

SEQ ID NO: 308820 - DNA, 1554 bp, Artificial Sequence
  derived and/or modified sequence
atggacttccggacagcgtgcgaagaaacaaagacaggaatctgccttctccaagacggcaatcaggagccatttaaggtcagactgcacctggctaaggatatcctgatgatccaagaacaggatgtcatctgcgttagcggagagcccttttacagcggagagaggaccgttactatcaggaggcagaccgttggcggattcggtctgtccattaaaggcggggccgagcacaatattcccgtagttgtatctaagatttccaaggagcaaagagcagagctcagtgggttgctgtttattggcgacgccattctccagatcaatgggattaacgttcgcaagtgtaggcacgaagaagttgttcaagttctccgaaatgccggagaggaggttacactgactgtgtccttcctcaagagggcacccgctttcctgaagctgcccttaaatgaagattgcgcgtgcgccccatcagatcagagcagcggaacgagctcccctttgtgcgactctggcctacatttaaactatcaccccaataataccgacaccctctcttgttcatcatggcctacttcaccgggcctaagatgggaaaaaaggtggtgtgatttgcgccttataccactgttacatagcaggtttagccaatatgtcccaggaaccgatctgtccagacaaaacgcgtttcaagtgatcgctgtggacggggtctgtacaggcattattcaatgtctgagcgccgaagactgcgtggattggcttcaggccatagctaccaacatcagcaacctcactaagcacaacattaagaagattaatagaaattttcctgtgaatcagcagatcgtatatatgggttggtgtgaggccagggaacaagatccactccaggacagagtttacagtcctacattcctagctctccgggggtcatgcctttacaaatttttggcgccgcccgtgaccacctgggactggacccgtgccgagaagacattctcggtgtatgaaattatgtgcaagattctgaaggacagtgatctgcttgaccggcgcaaacagtgttttacggtgcagtccgagtcgggggaggacttgtatttctctgtcgagctggagtccgacctagcgcagtgggagagggccttccagaccgctacctttcttgaggtcgagcgtatccaatgtaaaacatacgcgtgcgtcctggagtcccatctgatggggctgaccatcgatttttctacgggcttcatctgctttgacgccgcaacaaaggcagtcctgtggcgttataagttttcccagctgaagggcagcagtgatgatggcaagagcaagatcaagtttttgttccagaacccagacacgaagcaaattgaggccaaagagctcgagtttagcaacctctttgccgtactgcattgcattcactccttttttgctgccaaggttgcgtgcctggaccccctctttttaggaaatcaggctactgcctcaaccgcggccagcagcgctactacatcaaaagccaagtacaccacatag

SEQ ID NO: 308821 - DNA, 1554 bp, Artificial Sequence
  derived and/or modified sequence
atggacttcagaacagcctgtgaggagaccaagacaggcatctgcctgctgcaggacggcaaccaggagcccttcaaggtgcggctgcacctggccaaggacatcctgatgatccaggagcaggacgtcatctgtgtgtctggagagcccttctacagcggggagaggacagtgaccatccggcggcagacagtgggcggcttcggcctgagcatcaagggcggcgctgagcacaacatccctgtggtggtgtccaagatcagcaaggagcagagagctgagctgagcggcctgctcttcatcggagatgccatcctgcagatcaatggcatcaacgtgaggaaatgtagacatgaggaggtggtgcaggtgctgagaaatgctggggaggaggtgaccctgactgtgtccttcctgaagagggccccagccttcctgaagctgcccctgaatgaagactgtgcctgtgcccccagcgaccagagcagcggcaccagcagccccctgtgtgacagcggcctgcacctgaactaccaccccaacaacacagacaccctgagctgcagctcctggcccaccagccctggcctgcgctgggagaagcgctggtgtgacctgcggctcatccccctgctgcacagccgcttcagccagtatgtgcctggaacagacctgagccggcagaatgccttccaggtgattgctgtggatggagtgtgcaccggcatcatccagtgcctgtctgctgaggactgtgtggactggctgcaggccatcgccaccaacatcagcaacctgaccaagcacaacatcaagaagatcaacagaaacttccctgtgaaccagcagatcgtgtacatgggctggtgtgaggcccgggagcaggaccccctgcaggacagagtgtacagccccaccttcctggccctgcggggcagctgcctgtacaagttcctggcccctcctgtgaccacctgggactggaccagggctgagaagaccttctctgtgtatgagatcatgtgcaagatcctgaaggacagcgacctgctggacaggaggaagcagtgcttcaccgtgcagagcgagagcggggaggacctgtacttctctgtggagctggagagtgacctggcccagtgggagcgggccttccagacagccaccttcctggaggtggagcgcatccagtgcaagacctacgcctgtgtgctggagagccacctgatgggcctgaccatcgacttcagcacaggcttcatctgctttgatgctgccaccaaggctgtgctgtggagatacaagttcagccagctgaagggcagcagtgatgatggcaagagcaagatcaagttcctgttccagaacccagacaccaagcagatcgaggccaaggagctggagttcagcaacctgtttgctgtgctgcactgcatccacagcttctttgctgccaaggtggcctgcctggaccccctcttcctgggcaaccaggccacagccagcacagctgccagcagcgccaccaccagcaaggccaagtacaccacctag

SEQ ID NO: 308822 - DNA, 1554 bp, Artificial Sequence
  derived and/or modified sequence
atggacttccggaccgcctgcgaggagaccaagaccggcatctgcctcctgcaggacggtaatcaggagccatttaaggtgcggctgcacctagccaaagacatcctgatgatacaggagcaagacgtgatctgcgtgagtggcgagcccttttacagtggtgagcgcacggtcaccatcaggcgacagacagtcggaggctttggtttgtcgattaaagggggggccgaacacaatattcccgtggtggtttcaaaaatcagcaaagaacagagagccgagctatcgggcttactgttcatcggcgacgctatactgcagattaacggcataaatgtgcgcaagtgtcgacatgaggaagtggtgcaggtgctcagaaatgccggtgaggaggtaaccctgaccgttagctttctgaaacgcgcccctgcattcctgaagctgccccttaacgaggactgcgcttgcgcccccagcgaccaatccagtgggacatctagcccgctatgcgattccggtctccacctgaactatcatcctaataatactgatacgctgagttgctctagctggcccactagtcccggactgcgttgggaaaaaaggtggtgcgatctccgcttaattcctcttctgcacagtcggttttcacagtacgtgcctggaactgacctgagcaggcagaatgccttccaagttatcgctgttgacggggtgtgcacaggcataatccagtgcttgagcgccgaggattgcgtggactggcttcaggctatagccacgaacatctcaaacctgaccaagcataacattaagaagatcaaccgcaacttccccgtcaaccagcagattgtgtatatgggatggtgcgaggccagagagcaggaccctctgcaagatcgtgtatactcccccactttcttggcattacgagggtcatgtctctataagtttttggctccacctgtgacgacatgggattggactagggccgaaaaaacgttctctgtgtacgagatcatgtgcaagatactgaaagactccgatctgctcgaccggcgtaagcaatgttttaccgtccagtccgaaagtggagaagacctgtacttctctgtggaacttgagtcagatctggcacagtgggaacgggcattccagacagcaacatttctcgaggtcgagaggatacaatgtaaaacttacgcgtgcgttttagaaagtcacttaatgggacttacgattgatttttcgacagggtttatctgttttgacgctgcgaccaaagccgtgctgtggaggtataagttctcccagctgaagggatcctccgacgatggcaaaagcaagattaagtttctgtttcagaaccctgatacgaagcagatcgaggcaaaagagctggaattcagcaatctcttcgctgtcctgcattgcattcacagcttctttgccgccaaagtggcatgcctagacccactgtttctgggcaatcaggctacggccagtacagccgctagcagcgctaccacctccaaggccaagtataccacctag

SEQ ID NO: 308823 - DNA, 1554 bp, Artificial Sequence
  derived and/or modified sequence
atggacttccggaccgcctgcgaggagaccaagaccggcatctgcttactgcaagacggtaatcaagaaccgttcaaggtccggttgcacctggcaaaggatatactaatgattcaagagcaagatgtcatttgcgtctcaggtgaacccttttatagtggagagagaacagtaactatccgtcggcagaccgtcggaggctttggtctatcgattaaggggggcgctgaacacaacatccccgtggtggtcagcaaaatctcgaaggaacaacgggctgagctttctgggcttctgttcatcggcgatgccatcctgcagattaacggcattaacgtgagaaaatgccggcacgaagaggttgtccaggtgctccgaaacgctggtgaagaagtaaccttaactgtctcatttcttaagcgggctcccgcttttctgaagctaccattaaacgaagattgtgcctgcgccccttccgaccagtcttccggcacaagtagccctctgtgtgatagcgggctacacctgaattaccatcccaataacactgatacgctcagctgctcaagctggcctacttctcccggcctgcggtgggagaagagatggtgcgatctcagactaattccactgctgcacagtagattttcacagtacgtgcctggaaccgatctgagtagacaaaacgctttccaggtgattgccgttgatggcgtctgcacagggataatccagtgtctcagcgccgaggactgcgtggactggctgcaggccattgcaacaaatatctctaatttgactaaacataacattaagaaaattaataggaactttccagtgaaccagcagatcgtatatatggggtggtgcgaagccagggaacaggaccctttacaggatcgagtgtacagccctacctttctagccctccgcgggagctgtctgtacaaatttctggcaccgccggtgacaacctgggattggacccgggccgagaaaaccttctcagtctacgaaatcatgtgcaaaattctgaaagatagtgaccttttagacaggagaaaacagtgctttactgtgcagagtgaaagtggagaggatctctatttcagcgtggaactcgaaagcgacctcgctcaatgggaaagagctttccaaactgcaacctttctcgaggtggagcgtattcagtgcaaaacatatgcctgcgtgcttgaatcacacctgatgggactcacaattgatttcagcactgggttcatatgtttcgacgctgccactaaagccgtgctgtggaggtataagttctcacagctgaagggtagctctgatgatgggaaatcaaagatcaaattcctgttccagaacccagatacaaaacagatcgaggctaaagaactggagttttctaatctttttgccgtcttacactgcatacatagcttctttgctgcaaaggtggcctgcctggatcctctgtttctcggtaatcaggctactgccagcaccgctgcttctagtgccacgacatcaaaggccaaatataccacctag

SEQ ID NO: 308824 - DNA, 1554 bp, Artificial Sequence
  derived and/or modified sequence
atggattttagaacagcttgtgaggagacaaagactggcatatgtttgctgcaggacgggaaccaagagcctttcaaagttaggctccacttggccaaggatatcttgatgatacaggagcaggacgtgatttgtgtgtcaggtgagccgttttatagtggagagcgcacagtgacaattcgacggcagaccgttggtggctttgggttgtcaatcaaaggcggagcggagcataacatacctgtagtagtctctaaaatctccaaggagcaaagagctgaactttcgggcctactctttattggcgacgccattctgcagatcaatggcatcaacgtgaggaagtgccgacacgaagaagtcgtacaagtcctacgaaacgcaggagaggaagtgaccctgacggtctctttcttaaaacgcgctcctgctttcctcaagctaccactaaacgaagattgcgcatgtgctcccagcgaccagtcttctgggacatcatctcccttgtgcgatagtggtttgcacctgaattaccatccaaacaatacggacacactctcgtgctctagctggcccacatcacctggcctgcgatgggaaaaacggtggtgtgacttgcggctaatccccctgctacattcacgattcagccagtatgtccccggtactgacttgagtcgccagaacgcctttcaggtcatcgcggttgacggcgtgtgcacaggcatcattcagtgtctctcggcagaagactgcgtcgactggctgcaagctatcgccacaaacatcagtaatctgaccaaacacaatattaagaagattaatagaaactttccagtgaaccagcagatagtgtatatggggtggtgtgaggccagggaacaggaccccctccaagaccgggtgtactctccaacattcttggctctgcgcggttcctgcctctacaagtttctcgcgccacccgtgaccacctgggactggactagagccgagaaaacctttagtgtatacgaaattatgtgtaagatactgaaagactctgacctgttggataggaggaagcaatgtttcactgtacagtcggaaagcggggaagacctctatttctccgtcgaattggagtctgacctggcccagtgggagcgtgccttccagaccgcgaccttcctggaagttgagagaattcagtgtaagacctacgcttgtgtcctggaaagccacctgatgggcctcaccatcgatttttctacaggcttcatctgcttcgacgcagccacaaaagctgtgctttggcgatataagttctcccaacttaagggctcaagcgatgatgggaaatcaaaaatcaagttccttttccagaatcccgataccaagcaaattgaagccaaagaactagaattttccaacctcttcgcagtgttgcactgcattcacagctttttcgccgcaaaagtggcctgcctggacccactcttcctgggcaaccaggcaacggcgagcaccgcagcaagctcagccacgacatccaaggccaagtacacgacttag

SEQ ID NO: 308825 - DNA, 1554 bp, Artificial Sequence
  derived and/or modified sequence
atggactttcggaccgcctgcgaagagactaaaacaggaatctgtctcctgcaggacggaaatcaagaaccattcaaagtcagactgcacttggccaaggatatcttaatgatccaggagcaggacgtgatctgtgtgtcaggggagcccttctactccggtgaacgaacagtgactattagacggcaaaccgtgggtggcttcggcctgtcgattaaggggggagccgagcacaacatacccgtcgtggtgagcaagattagtaaggagcaacgggcagagctgagcggtttactttttataggagatgccatcctgcagatcaacggcataaacgtacggaaatgccgccacgaggaagtcgtccaggtcctgcgtaatgctggggaagaggttactttaacagtgagcttcctgaaaagagcgccagcctttctgaaactgccactgaatgaggactgcgcgtgtgcaccttccgatcagagttcgggcactagttccccgctctgtgattcaggcctgcacttgaattaccaccccaacaatactgatacactgagctgttcaagctggccaacatcgcccggtctgagatgggagaagagatggtgcgatctcaggctgatcccattgctgcactcgagattctctcaatatgtgccaggtaccgacttaagtagacagaatgccttccaggtgatcgccgtcgacggtgtttgtaccggcattattcagtgtctgtcagctgaagattgcgttgattggctgcaggccatagcaacaaatataagtaatctcaccaagcacaatatcaagaaaattaaccgcaatttccccgtgaaccaacagatcgtgtatatgggctggtgcgaggcaagggagcaagatccactgcaggaccgagtgtactcccccacattccttgccctgcgcggatcttgtttgtacaagttcttggcccctcctgtgacgacatgggattggacaagggcggagaagacatttagcgtttatgagatcatgtgtaagattctcaaagattccgatttgctggataggagaaagcagtgtttcaccgttcagtccgagagcggcgaggacctgtacttcagcgtagaactggaaagcgaccttgctcagtgggagcgagcattccagacagccacttttcttgaggtggagcgaattcagtgtaagacttatgcgtgcgtgcttgaatctcaccttatgggtttaactattgacttctccacaggtttcatttgctttgacgccgctactaaggcagtgctgtggagatacaagttttcccagcttaaagggtcttccgatgacggaaagtccaaaataaaatttctctttcagaatcccgatacaaagcagattgaagcaaaggagctcgagttttccaatttgttcgctgtgctgcactgcattcacagctttttcgccgcaaaggtggcatgtctggatcccctttttctcggaaatcaggcaaccgcaagcactgccgcttcaagcgcaactaccagcaaagcaaagtataccacatag

SEQ ID NO: 308826 - DNA, 1925 bp, Artificial Sequence
  derived and/or modified sequence
cccttccagccggagctcgcgagccgcggtggcggctggtggccaccccagggaaataaagccgttgctgctgcagcaaaatggctcaaagtccaaccaaagtctggccttttcctgagcctaggctgtgggcgactcgctagcactgccctgggcctccaagctgcctgctcgctgagctcagcgctgacactcacaggagctgcgttcgccggatcctctgagaggctctgcaacgatcccgatccaattcagcagcgttttaaaagactgctctccagaatgttgagattgcccgagaagtgaccccagcaaaagaaaaatattgctgtacctaaattcaaacgacatcctttgtggtgccacagcacatggatttcagaaccgcctgtgaggagacaaagacaggaatttgtttgctgcaggatggtaaccaggagcctttcaaagtgcggctgcacctagccaaagacattttgatgatccaggaacaggatgtgatatgtgtgtctggtgagcctttctattctggtgaaagaacggtgaccatcagaagacaaacagtaggaggatttggattaagcataaagggaggagcagaacataacattccagttgtcgtttcaaaaatctccaaggaacaaagagcggaactttcaggactactttttattggagatgcaattctacagataaatggcattaatgtgagaaaatgtagacatgaagaagtggttcaggttcttcggaatgctggagaagaagtgactctaacagtgtcatttttaaaaagagcacctgctttcctcaaactcccattgaatgaagattgtgcatgtgctccaagtgaccagagcagtggcacctcctctcctctctgtgacagtggcttacatctcaactaccatcccaacaatacagacacattatcatgctcgtcgtggccgacgtctccaggcttgaggtgggagaagcgatggtgcgacctcagactgatccctctacttcattcgcgcttctctcagtatgtgcccggcacagatttgagtcggcagaatgcctttcaagtcattgctgtggatggggtctgcactgggattattcagtgcctctctgctgaagactgcgttgactggctacaagcaatagcaactaacatttcaaatctcacaaagcacaatattaaaaaaatcaacagaaactttcctgtaaaccagcagattgtctacatgggctggtgtgaagcccgggagcaagaccccctccaggacagagtgtactccccgaccttcctggccctgaggggctcatgtctctacaagtttctggcacctccagtgaccacctgggactggacgagagcagagaaaacattctcagtttatgagattatgtgcaagatcctcaaggacagtgacctgctggaccgacggaaacagtgcttcaccgtgcagtctgagtctggggaggacctgtacttctcagtggagctggaaagtgacctcgcccagtgggaaagagccttccagacagcaacctttctagaagtagaacggatacagtgcaagacctatgcatgtgtgctagaaagtcatctaatgggactcacaattgatttcagcacaggatttatctgctttgatgctgcaacaaaggctgtcctttggaggtataaattctctcagcttaaaggttcttcagatgatggcaagagcaaaatcaaatttttgtttcagaatccagatactaaacagattgaagcaaaggagttggaattttctaatttatttgctgttcttcactgcattcattccttctttgctgccaaggtagcttgtttggaccctctatttttaggcaatcaagctactgcttctactgctgccagctctgctaccacgagcaaagcaaagtatacaacttga

SEQ ID NO: 308827 - DNA, 3504 bp, Artificial Sequence
  derived and/or modified sequence
ttaggggctcccgtccccttacttcagcaccagaggggatggacagcgtctccggactgagctgcagccacagggacggaactacgctgccgccgccgctgtccttgccgccactgtcgtcgccacgggcagctgggctacttgctcctcgcagctaaaaggcggtgcctcctattaccccctcgcctcccggcccccttccttaatggatgaaaagtacccctccctctacacctgctgtacctaaggacaggactctgaggagtactcttgctccacagattaaactctcagcagcaacttcaagaatcatttttctataggggtctgggaggaattctggaggagagtaaagtcgaagttcttagaagctctgagaaatcatgggccgtgcggtaggggttgaaatgctcaaaggtccacacttcttgaaataaacagaatggtcttgagtggattgcaactgttttggaaatagctttgtgaaaagagggtggagagctactcaaaattctacgttagagagactgaaaagacatctaatttcattgctcggcagactgctctccagaatgttgagattgcccgagaagtgaccccagcaaaagaaaaatattgctgtacctaaattcaaacgacatcctttgtggtgccacagcacatggatttcagaaccgcctgtgaggagacaaagacaggaatttgtttgctgcaggatggtaaccaggagcctttcaaagtgcggctgcacctagccaaagacattttgatgatccaggaacaggatgtgatatgtgtgtctggtgagcctttctattctggtgaaagaacggtgaccatcagaagacaaacagtaggaggatttggattaagcataaagggaggagcagaacataacattccagttgtcgtttcaaaaatctccaaggaacaaagagcggaactttcaggactactttttattggagatgcaattctacagataaatggcattaatgtgagaaaatgtagacatgaagaagtggttcaggttcttcggaatgctggagaagaagtgactctaacagtgtcatttttaaaaagagcacctgctttcctcaaactcccattgaatgaagattgtgcatgtgctccaagtgaccagagcagtggcacctcctctcctctctgtgacagtggcttacatctcaactaccatcccaacaatacagacacattatcatgctcgtcgtggccgacgtctccaggcttgaggtgggagaagcgatggtgcgacctcagactgatccctctacttcattcgcgcttctctcagtatgtgcccggcacagatttgagtcggcagaatgcctttcaagtcattgctgtggatggggtctgcactgggattattcagtgcctctctgctgaagactgcgttgactggctacaagcaatagcaactaacatttcaaatctcacaaagcacaatattaaaaaaatcaacagaaactttcctgtaaaccagcagattgtctacatgggctggtgtgaagcccgggagcaagaccccctccaggacagagtgtactccccgaccttcctggccctgaggggctcatgtctctacaagtttctggcacctccagtgaccacctgggactggacgagagcagagaaaacattctcagtttatgagattatgtgcaagatcctcaaggacagtgacctgctggaccgacggaaacagtgcttcaccgtgcagtctgagtctggggaggacctgtacttctcagtggagctggaaagtgacctcgcccagtgggaaagagccttccagacagcaacctttctagaagtagaacggatacagtgcaagacctatgcatgtgtgctagaaagtcatctaatgggactcacaattgatttcagcacaggatttatctgctttgatgctgcaacaaaggctgtcctttggaggtataaattctctcagcttaaaggttcttcagatgatggcaagagcaaaatcaaatttttgtttcagaatccagatactaaacagattgaagcaaaggagttggaattttctaatttatttgctgttcttcactgcattcattccttctttgctgccaaggtagcttgtttggaccctctatttttaggcaatcaagctactgcttctactgctgccagctctgctaccacgagcaaagcaaagtatacaacttgacatactgaactcttcattgacacaccccatgactgtataagcaggacacatttactcatcattttagaccctagagaaaccataacatcaccaagtcgacagtggaggcaaatcaaaatttcggcagaaaaagaaggtcatgtggaacctcaaaaacacttctattctggatgacatctgtgaaatatactacatgaacagaacagcttgttctcactcagttgctttgtaccagtaagtgtattgctttcaccaaaagtggagacaaaagaataaattatttgaagaagtatgtaaataacataaaaatagtaagctacctatgaataaaaatacttattaaatgattacttctgtattttagattattttgtatgactagtacatgttgggcagagtcataggaaaacaaatgccctatcttgtattatgagggacataaaagagttaaaaaccataaatcagcaaggagcatgcaaaaaaatctcatcaaagaaggatgcactttaatttgctgatgtaaatttgcccttgtgttctcatcccatgatttgacactggcattccaattgtttttatcttattgtaaatattccgaagaacttccaaaggataattacattgacccatgatagatacaatgtgaaatggactattctcccttggatcactgttattgaaatgtcttattagctgccaaagtcaatcaaatatgccaacagtgtattaatttaattatgagtgatggaaaatttcatgaacctctcatttcttccttggtttgaaagagatttgtattttacctaataagatttattatcaaattaaagtttcataaattttcagtgaacccaaaaccttttgtagagaaaataatataaacaaatatggtgtgagaaacaattctttgtaatccgaagtctactagttaatcatgaactaaaatgtcccccgaaaacagtcccaaagctattatagatgttaattaaatgacattttttcattttagtactattttatgagaaacaaaggtgatatttaaagataaaagttaaaattctttaacctcccttgtcatggaaagtgattaagtaatgccaactatgcaggttgttttaggtattttgtcctaagaatgtaaatgtgaaaggctgggaaatttgaaagccttagaggtgtgcaatttactcagattccaggtattattcaactagttgtataacatggaacacagtctctgtccttcagtacagcttttttgagatattttaaaaagtcagctgtgtatg

SEQ ID NO: 308828 - DNA, 279 bp, Artificial Sequence
  derived and/or modified sequence
atggacttcagaaccgcctgcgaggagaccaagaccggcatctgcctgctgcaggacggcaaccaggagcccttcaaggtgagactgcacctggccaaggacatcctgatgatccaggagcaggacgtgatctgcgtgagcggcgagcccttctacagcggcgagagaaccgtgaccatcagaagacagaccgtgggcggcttcggcctgagcatcaagggcggcgccgagcacaacatccccgtggtggtgagcaagatcagcaaggagcagagatag

SEQ ID NO: 308829 - DNA, 279 bp, Artificial Sequence
  derived and/or modified sequence
atggactttagaactgcctgcgaggagacaaaaactggcatctgcttactgcaagacggaaatcaggaaccatttaaggtcaggctgcacctagcaaaggatattctgatgattcaagaacaggatgtgatctgtgtctccggcgaacctttttatagcggagagcgtacggtgactatccgacgccagacagtcggaggatttggactgtccattaaggggggcgctgaacataacatccctgttgtggtctccaagatcagcaaggagcagcgctag

SEQ ID NO: 308830 - DNA, 279 bp, Artificial Sequence
  derived and/or modified sequence
atggacttcagaacagcctgtgaggagaccaagacaggcatctgcctgctgcaggacggcaaccaggagcccttcaaggtgcggctgcacctggccaaggacatcctgatgatccaggagcaggacgtcatctgtgtgtctggagagcccttctacagcggggagaggacagtgaccatccggcggcagacagtgggcggcttcggcctgagcatcaagggcggcgctgagcacaacatccctgtggtggtgtccaagatcagcaaggagcagaggtag

SEQ ID NO: 308831 - DNA, 279 bp, Artificial Sequence
  derived and/or modified sequence
atggacttccggaccgcctgcgaggagaccaagaccggcatctgcctgttgcaggacggaaaccaggaaccattcaaggtgagactgcaccttgccaaagacatcctgatgattcaggagcaggatgtgatttgcgtgtctggtgagcctttctactctggagaaaggaccgtgactattagaaggcagactgtgggcggattcggcctgagtatcaagggtggtgcagagcacaatatacccgttgtggtctccaaaatcagtaaagagcaaaggtag

SEQ ID NO: 308832 - DNA, 279 bp, Artificial Sequence
  derived and/or modified sequence
atggattttcggacagcttgcgaggagacaaaaaccggcatttgcctgctgcaggatggcaatcaggagccatttaaggtcaggctgcacctggccaaggatatcttaatgattcaggaacaggatgtgatctgcgtaagcggagaacccttctactcaggagaacgaaccgtgacgattaggcggcagacagtaggtggctttgggctgtctattaaaggtggggcagagcacaacatccccgtggtcgtcagtaagatctccaaggaacagaggtag

SEQ ID NO: 308833 - DNA, 548 bp, Artificial Sequence
  derived and/or modified sequence
aaatagctttgtgaaaagagggtggagagctactcaaaattctacgttagagagactgaaaagacatctaatttcattgctcggcagtgaacactggacacgttggtgggagttgttctgtgctgagagcatagcaatgaatacagagacagcagacctgccttcacagactgctctccagaatgttgagattgcccgagaagtgaccccagcaaaagaaaaatattgctgtacctaaattcaaacgacatcctttgtggtgccacagcacatggatttcagaaccgcctgtgaggagacaaagacaggaatttgtttgctgcaggatggtaaccaggagcctttcaaagtgcggctgcacctagccaaagacattttgatgatccaggaacaggatgtgatatgtgtgtctggtgagcctttctattctggtgaaagaacggtgaccatcagaagacaaacagtaggaggatttggattaagcataaagggaggagcagaacataacattccagttgtcgtttcaaaaatctccaaggaacaaagag

SEQ ID NO: 308834 - DNA, 102 bp, Artificial Sequence
  derived and/or modified sequence
atggccgatcctggaatgatgtccttgttcggagaggacgggaatatcttctcggagggactggagggcttgggagaatgtgggtacccggagaacccatag

SEQ ID NO: 308835 - DNA, 102 bp, Artificial Sequence
  derived and/or modified sequence
atggctgaccccggcatgatgagcctgtttggagaagatggcaacatcttcagcgagggcctggagggcctgggggagtgtggctacccagagaacccctag

SEQ ID NO: 308836 - DNA, 102 bp, Artificial Sequence
  derived and/or modified sequence
atggccgaccccggcatgatgagcctgttcggcgaggacggcaacatattcagcgagggcttggagggtctcggggagtgtgggtaccccgagaatccatag

SEQ ID NO: 308837 - DNA, 102 bp, Artificial Sequence
  derived and/or modified sequence
atggctgatcccggtatgatgagtctgttcggtgaggatggaaatattttctcggagggccttgaggggttgggggaatgcggctaccctgaaaatccctag

SEQ ID NO: 308838 - DNA, 102 bp, Artificial Sequence
  derived and/or modified sequence
atggccgaccccggcatgatgagcctgttcggcgaggacggcaacatcttcagcgagggcctggagggcctgggcgagtgcggctaccccgagaacccctag

SEQ ID NO: 308839 - protein, 33 aa, Artificial Sequence
  derived and/or modified sequence
MADPGMMSLFGEDGNIFSEGLEGLGECGYPENP

SEQ ID NO: 308840 - protein, 432 aa, Artificial Sequence
  derived and/or modified sequence
MGPAGSLLGSGQMQITLWGSLAAVAIFFVITFLIFLCSSCDREKKPRQHSGDHENLMNVPSDKEMFSRSVTSLATDAPASSEQNGALTNGDILSEDSTLTCMQHYEEVQTSASDLLDSQDSTGKPKCHQSRELPRIPPESAVDTMLTARSVDGDQGLGMEGPYEVLKDSSSQENMVEDCLYETVKEIKEVAAAAHLEKGHSGKAKSTSASKELPGPQTEGKAEFAEYASVDRNKKCRQSVNVESILGNSCDPEEEAPPPVPVKLLDENENLQEKEGGEAEESATDTTSETNKRFSSLSYKSREEDPTLTEEEISAMYSSVNKPGQLVNKSGQSLTVPESTYTSIQGDPQRSPSSCNDLYATVKDFEKTPNSTLPPAGRPSEEPEPDYEAIQTLNREEEKATLGTNGHHGLVPKENDYESISDLQQGRDITRL

SEQ ID NO: 308841 - DNA, 4387 bp, Artificial Sequence
  derived and/or modified sequence
attctccgcggcgcggcggcgagtgctggctgcggtaccctcccgctcgcttgtccgtctgcgcgcccgcgatgtgaccagccgactgggggcgggctggcggctctgcctgcggcagcgcatcggtttttctcctggcaggtccctaattgagccgtgattcccttggagccagagacacccaccaggggctcggagcgccgcgctccggggctggaggcagctgcagcgctcgggtccgcgcggccgggtgcagtagcctcagtcccagccgccgcctcgctgagtcgtgtgccctggcgaatgcccggcgcccggcacagctgagccaaggcgactggtgcagagcggcggcgcctggtcctgcacttgccgctgctgccgggctgtgccggggcggcggcgctgcgcgccggagtttgcagaggctgcctccgagcgccgtccgccaggaagactccctgcctcctgagtcccaaaaacacgagatttttctcctatttcagcagttggccacaacttcattgctgggaaaaggccaagaaagaagagagaactctcaccacaacatttcaaagggaatacattgccagaacttggaatactctactggacaaacatttcctccaaggacacagctctctgcctccatgtcaccacctttgaaggactgactgattccctcggctggtgccagtgcctgctcctgccatggggcccgcggggagcctgctgggcagcggacagatgcagatcaccctgtggggaagtctggctgctgtcgccattttcttcgtcatcaccttcctcatcttcctgtgctctagttgtgacagggaaaagaagccgcgacagcatagtggggaccatgagaacctgatgaacgtgccttcagacaaggagatgttcagccgttcagttactagcctggcaacagatgctcctgccagcagtgagcagaatggggcactcaccaatggggacattctttcagaggacagtactctgacctgcatgcagcattacgaggaagtccagacatcggcctcggatctgctggattcccaggacagcacagggaaaccaaaatgtcatcagagtcgggagctgcccagaatccctcccgagagcgcagtggataccatgctcacggcgagaagtgtggacggggaccaggggctggggatggaagggccctatgaagtgctcaaggacagctcctcccaagaaaacatggtggaggactgcttgtatgaaactgtgaaagagatcaaggaggtggctgcagctgcacacctggagaaaggccacagtggcaaggcaaaatctacttctgcctcgaaagagctcccagggccccagactgaaggcaaagctgagtttgctgaatatgcctcggtggacagaaacaaaaaatgtcgtcaaagtgttaatgtagagagtatccttggaaattcatgtgatccagaagaggaggccccaccacctgtccctgttaagcttctggacgagaatgaaaaccttcaggagaaggaagggggagaggcggaagagagtgccacagacacgaccagtgaaactaacaagagatttagctcattgtcatacaagtctcgggaagaagaccccactctcacagaagaagagatctcagctatgtactcatcagtaaataaacctggacagttagtgaataaatcggggcagtcgcttacagttccggagtccacctacacctccattcaaggggacccacagaggtcaccctcctcctgtaatgatctctatgctactgttaaagacttcgaaaaaactccaaacagcacacttccaccagcagggaggcccagcgaggagccagagcctgattatgaagcgatacagactctcaacagagaggaagaaaaggccaccctggggaccaatggccaccacggtctcgtcccaaaggagaacgactacgagagcataagtgacttgcagcaaggcagagatattaccaggctctagcaacccagaagacaaccctgggtagcctgtgatcagtgtctggagacgtttcttctgtggaagagaagaagtgacacaaacctatacttcatatgctgctttagtcacctgaagatggttggagaggccctgtcgactgttctcccagttgttcagtttctgagacagagaggtacggactaggctgcacctgagtgtgcccctgcctgccagatggacaggtacacccaagcacatctccctgctgcaccctcaccacccacaaaagatcccagctgtcagtggtctcatctcattagtgaggaaagccaagctgtatggaaaagctgcactcaccaaggaccacaatgcccccggcctaaagtactgccattcagaaaagcaggtttttcttcctctctttccttttctctgtctgctactgactttaaggctttttcccccttgaaatgtccagattcctgtggttcatcccaaggaaattttcacacaaagcttggcctttgccctcaatataggtgttttaggatggtgacaaaccatggctgctgctttctgcccagctcgccagtcctccccaaagagttgcgcatcagcacctggggatctggaccctgcgggtgaagggatggggagggacgtccctggagtctcttctgtctttgttccttcttattttggcattcgatatcagcagcctctccccaaagtacttgaagtcagttttagatgctttattttatttttctagtcaaaaacgtgtttcccccagtgtttgaaaactcgtccgaatcttttcagtattttccatgagtattgtggtacttctagacttgtttaagcccagaactcattccttcaaaacagagagccttaatctttatgttgggacacagaccacatatttggacggcagccatgcatccatcgctgaagggctgtggacatgaatgtgtatttcccatggtctccgctgcccacaccaacagtgtggcatctcataagttaactgctaccctaaggtaatctaagattaaaatgtaaacatttatttttgttatgtaagtttataagatgttttatgttcaatgcctaatttctcaaaagtgccagaaaaaaatgtatattagctattttgattttatgtacaatgatttatactctccttttgaaaagataccataaagcacataagctagatcactacaaggagctgttatcttttttctaatcaagtgtttaaaacactgatggtttttaaagactcacctttttaaatggtacttggagctcctgattcaaattacctagaccccctagagaaataaatggaatatacataaataatcattttcagtggtttatggtgggcaatattgcaatatttgaaatggtaaaaatggaaagaagaacaaaatatgatgagaggtggctgtgaattataaacctcataaaagtgtcataattccattaaggtttaattatattttttcagaaaacagtgatgaattctgtagtccagtgcttgccaatgcaaattgcctattggaatcttcttcctatattttacaaacatcagtggctgaaatagctcagagtaagagctcagcctggtttgaatttaatcatctctttagatcttataaggccagcattaggaaacttgttcacttttcattttcaaaggagcctagttgaagtgctattatgagtgtgggctatggaaagacagcttttcctacactgataaagaaaaaaaatgaggaaattatttcatccccttgtgacatctgtgactttttggatttaataatcttgctgtttttcctctttatgacaaagaatataattgggaggatgaagtgtcttaaaaattgtagagaccagctcactggaatgtttttccatccctgtattcatggcttgactttgtgactgctctacactgcatgtctgacattgcagagtgagctatgttgaggtaaactggttggttgtcattattttgcaatcagcctggtctctcccatgaagatgtcgtgtgcataagcacaatcatcactgattagaagatcacagcagaatacccttggattagagagaagttcgtaccttgcatttctctgaattctagtctctcataagcactgctttgctggatgattttcactgctttgtgttaatgactttgagcgatctctcacatgatggggttctttagtacatggtaacagccatgtcatcttacacacctagcattgtgaatgctgtagtgacatcctttataggcaccttacagctcaaaacttttgtttcatttcatgccttacttatcaaaaaggcaggaaagtaggtatgatctctaaagtaaaaaaaa

SEQ ID NO: 308842 - DNA, 1299 bp, Artificial Sequence
  derived and/or modified sequence
atgggccccgccggcagcctgctgggcagcggccagatgcagatcaccctgtggggcagcctggccgccgtggccatcttcttcgtgatcaccttcctgatcttcctgtgcagcagctgcgacagagagaagaagcccagacagcacagcggcgaccacgagaacctgatgaacgtgcccagcgacaaggagatgttcagcagaagcgtgaccagcctggccaccgacgcccccgccagcagcgagcagaacggcgccctgaccaacggcgacatcctgagcgaggacagcaccctgacctgcatgcagcactacgaggaggtgcagaccagcgccagcgacctgctggacagccaggacagcaccggcaagcccaagtgccaccagagcagagagctgcccagaatcccccccgagagcgccgtggacaccatgctgaccgccagaagcgtggacggcgaccagggcctgggcatggagggcccctacgaggtgctgaaggacagcagcagccaggagaacatggtggaggactgcctgtacgagaccgtgaaggagatcaaggaggtggccgccgccgcccacctggagaagggccacagcggcaaggccaagagcaccagcgccagcaaggagctgcccggcccccagaccgagggcaaggccgagttcgccgagtacgccagcgtggacagaaacaagaagtgcagacagagcgtgaacgtggagagcatcctgggcaacagctgcgaccccgaggaggaggcccccccccccgtgcccgtgaagctgctggacgagaacgagaacctgcaggagaaggagggcggcgaggccgaggagagcgccaccgacaccaccagcgagaccaacaagagattcagcagcctgagctacaagagcagagaggaggaccccaccctgaccgaggaggagatcagcgccatgtacagcagcgtgaacaagcccggccagctggtgaacaagagcggccagagcctgaccgtgcccgagagcacctacaccagcatccagggcgacccccagagaagccccagcagctgcaacgacctgtacgccaccgtgaaggacttcgagaagacccccaacagcaccctgccccccgccggcagacccagcgaggagcccgagcccgactacgaggccatccagaccctgaacagagaggaggagaaggccaccctgggcaccaacggccaccacggcctggtgcccaaggagaacgactacgagagcatcagcgacctgcagcagggcagagacatcaccagactgtag

SEQ ID NO: 308843 - DNA, 1299 bp, Artificial Sequence
  derived and/or modified sequence
atgggtccagccggcagtcttctcggatctggccagatgcagattactctgtgggggagcctcgcggcagtcgctatcttctttgttatcactttccttatctttctgtgctcatcctgcgaccgtgagaagaaacctcgccaacattctggcgaccatgagaaccttatgaacgttccgtcagacaaagagatgttctctagatccgttacgtctcttgctaccgatgccccagcctcctcagaacagaacggtgccctcacaaatggcgatatactcagcgaggacagcactctcacatgtatgcagcactatgaagaggtgcagacctctgcttccgacctcttggactcgcaagactctaccggtaagccaaagtgtcatcagagccgtgagttacccagaattcctcccgagtctgcggtcgatacaatgctcaccgcacgctcagtcgatggcgaccaaggcctgggcatggaggggccctacgaggtgttaaaagattctagtagccaggagaacatggtggaagattgtctgtacgagaccgtgaaggagatcaaggaggtcgctgctgccgcccatctagaaaagggtcactcagggaaggctaagtccacaagcgcaagcaaggaactgccaggtcctcagacagaaggaaaggccgagtttgcagaatatgcatccgttgacagaaataaaaagtgcagacagtcggtgaatgtggaatcaatcctgggtaacagctgcgaccctgaggaagaagctcctcccccagtacctgtgaaactgctagacgaaaatgagaacctgcaggaaaaagagggcggcgaggctgaagaatctgcaactgacaccaccagtgagaccaataaaaggttctcttcactgagctataagtcccgggaggaagacccaacactgaccgaagaggagattagcgcaatgtacagcagtgtgaacaaacccggccagctcgtgaacaaatccgggcaatcccttaccgtaccagaatccacgtataccagcattcaaggcgatcctcagcgatccccgtcttcctgtaatgacctatacgccaccgtcaaggattttgagaagactccaaacagcacgctgccccccgcaggccggccttcggaagaacctgagccggactacgaagctatccaaacgctgaatcgcgaggaggagaaggccaccttaggaaccaacggccaccacggactcgtgcccaaagagaatgattatgaaagtatttccgacttgcagcagggcagagacattacaaggttgtag

SEQ ID NO: 308844 - DNA, 1299 bp, Artificial Sequence
  derived and/or modified sequence
atgggccctgctggcagcctgctgggcagcggccagatgcagatcaccctgtggggcagcctggccgctgtggccatcttcttcgtcatcaccttcctgatcttcctgtgcagcagctgtgaccgggagaagaagccccggcagcacagcggggaccacgagaacctgatgaatgtgcccagcgacaaggagatgttcagccgctctgtgaccagcctggccacagatgccccagccagcagcgagcagaatggagccctgaccaatggagacatcctgtctgaggacagcaccctgacctgcatgcagcactatgaggaggtgcagaccagcgccagtgacctgctggacagccaggacagcacaggcaagcccaagtgccaccagagccgggagctgccccgcatccccccagagagcgctgtggacaccatgctgacagcccggtctgtggatggagaccagggcctgggcatggagggcccctatgaggtgctgaaggacagcagcagccaggagaacatggtggaggactgcctgtatgaaacagtgaaggagatcaaggaggtggccgctgctgcccacctggagaagggccacagcggcaaggccaagagcaccagcgccagcaaggagctgcccggcccccagacagagggcaaggccgagtttgctgaatatgcctctgtggacaggaacaagaagtgccggcagagcgtgaatgtggagagcatcctgggcaacagctgtgaccctgaggaggaggcccctcctcctgtgcctgtgaagctgctggatgaaaatgaaaacctgcaggagaaggagggcggggaggccgaggagagcgccacagacaccaccagcgagaccaacaagcgcttcagcagcctgagctacaagagccgggaggaggaccccaccctgacagaggaggagatcagcgccatgtacagctctgtgaacaagccaggccagctggtgaacaagagcggccagagcctgactgtgcctgagagcacctacaccagcatccagggcgacccccagaggagccccagcagctgcaatgacctgtatgccaccgtgaaggactttgagaagacccccaacagcaccctgcccccagctggccggcccagcgaggagcctgagccagactatgaggccatccagaccctgaaccgggaggaggagaaggccaccctgggcaccaacggccaccacggcctggtgcccaaggaaaatgactatgagagcatcagtgacctgcagcagggccgggacatcacccggctgtag

SEQ ID NO: 308845 - DNA, 1299 bp, Artificial Sequence
  derived and/or modified sequence
atgggccccgccggcagcctgctgggcagcggccagatgcagatcaccctgtggggctccctcgccgccgttgctatcttctttgtcattacattcctgatctttctttgctcgagctgcgatcgagagaaaaaacccagacagcactcaggcgaccatgagaacctgatgaacgttccctctgataaagagatgttttctaggagtgtgacgagcctcgccaccgatgctcctgccagcagcgagcaaaatggagctctgaccaatggggatattctaagtgaggactcaacgctaacctgtatgcaacactatgaagaagtgcaaacttctgctagcgatctccttgattcgcaggattcaacgggcaagccaaagtgccaccagtccagagaactgccccgcattccacccgaatcagccgttgacaccatgttgactgcgcgttctgtcgacggcgaccaggggcttggtatggagggcccttatgaagtgctcaaagacagcagctcccaagagaatatggtcgaggattgtctgtacgaaacggtgaaggagattaaggaggtcgcagccgccgcccacctcgagaaggggcattccgggaaagctaaaagcacgtctgcctctaaagaactgcccggcccccagaccgagggcaaagctgaatttgccgaatacgcctctgtggaccgaaataagaagtgccgtcagtcagtgaacgtggaatctatactggggaattcttgcgatcccgaggaagaggctccccctcctgtgcccgtgaaactactggatgagaatgagaacctgcaggaaaaagaaggcggtgaggcggaggagtcggccacggacaccacatctgagaccaataaacgcttttccagcctctcctataagtccagggaggaagaccctactctgaccgaagaagaaataagtgctatgtacagctccgttaacaaaccaggccagctcgtaaataagtccggtcaaagcttgaccgtgccagagtctacatatacgtctatacagggcgacccccagcgcagcccaagtagctgcaacgatctatatgccacagttaaggatttcgagaaaactcccaacagcacccttcccccagctggtcgccctagcgaggaaccagagcccgattacgaagctatacagacgctaaatagggaggaggaaaaggctaccctgggtactaatgggcatcatgggctggtgcctaaggaaaatgactatgaaagtatcagtgaccttcaacagggccgggatatcacccgtctctag

SEQ ID NO: 308846 - DNA, 1299 bp, Artificial Sequence
  derived and/or modified sequence
atggggccagcagggtcacttctaggcagcggccagatgcaaattaccctctggggctcacttgccgcagtcgccattttttttgttatcacatttctcatctttctgtgttcctcctgcgatagagaaaagaagccaaggcagcactctggggaccacgagaacctcatgaatgtaccttccgacaaggaaatgttctcaagatcagtaacatcactggcaacagacgcccctgcctcttctgagcagaatggggcattgaccaatggcgacatattgtctgaagattccacactgacatgtatgcagcactatgaggaggttcagacctccgccagcgaccttctggattcacaggactcaacgggaaagccaaagtgccaccagtctagagaattaccacgtatacccccagaatctgccgtcgacacgatgcttacagcaagaagtgtggatggcgaccaggggctggggatggaaggtccctacgaggttctgaaggactcctctagccaggaaaacatggttgaggattgtctgtacgagacggttaaagagatcaaggaagtggcagctgcagctcacttggagaagggtcattccggcaaggcgaaatccaccagcgcctcaaaggaactcccgggaccccagaccgagggcaaggctgaattcgccgaatacgccagcgtagacagaaataaaaagtgccgccagagcgttaacgtggaatccatacttggcaacagctgcgaccctgaagaggaggcccctcctccggttcctgtgaagttgctcgacgagaacgagaaccttcaagagaaggaggggggagaggctgaggaatccgcaaccgatacaacttcagagactaacaaacggttcagctccttgtcatacaagtcgagagaagaggatcccacccttactgaagaggagatctccgccatgtatagttcagttaacaagcccggacagctcgtgaacaagtccggtcagagcttgactgtacccgagtccacttacacctctatccaaggcgacccacagaggagcccttctagctgcaacgacctttacgctacagtaaaggacttcgaaaagaccccaaattcaacattgccaccagcaggtaggcccagcgaagaaccggagcccgactacgaggcaatacaaacgttgaatcgcgaggaggagaaagctactctaggaaccaatgggcaccacggactggttccaaaggagaacgactatgaatcaatttccgacttacaacagggacgggacattaccaggctctag

SEQ ID NO: 308847 - DNA, 582 bp, Artificial Sequence
  derived and/or modified sequence
atgcatcacctaaacaaaacgcactccggccttatccacatgttttcaatcgggcgcagttacgaaggcagaagcttgtttatcctcaagctgggccgccgtagccgtttaaaaagagccgtgtggatcgactgtggtatccacgcccgcgagtggatcggccccgccttctgccagtggtttgtgaaggaggcactgctaacatataaaagtgatccagcaatgcgcaaaatgctgaatcacctctacttctatattatgccagtgtttaatgtcgacgggtatcatttttcctggacaaacgatcgattctggcggaagacccgttcccgcaattcacggttccgctgtagaggggtggatgcgaatagaaactggaaagtcaaatggtgtgatgttagctctggcagttctatggattgggcctacaaaaatgggatcccatacgctttcgcctttgaattacgcgacaccggctacttcgggtttcttctgcctgagatgcttatcaagccaacatgcaccgagacaatgctggccgtgaagaacattaccatgcacctgttgaagaagtgcccctag

SEQ ID NO: 308848 - DNA, 582 bp, Artificial Sequence
  derived and/or modified sequence
atgcaccacctgaacaagacccacagcggcctcatccacatgttcagcatcggccgctcctatgagggccgcagcctcttcatcctgaagctgggcagaagaagccggctgaagagagctgtgtggattgactgtggcatccacgcccgggagtggattggccctgccttctgccagtggtttgtgaaggaggccctgctgacctacaagagtgaccctgccatgaggaagatgctgaaccacctgtacttctacatcatgcctgtgttcaacgtggatggctaccacttctcctggaccaatgaccgcttctggaggaagaccaggagcaggaacagccgcttccgctgccggggcgtggatgccaacagaaactggaaggtgaagtggtgtgatgtgagcagcggcagctccatggactgggcctacaagaatggcatcccctatgcctttgcctttgagctgcgggacaccggctacttcggcttcctgctgcctgagatgctgatcaagcccacctgcacagagaccatgctggccgtgaagaacatcaccatgcacctgctgaagaagtgcccctag

SEQ ID NO: 308849 - DNA, 582 bp, Artificial Sequence
  derived and/or modified sequence
atgcaccacctgaacaagacccacagcggcctgatccacatgttctccatcggccgtagctacgaaggcaggagcctgttcatactcaagctgggccgccgctcccggctgaaacgtgctgtgtggatcgattgtggaatacacgcacgggaatggatcggcccggccttttgccagtggttcgtcaaggaggccctactgacctacaagtccgaccctgccatgcgcaaaatgctgaatcacttgtacttctatataatgcccgtattcaacgtggatggctatcatttctcatggacaaatgaccgattttggagaaaaacacgatccaggaatagtcgttttcggtgcaggggggtcgacgcgaatcgcaattggaaggttaagtggtgtgacgtgagtagcggatcgagcatggactgggcttataagaatggtattccttatgcattcgcgtttgaattaagagatacagggtatttcgggttcctcctccctgagatgctgattaaaccgacatgtactgaaaccatgcttgcggttaaaaacatcaccatgcacctactgaagaaatgcccatag

SEQ ID NO: 308850 - DNA, 582 bp, Artificial Sequence
  derived and/or modified sequence
atgcatcatcttaataagacccacagtggactgatccatatgttttcgatagggaggtcatatgagggacgcagcttatttatcctgaagctcgggaggcgctccaggctgaagcgcgcagtgtggatcgactgcggcatccatgcaagagagtggataggacctgcattttgccagtggtttgtcaaggaggctctgttgacatataagtcagatcccgctatgaggaagatgcttaaccatctgtatttttatattatgccggtgtttaacgtcgacgggtaccacttctcctggaccaacgatagattttggagaaaaactcggtcaaggaattccaggttccgctgccgcggagtggacgccaaccgtaactggaaagtcaagtggtgtgacgtatcctcggggagttccatggattgggcctacaaaaacgggattccttacgccttcgcattcgaactgagggacaccggatatttcgggttcctcctaccagagatgctgattaagcctacttgcacagagactatgttggcagtcaaaaatatcactatgcacctcttgaagaagtgcccctag

SEQ ID NO: 308851 - DNA, 582 bp, Artificial Sequence
  derived and/or modified sequence
atgcaccacctgaacaagacccacagcggcctgatccacatgttcagcatcggcagaagctacgagggcagaagcctgttcatcctgaagctgggcagaagaagcagactgaagagagccgtgtggatcgactgcggcatccacgccagagagtggatcggccccgccttctgccagtggttcgtgaaggaggccctgctgacctacaagagcgaccccgccatgagaaagatgctgaaccacctgtacttctacatcatgcccgtgttcaacgtggacggctaccacttcagctggaccaacgacagattctggagaaagaccagaagcagaaacagcagattcagatgcagaggcgtggacgccaacagaaactggaaggtgaagtggtgcgacgtgagcagcggcagcagcatggactgggcctacaagaacggcatcccctacgccttcgccttcgagctgagagacaccggctacttcggcttcctgctgcccgagatgctgatcaagcccacctgcaccgagaccatgctggccgtgaagaacatcaccatgcacctgctgaagaagtgcccctag

SEQ ID NO: 308852 - DNA, 2167 bp, Artificial Sequence
  derived and/or modified sequence
ggctgaaggcgggggcggtgccatgacgcgcctcgggggcggtcctcgggcgcgcaccgctctcttacactcgggcctcagaagtccgtgccagtgaccggaggcggcggcggcgagcggttccttgtgggctagaagaatcctgcaaaaatgtctctctatccatctctcgaagacttgaaggtagacaaagtaattcaggctcaaactgctttttctgcaaaccctgccaatccagcaattttgtcagaagcttctgctcctatccctcacgatggaaatctctatcccagactgtatccagagctctctcaatacatggggctgagtttaaatgaagaagaaatacgtgcaaatgtggccgtggtttctggtgcaccacttcaggggcagttggtagcaagaccttccagtataaactatatggtggctcctgtaactggtaatgatgttggaattcgtagagcagaaattaagcaagggattcgtgaagtcattttgtgtaaggatcaagatggaaaaattggactcaggcttaaatcaatagataatggtatatttgttcagctagtccaggctaattctccagcctcattggttggtctgagatttggggaccaagtacttcagatcaatggtgaaaactgtgcaggatggagctctgataaagcgcacaaggtgctcaaacaggcttttggagagaagattaccatgaccattcgtgacaggccctttgaacggacgattaccatgcataaggatagcactggacatgttggttttatctttaaaaatggaaaaataacatccatagtgaaagatagctctgcagccagaaatggtcttctcacggaacataacatctgtgaaatcaatggacagaatgtcattggattgaaggactctcaaattgcagacatactgtcaacatctgggactgtagttactattacaatcatgcctgcttttatctttgaacatattattaagcggatggcaccaagcattatgaaaagcctaatggaccacaccattcctgaggtttaaaattcacggcaccatggaaatgtagctgaacgtctccagtttccttctttggcaacttctgtattatgcacgtgaagccttcccggagccagcgagcatatgctgcatgaggacctttctatcttacattatggctgggaatcttactctttcatctgataccttgttcagatttcaaaatagttgtagccttatcctggttttacagatgtgaaactttcaagagatttactgactttcctagaatagtttctctactggaaacctgatgcttttataagccattgtgattaggatgactgttacaggcttagctttgtgtgaaaaccagtcacctttctcctaggtaatgagtagtgctgttcatattactttagttctatagcatacttgcatctttaacatgctatcatagtacatttagaatgattgcctttgattttttttttaaattctgtgtgtgtgtgtgtaaaatgccaattaagaacactggtttcattccatgtaagcattaaacagtgtatgtaggtttcaagagattgtgatgattcttaaattttaactaccttcacttaatatgcttgaactgtcgccttaactatgttaagcatctagactaaaagccaaaatataattattgctgcctttctaaaaacccaaaatgtagttctctattaacctgaaatgtacactagcccagaacagtttaatggtacttactgagctatagcatagctgcttagttgtttttgagattttttagtcaacacataatggaaacttctttcttctaaaagttgccagtgccacttttaagaagtgaatcactatatgtgatgtaaaagttattacactaaacaggataaacttttgactccccttttgttcatttgtggattaagtggtataatacttaattttggcatttgactcttaagattatgtaacctagctactttgggatggtcttagaatatttttctgataacttgttccttttcctgactcctccttgcaaacaaaatgatagttgacactttatcctgatttttttcttctttttggtttatgtctattctaattaaatatgtataaataaagttacattttagtctgtcta

SEQ ID NO: 308853 - DNA, 2086 bp, Artificial Sequence
  derived and/or modified sequence
ggcgcgcaccgctctcttacactcgggcctcagaagtccgtgccagtgaccggaggcggcggcggcgagcggttccttgtgggctagaatcctgcaaaaatgtctctctatccatctctcgaagacttgaaggtagacaaagtaattcaggctcaaactgctttttctgcaaaccctgccaatccagcaattttgtcagaagcttctgctcctatccctcacgatggaaatctctatcccagactgtatccagagctctctcaatacatggggctgagtttaaatgaagaagaaatacgtgcaaatgtggccgtggtttctggtgcaccacttcaggggcagttggtagcaagaccttccagtataaactatatggtggctcctgtaactggtaatgatgttggaattcgtagagcagaaattaagcaagggattcgtgaagtcattttgtgtaaggatcaagatggaaaaattggactcaggcttaaatcaatagataatggtatatttgttcagctagtccaggctaattctccagcctcattggttggtctgagatttggggaccaagtacttcagatcaatggtgaaaactgtgcaggatggagctctgataaagcgcacaaggtgctcaaacaggcttttggagagaagattaccatgaccattcgtgacaggccctttgaacggacgattaccatgcataaggatagcactggacatgttggttttatctttaaaaatggaaaaataacatccatagtgaaagatagctctgcagccagaaatggtcttctcacggaacataacatctgtgaaatcaatggacagaatgtcattggattgaaggactctcaaattgcagacatactgtcaacatctgggactgtagttactattacaatcatgcctgcttttatctttgaacatattattaagcggatggcaccaagcattatgaaaagcctaatggaccacaccattcctgaggtttaaaattcacggcaccatggaaatgtagctgaacgtctccagtttccttctttggcaacttctgtattatgcacgtgaagccttcccggagccagcgagcatatgctgcatgaggacctttctatcttacattatggctgggaatcttactctttcatctgataccttgttcagatttcaaaatagttgtagccttatcctggttttacagatgtgaaactttcaagagatttactgactttcctagaatagtttctctactggaaacctgatgcttttataagccattgtgattaggatgactgttacaggcttagctttgtgtgaaaaccagtcacctttctcctaggtaatgagtagtgctgttcatattactttagttctatagcatacttgcatctttaacatgctatcatagtacatttagaatgattgcctttgattttttttttaaattctgtgtgtgtgtgtgtaaaatgccaattaagaacactggtttcattccatgtaagcattaaacagtgtatgtaggtttcaagagattgtgatgattcttaaattttaactaccttcacttaatatgcttgaactgtcgccttaactatgttaagcatctagactaaaagccaaaatataattattgctgcctttctaaaaacccaaaatgtagttctctattaacctgaaatgtacactagcccagaacagtttaatggtacttactgagctatagcatagctgcttagttgtttttgagattttttagtcaacacataatggaaacttctttcttctaaaagttgccagtgccacttttaagaagtgaatcactatatgtgatgtaaaagttattacactaaacaggataaacttttgactccccttttgttcatttgtggattaagtggtataatacttaattttggcatttgactcttaagattatgtaacctagctactttgggatggtcttagaatatttttctgataacttgttccttttcctgactcctccttgcaaacaaaatgatagttgacactttatcctgatttttttcttctttttggtttatgtctattctaattaaatatg

SEQ ID NO: 308854 - DNA, 2160 bp, Artificial Sequence
  derived and/or modified sequence
ggctgaaggcgggggcggtgccatgacgcgcctcgggggcggtcctcgggcgcgcaccgctctcttacactcgggcctcagaagtccgtgccagtgaccggaggcggcggcggcgagcggttccttgtgggctagaatcctgcaaaaatgtctctctatccatctctcgaagacttgaaggtagacaaagtaattcaggctcaaactgctttttctgcaaaccctgccaatccagcaattttgtcagaagcttctgctcctatccctcacgatggaaatctctatcccagactgtatccagagctctctcaatacatggggctgagtttaaatgaagaagaaatacgtgcaaatgtggccgtggtttctggtgcaccacttcaggggttggtagcaagaccttccagtataaactatatggtggctcctgtaactggtaatgatgttggaattcgtagagcagaaattaagcaagggattcgtgaagtcattttgtgtaaggatcaagatggaaaaattggactcaggcttaaatcaatagataatggtatatttgttcagctagtccaggctaattctccagcctcattggttggtctgagatttggggaccaagtacttcagatcaatggtgaaaactgtgcaggatggagctctgataaagcgcacaaggtgctcaaacaggcttttggagagaagattaccatgaccattcgtgacaggccctttgaacggacgattaccatgcataaggatagcactggacatgttggttttatctttaaaaatggaaaaataacatccatagtgaaagatagctctgcagccagaaatggtcttctcacggaacataacatctgtgaaatcaatggacagaatgtcattggattgaaggactctcaaattgcagacatactgtcaacatctgggactgtagttactattacaatcatgcctgcttttatctttgaacatattattaagcggatggcaccaagcattatgaaaagcctaatggaccacaccattcctgaggtttaaaattcacggcaccatggaaatgtagctgaacgtctccagtttccttctttggcaacttctgtattatgcacgtgaagccttcccggagccagcgagcatatgctgcatgaggacctttctatcttacattatggctgggaatcttactctttcatctgataccttgttcagatttcaaaatagttgtagccttatcctggttttacagatgtgaaactttcaagagatttactgactttcctagaatagtttctctactggaaacctgatgcttttataagccattgtgattaggatgactgttacaggcttagctttgtgtgaaaaccagtcacctttctcctaggtaatgagtagtgctgttcatattactttagttctatagcatacttgcatctttaacatgctatcatagtacatttagaatgattgcctttgattttttttttaaattctgtgtgtgtgtgtgtaaaatgccaattaagaacactggtttcattccatgtaagcattaaacagtgtatgtaggtttcaagagattgtgatgattcttaaattttaactaccttcacttaatatgcttgaactgtcgccttaactatgttaagcatctagactaaaagccaaaatataattattgctgcctttctaaaaacccaaaatgtagttctctattaacctgaaatgtacactagcccagaacagtttaatggtacttactgagctatagcatagctgcttagttgtttttgagattttttagtcaacacataatggaaacttctttcttctaaaagttgccagtgccacttttaagaagtgaatcactatatgtgatgtaaaagttattacactaaacaggataaacttttgactccccttttgttcatttgtggattaagtggtataatacttaattttggcatttgactcttaagattatgtaacctagctactttgggatggtcttagaatatttttctgataacttgttccttttcctgactcctccttgcaaacaaaatgatagttgacactttatcctgatttttttcttctttttggtttatgtctattctaattaaatatgtataaataaagttacattttagtctgtct

SEQ ID NO: 308855 - DNA, 1277 bp, Artificial Sequence
  derived and/or modified sequence
actcgggcctcagaagtccgtgccagtgaccggaggcggcggcggcgagcggttccttgtgggctagaagaatcctgcaaaaatgtctctctatccatctctcgaagacttgaaggctcaaactgctttttctgcaaaccctgccaatccagcaattttgtcagaagcttctgctcctatccctcacgatggaaatctctatcccagactgtatccagagctctctcaatacatggggctgagtttaaatgaagaagaaatacgtgcaaatgtggccgtggtttctggtgcaccacttcaggggcagttggtagcaagaccttccagtataaactatatggtggctcctgtaactggtaatgatgttggaattcgtagagcagaaattaagcaagggattcgtgaagtcattttgtgtaaggatcaagatggaaaaattggactcaggcttaaatcaatagataatggtatatttgttcagctagtccaggctaattctccagcctcattggttggtctgagatttggggaccaagtacttcagatcaatggtgaaaactgtgcaggatggagctctgataaagcgcacaaggtgctcaaacaggcttttggagagaagattaccatgaccattcgtgacaggccctttgaacggacgattaccatgcataaggatagcactggacatgttggttttatctttaaaaatggaaaaataacatccatagtgaaagatagctctgcagccagaaatggtcttctcacggaacataacatctgtgaaatcaatggacagaatgtcattggattgaaggactctcaaattgcagacatactgtcaacatctgggactgtagttactattacaatcatgcctgcttttatctttgaacatattattaagcggatggcaccaagcattatgaaaagcctaatggaccacaccattcctgaggtttaaaattcacggcaccatggaaatgtagctgaacgtctccagtttccttctttggcaacttctgtattatgcacgtgaagccttcccggagccagcgagcatatgctgcatgaggacctttctatcttacattatggctgggaatcttactctttcatctgataccttgttcagatttcaaaatagttgtagccttatcctggttttacagatgtgaaactttcaagagatttactgactttcctagaatagtttctctactggaaacctgatgcttttataagccattgtgattaggatgactgttacaggcttagct

SEQ ID NO: 308856 - DNA, 2103 bp, Artificial Sequence
  derived and/or modified sequence
gggcgcgcaccgctctcttacactcgggcctcagaagtccgtgccagtgaccggaggcggcggcggcgagcggttccttgtgggctagaagaatcctgcaaaaatgtctctctatccatctctcgaagacttgaaggtagacaaagtaattcaggctcaaactgctttttctgcaaaccctgccaatccagcaattttgtcagaagcttctgctcctatccctcacgatggaaatctctatcccagactgtatccagagctctctcaatacatggggctgagtttaaatgaagaagaaatacgtgcaaatgtggccgtggtttctggtgcaccacttcaggggttggtagcaagaccttccagtataaactatatggtggctcctgtaactggtaatgatgttggaattcgtagagcagaaattaagcaagggattcgtgaagtcattttgtgtaaggatcaagatggaaaaattggactcaggcttaaatcaatagataatggtatatttgttcagctagtccaggctaattctccagcctcattggttggtctgagatttggggaccaagtacttcagatcaatggtgaaaactgtgcaggatggagctctgataaagcgcacaaggtgctcaaacaggcttttggagagaagattaccatgaccattcgtgacaggccctttgaacggacgattaccatgcataaggatagcactggacatgttggttttatctttaaaaatggaaaaataacatccatagtgaaagatagctctgcagccagaaatggtcttctcacggaacataacatctgtgaaatcaatggacagaatgtcattggattgaaggactctcaaattgcagacatactgtcaacatctgggactgtagttactattacaatcatgcctgcttttatctttgaacatattattaagcggatggcaccaagcattatgaaaagcctaatggaccacaccattcctgaggtttaaaattcacggcaccatggaaatgtagctgaacgtctccagtttccttctttggcaacttctgtattatgcacgtgaagccttcccggagccagcgagcatatgctgcatgaggacctttctatcttacattatggctgggaatcttactctttcatctgataccttgttcagatttcaaaatagttgtagccttatcctggttttacagatgtgaaactttcaagagatttactgactttcctagaatagtttctctactggaaacctgatgcttttataagccattgtgattaggatgactgttacaggcttagctttgtgtgaaaaccagtcacctttctcctaggtaatgagtagtgctgttcatattactttagttctatagcatacttgcatctttaacatgctatcatagtacatttagaatgattgcctttgattttttttttaaattctgtgtgtgtgtgtgtaaaatgccaattaagaacactggtttcattccatgtaagcattaaacagtgtatgtaggtttcaagagattgtgatgattcttaaattttaactaccttcacttaatatgcttgaactgtcgccttaactatgttaagcatctagactaaaagccaaaatataattattgctgcctttctaaaaacccaaaatgtagttctctattaacctgaaatgtacactagcccagaacagtttaatggtacttactgagctatagcatagctgcttagttgtttttgagattttttagtcaacacataatggaaacttctttcttctaaaagttgccagtgccacttttaagaagtgaatcactatatgtgatgtaaaagttattacactaaacaggataaacttttgactccccttttgttcatttgtggattaagtggtataatacttaattttggcatttgactcttaagattatgtaacctagctactttgggatggtcttagaatatttttctgataacttgttccttttcctgactcctccttgcaaacaaaatgatagttgacactttatcctgatttttttcttctttttggtttatgtctattctaattaaatatgtataaataaagttaca

SEQ ID NO: 308857 - DNA, 354 bp, Artificial Sequence
  derived and/or modified sequence
atggaggacgaggtggtgagattcgccaagaagatggacaagatggtgcagaagaagaacgccgccggcgccctggacctgctgaaggagctgaagaacatccccatgaccctggagctgctgcaggagatggccagcgacgagctgaaggagatgagaaagaacctgaccaaggaggccatcagagagcaccagatggccaagaccggcggcacccagaccgacctgttcacctgcggcaagtgcaagaagaagaactgcacctacacccaggtgcagaccagaagcgccgacgagcccatgaccaccttcgtggtgtgcaacgagtgcggcaacagatggaagttctgctag

SEQ ID NO: 308858 - DNA, 354 bp, Artificial Sequence
  derived and/or modified sequence
atggaagacgaagtggtgcgattcgccaagaaaatggacaagatggtgcaaaagaagaatgccgcaggagcactcgacctgctgaaagaactgaagaacatcccgatgaccctggagctcctacaggaaatggcaagcgacgagctcaaggaaatgcgcaagaaccttactaaggaggccatccgggagcaccagatggccaagaccggtgggacccagacagacttgttcacctgcggtaagtgcaagaagaaaaactgtacatatacacaggtccagacccggagtgcagacgagccaatgaccacattcgtcgtttgcaacgagtgtggcaaccgctggaagttctgctag

SEQ ID NO: 308859 - DNA, 354 bp, Artificial Sequence
  derived and/or modified sequence
atggaggatgaggtggtgcgctttgccaagaagatggacaagatggtgcagaagaagaatgctgctggggccctggacctgctgaaggagctgaagaacatccccatgaccctggagctgctgcaggagatggccagtgatgagctgaaggagatgaggaagaacctgaccaaggaggccatccgggagcaccagatggccaagacaggaggcacccagacagacctcttcacctgtgggaagtgcaagaagaagaactgcacctacacccaggtgcagaccaggtctgcagatgagcccatgaccacctttgtggtgtgcaatgaatgtggcaaccgctggaagttctgctag

SEQ ID NO: 308860 - DNA, 354 bp, Artificial Sequence
  derived and/or modified sequence
atggaggacgaggtggtgcggttcgccaagaagatggacaagatggttcagaaaaaaaatgctgccggagctctcgatctgctcaaagagctgaaaaacatcccaatgaccctcgagctgcttcaggagatggcttccgatgagctgaaggagatgcgaaaaaaccttaccaaggaggccatacgggagcaccagatggccaagaccggggggactcagacagacctcttcacttgtggtaagtgcaagaagaaaaactgtacttatacacaggtacaaactagaagtgctgacgagcccatgacgacctttgtagtctgtaacgaatgcggaaataggtggaaattctgttag

SEQ ID NO: 308861 - DNA, 354 bp, Artificial Sequence
  derived and/or modified sequence
atggaggatgaggtcgtgcggttcgcaaagaagatggacaaaatggtgcagaaaaaaaatgccgctggggctcttgacctgctcaaagaactgaagaacataccaatgacactcgaactgcttcaggaaatggcctcggacgaactcaaggaaatgaggaagaacctgacaaaagaggcaattcgggagcatcagatggcaaaaactgggggtactcaaaccgatcttttcacttgcggcaaatgcaaaaagaaaaactgtacatatacacaggtccagacacgcagtgctgacgagcccatgactacattcgtggtgtgtaatgagtgtggtaataggtggaagttttgctag

SEQ ID NO: 308862 - DNA, 1432 bp, Artificial Sequence
  derived and/or modified sequence
gttcgtaaggaagggggcctaggcccgggcctgcggtggtgggggttgctgcgcgccgggggtcgctcctgctgtgtcttccgctccagcttcgcccacttccccttgccagcggggtgggcgcggagaagacctgccggagccatggaggacgaagtggtccgctttgccaagaagatggacaagatggtgcagaagaagaacgcggctggagcattggatttgctaaaggagcttaagaatattcctatgaccctggaattactgcaggaaatggctagtgatgagctgaaagagatgcggaaaaacttgaccaaagaagccatcagagagcatcagatggccaagactggtgggacccagactgacttgttcacatgtggcaaatgtaaaaagaagaattgcacttacacacaggtacaaacccgtagtgctgatgaaccaatgacaacatttgttgtctgtaatgaatgtggaaatcgatggaagttctgttgagttggaagaattggcaaaatatctggaccattaagaaaacggattttgtaactagctttaaactaggccaagcaactagttttcctgcaaatcaaatttttaaagcaacttgggttagactttgtttttgacctaacatcccttccttaaatgccttctgtagtttcagatcagtagggagaccatataataattttatggtacctgtttcaaaacatattttttctgtttttataagtaagttgatattaattaaactcttggcaatatttcttctttcttaaaggaaaatataccttaactttttttcttttacactgtgaaacatacacagtagaaattctgttactctctgttattaatacataaatgaaaatacatttttttccatattggcatgtagctacaaatattaaaggaggagaaaaggtaatataattttaggtttaccaaatatggtgtgtattcaaataatacttgaccagcttatctaaaatgtacataattttgaggtagcttatgaatttgattttaattattatgttcacaagcttggaatattagatattattttgcatctgtaactaaccgtgatcatcatttcttgtaatttcttgtacatgtatattacttgttcttaatagatttttggaaacaagactttattgagatcagtttggttttcctgttaatttacctgtttgactttataatgtgttttagttttgcagaagaacactgttgtagtttagaaggcttttcataaatcccctcataggcaaagatgaaaacttcccactatttttttcccctcttaggaagacatactggaaagaaaatgtttagcatcttagtgtagtatagctattgtaaacagttcatgactagattttgattcggaaatctatactgaccaaggattaatcttaaggat

SEQ ID NO: 308863 - protein, 120 aa, Artificial Sequence
  derived and/or modified sequence
MNGEEKSCSGYGGPDAMDGKLVSSDDDDFIVKREHTRASGIRKAVLSGPGQSAENETDQVNFREIPPRCYPKHAKACIYFTYKVHYSNSSTEIPEFLTALEVLMASDFLDIYIFLFFLFF

SEQ ID NO: 308864 - protein, 112 aa, Artificial Sequence
  derived and/or modified sequence
MDGEEKTYGGCEGPDAMYVKLISSDGHEFIVKREHALTSGTIKAMLSGPGQFAENETNEVNFREIPSHVLSKVCMYFTYKVRYTNSSTEIPEFPIAPEIALELLMAANFLDC

SEQ ID NO: 308865 - DNA, 363 bp, Artificial Sequence
  derived and/or modified sequence
atgaacggcgaggagaagagctgcagcggctacggcggccccgacgccatggacggcaagctggtgagcagcgacgacgacgacttcatcgtgaagagagagcacaccagagccagcggcatcagaaaggccgtgctgagcggccccggccagagcgccgagaacgagaccgaccaggtgaacttcagagagatcccccccagatgctaccccaagcacgccaaggcctgcatctacttcacctacaaggtgcactacagcaacagcagcaccgagatccccgagttcctgaccgccctggaggtgctgatggccagcgacttcctggacatctacatcttcctgttcttcctgttcttctag

SEQ ID NO: 308866 - DNA, 363 bp, Artificial Sequence
  derived and/or modified sequence
atgaacggggaggagaaatcatgttccgggtacggaggcccggatgcaatggatggaaaacttgtgtcttctgacgacgatgacttcatcgtcaaacgggaacacacccgagcttccggaatccgcaaggccgtgcttagcgggcctggacagagtgcagagaacgaaaccgaccaggttaactttcgcgagatcccccccagatgttatcctaagcacgcaaaagcctgcatctacttcacctacaaggtacattattccaactcttcaactgagatacctgaatttctcaccgctctggaggtactgatggccagcgactttctggacatctacattttcttgttctttttgttcttctag

SEQ ID NO: 308867 - DNA, 363 bp, Artificial Sequence
  derived and/or modified sequence
atgaatggagaggagaagagctgcagcggctatggaggcccagatgccatggatggcaagctggtgtccagtgatgatgatgacttcatcgtgaagcgggagcacacccgggccagcggcatcaggaaggctgtgctgagcggccctggccagagcgcagaaaatgaaacagaccaggtgaacttccgggagatccccccacgctgctaccccaagcacgccaaggcctgcatctacttcacctacaaggtgcactacagcaacagcagcacagagatccctgagttcctgacagccctggaggtgctgatggccagtgacttcctggacatctacatcttcctgttcttcctgttcttctag

SEQ ID NO: 308868 - DNA, 363 bp, Artificial Sequence
  derived and/or modified sequence
atgaacggcgaggagaagagctgcagcggctacggcggccccgacgccatggacggtaagctggtgagttctgatgatgacgatttcatcgtcaagcgcgagcatacccgggcaagcggtatccgcaaggcagtgctctctgggccaggacaatcagctgaaaatgaaaccgaccaggtgaatttcagagaaattccaccacgctgttacccgaaacacgccaaagcatgtatttatttcacatataaagtacactactcaaacagctcaaccgagatccctgaatttttgacagccttagaggtactcatggcgagcgattttctggacatctacattttcctttttttcctgttcttctag

SEQ ID NO: 308869 - DNA, 363 bp, Artificial Sequence
  derived and/or modified sequence
atgaatggtgaggaaaagtcgtgctctggctacggcggaccggatgccatggatggcaagctggtctcctcagacgatgacgatttcatcgtgaagcgggaacacacgagggcctccgggataagaaaggcggtactgtctggacccggtcaatctgccgaaaacgaaaccgaccaggtgaattttcgcgagattccacccagatgctatcctaaacatgcaaaggcatgtatctactttacatacaaagtgcattattctaactcatccacggagatcccagaattcttgaccgccctggaagtgctgatggcttctgactttctggatatttacatcttcctcttttttctttttttttag

SEQ ID NO: 308870 - DNA, 363 bp, Artificial Sequence
  derived and/or modified sequence
atgaatggagaggagaaaagctgcagtggctacggaggccctgatgccatggatggtaaactggtatcttctgacgatgatgactttattgtaaaaagagaacatacacgagcatcaggaataaggaaagccgtgctgagtggcccaggtcagtctgctgagaatgaaaccgaccaggtcaattttagagagatccctccacgatgctatccaaagcatgcaaaggcatgcatatattttacttacaaggttcactactctaacagctccactgagattcctgaattcctcactgcattggaagtgctgatggcttcagacttcctagatatatatatttttcttttttttctttttttttga

SEQ ID NO: 308871 - DNA, 339 bp, Artificial Sequence
  derived and/or modified sequence
atggacggcgaggagaagacctacggcggctgcgagggccccgacgccatgtacgtgaagctgatcagcagcgacggccacgagttcatcgtgaagagagagcacgccctgaccagcggcaccatcaaggccatgctgagcggccccggccagttcgccgagaacgagaccaacgaggtgaacttcagagagatccccagccacgtgctgagcaaggtgtgcatgtacttcacctacaaggtgagatacaccaacagcagcaccgagatccccgagttccccatcgcccccgagatcgccctggagctgctgatggccgccaacttcctggactgctag

SEQ ID NO: 308872 - DNA, 339 bp, Artificial Sequence
  derived and/or modified sequence
atggacggcgaggagaagacttacggcggctgcgagggacccgacgctatgtacgtgaaactcatttcttccgatggtcacgagtttattgtgaaacgagaacatgcattgacctccggcaccattaaggccatgctcagcgggcctgggcaattcgccgagaatgagacgaatgaagtgaattttagagagatccccagccatgtactgagcaaggtttgtatgtattttacatataaggtcagatatactaattcttctactgaaatcccagaattcccaatcgcgccggagatagcattagaactgctcatggccgcaaatttcctcgattgctag

SEQ ID NO: 308873 - DNA, 339 bp, Artificial Sequence
  derived and/or modified sequence
atggacggcgaggagaagacttacggggggtgcgaaggcccagatgctatgtatgttaagttgattagcagtgacggacatgaatttattgtgaagcgagagcatgctctcacttcaggaactattaaggcaatgttgagcggtcctggccagtttgccgaaaatgaaaccaatgaagtgaatttccgagagataccaagtcatgttttgtcaaaggtatgcatgtacttcacctataaggttcgctatacaaactcttccaccgaaatcccggagttccccattgccccagagatcgctctcgagctcttgatggctgccaactttttagactgttag

SEQ ID NO: 308874 - DNA, 339 bp, Artificial Sequence
  derived and/or modified sequence
atggacggggaggagaaaacgtacggcgggtgcgagggccctgatgcaatgtacgtgaaactgattagctccgatggccatgagttcatcgtaaagagggagcacgctctcacttctggtacaattaaggcaatgctgtccggcccaggtcagtttgcggagaatgagactaatgaggtcaactttcgtgagatcccttcccacgttctatcgaaagtctgtatgtattttacttacaaggtgcgatatacaaattcttctaccgagattcctgagttccctatagcccccgaaatcgcactggaattattgatggcggcaaattttcttgactgctag

SEQ ID NO: 308875 - DNA, 339 bp, Artificial Sequence
  derived and/or modified sequence
atggatggcgaagagaaaacatatggggggtgtgagggcccagatgccatgtatgtgaagttgatatcatccgatggccacgagtttattgtgaagcgtgaacacgccctgaccagcgggaccatcaaagcaatgttatcggggcctgggcagtttgctgaaaatgagacaaatgaggtgaatttcagggaaatcccatcacacgtgctgtctaaggtgtgcatgtacttcacctataaagtcaggtacaccaacagttctaccgaaatcccggaattccccattgctcccgagatagctctggagctgctcatggccgctaattttctggactgttag

SEQ ID NO: 308876 - DNA, 339 bp, Artificial Sequence
  derived and/or modified sequence
atggatggcgaagaaaagacttatggcggatgtgaaggtccagacgccatgtacgtgaagcttattagctctgatggccatgaattcattgttaagagggagcacgcattaacaagcgggaccattaaggcgatgctctccggccctggccagttcgcagaaaatgaaaccaacgaggtgaacttcagggagataccatcccacgtcctgagcaaggtgtgtatgtacttcacatataaagttcggtacactaatagctcgaccgaaatccccgagttccctattgcccctgagatagcactagagctgttgatggctgccaatttcctagactgctag

SEQ ID NO: 308877 - DNA, 339 bp, Artificial Sequence
  derived and/or modified sequence
atggacggcgaagaaaagacctacggtggctgcgagggccccgacgcaatgtatgtgaagttgatatctagcgatggtcacgagttcatagtgaagagggagcatgccctgacttcagggaccattaaagcaatgttgagtggacccggacaattcgcagagaacgagaccaacgaagtgaattttcgcgaaatccctagccatgtgctgtccaaagtatgcatgtactttacatacaaggtccgctatacaaacagcagcactgagatccctgagttcccgatcgcaccagaaattgctctcgaactgcttatggcagccaacttcctcgactgctag

SEQ ID NO: 308878 - DNA, 339 bp, Artificial Sequence
  derived and/or modified sequence
atggatggagaggagaagacctacggcggctgtgagggcccagatgccatgtatgtgaagctgatcagcagtgatggccacgagttcatcgtgaagcgggagcacgccctgaccagcggcaccatcaaggccatgctgagcggccctggccagtttgctgaaaatgagaccaatgaggtgaacttccgggagatccccagccacgtgctgagcaaggtgtgcatgtacttcacctacaaggtgcgctacaccaacagcagcacagagatccctgagttccccatcgcccctgagatcgccctggagctgctgatggccgccaacttcctggactgctag

SEQ ID NO: 308879 - DNA, 339 bp, Artificial Sequence
  derived and/or modified sequence
atggacggcgaggagaagacctacggcggctgcgagggccccgacgctatgtacgtgaagttgattagctcagacggtcatgaatttattgtgaaacgcgagcacgcccttacatctgggaccatcaaagcgatgcttagcggaccaggccagtttgctgaaaacgagacaaatgaagtaaattttcgagagatcccatctcatgtattatctaaggtatgcatgtactttacttacaaggtccgatatacaaattcaagcactgaaatccccgagtttcccatcgctcccgagatcgcgctcgagctcctcatggctgccaactttctggattgttag

SEQ ID NO: 308880 - DNA, 339 bp, Artificial Sequence
  derived and/or modified sequence
atggacggcgaggagaagacctacggcggctgcgagggccccgacgctatgtatgtgaagctgatcagcagtgacggacacgagtttattgtgaaacgagaacacgcactaacgtctggaacaatcaaggcaatgttatctgggccaggacaattcgcagaaaatgagactaatgaagtcaattttcgggaaatcccttcccacgtgctatcaaaggtgtgtatgtattttacatacaaggtgaggtacaccaattcctcaactgagatcccagagttccctatagcaccggagattgctttggagctgctgatggccgctaattttctggactgctag

SEQ ID NO: 308881 - DNA, 339 bp, Artificial Sequence
  derived and/or modified sequence
atggacggcgaggagaagacctacggcggctgcgagggccccgacgctatgtacgtgaagttgatcagcagtgatggtcatgagttcattgtgaaaagggaacatgcgctgacttcaggtacaattaaggctatgctcagtggcccaggacagttcgcagaaaacgagacgaacgaagtgaactttcgggagattccaagccacgtccttagcaaggtctgcatgtattttacctataaggtccggtatacgaatagctccactgagatccctgaatttcccatcgctcctgagattgccttagaactgcttatggctgctaattttctggattgctag

SEQ ID NO: 308882 - DNA, 339 bp, Artificial Sequence
  derived and/or modified sequence
atggacggcgaggagaagacctacggcggctgcgagggccccgacgccatgtatgtgaaacttatttcctcagatgggcacgaatttattgtaaagcgtgagcatgcactcaccagtgggacaattaaggccatgctgtccgggccaggacaatttgcagagaacgaaacaaacgaggtgaacttccgcgaaataccatcacacgtgctatctaaggtgtgcatgtacttcacttacaaagtcaggtacacaaatagctcgaccgagattcccgaattcccgatcgcaccagagattgccctggaattactgatggccgctaacttcctcgattgctag

SEQ ID NO: 308883 - DNA, 339 bp, Artificial Sequence
  derived and/or modified sequence
atggacggcgaggagaagacctacggcggctgcgagggccccgacgctatgtatgtcaagctcatttcctccgacggacacgaattcattgttaagagagaacacgcactgacctctggcacgattaaagcaatgctttctgggcccggccagtttgcagagaatgaaacaaatgaggtgaatttcagagagatcccttcgcacgtactgtcaaaagtttgcatgtacttcacctataaggtgaggtatactaactcttcaaccgagatacccgaatttcctattgccccagagatcgcattggagttactgatggccgccaactttctagattgctag

SEQ ID NO: 308884 - DNA, 339 bp, Artificial Sequence
  derived and/or modified sequence
atggacggcgaggagaagacctacggcggctgcgagggccccgacgcaatgtacgtgaaactcatatcctccgacgggcatgagtttattgtgaagcgtgagcatgcgttaactagtggtacgattaaagcaatgctctcggggcctggacagttcgctgaaaacgagacaaatgaagtaaactttagagagatccctagccacgtgttaagcaaagtgtgtatgtatttcacgtacaaggttagatacaccaatagtagcactgaaatccccgaatttccaattgcccctgagattgccctggaactactcatggctgcaaactttcttgactgctag

SEQ ID NO: 308885 - DNA, 339 bp, Artificial Sequence
  derived and/or modified sequence
atggatggtgaggaaaaaacgtacggagggtgcgagggccctgacgctatgtatgtgaagcttatatcaagcgacggccacgaattcattgtgaagcgtgagcacgcgttgaccagcgggacgatcaaggccatgctgagcgggccagggcagttcgcagaaaacgagaccaacgaggtgaatttcagggagattcctagtcacgttctgtccaaagtctgcatgtactttacctacaaggtgcggtatacgaactcttccactgagattcccgaattcccgattgcgcctgaaatcgccctggaacttctcatggccgctaactttcttgactgctag

SEQ ID NO: 308886 - DNA, 339 bp, Artificial Sequence
  derived and/or modified sequence
atggacggggaagagaagacctacggaggttgcgaaggcccagatgcgatgtacgtcaaacttattagctcagacggacacgaattcattgtcaagcgcgagcacgcactgacgtcaggcaccatcaaggcaatgcttagcggtccaggtcaattcgccgaaaacgagaccaacgaggtcaattttcgggaaattcctagccacgtactttctaaagtgtgtatgtatttcacttacaaagtccgatacacaaattcctccacggaaatccccgagtttcctattgcccctgaaattgccctggagctactgatggccgcaaacttcttagactgttag

SEQ ID NO: 308887 - DNA, 339 bp, Artificial Sequence
  derived and/or modified sequence
atggacggtgaggagaagacctacgggggttgtgaaggcccagatgcaatgtacgtaaagctgattagcagtgacggacacgaattcattgtgaagagggagcatgcacttacctcagggaccattaaagctatgctcagtggcccagggcagtttgccgaaaacgagaccaatgaagtcaattttagagaaattccttctcacgtactctccaaggtttgtatgtatttcacgtacaaggttcgatataccaactcatccaccgagatccccgaattcccaattgctccagaaatcgccctggagctgctaatggcagcaaacttcctcgactgttag

SEQ ID NO: 308888 - DNA, 339 bp, Artificial Sequence
  derived and/or modified sequence
atggacggagaagagaagacgtacgggggttgcgagggacccgatgccatgtatgtaaagctgatatcctcagacggtcatgaatttattgtcaaaagagagcatgccttgacctctgggaccattaaagcaatgctgtctggaccaggacagttcgctgagaacgaaacaaatgaggttaatttccgggaaattcctagtcatgtcctatcaaaagtgtgcatgtactttacatacaaagtgcggtacaccaattcctccacagagatccctgagttccccatcgctccagaaatagccctcgaattgctaatggcggctaatttcctggattgctag

SEQ ID NO: 308889 - DNA, 339 bp, Artificial Sequence
  derived and/or modified sequence
atggacggcgaagagaaaacctacggcggatgcgagggcccagacgcaatgtatgtgaagctgatctccagcgatgggcatgagtttattgtcaagcgcgagcacgcattgacatctggcacaataaaggcaatgctgtcggggcctgggcagttcgccgaaaatgagacaaacgaggtgaacttcagggagatcccgtcacacgtgcttagcaaggtgtgtatgtattttacatataaggtgcgatatacgaactccagtaccgaaatcccagagtttcctatcgcccctgagatagcgctggagttgctcatggctgcgaattttctggattgctag

SEQ ID NO: 308890 - DNA, 339 bp, Artificial Sequence
  derived and/or modified sequence
atggatggggaggagaaaacctatgggggttgcgagggtcccgacgccatgtatgtgaagttaatcagctccgacggacatgagtttatcgtcaagagggagcacgccctgacctctggaaccatcaaggctatgctgagtggcccaggtcagtttgccgagaatgagaccaacgaagttaattttcgggagatccccagtcatgtgctgtccaaggtgtgcatgtattttacttacaaagtgcgctacacgaatagtagtacggaaatccccgagttcccaattgctcctgaaatcgcactagagcttctaatggctgcgaacttcttggattgttag

SEQ ID NO: 308891 - DNA, 1451 bp, Artificial Sequence
  derived and/or modified sequence
accggagcaggcagctgggggtgggggggcggccctgggataggggctgtggcagtacgcggggacccggctgcggtggctgcgggactgacgaatggagaggagaaaacctatggtggctgtgaaggacctgatgccatgtatgtcaaattgatatcatctgatggccatgaatttattgtaaaaagagaacatgcattaacatcaggcacgataaaagccatgttgagtggcccaggtcagtttgctgagaacgaaaccaatgaggtcaattttagagagataccttcacatgtgctatcgaaagtatgcatgtattttacgtacaaggttcgctacactaacagctccaccgagattcctgaattcccaattgcacctgaaattgcactggaactgctgatggctgcgaacttcttagattgttaaataaaataaattataataaactgttaactcttttcagtatttaatacctgtagttcagttagtaactttttcatatatagcatgttgcctgtatgcagttgaactatataaagttcattgcaaagcagattatcttgtttttttgcatagcaatcaaagttgaaatttgtttgctacatcaacaaattaaggacattttcacaaactgagaaataaacaaatatgccaattcgtaggtggttttgccttatcctttgaatgtgacttaaaatcagcaatgatgatatagtaaatactgaaatttaggtgtaaatcaatacgttctacagggaaataatgaggctaagtatttttatgtttttagtggttttttagaaacctaatcttatagccgccattagcattactagagttatgcaaataattgcattataaacatgtttataacttagccaaaacattgatttttataactctccaagtatgagttgaaatttcttatgtcttttgataaactgcagtattctttaagtgtactttgtccttttgtttattgctacaatttaagaactttatttaaaaacaattttggaaggttactaggtacagcttttgcagaagaaactgaactgtagccagatggtcagcaagtaaactacatgacttagagttcttgtgcattatacattttgggtaattcaaagtactgtatttgcattgactataaagcgtcgtttgcaatatttattcttccttcatagtcccttgttgtgattatacttccagttgtttaaatgtattttaaaagactcactattaactttattcagatcttaaaagctacacctttttgaactattccagtctttctccatccaattagaatgttatggaataacatgtgaagagatacagtgaaaatcatattataatgcattgaagatatcctacatgaattatcttctattaaaatatgtcccaataaatatacccataatcagtgggtcttctactgaaatcaa

SEQ ID NO: 308892 - DNA, 683 bp, Artificial Sequence
  derived and/or modified sequence
acccggctgcggtggctgcgggactgacgagtgagtctcgggctggggcggaaacggagctccgggaaactactaaagttcctggggaagcaaagtagaatttcataagaacaaaatggatggagaggagaaaacctatggtggctgtgaaggacctgatgccatgtatgtcaaattgatatcatctgatggccatgaatttattgtaaaaagagaacatgcattaacatcaggcacgataaaagccatgttgagtggcccaggtcagtttgctgagaacgaaaccaatgaggtcaattttagagagataccttcacatgtgctatcgaaagtatgcatgtattttacgtacaaggttcgctacactaacagctccaccgagattcctgaattcccaattgcacctgaaattgcactggaactgctgatggctgcgaacttcttagattgttaaataaaataaattataataaactgttaactcttttcagtatttaatacctgtagttcagttagtaactttttcatatatagcatgttgcctgtatgcagttgaactatataaagttcattgcaaagcagattatcttgtttttttgcatagcaatcaaagttgaaatttgtttgctacatcaacaaattaaggacattttcacaaactgagaaataaacaaatatgccaa

SEQ ID NO: 308893 - DNA, 1943 bp, Artificial Sequence
  derived and/or modified sequence
cagacggaagtgagcgacacactctgcgtcctcgcctcaccaggaaactactaaagttcctggggaagcaaagtagaatttcataagaacaaaatggatggagaggagaaaacctatggtggctgtgaaggacctgatgccatgtatgtcaaattgatatcatctgatggccatgaatttattgtaaaaagagaacatgcattaacatcaggcacgataaaagccatgttgagtggcccaggtcagtttgctgagaacgaaaccaatgaggtcaattttagagagataccttcacatgtgctatcgaaagtatgcatgtattttacgtacaaggttcgctacactaacagctccaccgagattcctgaattcccaattgcacctgaaattgcactggaactgctgatggctgcgaacttcttagattgttaaataaaataaattataataaactgttaactcttttcagtatttaatacctgtagttcagttagtaactttttcatatatagcatgttgcctgtatgcagttgaactatataaagttcattgcaaagcagattatcttgtttttttgcatagcaatcaaagttgaaatttgtttgctacatcaacaaattaaggacattttcacaaactgagaaataaacaaatatgccaattcgtaggtggttttgccttatcctttgaatgtgacttaaaatcagcaatgatgatatagtaaatactgaaatttaggtgtaaatcaatacgttctacagggaaataatgaggctaagtatttttatgtttttagtggttttttagaaacctaatcttatagccgccattagcattactagagttatgcaaataattgcattataaacatgtttataacttagccaaaacattgatttttataactctccaagtatgagttgaaatttcttatgtcttttgataaactgcagtattctttaagtgtactttgtccttttgtttattgctacaatttaagaactttatttaaaaacaattttggaaggttactaggtacagcttttgcagaagaaactgaactgtagccagatggtcagcaagtaaactacatgacttagagttcttgtgcattatacattttgggtaattcaaagtactgtatttgcattgactataaagcgtcgtttgcaatatttattcttccttcatagtcccttgttgtgattatacttccagttgtttaaatgtattttaaaagactcactattaactttattcagatcttaaaagctacacctttttgaactattccagtctttctccatccaattagaatgttatggaataacatgtgaagagatacagtgaaaatcatattataatgcattgaagatatcctacatgaattatcttctattaaaatatgtcccaataaatatacccataatcagtgggtcttctactgaaatcaagctcattcagcttttctattaagcagccaaaaaattttttgaaaaaatatgacagcatcattccttatgcatggggaaagaagcactggagatgggtttagtattgtctttatctcagaggtggaacaaagttgtcattatagggtctataaacttaagtctccagcttatttgagactggcttaatatggctgagcccggtggctcatgcctgtaatcccagcactttcagaggacgaggcgggtagatcacttgaggccaggagtttgagaccagcctggccaccatggcaaaaccccatctctaccaaaaatgcaaaaattagctaggccatggtggcacacgcctgtaatcccagctacttgtgaggctgaggcatgagaatcgcttgaacctgggaggtggaggtggcagtgagccgagatcgcaccactgcactccagcctgggtgacagagcgagactgtctcaaaaaaaaaaaaaaaaaaa

SEQ ID NO: 308894 - DNA, 814 bp, Artificial Sequence
  derived and/or modified sequence
tagcagtttacatgtggatttattcattctggagatacaatggcaaggaaacagctgtggaaactactaaagttcctggggaagcaaagtagaatttcataagaacaaaatggatggagaggagaaaacctatggtggctgtgaaggacctgatgccatgtatgtcaaattgatatcatctgatggccatgaatttattgtaaaaagagaacatgcattaacatcaggcacgataaaagccatgttgagtggcccaggtcagtttgctgagaacgaaaccaatgaggtcaattttagagagataccttcacatgtgctatcgaaagtatgcatgtattttacgtacaaggttcgctacactaacagctccaccgagattcctgaattcccaattgcacctgaaattgcactggaactgctgatggctgcgaacttcttagattgttaaataaaataaattataataaactgttaactcttttcagtatttaatacctgtagttcagttagtaactttttcatatatagcatgttgcctgtatgcagttgaactatataaagttcattgcaaagcagattatcttgtttttttgcatagcaatcaaagttgaaatttgtttgctacatcaacaaattaaggacattttcacaaactgagaaataaacaaatatgccaattcgtaggtggttttgccttatcctttgaatgtgacttaaaatcagcaatgatgatatagtaaatactgaaatttaggtgtaaatcaatacgttctacagggaaataatgaggctaagtatttttatgtttttagtg

SEQ ID NO: 308895 - DNA, 1573 bp, Artificial Sequence
  derived and/or modified sequence
caggtacggatctcccgcgcgtcgccgaaagcggctctgacccagcggaagtaattctttcgactgccccggaacccaccggagcaggcagctgggggtgggggggcggccctgggataggggctgtggcagtacgcggggacccggctgcggtggctgcgggactgacgagaaactactaaagttcctggggaagcaaagtagaatttcataagaacaaaatggatggagaggagaaaacctatggtggctgtgaaggacctgatgccatgtatgtcaaattgatatcatctgatggccatgaatttattgtaaaaagagaacatgcattaacatcaggcacgataaaagccatgttgagtggcccaggtcagtttgctgagaacgaaaccaatgaggtcaattttagagagataccttcacatgtgctatcgaaagtatgcatgtattttacgtacaaggttcgctacactaacagctccaccgagattcctgaattcccaattgcacctgaaattgcactggaactgctgatggctgcgaacttcttagattgttaaataaaataaattataataaactgttaactcttttcagtatttaatacctgtagttcagttagtaactttttcatatatagcatgttgcctgtatgcagttgaactatataaagttcattgcaaagcagattatcttgtttttttgcatagcaatcaaagttgaaatttgtttgctacatcaacaaattaaggacattttcacaaactgagaaataaacaaatatgccaattcgtaggtggttttgccttatcctttgaatgtgacttaaaatcagcaatgatgatatagtaaatactgaaatttaggtgtaaatcaatacgttctacagggaaataatgaggctaagtatttttatgtttttagtggttttttagaaacctaatcttatagccgccattagcattactagagttatgcaaataattgcattataaacatgtttataacttagccaaaacattgatttttataactctccaagtatgagttgaaatttcttatgtcttttgataaactgcagtattctttaagtgtactttgtccttttgtttattgctacaatttaagaactttatttaaaaacaattttggaaggttactaggtacagcttttgcagaagaaactgaactgtagccagatggtcagcaagtaaactacatgacttagagttcttgtgcattatacattttgggtaattcaaagtactgtatttgcattgactataaagcgtcgtttgcaatatttattcttccttcatagtcccttgttgtgattatacttccagttgtttaaatgtattttaaaagactcactattaactttattcagatcttaaaagctacacctttttgaactattccagtctttctccatccaattagaatgttatggaataacatgtgaagagatacagtgaaaatcatattataatgcattgaagatatcctacatgaattatcttctattaaaatatgtcccaataaatatacccataatcagtgggtcttctac

SEQ ID NO: 308896 - DNA, 816 bp, Artificial Sequence
  derived and/or modified sequence
cgcgcgtcgccgaaagcggctctgacccagcggaagtaattctttcgactgccccggaacccaccggagcaggcagctgggggtgggggggcggccctgggataggggctgtggcagtacgcggggacccggctgcggtggctgcgggactgacgagatcatcagggaaggaagacctctctgaggagttgatgttttacctggagacctaaatgatgaggatttaaaagcttttcggacaacagcaattacaaatgcaaagaccttgaggaaactactaaagttcctggggaagcaaagtagaatttcataagaacaaaatggatggagaggagaaaacctatggtggctgtgaaggacctgatgccatgtatgtcaaattgatatcatctgatggccatgaatttattgtaaaaagagaacatgcattaacatcaggcacgataaaagccatgttgagtggcccaggtcagtttgctgagaacgaaaccaatgaggtcaattttagagagataccttcacatgtgctatcgaaagtatgcatgtattttacgtacaaggttcgctacactaacagctccaccgagattcctgaattcccaattgcacctgaaattgcactggaactgctgatggctgcgaacttcttagattgttaaataaaataaattataataaactgttaactcttttcagtatttaatacctgtagttcagttagtaactttttcatatatagcatgttgcctgtatgcagttgaactatataaagttcattgcaaagcagattatcttgtttttttgcatagcaatcaa

SEQ ID NO: 308897 - DNA, 719 bp, Artificial Sequence
  derived and/or modified sequence
gggagaagagggcggcgggacctttcctggcgccgctcgcagtttacatgtggatttattcattctggagatacaatggcaaggaaacagctgtgagtcttgctgtgtggcccaggctggagtgcccggctggtctcaaattcctgacctcaagtgatctccctcccaaagtgttgcgattgcaggtgtgagccactgcacctggctgctgagaaatctttgcctacagtgagggaaactactaaagttcctggggaagcaaagtagaatttcataagaacaaaatggatggagaggagaaaacctatggtggctgtgaaggacctgatgccatgtatgtcaaattgatatcatctgatggccatgaatttattgtaaaaagagaacatgcattaacatcaggcacgataaaagccatgttgagtggcccaggtcagtttgctgagaacgaaaccaatgaggtcaattttagagagataccttcacatgtgctatcgaaagtatgcatgtattttacgtacaaggttcgctacactaacagctccaccgagattcctgaattcccaattgcacctgaaattgcactggaactgctgatggctgcgaacttcttagattgttaaataaaataaattataataaactgttaactcttttcagtatttaatacctgtagttcagttagtaactttttcatatatagcatgttgcctgtatgc

SEQ ID NO: 308898 - protein, 50 aa, Artificial Sequence
  derived and/or modified sequence
IFSIIHGLSSLTACQLRTIYICQFLTRIAAGKTLDAQFENDERITPLESA

SEQ ID NO: 308899 - DNA, 153 bp, Artificial Sequence
  derived and/or modified sequence
atcttcagcatcatccacggcctgagcagcctgaccgcctgccagctgagaaccatctacatctgccagttcctgaccagaatcgccgccggcaagaccctggacgcccagttcgagaacgacgagagaatcacccccctggagagcgcctag

SEQ ID NO: 308900 - DNA, 153 bp, Artificial Sequence
  derived and/or modified sequence
atattttctattatacacggactcagctctctgacagcctgtcagttacgcactatctacatttgccaatttctgacccgaatcgcagccggaaaaacgctggacgcccagttcgagaacgacgagcgcatcacccctcttgagagcgcctag

SEQ ID NO: 308901 - DNA, 153 bp, Artificial Sequence
  derived and/or modified sequence
atcttcagcatcatccacggcctgagcagcctgacagcctgccagctgcggaccatctacatctgccagttcctgaccagaattgctgctgggaagaccctggatgcccagtttgaaaatgatgagcgcatcacccccctggagagcgcctag

SEQ ID NO: 308902 - DNA, 153 bp, Artificial Sequence
  derived and/or modified sequence
atcttcagcatcatccacggcctgagcagcctgaccgcctgccagctccgaaccatatatatatgtcagttcctcactaggattgcggccggtaagaccctcgatgcccaattcgaaaacgatgagcggatcacccccttggaaagcgcgtag

SEQ ID NO: 308903 - DNA, 153 bp, Artificial Sequence
  derived and/or modified sequence
atcttcagtataattcacggtttgtctagcctgaccgcctgtcagctgcgcacaatctatatctgccagtttctcacccgcatcgcggcaggcaagacgttggatgcccagtttgagaacgatgagcgaattacaccacttgagtccgcctag

SEQ ID NO: 308904 - protein, 261 aa, Artificial Sequence
  derived and/or modified sequence
MASPDWGYDDKNGPEQWSKLYPIANGNNQSPVDIKTSETKHDTSLKPISVSYNPATAKEIINVGHSFHVNFEDNDNRSVLKGGPFSDSYRLFQFHFHWGSTNEHGSEHTVDGVKYSAELHVAHWNSAKYSSLAEAASKADGLAVIGVLMKVGEANPKLQKVLDALQAIKTKGKRAPFTNFDPSTLLPSSLDFWTYPGSLTHPPLYESVTWIICKESISVSSEQLAQFRSLLSNVEGDNAVPMQHNNRPTQPLKGRTVRASF

SEQ ID NO: 308905 - protein, 176 aa, Artificial Sequence
  derived and/or modified sequence
MASPDWGYDDKNGPEQWSKLYPIANGNNQSPVDIKTSETKHDTSLKPISVSYNPATAKEIINVGHSFHVNFEDNDNRSVLKGGPFSDSYRLFQFHFHWGSTNEHGSEHTVDGVKYSAELHVAHWNSAKYSSLAEAASKADGLAVIGVLMKVGEANPKLQKVLDALQAIKTKGKRAP

SEQ ID NO: 308906 - protein, 251 aa, Artificial Sequence
  derived and/or modified sequence
MASPDWGYDDKNGPEQWSKLYPIANGNNQSPVDIKTSETKHDTSLKPISVSYNPATAKEIINVGHSFHVNFEDNDNRSVLKGGPFSDSYRLFQFHFHWGSTNEHGSEHTVDGVKYSAELHVAHWNSAKYSSLAEAASKADGLAVIGVLMKVGEANPKLQKVLDALQAIKTKGKRAPFTNFDPSTLLPSSLDFWTYPGSLTHPPLYESVTWIICKESISVSSEQLAQFRSLLSNVEGDNAVPMQHNNRPTQP

SEQ ID NO: 308907 - protein, 22 aa, Artificial Sequence
  derived and/or modified sequence
MASPDWGYDDKNGPEQWSKLYP

SEQ ID NO: 308908 - protein, 149 aa, Artificial Sequence
  derived and/or modified sequence
MASPDWGYDDKNGPEQWSKLYPIANGNNQSPVDIKTSETKHDTSLKPISVSYNPATAKEIINVGHSFHVNFEDNDNRSVLKGGPFSDSYRLFQFHFHWGSTNEHGSEHTVDGVKYSAELHVAHWNSAKYSSLAEAASKADGLAVIGVLM

SEQ ID NO: 308909 - protein, 118 aa, Artificial Sequence
  derived and/or modified sequence
MASPDWGYDDKNGPEQWSKLYPIANGNNQSPVDIKTSETKHDTSLKPISVSYNPATAKEIINVGHSFHVNFEDNDNRSVLKGGPFSDSYRLFQFHFHWGSTNEHGSEHTVDGVKYSAE

SEQ ID NO: 308910 - protein, 148 aa, Artificial Sequence
  derived and/or modified sequence
MASPDWGYDDKNGPEQWSKLYPIANGNNQSPVDIKTSETKHDTSLKPISVSYNPATAKEIINVGHSFHVNFEDNDNRSVLKGGPFSDSYRLFQFHFHWGSTNEHGSEHTVDGVKYSAELHVAHWNSAKYSSLAEAASKADGLAVIGVL

SEQ ID NO: 308911 - protein, 99 aa, Artificial Sequence
  derived and/or modified sequence
MASPDWGYDDKNGPEQWSKLYPIANGNNQSPVDIKTSETKHDTSLKPISVSYNPATAKEIINVGHSFHVNFEDNDNRSVLKGGPFSDSYRLFQFHFHWG

SEQ ID NO: 308912 - DNA, 786 bp, Artificial Sequence
  derived and/or modified sequence
atggcgagcccagattggggatatgacgacaagaatggtcctgagcagtggtctaagctgtatcccatagccaacgggaacaatcagtctcccgtagacattaagacgtccgagacaaaacacgacacaagcctgaagccaatcagtgtgtcctataatcccgctaccgctaaggagattatcaacgtgggtcactcatttcacgtgaactttgaggataacgacaacagatcggttttgaaggggggtcctttctccgactcttaccgtctgttccagtttcactttcattgggggtctactaatgagcacggctccgaacacacggtcgatggcgtcaagtactccgcggagcttcatgttgcccattggaacagtgctaagtattcaagcttggctgaagcggcctcaaaagcagatggactggcagtgattggtgtcctgatgaaggttggtgaagctaaccccaagttgcagaaggtactcgatgcactacaagcaatcaagacgaagggaaaacgcgccccttttactaatttcgacccgtccacacttctgccatcttctctagacttctggacgtacccaggtagtctgacccatccacctctgtacgagtcggtgacatggatcatctgtaaggaaagcatttccgtgagttccgaacagctggctcagtttcgttctctactcagtaatgtcgaaggagacaatgccgtcccaatgcagcataataaccgccccacccagccactcaaaggaagaaccgtaagggcttctttttag

SEQ ID NO: 308913 - DNA, 786 bp, Artificial Sequence
  derived and/or modified sequence
atggcttcgcctgactgggggtacgacgacaaaaatgggcctgagcagtggagtaagctctatcctatcgctaatggcaacaaccaatctccagtcgacattaagactagcgagacgaagcacgacacaagcctgaagcccatctctgtcagttacaatccagccaccgcaaaggaaattatcaatgtgggacattcctttcatgtgaactttgaagacaacgataatcggtcggtgctcaagggtggccctttcagtgattcttaccgcttattccagtttcacttccattggggaagcactaatgaacatggcagcgagcacacagtcgacggcgttaaatactccgcagagctccacgttgctcactggaatagcgccaagtattcaagcttagctgaggcagcgagcaaggcagacggcctcgccgtgatcggagtcctgatgaaggttggggaagcgaaccctaaacttcaaaaggtgctcgatgcgcttcaagcaattaagaccaaggggaaaagggcacccttcaccaacttcgaccccagcaccttgttaccatcaagcctggacttttggacgtatcccggatcgcttacacatcctcccctgtacgagtcagtgacgtggatcatttgtaaggaaagcatcagtgtttcaagcgagcagcttgcccagttccgcagcctgctgtctaatgtggagggcgataacgccgtgccaatgcagcacaacaatcgacctacacagcccctgaaagggcggacagttagagcttccttctag

SEQ ID NO: 308914 - DNA, 786 bp, Artificial Sequence
  derived and/or modified sequence
atggcctctcctgattggggatacgatgacaagaatggccctgaacagtggtctaaattgtaccctatcgcaaatggcaacaatcagtcccccgttgacatcaagacatccgagaccaagcacgacaccagcctgaagcctatttccgtgtcgtacaatcccgccacggccaaggagatcatcaacgtgggccattcgttccatgtcaatttcgaagacaatgacaataggagtgtgcttaagggtgggcctttcagtgatagctaccggctgtttcaatttcacttccattgggggtcaaccaacgagcatggatctgagcacaccgttgatggcgtgaaatattcagctgagttacatgtggcacactggaactccgccaagtacagcagtctggctgaagctgcatcaaaagccgatggtctcgctgtaattggagtgctcatgaaggtcggcgaggcaaatcctaaactgcaaaaagtcctcgatgctctgcaggctattaagaccaaaggaaagagagcaccattcaccaatttcgacccatccacgctcctgccaagttctctggacttctggacataccctggttctctcacgcatcctcctttgtacgaatccgtcacatggatcatatgcaaagagtctatctctgtctcatcggagcaattagcccaattccggtcactgctgtctaacgtcgagggtgacaacgcggtgcctatgcagcataataataggcctacccagcctcttaagggccgcaccgtgagagcatccttctag

SEQ ID NO: 308915 - DNA, 531 bp, Artificial Sequence
  derived and/or modified sequence
atggcgagcccagattggggctacgatgacaaaaacgggccagagcagtggtccaagctgtatccaattgccaacggtaataatcagagccctgtcgacattaaaacctcggaaacaaagcatgatacttctttaaagccaatctcagtgagctataaccctgcaacggcaaaagagattattaacgtgggccactccttccacgttaatttcgaagacaatgacaatcgaagcgtcctgaagggcggaccattcagcgacagttaccgcctcttccagtttcatttccactggggcagcaccaacgaacacggcagtgaacatacggtggatggagtgaaatattcagccgagctgcatgtggctcactggaacagcgccaagtatagctccctggcggaggctgcttcgaaagcggacggcctggcggtaataggggtgctgatgaaagtgggcgaagcaaatcctaaattgcagaaggtgctggatgctctgcaggcaatcaaaacaaaggggaagcgggccccatag

SEQ ID NO: 308916 - DNA, 756 bp, Artificial Sequence
  derived and/or modified sequence
atggcatccccagattggggatatgacgacaagaacggtcccgaacagtggtccaaactttatccgatcgcaaacgggaacaaccagtcgcccgtcgacattaaaacctcagagaccaagcatgacacatctctcaagccaataagcgtgtcttacaatcccgcgactgccaaggaaataattaatgtgggccattctttccacgtcaacttcgaagacaacgacaaccgctcagtgctgaagggtgggccatttagcgacagctacagactgtttcagtttcattttcattggggtagtaccaatgaacatgggtctgagcatacagtcgatggagtaaaatatagtgccgagctgcatgtcgcccattggaactcagcgaagtattcttctttggcagaagccgcatcaaaagctgatggtttggccgtgataggagtcctgatgaaagtaggtgaggcaaacccaaagctgcagaaagtgctcgacgctctgcaggctatcaagaccaagggtaaaagggcgcccttcaccaatttcgaccccagcaccctgttgcctagctccttagacttctggacgtaccctggcagtttgacccaccccccgttgtatgaaagtgtgacctggattatctgcaaggaatctatatcagtttcgagtgagcagctggcacagtttagatctttgctgtccaacgtcgagggcgacaatgcggtacctatgcagcacaacaaccgccctacacagccttag

SEQ ID NO: 308917 - DNA, 69 bp, Artificial Sequence
  derived and/or modified sequence
atggcaagccctgactggggctatgacgataagaatggtcccgaacagtggtcaaaactctatccatag

SEQ ID NO: 308918 - DNA, 450 bp, Artificial Sequence
  derived and/or modified sequence
atggcatctcctgactgggggtacgacgataaaaacggccctgagcaatggtccaagctctaccctattgccaacggaaacaaccagagccccgtcgatatcaagacctctgagactaagcacgatacatccctcaaaccaatctccgtttcatacaatccagccacagctaaagagataatcaatgtcggccatagcttccatgtgaatttcgaggacaacgacaaccgctccgtcttaaagggtggaccgttttccgatagttataggctcttccagttccactttcattggggaagtaccaacgaacacggctcagagcacacagtggacggcgtgaagtattctgcggagttgcatgtggcacactggaactctgccaagtacagctctctggccgaggcagcctcgaaggcagatggattagccgttattggagtgctcatgtag

SEQ ID NO: 308919 - DNA, 450 bp, Artificial Sequence
  derived and/or modified sequence
atggcgtctccagattggggctacgacgacaaaaatggccctgaacaatggagtaagctgtaccctatcgccaacggaaataatcagagtcccgtagacatcaaaacgagcgagacaaagcatgacaccagtctcaagccaatttctgttagctacaaccccgccaccgccaaagagatcataaatgtagggcacagctttcatgtcaacttcgaggataacgataaccggtctgtcttaaaaggcggacctttctccgacagctatcggctatttcagttccacttccactggggtagtactaacgaacacggaagtgagcacacagtcgacggggtcaaatacagcgccgagctgcacgttgcccactggaactctgctaaatatagcagtcttgcagaagctgcatcaaaggcggacgggctggcagtcatcggggtgctgatgtag

SEQ ID NO: 308920 - DNA, 357 bp, Artificial Sequence
  derived and/or modified sequence
atggcatcacctgattggggttacgatgacaaaaacggtccagagcaatggagcaaactttaccccatagctaatggcaacaaccaaagccctgtggatatcaaaaccagtgaaaccaagcacgatacttcactcaaaccaatttcagtgtcttacaaccccgccacagctaaagaaattatcaatgttgggcactcattccacgttaacttcgaagataatgataaccgtagtgtcttgaagggaggccccttcagcgactcttacaggctgttccagttccatttccactggggatccacaaatgagcacgggtctgagcataccgtcgatggagtcaaatactctgctgaatag

SEQ ID NO: 308921 - DNA, 447 bp, Artificial Sequence
  derived and/or modified sequence
atggctagccccgattgggggtatgatgataaaaacggccccgaacaatggtctaagttgtaccccattgccaacggcaacaatcaaagccctgtagacatcaagacctctgagacgaagcacgacacatccctgaaaccaattagtgtttcgtacaatcccgctaccgcgaaggagattattaatgtgggacattcgttccatgtaaactttgaagacaatgataatagatccgtgctgaagggcggacctttttccgattcatacaggctgttccaatttcattttcactggggatctaccaatgagcacgggtccgagcacaccgttgatggagtgaagtactcagcagagctacacgtagctcattggaacagtgctaaatacagcagcttggcagaagcagcaagcaaggccgatgggctggctgttatcggagtcctttag

SEQ ID NO: 308922 - DNA, 786 bp, Artificial Sequence
  derived and/or modified sequence
atggcatcaccggattggggctacgacgataaaaacggtcctgagcagtggtctaaactctatcctatcgctaatggcaacaaccaatcccccgtagatattaagacatccgagaccaagcatgacacttctttgaaacccatttccgtaagctataatcccgcaaccgcaaaggagattataaatgtcgggcattcctttcacgttaattttgaagataatgacaaccgctctgttttgaaagggggccccttttccgattcttatcgactgtttcagttccactttcactggggaagcaccaacgagcacggttccgagcatacagttgacggcgtgaagtactccgccgagctgcacgttgcccattggaattctgcaaaatacagttctctcgctgaggctgcaagcaaggctgatgggctggccgtgataggggtgctaatgaaggtgggagaggctaacccaaagttgcagaaagtgctggatgccctgcaggccattaaaactaaagggaaaagagctccctttaccaattttgacccctcgacacttctgccttcctctttggacttttggacctatcctggctctttgacacaccctcccctctatgaatcagtgacctggattatctgcaaggagtccatttctgtgtcatctgagcagctcgctcaatttcgctcattgctgagcaatgtagagggtgacaatgctgtccctatgcagcataacaacaggcctacgcagccactcaagggaagaacagttagggccagcttctag

SEQ ID NO: 308923 - DNA, 300 bp, Artificial Sequence
  derived and/or modified sequence
atggcatccccagattggggatatgatgataaaaatggccccgagcaatggagtaagctctatcccatcgcaaatggtaataaccaaagcccagtggatatcaaaacctcagaaacaaaacatgacaccagcctaaagcccataagcgtgagctacaacccagccactgccaaagaaatcataaatgtgggacactcctttcacgttaacttcgaggacaacgacaacaggtccgtcctcaaaggaggtcctttttctgatagctatagactgttccaattccacttccattgggggtag

SEQ ID NO: 308924 - DNA, 786 bp, Artificial Sequence
  derived and/or modified sequence
atggctagcccagactggggctatgatgataaaaacgggcctgagcagtggagcaaactctaccccatcgccaatgggaataaccagtcacctgtcgatatcaaaacgtctgaaacaaagcatgatactagtctgaagcccatctctgtcagttacaaccccgctaccgctaaggagatcatcaatgtgggtcacagttttcatgttaactttgaagataatgataatagaagtgtgctcaagggcggccccttctcggattcctataggctatttcagttccactttcactggggaagtactaacgaacacgggtccgagcacaccgttgacggcgttaagtactccgccgagcttcacgtggcgcattggaattcagccaaatattcctctttagccgaggcggctagcaaggccgatgggctggcggtgatcggcgtactgatgaaggttggtgaagccaaccccaaactccaaaaggtgctggacgcactccaggccatcaaaactaaaggcaaaagagcaccttttactaattttgatccctccaccctgctgcctagctctttggatttctggacctaccccggctccctcacccacccccctctgtacgaatcagtgacttggattatctgtaaagaatctatttccgtgtcctctgagcagctggcacagtttcggagccttctgtctaatgtagaaggtgacaacgctgtacccatgcagcacaataaccggcctacccaacctctgaaaggcaggaccgtcagggcttcattctag

SEQ ID NO: 308925 - DNA, 786 bp, Artificial Sequence
  derived and/or modified sequence
atggcttccccggattggggctacgacgacaagaacggaccagaacagtggagtaagctctaccctatagcaaacggaaacaatcagtcccccgtcgacattaaaacaagtgaaaccaagcatgacacaagtctcaaaccaatctctgtgtcttacaaccccgcaacagccaaggaaatcatcaacgtgggacattctttccacgtaaattttgaggacaatgacaaccgcagcgtcctgaaggggggacccttttctgacagttatcggctcttccagtttcactttcactggggcagtacaaacgagcacgggagcgaacacaccgtggacggggtgaagtactccgctgaactccacgtcgcacactggaactccgcaaagtactcttccctggctgaagccgcctccaaagcagacggtctggcagtaattggtgtactgatgaaggtgggagaagccaaccctaagctgcagaaggtactggacgcactacaagcaattaaaactaaggggaaaagggccccgtttactaacttcgatcccagcacactcctgccatcttctctggacttctggacataccccggttcccttacacacccccccctgtatgaaagtgtcacatggatcatttgcaaggagagcatatctgttagctcggaacagctcgcccagttccgctcactgctctccaacgttgaaggcgataacgctgtcccaatgcagcataacaacagacccacacagccgctgaagggtagaactgtaagggctagcttttag

SEQ ID NO: 308926 - DNA, 786 bp, Artificial Sequence
  derived and/or modified sequence
atggccagcccagactggggctatgatgacaagaatggacctgagcagtggagcaagctgtaccccatcgccaatggaaacaaccagagccctgtggacatcaagaccagcgagaccaagcatgacaccagcctgaagcccatctctgtgtcctacaacccagccacagccaaggagatcatcaacgtgggccacagcttccacgtgaactttgaggacaatgacaacagatctgtgctgaagggcggccccttcagtgacagctaccgcctcttccagttccacttccactggggcagcaccaatgagcacggcagcgagcacacagtggatggagtgaagtacagcgctgagctgcacgtggcccactggaacagcgccaagtacagcagcctggccgaggccgccagcaaggcagatggcctggccgtgattggagtgctgatgaaggtgggggaggccaaccccaagctgcagaaggtgctggatgccctgcaggccatcaagaccaagggcaagagggcccccttcaccaactttgaccccagcaccctgctgcccagcagcctggacttctggacctacccaggcagcctgacccacccccccctgtatgaatctgtgacctggatcatctgcaaggagagcatctctgtgtcctctgagcagctggcccagttccgcagcctgctgagcaatgtggagggggacaatgctgtgcccatgcagcacaacaaccggcccacccagcccctgaagggccgcacagtgcgggccagcttctag

SEQ ID NO: 308927 - DNA, 531 bp, Artificial Sequence
  derived and/or modified sequence
atggccagcccagactggggctatgatgacaagaatggacctgagcagtggagcaagctgtaccccatcgccaatggaaacaaccagagccctgtggacatcaagaccagcgagaccaagcatgacaccagcctgaagcccatctctgtgtcctacaacccagccacagccaaggagatcatcaacgtgggccacagcttccacgtgaactttgaggacaatgacaacagatctgtgctgaagggcggccccttcagtgacagctaccgcctcttccagttccacttccactggggcagcaccaatgagcacggcagcgagcacacagtggatggagtgaagtacagcgctgagctgcacgtggcccactggaacagcgccaagtacagcagcctggccgaggccgccagcaaggcagatggcctggccgtgattggagtgctgatgaaggtgggggaggccaaccccaagctgcagaaggtgctggatgccctgcaggccatcaagaccaagggcaagagggccccctag

SEQ ID NO: 308928 - DNA, 756 bp, Artificial Sequence
  derived and/or modified sequence
atggccagcccagactggggctatgatgacaagaatggacctgagcagtggagcaagctgtaccccatcgccaatggaaacaaccagagccctgtggacatcaagaccagcgagaccaagcatgacaccagcctgaagcccatctctgtgtcctacaacccagccacagccaaggagatcatcaacgtgggccacagcttccacgtgaactttgaggacaatgacaacagatctgtgctgaagggcggccccttcagtgacagctaccgcctcttccagttccacttccactggggcagcaccaatgagcacggcagcgagcacacagtggatggagtgaagtacagcgctgagctgcacgtggcccactggaacagcgccaagtacagcagcctggccgaggccgccagcaaggcagatggcctggccgtgattggagtgctgatgaaggtgggggaggccaaccccaagctgcagaaggtgctggatgccctgcaggccatcaagaccaagggcaagagggcccccttcaccaactttgaccccagcaccctgctgcccagcagcctggacttctggacctacccaggcagcctgacccacccccccctgtatgaatctgtgacctggatcatctgcaaggagagcatctctgtgtcctctgagcagctggcccagttccgcagcctgctgagcaatgtggagggggacaatgctgtgcccatgcagcacaacaaccggcccacccagccctag

SEQ ID NO: 308929 - DNA, 69 bp, Artificial Sequence
  derived and/or modified sequence
atggccagcccagactggggctatgatgacaagaatggacctgagcagtggagcaagctgtacccctag

SEQ ID NO: 308930 - DNA, 450 bp, Artificial Sequence
  derived and/or modified sequence
atggccagcccagactggggctatgatgacaagaatggacctgagcagtggagcaagctgtaccccatcgccaatggaaacaaccagagccctgtggacatcaagaccagcgagaccaagcatgacaccagcctgaagcccatctctgtgtcctacaacccagccacagccaaggagatcatcaacgtgggccacagcttccacgtgaactttgaggacaatgacaacagatctgtgctgaagggcggccccttcagtgacagctaccgcctcttccagttccacttccactggggcagcaccaatgagcacggcagcgagcacacagtggatggagtgaagtacagcgctgagctgcacgtggcccactggaacagcgccaagtacagcagcctggccgaggccgccagcaaggcagatggcctggccgtgattggagtgctgatgtag

SEQ ID NO: 308931 - DNA, 357 bp, Artificial Sequence
  derived and/or modified sequence
atggccagcccagactggggctatgatgacaagaatggacctgagcagtggagcaagctgtaccccatcgccaatggaaacaaccagagccctgtggacatcaagaccagcgagaccaagcatgacaccagcctgaagcccatctctgtgtcctacaacccagccacagccaaggagatcatcaacgtgggccacagcttccacgtgaactttgaggacaatgacaacagatctgtgctgaagggcggccccttcagtgacagctaccgcctcttccagttccacttccactggggcagcaccaatgagcacggcagcgagcacacagtggatggagtgaagtacagcgctgagtag

SEQ ID NO: 308932 - DNA, 447 bp, Artificial Sequence
  derived and/or modified sequence
atggccagcccagactggggctatgatgacaagaatggacctgagcagtggagcaagctgtaccccatcgccaatggaaacaaccagagccctgtggacatcaagaccagcgagaccaagcatgacaccagcctgaagcccatctctgtgtcctacaacccagccacagccaaggagatcatcaacgtgggccacagcttccacgtgaactttgaggacaatgacaacagatctgtgctgaagggcggccccttcagtgacagctaccgcctcttccagttccacttccactggggcagcaccaatgagcacggcagcgagcacacagtggatggagtgaagtacagcgctgagctgcacgtggcccactggaacagcgccaagtacagcagcctggccgaggccgccagcaaggcagatggcctggccgtgattggagtgctgtag

SEQ ID NO: 308933 - DNA, 300 bp, Artificial Sequence
  derived and/or modified sequence
atggccagcccagactggggctatgatgacaagaatggacctgagcagtggagcaagctgtaccccatcgccaatggaaacaaccagagccctgtggacatcaagaccagcgagaccaagcatgacaccagcctgaagcccatctctgtgtcctacaacccagccacagccaaggagatcatcaacgtgggccacagcttccacgtgaactttgaggacaatgacaacagatctgtgctgaagggcggccccttcagtgacagctaccgcctcttccagttccacttccactggggctag

SEQ ID NO: 308934 - DNA, 786 bp, Artificial Sequence
  derived and/or modified sequence
atggccagccccgactggggctacgacgacaagaacggccccgagcagtggtctaagctttaccccatcgccaatggcaacaaccagtcacccgttgatattaaaacctcagagactaagcatgacacgagcctcaagcctatatctgtttcctacaaccccgctacagcaaaagaaataataaacgtcggccacagttttcatgtgaattttgaggataatgacaacaggagcgtgctcaagggtggcccattctccgactcctatagactgttccagttccacttccactgggggtcaacgaacgagcacggctctgagcacaccgtcgacggagttaagtactccgccgaactgcatgtggcccactggaacagtgctaaatacagttccctggcagaagccgcctcaaaggctgacggtctagccgttattggcgtcctgatgaaagttggggaagctaacccaaagctccagaaggtgctcgacgccctacaggctatcaaaaccaaagggaaacgggcccccttcaccaacttcgacccttccacccttcttcccagcagcctcgatttttggacctaccccggctctctgacacatcccccattgtacgaatcggtgacttggattatctgcaaagagtcaatcagcgtgtcctcagaacagctagcacagtttcgctccctcctgagtaacgtcgagggagacaacgcagtgcctatgcagcataacaaccgacccactcagcccctgaagggtcgaacagttagggcctccttttag

SEQ ID NO: 308935 - DNA, 786 bp, Artificial Sequence
  derived and/or modified sequence
atggccagccccgactggggctacgacgacaagaacggccccgagcaatggtcaaagttataccccatcgccaatggcaataaccagtcaccagtggatatcaaaacctccgagaccaagcacgatacaagcctgaaacccatctccgtttcctacaacccagccaccgcgaaggaaattatcaatgtggggcacagctttcatgtcaatttcgaggacaacgacaatagatccgttctaaagggcggaccgttttccgactcatatcgtctgtttcagtttcattttcactgggggtctactaatgaacatggctcggaacataccgttgatggcgttaaatattcagccgaactgcacgttgctcactggaattctgccaaatattccagtctggctgaggccgcttcaaaagcggatggcctggcagtgattggcgtgctgatgaaagtgggggaggctaaccccaaactccaaaaagtgctagacgccttgcaggctattaaaactaaggggaagcgagcacccttcaccaattttgatccgtctaccctgctcccttcgtctcttgatttttggacataccccggcagtctgacacaccccccactgtatgagtctgttacctggattatctgtaaggagtcgataagcgtgagcagcgaacagcttgcgcagtttaggtcgctgctgtctaacgtcgagggcgacaacgccgtgcctatgcagcacaacaaccgcccaactcagcctctcaagggacggactgttcgcgcgtccttctag

SEQ ID NO: 308936 - DNA, 786 bp, Artificial Sequence
  derived and/or modified sequence
atggccagccccgactggggctacgacgacaagaacggccccgagcaatggtctaaactgtaccccattgccaacggtaataatcagtcccctgttgacattaaaacgtcagaaacaaaacacgatacgtcattgaaaccaatctccgtctcctacaatccagctacagccaaagagataattaatgtaggtcactcgttccacgtgaactttgaggataatgacaaccgaagtgtgctgaaaggcggccctttctccgattcgtaccgcctgtttcaatttcactttcactggggtagtacaaacgagcacgggagcgagcacaccgtggacggagttaaatatagcgcggagcttcacgtcgcccactggaattccgcaaagtacagcagcctggctgaggccgcttcaaaggcggatgggcttgccgtgataggcgtcctgatgaaagtcggggaggcaaatcctaagctccagaaggttctcgatgctcttcaggctatcaagaccaagggtaaacgggccccctttaccaattttgatcccagcacattgcttccttccagtctcgatttttggacttaccccggaagcctcacccacccacccctgtatgagagtgtaacttggatcatctgcaaggaatctatctctgtatcctccgagcagctagcccagttcagatctctgttgagtaacgtagaaggggacaatgccgtcccgatgcagcataacaatcggccaacacaaccactgaaaggacgcactgtcagagcgtcattttag

SEQ ID NO: 308937 - DNA, 531 bp, Artificial Sequence
  derived and/or modified sequence
atggccagccccgactggggctacgacgacaagaacggccccgagcagtggtcaaagctctatccgattgctaatggcaacaatcagtctccagtggacattaaaacctctgagactaagcacgacacaagcttgaaaccaatatccgtgagctacaatcctgctacggccaaggagatcataaatgtgggacactccttccatgtaaacttcgaagacaatgacaatcggtccgtgctcaagggcggccccttttctgattcctatcggctgttccaattccatttccattggggatcaaccaatgaacacggtagtgagcacacagtggacggagtgaaatattccgccgaactgcatgtagcccattggaacagcgctaaatacagcagtctggcagaagccgcaagcaaggcggacggcctcgcagtcatcggcgtgctgatgaaagtgggagaggccaacccgaagttgcaaaaagtgctcgatgcgctgcaggccatcaaaacaaagggcaaaagggccccctag

SEQ ID NO: 308938 - DNA, 756 bp, Artificial Sequence
  derived and/or modified sequence
atggccagccccgactggggctacgacgacaagaacggccccgagcagtggagcaaactgtaccccattgcaaatggtaataaccagagcccagtggatatcaaaacttctgagacaaagcacgataccagtctgaagcctatctctgtctcttacaaccccgcaacagctaaggaaatcatcaacgtggggcactccttccatgttaattttgaggacaacgataacagaagcgtcctaaaagggggtccattctcagattcttacagacttttccagtttcattttcattggggatccactaacgagcatggtagcgagcacaccgttgacggcgtgaagtattctgctgagctgcacgtggcccactggaacagcgcaaagtacagctcccttgcagaggccgcgagcaaagccgatgggctggctgtcatcggcgtcttgatgaaggtgggggaggccaacccgaagctccaaaaggtccttgacgccctccaagccataaagaccaaaggcaaacgcgccccatttacaaacttcgacccatccactctcttaccttcatctctcgacttctggacataccctggtagtttgacccaccctcccctctacgagtcagtcacttggatcatctgtaaggaaagtatctctgtcagttccgagcaactggctcagttccgtagtcttctttctaatgtcgaaggagacaatgccgtgcccatgcagcacaataacaggccaacacagccatag

SEQ ID NO: 308939 - DNA, 69 bp, Artificial Sequence
  derived and/or modified sequence
atggccagccccgactggggctacgacgacaagaacggccccgagcagtggagcaaactgtacccctag

SEQ ID NO: 308940 - DNA, 450 bp, Artificial Sequence
  derived and/or modified sequence
atggccagccccgactggggctacgacgacaagaacggccccgagcaatggagtaagctgtatccgatagctaacgggaataaccagagcccggtggatatcaaaacatccgagaccaagcacgacaccagccttaagcccatttcggtctcctacaatcctgcaaccgcgaaggagattatcaacgttggccattcgttccatgtgaatttcgaggacaatgataaccggtccgtcttgaaaggcggccccttctctgattcatacagactctttcagtttcattttcactggggatctacaaatgaacatggcagtgaacataccgtggacggtgttaagtacagtgctgagctccatgtggcccattggaatagcgcaaaatactcgagcttagctgaggccgcttctaaggcagatggactggccgtgatcggtgtcctgatgtag

SEQ ID NO: 308941 - DNA, 450 bp, Artificial Sequence
  derived and/or modified sequence
atggccagccccgactggggctacgacgacaagaacggccccgagcagtggtccaagctttaccccatcgccaatggaaataatcagtctcctgtagatatcaagacaagcgaaacgaaacacgacacgtccctgaagccgatttccgtctcttacaaccccgcaaccgccaaagagataatcaatgtggggcactcgttccatgtgaacttcgaggacaacgacaaccgctcagtactgaagggcggcccatttagcgactcatataggctgttccagttccattttcactggggttcaacgaacgagcatggcagcgagcacacagtggatggggtgaaatatagcgccgaattgcacgtagcccactggaacagtgctaagtacagcagcttggctgaagctgcctccaaagcagatggattagcggtcattggcgtcctgatgtag

SEQ ID NO: 308942 - DNA, 357 bp, Artificial Sequence
  derived and/or modified sequence
atggccagccccgactggggctacgacgacaagaacggccccgagcagtggtccaaactctaccctatcgctaatgggaataatcaaagccctgtcgacattaagacttccgagacgaaacatgacacctctctcaagccaatttctgtttcttacaaccccgcaacagccaaggaaattattaacgtggggcactcctttcatgtgaactttgaggacaatgacaatcgctctgtcctgaaaggaggacctttttccgactcttataggctctttcaatttcactttcattggggtagtaccaacgaacacgggtcagaacataccgtagatggcgtgaagtactcagcggagtag

SEQ ID NO: 308943 - DNA, 447 bp, Artificial Sequence
  derived and/or modified sequence
atggccagccccgactggggctacgacgacaagaacggccccgagcagtggtcaaagctttatccaattgctaatgggaataatcagtcgccagtcgacataaagacaagcgagacaaaacatgatacctctctgaagccaatttccgtctcctacaacccggcaaccgcaaaggagataatcaatgtgggccacagtttccacgtgaactttgaggacaacgataacagatcagtgttgaaaggaggtcccttttccgattcgtaccgacttttccagtttcacttccattggggaagtactaatgaacacggtagtgaacatactgtcgacggagttaagtattcagctgaacttcatgtggcacattggaactcagctaagtattcgagtctagctgaagctgcaagcaaggccgacggattagctgtcatcggcgtcctgtag

SEQ ID NO: 308944 - DNA, 786 bp, Artificial Sequence
  derived and/or modified sequence
atggccagccccgactggggctacgacgacaagaacggccccgagcagtggagcaagttatacccaatcgcgaatggtaacaatcaaagtcctgtggacataaagacaagtgaaacaaagcacgacaccagcctcaagccaattagtgtctcttacaaccctgctaccgctaaagagattatcaacgtcggccattctttccacgttaactttgaggacaatgacaaccgctccgtactgaagggtggaccgttttccgattcctaccggctcttccagtttcattttcattggggatccactaatgaacacgggtccgaacacaccgtggacggcgtcaagtacagtgcagaacttcacgttgcacattggaatagcgccaaatactcctcacttgctgaggctgcctcgaaagccgacgggctcgctgttattggggtcttgatgaaagtgggagaggccaaccctaaactccagaaggtgttggacgccttacaagccattaagactaaaggtaagcgggccccttttaccaacttcgatccctcaactctactccctagcagtctcgacttttggacataccctggatctcttacccacccccctctttacgaatcagtaacctggattatctgcaaggaatccatctccgtcagcagtgagcaactcgcacagtttagatctctgttatcaaatgtcgaaggcgataatgccgtgccgatgcagcataataaccggcctactcagccgcttaagggacgcactgtgcgagccagcttttag

SEQ ID NO: 308945 - DNA, 300 bp, Artificial Sequence
  derived and/or modified sequence
atggccagccccgactggggctacgacgacaagaacggccccgagcaatggtcaaagttgtaccccatcgctaatgggaataatcaaagccctgtggatataaaaacctctgagaccaagcacgacacatctctgaaacctatctccgtgagctataaccctgccacagccaaagaaatcataaacgtgggacattctttccatgtgaattttgaggacaatgacaatcgtagtgtgttgaaaggggggcccttcagtgacagttatcgtctgttccagtttcactttcactgggggtag

SEQ ID NO: 308946 - DNA, 786 bp, Artificial Sequence
  derived and/or modified sequence
atggccagccccgactggggctacgacgacaagaacggccccgagcaatggtcaaagctttacccgatagctaacgggaacaaccaatcccctgtggatattaagacttccgagacaaaacacgacacgtcactaaaacctatctctgtgtcctacaatccagccacagcaaaggaaatcattaatgttgggcacagctttcacgtgaattttgaagacaacgacaatagaagcgtgctgaaaggaggacctttctctgacagctatcgacttttccaattccactttcactggggttccacaaatgagcacgggtcagagcatactgttgacggagtcaaatatagcgcggagctccacgtagcccattggaactccgccaagtacagtagtctggctgaagccgccagtaaggctgatgggctcgcggtaatcggagtcttgatgaaagttggcgaagccaatcctaaattacagaaggtgcttgatgccctgcaggctatcaagaccaaaggcaagagagccccttttacaaactttgatccctcaactctcctcccgagttccctcgatttttggacctacccgggctccctaactcatccaccactgtatgaatccgtgacttggattatctgcaaagaatccatttctgtgagctccgaacagttagctcagtttcgcagcctgttatctaatgtcgagggcgataacgccgtgcccatgcagcataataatcggcccacacagcctctcaagggccggactgtacgagcgtccttctag

SEQ ID NO: 308947 - DNA, 786 bp, Artificial Sequence
  derived and/or modified sequence
atggccagccccgactggggctacgacgacaagaacggccccgagcagtggagtaagctgtacccgatcgctaacgggaacaaccagtcaccagtggacataaaaacttcagagactaagcatgacacgagtcttaaaccgatctcagtaagctacaatcccgccaccgccaaggagatcattaatgtaggtcactcatttcatgtaaacttcgaagataacgataaccggtctgtcctgaaaggtgggcccttttcagactcgtataggctttttcagtttcactttcactgggggagcacaaatgagcacggatctgagcatacagttgatggcgtcaaatatagcgctgagctgcatgtggcacattggaactccgcgaaatattcctcccttgccgaggcagcctcaaaagccgatggcctcgctgtcattggagtgttaatgaaggtaggtgaggccaacccaaagctgcaaaaggtccttgatgccctgcaggcgattaaaactaagggcaagagagcccctttcacaaattttgacccttcgacactgctgcccagctctctggacttttggacttaccccggttcacttacacacccgcctctttacgaaagcgtgacctggattatctgtaaagagtccatttctgtgagttcagaacagctcgctcagttccgctctctgctgtctaacgtggaaggagataacgctgtacctatgcagcacaacaataggcccacccagccgctgaaaggacgcactgtgcgtgcgagtttctag

SEQ ID NO: 308948 - DNA, 786 bp, Artificial Sequence
  derived and/or modified sequence
atggcttcaccagactgggggtacgacgacaagaatgggccagaacaatggtcaaaattataccccatagcaaacggcaataaccagagccctgtggacatcaaaacctctgaaaccaaacacgacactagcttaaaaccgatttcggtctcatacaaccctgcaactgccaaggagatcattaacgtggggcatagcttccacgtgaattttgaggacaatgacaaccgaagcgtattaaagggtggacccttctctgattcttatcggctctttcagttccactttcattgggggagcaccaatgagcacgggtctgaacatactgtggatggagttaaatattccgcggagctgcacgtggcccattggaattctgcaaagtatagctccttagcagaagcagcttctaaggcagacggattggccgtcataggagtcctcatgaaggtgggggaggccaatccgaaacttcagaaagttctggatgccctgcaggccattaagacaaagggtaaaagagcccctttcactaattttgatccctccactcttctgccctcaagcctcgacttttggacatacccgggatctcttactcatccacccttgtatgaatctgtcacatggatcatttgcaaagagtctatttcagtcagttctgaacagctggcacagtttagatcactgctgagtaacgttgaaggtgataatgccgtcccaatgcagcacaataaccggccaacccaacctctcaagggcagaaccgtgcgggcatcattctag

SEQ ID NO: 308949 - DNA, 786 bp, Artificial Sequence
  derived and/or modified sequence
atggcgtcgccagattgggggtacgacgacaagaacggacctgagcaatggagcaagttgtatccaatcgctaacggaaataatcagagccctgtggatattaaaacctcagaaaccaagcacgatacaagccttaagcccattagtgtaagttataaccctgccaccgcgaaagagatcattaacgtaggtcatagcttccacgtgaactttgaggacaacgacaaccgctcggtcctaaagggtgggcctttctccgattcttataggctgttccagttccatttccattggggatccaccaatgagcatggatccgaacacaccgtagacggagtgaagtatagcgctgaacttcatgtcgcacactggaattctgcgaagtatagctccctggccgaggccgcatcgaaggccgatggattagcagtgattggggtactgatgaaggtgggcgaggccaatcccaagctgcagaaggtccttgatgcgctgcaagccattaagactaaggggaaacgggctcccttcactaatttcgatcccagcacccttctgccctcgtcactggacttctggacctaccccggttctctgacccacccccctttgtatgaaagcgtgacctggataatatgcaaagaaagcatttctgtgtcctccgagcagttagcgcagtttagatctttgctgagcaatgtggagggtgacaacgctgtgcccatgcagcacaataataggccaactcagcctctaaaggggcgaactgtcagagcttctttttag

SEQ ID NO: 308950 - DNA, 786 bp, Artificial Sequence
  derived and/or modified sequence
atggcttctcccgactggggttacgacgataagaatggaccagaacagtggtccaagctttaccccatcgcgaatggcaacaaccagagtcctgttgacattaagacttccgaaaccaagcatgacacatcgctgaagccaatctcagtttcttacaatccagcaacagctaaagagataattaatgtaggccactcctttcatgtgaactttgaagataacgataaccgctcagtgctcaaggggggacccttcagtgattcctatagactatttcagtttcacttccactggggaagcaccaatgaacatgggtctgagcatactgttgatggcgttaaatactctgccgaacttcacgtagcccactggaatagcgcaaaatattccagccttgccgaagctgctagcaaagcggatggcttagccgtgatcggcgttctgatgaaggtcggagaggcgaaccctaagttacagaaggtgctggacgccctgcaagctataaagaccaagggcaagcgggcaccatttaccaatttcgatccctccacgctgctgccatcctccctcgacttttggacgtaccctgggtccctgacccacccccctctgtacgagagcgtgacgtggatcatatgcaaggaatccatatccgtctcttcagaacagcttgcacagttccggtcactattatctaatgtggaaggggacaatgctgttccgatgcagcataacaatcggccaacacagccgctgaaaggacgtacggttcgggcaagcttctag

SEQ ID NO: 308951 - DNA, 531 bp, Artificial Sequence
  derived and/or modified sequence
atggcttcccccgattggggctatgatgacaaaaatggacccgagcagtggtccaagctttaccccatcgctaacggaaacaaccagtcacccgtggacattaaaacctctgaaacaaaacatgacaccagtttaaagccaattagcgtgagttataaccccgctactgccaaggaaattattaacgtaggacacagctttcatgtgaacttcgaagacaatgataacagaagcgtgctcaagggcggaccattttccgatagctatcggctgtttcagttccacttccattggggcagcacaaatgaacacggcagtgagcacactgtggacggggttaagtattcagccgaacttcacgtggctcactggaatagcgcgaaatattcatcattggcggaagccgcatctaaggctgacggactagcagtgattggagtgttaatgaaggtcggcgaggcaaacccgaagctccagaaagtactagacgctttgcaggccattaagaccaagggaaaacgcgctccttag

SEQ ID NO: 308952 - DNA, 756 bp, Artificial Sequence
  derived and/or modified sequence
atggcttcccctgactggggctatgatgataaaaacggacctgagcaatggtctaaactataccccatcgccaatggcaataaccagtcaccggtcgatatcaaaacaagcgagaccaagcacgatacatctcttaagccaatcagcgttagctataaccctgccactgcgaaggagatcattaacgtcgggcactcctttcacgtgaatttcgaggataatgacaacaggtccgtgttgaagggcggtccattctcagactcatatcgtctgtttcaattccacttccactggggaagcactaatgagcatggctctgagcacaccgtcgatggagtaaaatatagtgcagagcttcacgtggctcattggaactccgcaaagtactcatctctggccgaggcggcatccaaggctgatggactggctgtcatcggcgtactgatgaaggtcggcgaggcgaacccaaaacttcagaaggtgttggacgctttgcaggcaataaaaacgaaaggcaagcgcgcaccattcaccaatttcgatccctcaaccctgttgccttctagtctcgatttttggacgtatcctggatccttgactcaccctcccctgtacgaaagcgttacatggatcatttgtaaggagagcattagtgtctcctctgagcaactggcccagttccgctcactcctcagcaacgtggaaggagacaatgcagtgcccatgcagcataacaaccgcccaacacagccatag

SEQ ID NO: 308953 - DNA, 69 bp, Artificial Sequence
  derived and/or modified sequence
atggccagcccggattggggctacgacgataaaaacgggcctgagcagtggagcaagctatacccttag

SEQ ID NO: 308954 - DNA, 450 bp, Artificial Sequence
  derived and/or modified sequence
atggcctcccctgactggggctatgacgacaaaaatggtcccgaacagtggtcgaagctatatccaatcgcgaatggcaacaatcagagcccagtggatatcaagacaagcgaaacaaaacacgacacttccttaaagccgatatctgtgtcgtataatcccgctaccgctaaagaaatcatcaacgtgggccattcattccacgtcaacttcgaggacaacgacaatagatccgttctaaaggggggtcctttctcagattcatatcgactgtttcaattccactttcactgggggagcaccaatgaacatggctctgaacacactgtggatggagttaaatactcagcagagctgcacgtggcccattggaacagcgccaagtacagtagtctcgcagaagcagcaagcaaagccgacgggctggcagtcatcggggtgctgatgtag

SEQ ID NO: 308955 - DNA, 450 bp, Artificial Sequence
  derived and/or modified sequence
atggccagtcccgactgggggtatgatgataaaaacggtcctgagcagtggtctaagctgtatcctattgccaatggaaataaccagtctccagtggatatcaagaccagcgaaacaaaacacgataccagcctgaagccaatctccgtgagctacaaccccgctacggcgaaggaaattattaacgttggtcactcctttcacgtcaatttcgaagataacgacaatagatccgtgttgaaaggcggtcctttctctgatagctaccgcctgttccagtttcactttcattggggctctaccaatgagcatggttcggagcatacagtagacggagtcaaatacagtgctgagttgcacgtggcccattggaattctgccaaatactccagcctggcagaggcagcgtcaaaagcagacggcctggcagtgattggagtcctgatgtag

SEQ ID NO: 308956 - DNA, 357 bp, Artificial Sequence
  derived and/or modified sequence
atggcctcacctgattggggatatgatgataaaaatggccctgagcagtggtcaaagctataccctatcgccaacggcaataatcagtctccagtcgacattaaaaccagcgagaccaagcacgacacctcactaaaacccatcagcgtgtcatacaatccagctacagccaaggagattattaatgtggggcatagcttccacgtgaatttcgaagataatgataaccggtcagtcctgaaggggggaccattctcagatagctacagactcttccagtttcatttccattggggatctaccaatgagcacggctctgagcacaccgtggatggagtcaagtattccgcagagtag

SEQ ID NO: 308957 - DNA, 447 bp, Artificial Sequence
  derived and/or modified sequence
atggcatcccccgattggggatacgacgataagaacggaccggagcagtggtccaagctatacccaattgctaacggaaataaccagagtccagtggatatcaagacatccgagaccaaacacgataccagtctaaaaccaatctctgtgagttataatcccgctactgctaaagagatcattaatgtgggccatagtttccatgtaaactttgaggacaatgataacaggtctgtgttgaaaggcggaccattcagtgatagctatcggctgttccagtttcactttcactggggatctactaacgagcatggaagtgagcacactgtcgatggggtcaagtatagcgccgaactgcacgtggctcattggaactcagctaaatacagttcactggcagaagcagcctctaaggctgacgggctagcggtcatcggcgtgctatag

SEQ ID NO: 308958 - DNA, 786 bp, Artificial Sequence
  derived and/or modified sequence
atggcatcccctgactggggttacgacgacaaaaatggcccagagcagtggtccaagctgtacccaattgccaacggaaacaaccaatcccctgtggacataaaaacatctgaaacaaagcatgatactagccttaagccgatctccgtgtcctataaccctgcaacagccaaagaaatcatcaatgtgggacacagctttcacgttaactttgaggataacgacaaccgatccgttctgaagggaggcccattcagtgacagttaccgactgttccagtttcatttccactgggggtccacgaacgaacacggctctgaacacacagtggacggggttaagtacagcgcggagttgcacgtcgctcactggaatagcgccaaatactcctccttggctgaggccgcttcaaaggcagatggtcttgccgtaataggcgtcttgatgaaggtcggagaggccaatcctaagctgcagaaggtgttggatgccctacaggcgatcaaaaccaagggcaaacgcgcaccatttacaaatttcgaccccagtactcttctgccaagctcgttagatttctggacctaccctggatcgctgactcaccccccactttacgaatccgtcacctggatcatctgcaaggaaagcattagtgtctccagcgagcagctagcccagttccgttccctgctgagcaacgtagaaggagataacgccgtccctatgcagcataataaccggcctactcagcccctgaaaggaaggacagttcgtgccagcttctag

SEQ ID NO: 308959 - DNA, 300 bp, Artificial Sequence
  derived and/or modified sequence
atggcatcccctgactggggctatgatgacaaaaatggccctgagcagtggagtaaattatacccaatagccaacggaaacaaccaaagccccgtggacattaaaacctccgagacaaaacatgacacttcacttaagcccatttcagtgagctataatcccgcaactgccaaggagattatcaacgtggggcactcctttcatgttaatttcgaagataatgacaaccgctcagtgcttaaaggcggacccttttcagatagctacaggctctttcaatttcatttccattggggctag

SEQ ID NO: 308960 - DNA, 786 bp, Artificial Sequence
  derived and/or modified sequence
atggcctcacctgattgggggtacgacgacaaaaacggcccagagcagtggagtaaactctatccgattgcaaacgggaacaaccagtccccggtggatattaagacctctgagaccaagcacgatacttcactcaagcccatatcagtgtcttataaccctgccactgccaaggagattattaacgtcggtcactccttccacgtgaatttcgaagataatgataatcgctccgtgttgaaagggggtcctttctccgattcctatcgacttttccaattccatttccattggggctcaaccaatgagcacggttccgagcacacggttgacggcgtcaaatattccgcggagctacatgtcgcgcactggaatagcgccaaatattctagtttggccgaagcagcatctaaggcagatggattggcggtcattggggtcctcatgaaagtcggagaagctaatcccaagctgcagaaggtgcttgacgctttacaggccatcaaaaccaaaggtaagagggcgccatttacaaactttgacccctctactctgctgccatcaagtctggatttttggacttaccccggatccctcacccatccacctctgtacgagagtgtaacgtggatcatatgcaaggagtctatttccgtcagctcagaacaacttgcgcaattcagaagtttactttcaaacgttgaaggggataatgctgtacctatgcagcacaacaacaggcccacccagccgttgaaaggacggactgtcagagcttctttttag

SEQ ID NO: 308961 - DNA, 786 bp, Artificial Sequence
  derived and/or modified sequence
atggctagtcctgattgggggtacgacgacaagaatggccctgagcagtggtctaaattatacccaattgctaacggcaacaatcagagccccgtggacattaagacctcagagactaaacacgacactagccttaagccaatttcagtgtcatacaatcctgcaacggccaaagaaatcataaatgtgggacattctttccacgtgaacttcgaggacaacgacaacagatccgttcttaaaggtggacccttttctgattcctatcggctattccagtttcacttccactgggggagcacaaacgagcacggctctgagcatactgtggacggcgttaaatactcagcagaactgcacgtagcccattggaactcagccaagtacagcagtctggcggaggctgcgtccaaggccgacggcctggctgttatcggcgtacttatgaaagttggcgaggctaatcctaagctccagaaagtgttggatgcattgcaagccattaagactaaggggaaaagagccccttttaccaactttgatccctctacactcctccctagtagcctggatttttggacataccctgggtccctgacacatccccctctctatgagtcggtgacttggatcatctgtaaggagagtatatcagtctcgtctgagcagctggcccagttcagatccctgctctccaatgtcgagggtgacaacgccgttccgatgcagcacaataataggcctacacagccgctgaagggtagaaccgtcagggcctccttttag

SEQ ID NO: 308962 - DNA, 1195 bp, Artificial Sequence
  derived and/or modified sequence
gttttccacagaggtagtgaaaagaactggattttcaagttcactttgcaagagaaaaagaaaactcagtagaagataatggcaagtccagactggggatatgatgacaaaaatggtcctgaacaatggagcaagctgtatcccattgccaatggaaataaccagtcccctgttgatattaaaaccagtgaaaccaaacatgacacctctctgaaacctattagtgtctcctacaacccagccacagccaaagaaattatcaatgtggggcattccttccatgtaaattttgaggacaacgataaccgatcagtgctgaaaggtggtcctttctctgacagctacaggctctttcagttccattttcactggggcagtacaaatgagcatggttcagaacatacagtggatggagtcaaatattctgccgagcttcacgtagctcactggaattctgcaaagtactccagccttgctgaagctgcctcaaaggctgatggtttggcagttattggtgttttgatgaaggttggtgaggccaacccaaagctgcagaaagtacttgatgccctccaagcaattaaaaccaagggcaaacgagccccattcacaaattttgacccctctactctccttccttcatccctggatttctggacctaccctggctctctgactcatcctcctctttatgagagtgtaacttggatcatctgtaaggagagcatcagtgtcagctcagagcagctggcacaattccgcagccttctatcaaatgttgaaggtgataacgctgtccccatgcagcacaacaaccgcccaacccaacctctgaagggcagaacagtgagagcttcattttgatgattctgagaagaaacttgtccttcctcaagaacacagccctgcttctgacataatccagtaaaataataatttttaagaaataaatttatttcaatattagcaagacagcatgccttcaaatcaatctgtaaaactaagaaacttaaattttagttcttactgcttaattcaaataataattagtaagctagcaaatagtaatctgtaagcataagcttatgcttaaattcaagtttagtttgaggaattctttaaaattacaactaagtgatttgtatgtctatttttttcagtttatttgaaccaataaaataattttatctctttc

SEQ ID NO: 308963 - DNA, 1232 bp, Artificial Sequence
  derived and/or modified sequence
ctcctccctattctagaaatagaagggaggaggacctattttgttccatcctgtaggctgatcctttacacctaggactggaagaaataagaaaaagaaaactcagtagaagataatggcaagtccagactggggatatgatgacaaaaatggtcctgaacaatggagcaagctgtatcccattgccaatggaaataaccagtcccctgttgatattaaaaccagtgaaaccaaacatgacacctctctgaaacctattagtgtctcctacaacccagccacagccaaagaaattatcaatgtggggcattccttccatgtaaattttgaggacaacgataaccgatcagtgctgaaaggtggtcctttctctgacagctacaggctctttcagttccattttcactggggcagtacaaatgagcatggttcagaacatacagtggatggagtcaaatattctgccgagcttcacgtagctcactggaattctgcaaagtactccagccttgctgaagctgcctcaaaggctgatggtttggcagttattggtgttttgatgaaggttggtgaggccaacccaaagctgcagaaagtacttgatgccctccaagcaattaaaaccaagggcaaacgagccccattcacaaattttgacccctctactctccttccttcatccctggatttctggacctaccctggctctctgactcatcctcctctttatgagagtgtaacttggatcatctgtaaggagagcatcagtgtcagctcagagcagctggcacaattccgcagccttctatcaaatgttgaaggtgataacgctgtccccatgcagcacaacaaccgcccaacccaacctctgaagggcagaacagtgagagcttcattttgatgattctgagaagaaacttgtccttcctcaagaacacagccctgcttctgacataatccagtaaaataataatttttaagaaataaatttatttcaatattagcaagacagcatgccttcaaatcaatctgtaaaactaagaaacttaaattttagttcttactgcttaattcaaataataattagtaagctagcaaatagtaatctgtaagcataagcttatgcttaaattcaagtttagtttgaggaattctttaaaattacaactaagtgatttgtatgtctatttttttcagtttatttgaaccaataaaataattttatctctttc

SEQ ID NO: 308964 - DNA, 1196 bp, Artificial Sequence
  derived and/or modified sequence
atctcctgcatgcacagttgcagttagttattccaggtattatttttgttttcagaaaaagaaaactcagtagaagataatggcaagtccagactggggatatgatgacaaaaatggtcctgaacaatggagcaagctgtatcccattgccaatggaaataaccagtcccctgttgatattaaaaccagtgaaaccaaacatgacacctctctgaaacctattagtgtctcctacaacccagccacagccaaagaaattatcaatgtggggcattccttccatgtaaattttgaggacaacgataaccgatcagtgctgaaaggtggtcctttctctgacagctacaggctctttcagttccattttcactggggcagtacaaatgagcatggttcagaacatacagtggatggagtcaaatattctgccgagcttcacgtagctcactggaattctgcaaagtactccagccttgctgaagctgcctcaaaggctgatggtttggcagttattggtgttttgatgaaggttggtgaggccaacccaaagctgcagaaagtacttgatgccctccaagcaattaaaaccaagggcaaacgagccccattcacaaattttgacccctctactctccttccttcatccctggatttctggacctaccctggctctctgactcatcctcctctttatgagagtgtaacttggatcatctgtaaggagagcatcagtgtcagctcagagcagctggcacaattccgcagccttctatcaaatgttgaaggtgataacgctgtccccatgcagcacaacaaccgcccaacccaacctctgaagggcagaacagtgagagcttcattttgatgattctgagaagaaacttgtccttcctcaagaacacagccctgcttctgacataatccagtaaaataataatttttaagaaataaatttatttcaatattagcaagacagcatgccttcaaatcaatctgtaaaactaagaaacttaaattttagttcttactgcttaattcaaataataattagtaagctagcaaatagtaatctgtaagcataagcttatgcttaaattcaagtttagtttgaggaattctttaaaattacaactaagtgatttgtatgtctatttttttcagtttatttgaaccaataaaataattttatctctttc

SEQ ID NO: 308965 - DNA, 696 bp, Artificial Sequence
  derived and/or modified sequence
gtggtacccagtcctcaggtgcaaccccctgcgtggtcctctgtggcagccttctctcattcagagctgggttgcagcagctcagacaatccttaccatgtgaaaggaggaatgactgtcatggcatgaaaaaagcatcactatgaaaaagaaaactcagtagaagataatggcaagtccagactggggatatgatgacaaaaatggtcctgaacaatggagcaagctgtatcccattgccaatggaaataaccagtcccctgttgatattaaaaccagtgaaaccaaacatgacacctctctgaaacctattagtgtctcctacaacccagccacagccaaagaaattatcaatgtggggcattccttccatgtaaattttgaggacaacgataaccgatcagtgctgaaaggtggtcctttctctgacagctacaggctctttcagttccattttcactggggcagtacaaatgagcatggttcagaacatacagtggatggagtcaaatattctgccgagcttcacgtagctcactggaattctgcaaagtactccagccttgctgaagctgcctcaaaggctgatggtttggcagttattggtgttttgatgaaggttggtgaggccaacccaaagctgcagaaagtacttgatgccctccaagcaattaaaaccaagggcaaacgagcccc

SEQ ID NO: 308966 - DNA, 832 bp, Artificial Sequence
  derived and/or modified sequence
atctcctgcatgcacagttgcagttagttattccaggtattatttttgttttcagaaaaagaaaactcagtagaagataatggcaagtccagactggggatatgatgacaaaaatggtcctgaacaatggagcaagctgtatcccattgccaatggaaataaccagtcccctgttgatattaaaaccagtgaaaccaaacatgacacctctctgaaacctattagtgtctcctacaacccagccacagccaaagaaattatcaatgtggggcattccttccatgtaaattttgaggacaacgataaccgatcagtgctgaaaggtggtcctttctctgacagctacaggctctttcagttccattttcactggggcagtacaaatgagcatggttcagaacatacagtggatggagtcaaatattctgccgagcttcacgtagctcactggaattctgcaaagtactccagccttgctgaagctgcctcaaaggctgatggtttggcagttattggtgttttgatgaaggttggtgaggccaacccaaagctgcagaaagtacttgatgccctccaagcaattaaaaccaagggcaaacgagccccattcacaaattttgacccctctactctccttccttcatccctggatttctggacctaccctggctctctgactcatcctcctctttatgagagtgtaacttggatcatctgtaaggagagcatcagtgtcagctcagagcagctggcacaattccgcagccttctatcaaatgttgaaggtgataacgctgtccccatgcagcacaacaaccgcccaacccaacct

SEQ ID NO: 308967 - DNA, 491 bp, Artificial Sequence
  derived and/or modified sequence
gtggtacccagtcctcaggtgcaaccccctgcgtggtcctctgtggcagccttctctcattcagagctgttttccacagaggtagtgaaaagaactggattttcaagttcactttgcaagagaaatagaagggaggaggacctattttgttccatcctgtaggctgatcctttacacctaggactggaagaaataagaaacagagtatcactatgtggcccaagctggtctggacctcctaggtgcaagagatcctcccacctcagcctaaaacacagattttaatgcccaattttgttataataagaattaaataagttaatgggttgcagcagctcagacaatccttaccatgtgaaaggaggaatgactgtcatggcatgaaaaaagcatcactatgaaaaagaaaactcagtagaagataatggcaagtccagactggggatatgatgacaaaaatggtcctgaacaatggagcaagctgtatccca

SEQ ID NO: 308968 - DNA, 666 bp, Artificial Sequence
  derived and/or modified sequence
acccagtcctcaggtgcaaccccctgcgtggtcctctgtggcagccttctctcattcagagctgttttccacagaggtagtgaaaagaactggattttcaagttcactttgcaagaggggttgcagcagctcagacaatccttaccatgtgaaaggaggaatgactgtcatggcatgaaaaaagcatcactatgaaaaagaaaactcagtagaagataatggcaagtccagactggggatatgatgacaaaaatggtcctgaacaatggagcaagctgtatcccattgccaatggaaataaccagtcccctgttgatattaaaaccagtgaaaccaaacatgacacctctctgaaacctattagtgtctcctacaacccagccacagccaaagaaattatcaatgtggggcattccttccatgtaaattttgaggacaacgataaccgatcagtgctgaaaggtggtcctttctctgacagctacaggctctttcagttccattttcactggggcagtacaaatgagcatggttcagaacatacagtggatggagtcaaatattctgccgagcttcacgtagctcactggaattctgcaaagtactccagccttgctgaagctgcctcaaaggctgatggtttggcagttattggtgttttgatga

SEQ ID NO: 308969 - DNA, 614 bp, Artificial Sequence
  derived and/or modified sequence
gtggtacccagtcctcaggtgcaaccccctgcgtggtcctctgtggcagccttctctcattcagagctaaatagaagggaggaggacctattttgttccatcctgtaggctgatcctttacacctaggactggaagaaataagaaaaagaaaactcagtagaagataatggcaagtccagactggggatatgatgacaaaaatggtcctgaacaatggagcaagctgtatcccattgccaatggaaataaccagtcccctgttgatattaaaaccagtgaaaccaaacatgacacctctctgaaacctattagtgtctcctacaacccagccacagccaaagaaattatcaatgtggggcattccttccatgtaaattttgaggacaacgataaccgatcagtgctgaaaggtggtcctttctctgacagctacaggctctttcagttccattttcactggggcagtacaaatgagcatggttcagaacatacagtggatggagtcaaatattctgccgagcttcacgtagctcactggaattctgcaaagtactccagccttgctgaagctgcctcaaaggctgatggtttggcagttattggtgttttgatg

SEQ ID NO: 308970 - DNA, 501 bp, Artificial Sequence
  derived and/or modified sequence
gtggtacccagtcctcaggtgcaaccccctgcgtggtcctctgtggcagccttctctcattcagagctatatgtgtacttcctgataagcagagatgatgaaataatggcctattaaaagcaaaaaaagaaaactcagtagaagataatggcaagtccagactggggatatgatgacaaaaatggtcctgaacaatggagcaagctgtatcccattgccaatggaaataaccagtcccctgttgatattaaaaccagtgaaaccaaacatgacacctctctgaaacctattagtgtctcctacaacccagccacagccaaagaaattatcaatgtggggcattccttccatgtaaattttgaggacaacgataaccgatcagtgctgaaaggtggtcctttctctgacagctacaggctctttcagttccattttcactggggcagtacaaatgagcatggttcagaacatacagtggatggagtcaaatattctgccgag

SEQ ID NO: 308971 - DNA, 618 bp, Artificial Sequence
  derived and/or modified sequence
gtggtacccagtcctcaggtgcaaccccctgcgtggtcctctgtggcagccttctctcattcagagctaattttttacaacaccttttttttagatatgtgtacttcctgataagcagagatgatgaaataatggcctattaaaagcaaaaaaagaaaactcagtagaagataatggcaagtccagactggggatatgatgacaaaaatggtcctgaacaatggagcaagctgtatcccattgccaatggaaataaccagtcccctgttgatattaaaaccagtgaaaccaaacatgacacctctctgaaacctattagtgtctcctacaacccagccacagccaaagaaattatcaatgtggggcattccttccatgtaaattttgaggacaacgataaccgatcagtgctgaaaggtggtcctttctctgacagctacaggctctttcagttccattttcactggggcagtacaaatgagcatggttcagaacatacagtggatggagtcaaatattctgccgagcttcacgtagctcactggaattctgcaaagtactccagccttgctgaagctgcctcaaaggctgatggtttggcagttattggtgttttga

SEQ ID NO: 308972 - DNA, 1208 bp, Artificial Sequence
  derived and/or modified sequence
gtggtacccagtcctcaggtgcaaccccctgcgtggtcctctgtggcagccttctctcattcagagctaaaaagaaaactcagtagaagataatggcaagtccagactggggatatgatgacaaaaatggtcctgaacaatggagcaagctgtatcccattgccaatggaaataaccagtcccctgttgatattaaaaccagtgaaaccaaacatgacacctctctgaaacctattagtgtctcctacaacccagccacagccaaagaaattatcaatgtggggcattccttccatgtaaattttgaggacaacgataaccgatcagtgctgaaaggtggtcctttctctgacagctacaggctctttcagttccattttcactggggcagtacaaatgagcatggttcagaacatacagtggatggagtcaaatattctgccgagcttcacgtagctcactggaattctgcaaagtactccagccttgctgaagctgcctcaaaggctgatggtttggcagttattggtgttttgatgaaggttggtgaggccaacccaaagctgcagaaagtacttgatgccctccaagcaattaaaaccaagggcaaacgagccccattcacaaattttgacccctctactctccttccttcatccctggatttctggacctaccctggctctctgactcatcctcctctttatgagagtgtaacttggatcatctgtaaggagagcatcagtgtcagctcagagcagctggcacaattccgcagccttctatcaaatgttgaaggtgataacgctgtccccatgcagcacaacaaccgcccaacccaacctctgaagggcagaacagtgagagcttcattttgatgattctgagaagaaacttgtccttcctcaagaacacagccctgcttctgacataatccagtaaaataataatttttaagaaataaatttatttcaatattagcaagacagcatgccttcaaatcaatctgtaaaactaagaaacttaaattttagttcttactgcttaattcaaataataattagtaagctagcaaatagtaatctgtaagcataagcttatgcttaaattcaagtttagtttgaggaattctttaaaattacaactaagtgatttgtatgtctatttttttcagtttatttgaaccaataaaataattttatctcttt

SEQ ID NO: 308973 - DNA, 518 bp, Artificial Sequence
  derived and/or modified sequence
gtggtacccagtcctcaggtgcaaccccctgcgtggtcctctgtggcagccttctctcattcagagctgttttccacagaggtagtgaaaagaactggattttcaagttcactttgcaagagaaatagaagggaggaggacctattttgttccatcctgtaggctgatcctttacacctaggactggaagaaataagaaaaagaaaactcagtagaagataatggcaagtccagactggggatatgatgacaaaaatggtcctgaacaatggagcaagctgtatcccattgccaatggaaataaccagtcccctgttgatattaaaaccagtgaaaccaaacatgacacctctctgaaacctattagtgtctcctacaacccagccacagccaaagaaattatcaatgtggggcattccttccatgtaaattttgaggacaacgataaccgatcagtgctgaaaggtggtcctttctctgacagctacaggctctttcagttccattttcactggggc

SEQ ID NO: 308974 - DNA, 2785 bp, Artificial Sequence
  derived and/or modified sequence
ctttagcccaacagtcaaaaataattgatgctaccctacaaatgtccaaaactctagtatatcatatttctaagttacagcaaatattagtcctgctaaaccagggagctttggcaaaaatgttttttgacagtaaatttgtccttgattatatattaactagtcaaagaggtgtttgtaacattattagagcttcttgttgtaggtgggttaacaccaccaatcaagaggtcattctaacagaaagcctggatcagaaaaccatcaccctaaaaaaacatgccttacatatttaacacactctgaaatccagtcaaaatatgactaaaggcccttgccatgactgatgtattctcctggccaacgccaaacaaatgggagcctggttacgagtcagccttcagggacttgtcacatttctacttggtttcttccttgttattgtcataataaaatgttttctatgctgtttagtgcaacttaggccctattctgtagaagtctcctctactattcaggccactcaaacaccccaaataattgagttcaaaatcgacatcaagatataaaggaatcagtgactaaatatatttcatatatggtatttttattgattattgtgctgtcttgacctagtatggaggccttggctagaggctggtcagtttcctctcttgagcagctgattaaatccacaccccaaccacttcccttatcaggttctcacactctggggccactatgtacccactctaatcaccacagggccagacatcagacaattaaggacagcgcccatgccccaaagcccgccaaaattatgcaaattattcaaaattattcaacctagctaaccccaccctttttgctgtacataagctgcccattccccctccagcctgtggtacccagtcctcaggtgcaaccccctgcgtggtcctctgtggcagccttctctcattcagagctgttttccacagaggtagtgaaaagaactggattttcaagttcactttgcaagagaaaaagaaaactcagtagaagataatggcaagtccagactggggatatgatgacaaaaatggtcctgaacaatggagcaagctgtatcccattgccaatggaaataaccagtcccctgttgatattaaaaccagtgaaaccaaacatgacacctctctgaaacctattagtgtctcctacaacccagccacagccaaagaaattatcaatgtggggcattccttccatgtaaattttgaggacaacgataaccgatcagtgctgaaaggtggtcctttctctgacagctacaggctctttcagttccattttcactggggcagtacaaatgagcatggttcagaacatacagtggatggagtcaaatattctgccgagcttcacgtagctcactggaattctgcaaagtactccagccttgctgaagctgcctcaaaggctgatggtttggcagttattggtgttttgatgaaggttggtgaggccaacccaaagctgcagaaagtacttgatgccctccaagcaattaaaaccaagggcaaacgagccccattcacaaattttgacccctctactctccttccttcatccctggatttctggacctaccctggctctctgactcatcctcctctttatgagagtgtaacttggatcatctgtaaggagagcatcagtgtcagctcagagcagctggcacaattccgcagccttctatcaaatgttgaaggtgataacgctgtccccatgcagcacaacaaccgcccaacccaacctctgaagggcagaacagtgagagcttcattttgatgattctgagaagaaacttgtccttcctcaagaacacagccctgcttctgacataatccagtaaaataataatttttaagaaataaatttatttcaatattagcaagacagcatgccttcaaatcaatctgtaaaactaagaaacttaaattttagttcttactgcttaattcaaataataattagtaagctagcaaatagtaatctgtaagcataagcttatgcttaaattcaagtttagtttgaggaattctttaaaattacaactaagtgatttgtatgtctatttttttcagtttatttgaaccaataaaataattttatctctttctttctgttgtgcattcagtttctaaaaccattaagtttctactccatttacattcaaaaatcttaaatactttacttgcaagagtattttgcttcaaatacaacaacctaagagcagctggagatgaaatattgggaaattcatttgcttactcctgaagacaaaaatatagctgagatgaccactggatttaatatcgttatgctggcccaacattgctaccatttgtgttgtctgtgatcaaaatgattatcttttatataggaagatgacgcttctggatattgctttcacttcttctccccacgttagcaaggacaatgcttctctgccattattacaactagttagtttgcatggagaatctttactttaaaattggaagaaaagtcacaagtgaatggtttataaaaatgctaaagaagtcattcttgcttagaatcatatagaaacatcatgcaatcttttagtcagatgtgcgcttcaccttatgctatttttatctttaattgacacacaataattgtacatgtttatggagtatagtgtggtgttttctgtttgtttgtttgttttttgagacaaggtctcactctgccagtcagggtggagtgcgatggt

SEQ ID NO: 308975 - DNA, 1236 bp, Artificial Sequence
  derived and/or modified sequence
atccctctcttctttcaggggttgcagcagctcagacaatccttaccatgtgaaaggaggaatgactgtcatggcatgaaaaaagcatcactatgaaaaagaaaactcagtagaagataatggcaagtccagactggggatatgatgacaaaaatggtcctgaacaatggagcaagctgtatcccattgccaatggaaataaccagtcccctgttgatattaaaaccagtgaaaccaaacatgacacctctctgaaacctattagtgtctcctacaacccagccacagccaaagaaattatcaatgtggggcattccttccatgtaaattttgaggacaacgataaccgatcagtgctgaaaggtggtcctttctctgacagctacaggctctttcagttccattttcactggggcagtacaaatgagcatggttcagaacatacagtggatggagtcaaatattctgccgagcttcacgtagctcactggaattctgcaaagtactccagccttgctgaagctgcctcaaaggctgatggtttggcagttattggtgttttgatgaaggttggtgaggccaacccaaagctgcagaaagtacttgatgccctccaagcaattaaaaccaagggcaaacgagccccattcacaaattttgacccctctactctccttccttcatccctggatttctggacctaccctggctctctgactcatcctcctctttatgagagtgtaacttggatcatctgtaaggagagcatcagtgtcagctcagagcagctggcacaattccgcagccttctatcaaatgttgaaggtgataacgctgtccccatgcagcacaacaaccgcccaacccaacctctgaagggcagaacagtgagagcttcattttgatgattctgagaagaaacttgtccttcctcaagaacacagccctgcttctgacataatccagtaaaataataatttttaagaaataaatttatttcaatattagcaagacagcatgccttcaaatcaatctgtaaaactaagaaacttaaattttagttcttactgcttaattcaaataataattagtaagctagcaaatagtaatctgtaagcataagcttatgcttaaattcaagtttagtttgaggaattctttaaaattacaactaagtgatttgtatgtctatttttttcagtttatttgaaccaataaaataattttatctctttc

SEQ ID NO: 308976 - DNA, 786 bp, Artificial Sequence
  derived and/or modified sequence
atggccagccccgactggggctacgacgacaagaacggccccgagcagtggagcaagctgtaccccatcgccaacggcaacaaccagagccccgtggacatcaagaccagcgagaccaagcacgacaccagcctgaagcccatcagcgtgagctacaaccccgccaccgccaaggagatcatcaacgtgggccacagcttccacgtgaacttcgaggacaacgacaacagaagcgtgctgaagggcggccccttcagcgacagctacagactgttccagttccacttccactggggcagcaccaacgagcacggcagcgagcacaccgtggacggcgtgaagtacagcgccgagctgcacgtggcccactggaacagcgccaagtacagcagcctggccgaggccgccagcaaggccgacggcctggccgtgatcggcgtgctgatgaaggtgggcgaggccaaccccaagctgcagaaggtgctggacgccctgcaggccatcaagaccaagggcaagagagcccccttcaccaacttcgaccccagcaccctgctgcccagcagcctggacttctggacctaccccggcagcctgacccacccccccctgtacgagagcgtgacctggatcatctgcaaggagagcatcagcgtgagcagcgagcagctggcccagttcagaagcctgctgagcaacgtggagggcgacaacgccgtgcccatgcagcacaacaacagacccacccagcccctgaagggcagaaccgtgagagccagcttctag

SEQ ID NO: 308977 - DNA, 531 bp, Artificial Sequence
  derived and/or modified sequence
atggccagccccgactggggctacgacgacaagaacggccccgagcagtggagcaagctgtaccccatcgccaacggcaacaaccagagccccgtggacatcaagaccagcgagaccaagcacgacaccagcctgaagcccatcagcgtgagctacaaccccgccaccgccaaggagatcatcaacgtgggccacagcttccacgtgaacttcgaggacaacgacaacagaagcgtgctgaagggcggccccttcagcgacagctacagactgttccagttccacttccactggggcagcaccaacgagcacggcagcgagcacaccgtggacggcgtgaagtacagcgccgagctgcacgtggcccactggaacagcgccaagtacagcagcctggccgaggccgccagcaaggccgacggcctggccgtgatcggcgtgctgatgaaggtgggcgaggccaaccccaagctgcagaaggtgctggacgccctgcaggccatcaagaccaagggcaagagagccccctag

SEQ ID NO: 308978 - DNA, 756 bp, Artificial Sequence
  derived and/or modified sequence
atggccagccccgactggggctacgacgacaagaacggccccgagcagtggagcaagctgtaccccatcgccaacggcaacaaccagagccccgtggacatcaagaccagcgagaccaagcacgacaccagcctgaagcccatcagcgtgagctacaaccccgccaccgccaaggagatcatcaacgtgggccacagcttccacgtgaacttcgaggacaacgacaacagaagcgtgctgaagggcggccccttcagcgacagctacagactgttccagttccacttccactggggcagcaccaacgagcacggcagcgagcacaccgtggacggcgtgaagtacagcgccgagctgcacgtggcccactggaacagcgccaagtacagcagcctggccgaggccgccagcaaggccgacggcctggccgtgatcggcgtgctgatgaaggtgggcgaggccaaccccaagctgcagaaggtgctggacgccctgcaggccatcaagaccaagggcaagagagcccccttcaccaacttcgaccccagcaccctgctgcccagcagcctggacttctggacctaccccggcagcctgacccacccccccctgtacgagagcgtgacctggatcatctgcaaggagagcatcagcgtgagcagcgagcagctggcccagttcagaagcctgctgagcaacgtggagggcgacaacgccgtgcccatgcagcacaacaacagacccacccagccctag

SEQ ID NO: 308979 - DNA, 69 bp, Artificial Sequence
  derived and/or modified sequence
atggccagccccgactggggctacgacgacaagaacggccccgagcagtggagcaagctgtacccctag

SEQ ID NO: 308980 - DNA, 450 bp, Artificial Sequence
  derived and/or modified sequence
atggccagccccgactggggctacgacgacaagaacggccccgagcagtggagcaagctgtaccccatcgccaacggcaacaaccagagccccgtggacatcaagaccagcgagaccaagcacgacaccagcctgaagcccatcagcgtgagctacaaccccgccaccgccaaggagatcatcaacgtgggccacagcttccacgtgaacttcgaggacaacgacaacagaagcgtgctgaagggcggccccttcagcgacagctacagactgttccagttccacttccactggggcagcaccaacgagcacggcagcgagcacaccgtggacggcgtgaagtacagcgccgagctgcacgtggcccactggaacagcgccaagtacagcagcctggccgaggccgccagcaaggccgacggcctggccgtgatcggcgtgctgatgtag

SEQ ID NO: 308981 - DNA, 357 bp, Artificial Sequence
  derived and/or modified sequence
atggccagccccgactggggctacgacgacaagaacggccccgagcagtggagcaagctgtaccccatcgccaacggcaacaaccagagccccgtggacatcaagaccagcgagaccaagcacgacaccagcctgaagcccatcagcgtgagctacaaccccgccaccgccaaggagatcatcaacgtgggccacagcttccacgtgaacttcgaggacaacgacaacagaagcgtgctgaagggcggccccttcagcgacagctacagactgttccagttccacttccactggggcagcaccaacgagcacggcagcgagcacaccgtggacggcgtgaagtacagcgccgagtag

SEQ ID NO: 308982 - DNA, 447 bp, Artificial Sequence
  derived and/or modified sequence
atggccagccccgactggggctacgacgacaagaacggccccgagcagtggagcaagctgtaccccatcgccaacggcaacaaccagagccccgtggacatcaagaccagcgagaccaagcacgacaccagcctgaagcccatcagcgtgagctacaaccccgccaccgccaaggagatcatcaacgtgggccacagcttccacgtgaacttcgaggacaacgacaacagaagcgtgctgaagggcggccccttcagcgacagctacagactgttccagttccacttccactggggcagcaccaacgagcacggcagcgagcacaccgtggacggcgtgaagtacagcgccgagctgcacgtggcccactggaacagcgccaagtacagcagcctggccgaggccgccagcaaggccgacggcctggccgtgatcggcgtgctgtag

SEQ ID NO: 308983 - DNA, 300 bp, Artificial Sequence
  derived and/or modified sequence
atggccagccccgactggggctacgacgacaagaacggccccgagcagtggagcaagctgtaccccatcgccaacggcaacaaccagagccccgtggacatcaagaccagcgagaccaagcacgacaccagcctgaagcccatcagcgtgagctacaaccccgccaccgccaaggagatcatcaacgtgggccacagcttccacgtgaacttcgaggacaacgacaacagaagcgtgctgaagggcggccccttcagcgacagctacagactgttccagttccacttccactggggctag

SEQ ID NO: 308984 - protein, 211 aa, Artificial Sequence
  derived and/or modified sequence
MNRKKLQKLTDTLTKNCKHFNKFEVNCLIKLFYDLVGGVERQGLVVGLDRNAFRNILHVTFGMTDDMIMDRVFRGFDKDNDGCVNVLEWIHGLSLFLRGSLEEKMKYCFEVFDLNGDGFISKEEMFHMLKNSLLKQPSEEDPDEGIKDLVEITLKKMDHDHDGKLSFADYELAVREETLLLEAFGPCLPDPKSQMEFEAQVFKDPNEFNDM

SEQ ID NO: 308985 - protein, 129 aa, Artificial Sequence
  derived and/or modified sequence
  misc_feature (1)..(1): Xaa can be any naturally occurring amino acid
XVNVLEWIHGLSLFLRGSLEEKMKYCFEVFDLNGDGFISKEEMFHMLKNSLLKQPSEEDPDEGIKDLVEITLKKMDHDHDGKLSFADYELAVREETLLLEAFGPCLPDPKSQMEFEAQVFKDPNEFNDM

SEQ ID NO: 308986 - DNA, 636 bp, Artificial Sequence
  derived and/or modified sequence
atgaacagaaagaagctgcagaagctgaccgacaccctgaccaagaactgcaagcacttcaacaagttcgaggtgaactgcctgatcaagctgttctacgacctggtgggcggcgtggagagacagggcctggtggtgggcctggacagaaacgccttcagaaacatcctgcacgtgaccttcggcatgaccgacgacatgatcatggacagagtgttcagaggcttcgacaaggacaacgacggctgcgtgaacgtgctggagtggatccacggcctgagcctgttcctgagaggcagcctggaggagaagatgaagtactgcttcgaggtgttcgacctgaacggcgacggcttcatcagcaaggaggagatgttccacatgctgaagaacagcctgctgaagcagcccagcgaggaggaccccgacgagggcatcaaggacctggtggagatcaccctgaagaagatggaccacgaccacgacggcaagctgagcttcgccgactacgagctggccgtgagagaggagaccctgctgctggaggccttcggcccctgcctgcccgaccccaagagccagatggagttcgaggcccaggtgttcaaggaccccaacgagttcaacgacatgtag

SEQ ID NO: 308987 - DNA, 636 bp, Artificial Sequence
  derived and/or modified sequence
atgaaccggaagaaactgcagaagctcaccgacaccttgaccaagaattgcaagcatttcaataagttcgaagttaattgcctgatcaaattgttctatgacctggtcggtggcgttgaacggcaaggccttgtggtagggctcgatcgcaacgccttccggaatatactccatgtgacctttggtatgacggacgatatgatcatggacagggtctttcgtggatttgacaaggataatgatggctgtgtgaacgtgctggagtggatacatggcctctctttgtttctcagaggaagtcttgaagagaaaatgaagtattgtttcgaagtgtttgatctgaacggggatgggttcatcagcaaggaagagatgtttcatatgctgaagaattccttgctgaagcagcctagtgaagaagatcctgatgaagggatcaaggatctggtggagattacgcttaagaagatggaccacgaccacgacggcaagctctcctttgcagattatgaattagccgtcagagaagagacactgctattggaggccttcggcccctgtctccctgatcctaagtcccaaatggagttcgaggctcaggtctttaaagatcctaacgaattcaacgatatgtag

SEQ ID NO: 308988 - DNA, 636 bp, Artificial Sequence
  derived and/or modified sequence
atgaatcgcaagaagctgcagaagctcaccgataccttaaccaagaactgcaaacatttcaacaaatttgaagtgaattgtctgattaaactgttctatgatttagtaggtggggttgaacgccaggggctggttgtgggactggatcggaatgccttccgcaacattctccatgtgacatttggcatgactgatgacatgatcatggatcgagtgtttagaggtttcgacaaagacaacgatggatgcgtcaatgtattggagtggatccatggtctatccctgtttctaaggggttcacttgaggaaaagatgaagtactgctttgaggtgttcgacctcaatggagacggcttcatttcaaaggaggagatgttccatatgctcaagaacagcctcctgaagcagccctccgaggaagaccccgatgagggaatcaaggatctggtagaaatcaccctcaaaaaaatggatcacgatcacgatggcaaactctcttttgcggattatgagctggcagtgagggaggagacccttcttctggaagcttttggcccctgtttgcctgatccgaaaagtcaaatggagtttgaagcacaagtcttcaaggaccccaacgaattcaacgatatgtag

SEQ ID NO: 308989 - DNA, 2051 bp, Artificial Sequence
  derived and/or modified sequence
ggctcgcgggggtcccgcgagggtctcggtagccgcgcgcccagagacccccgccgcggcccgattctctgagcgccagacatgaaccgcaagaaactgcagaagctgacggacaccttaaccaaaaattgcaagcattttaataaatttgaagtgaactgtcttataaagcttttttatgacttggtgggaggagtagagaggcaaggtctggttgttggactggatcgtaatgcatttcgaaacatcctgcatgtgacatttggaatgacagatgacatgattatggacagagtattccgaggttttgataaagataatgatggctgtgtaaatgtattggagtggattcatggattatcactgtttcttcgaggatctttggaagaaaaaatgaaatattgctttgaagtgtttgatttgaatggtgacggattcatttcaaaggaggaaatgtttcacatgttgaagaacagccttctcaaacagccatctgaggaagaccctgatgaaggaattaaagatttggttgaaataacactgaagaaaatggatcatgaccatgatgggaagctgtcttttgcagactatgaactggctgtgagagaagagactcttctactggaggcctttgggccatgtcttcctgatccaaagagccagatggaatttgaagctcaagtattcaaagatccaaatgaattcaatgatatgtgaataactaaatgtctatattgtctcaagtgagtaaaaaaggaggcacacacatattgcttattttttctacttagttcagaaaaatgatgttgaattgtgtgtttcagggtgaagatgaggttcacttacatatatcatttaacatcagtgtaagatgcaattaaaatagatggaagacaagaagtcccttattagatgatgggtttggcaagacagttaacttttctacagatgttttatcacatagactatctgtcgaagcacataactggcataaaacctttgggttcattaaatgaatagagagattacataattatgaattgttaatacaaatattctgcatgtcaaaaagaagctgggtgtacactgaaaaatcattgaaactactggatttcctttgaaacaaataatgaagatggcatcaaaagaataagagtattctattgagcattgaaacgcctttctggtaggcattgagggagatctagagagatgaaagatacatggaaatcatattatattgaaatataatatgatttgcattattgtttgaggctttggctaaataacgttactgattgtaagcacctgaaggcaagggttttatccaccacatctttgtctgccatagcatttagtcctctgcatacaatgggctgtccataattactgtagattggactgaaaatcaaaaagtaccacaagataaatgcaaactcttggtgagcagagggagaacatgtactgagtttcttaggtttcatggctaatgcattggcacagctttcagtgtatccctgcagtccttccagatagtccctgccccatgcattgcagatggttgccaaagcccccctctgtcctggcacccagtgttcctccatcctgactccacgtattgcccccttgccactgcctgagtgcaccatagtgtccccatccccccactgcctggagttccccttgtgtacccccttatcagggcacgacctaactgtgccctgctggctgtgacctcctgaagacagacctggcttctccctgcatccagttccccagtatgtgctgtgggcatcctgagaagcctgaaaaagacagggccaggttaggcttgggtgagctgctttctgccttcttggtacacacagtaagcagtggagaggcgtgttacaccgtatctgttctatcctcatctaaatactgagaggctagttgggatagtaaatctttcttactacatatgcattaagtttaagtaaaatagaatattgtgtgaaaaaatgcactgttactaataaatggaataaacagatccatgaaataaaagaaaa

SEQ ID NO: 308990 - DNA, 1868 bp, Artificial Sequence
  derived and/or modified sequence
ctgagcgccagacatgaaccgcaagaaactgcagaagctgacggacaccttaaccaaaaattgcaagcattttaataaatttgaagtgaactgtcttataaagcttttttatgacttggtgggaggagtagagaggcaaggtctggttgttggactggatcgtaatgcatttcgaaacatcctgcatgtgacatttggaatgacagatgacatgattatggacagagtattccgaggttttgataaagataatgatggctgtgtaaatgtattggagtggattcatggattatcactgtttcttcgaggatctttggaagaaaaaatgaaatattgctttgaagtgtttgatttgaatggtgacggattcatttcaaaggaggaaatgtttcacatgttgaagaacagccttctcaaacagccatctgaggaagaccctgatgaaggaattaaagatttggttgaaataacactgaagaaaatggatcatgaccatgatgggaagctgtcttttgcagactatgaactggctgtgagagaagagactcttctactggaggcctttgggccatgtcttcctgatccaaagagccagatggaatttgaagctcaagtattcaaagatccaaatgaattcaatgatatgtgaataactaaatgtctatattgtctcaagtgagtaaaaaaggaggcacacacatattgcttattttttctacttagttcagaaaaatgatgttgaattgtgtgtttcagggtgaagatgaggttcacttacatatatcatttaacatcagtgtaagatgcaattaaaatagatggaagacaagaagtcccttattagatgatgggtttggcaagacagttaacttttctacagatgttttatcacatagactatctgtcgaagcacataactggcataaaacctttgggttcattaaatgaatagagagattacataattatgaattgttaatacaaatattctgcatgtcaaaaagaagctgggtgtacactgaaaaatcattgaaactactggatttcctttgaaacaaataatgaagatggcatcaaaagaataagagtattctattgagcattgaaacgcctttctggtaggcattgagggagatctagagagatgaaagatacatggaaatcatattatattgaaatataatatgatttgcattattgtttgaggctttggctaaataacgttactgattgtaagcacctgaaggcaagggttttatccaccacatctttgtctgccatagcatttagtcctctgcatacaatgggctgtccataattactgtagattggactgaaaatcaaaaagtaccacaagataaatgcaaactcttggtgagcagagggagaacatgtactgagtttcttaggtttcatggctaatgcattggcacagctttcagtgtatccctgcagtccttccagatagtccctgccccatgcattgcagatggttgccaaagcccccctctgtcctggcacccagtgttcctccatcctgactccacgtattgcccccttgccactgcctgagtgcaccatagtgtccccatccccccagtatgtgctgtgggcatcctgagaagcctgaaaaagacagggccaggttaggcttgggtgagctgctttctgccttcttggtacacacagtaagcagtggagaggcgtgttacaccgtatctgttctatcctcatctaaatactgagaggctagttgggatagtaaatctttcttactacatatgcattaagtttaagtaaaatagaatattgtgtgaaaaaatgcactgttactaataaatggaataaacagatccatgaaataaaag

SEQ ID NO: 308991 - DNA, 636 bp, Artificial Sequence
  derived and/or modified sequence
atgaacaggaagaagctgcagaagctgacagacaccctgaccaagaactgcaagcacttcaacaagtttgaggtgaactgcctgatcaagctgttctatgacctggtgggcggcgtggagcggcagggcctggtggtgggcctggacagaaatgccttcaggaacatcctgcacgtgaccttcggcatgacagatgacatgatcatggacagagtcttccggggctttgacaaggacaatgatggctgtgtgaatgtgctggagtggattcatggcctgagcctcttcctgcggggcagcctggaggagaagatgaagtactgctttgaggtgtttgacctgaatggagatggcttcatcagcaaggaggagatgttccacatgctgaagaacagcctgctgaagcagcccagcgaggaggaccctgatgagggcatcaaggacctggtggagatcaccctgaagaagatggaccatgaccatgatggcaagctgagctttgctgactatgagctggccgtgcgggaggagaccctgctgctggaggccttcggcccctgcctgcctgaccccaagagccagatggagtttgaggcccaggtgttcaaggaccccaatgagttcaatgacatgtag

SEQ ID NO: 308992 - DNA, 636 bp, Artificial Sequence
  derived and/or modified sequence
atgaaccggaagaagctgcagaagctgaccgacaccctgaccaagaactgcaaacacttcaacaaatttgaggtgaactgcttaatcaagcttttctacgatctggtgggcggcgtggagcgccagggactcgtggttgggctcgaccggaatgcgtttaggaacatcctgcatgtgactttcgggatgacggatgatatgattatggacagggttttcaggggattcgacaaagataacgacggttgcgtaaatgtattggagtggatccatggactctctcttttcttacgagggtctcttgaggagaagatgaaatattgcttcgaagtctttgatctgaacggagacgggtttataagcaaggaggaaatgttccacatgctcaaaaattcactgctcaagcaaccctcagaagaggaccccgacgagggcataaaagatctcgtcgaaataacattaaaaaagatggatcacgaccacgacggcaagctctcctttgccgattacgagcttgctgtgagagaagagaccctgttattggaagccttcgggccttgcctacccgaccctaagtcccagatggagttcgaggcacaggtgttcaaagaccccaacgaatttaacgatatgtag

SEQ ID NO: 308993 - DNA, 636 bp, Artificial Sequence
  derived and/or modified sequence
atgaaccggaagaagctgcagaagctgaccgacaccctgaccaagaattgcaaacacttcaacaagtttgaggtcaactgcttgatcaagttattctacgatctcgtcggtggcgttgagcggcagggactggtggtgggtcttgacaggaatgcctttaggaacattctgcacgtgactttcgggatgaccgatgatatgatcatggacagggtctttaggggttttgacaaagacaacgacggatgtgtgaacgtgctggagtggatacacggcttgagcctattcctgcgcggcagtctcgaagaaaagatgaaatattgcttcgaagtgtttgacttgaacggcgacggatttatatcaaaggaggagatgtttcatatgttaaaaaacagtctgctgaagcagccaagtgaagaggatcccgacgaaggtataaaggatctcgtggagattacattaaagaagatggatcatgaccacgacgggaaactaagttttgccgattacgaactggccgtccgcgaggaaacccttctcctggaggctttcgggccttgtctgcccgacccgaaaagccagatggagttcgaggcccaggtcttcaaggatcctaacgaattcaatgacatgtag

SEQ ID NO: 308994 - DNA, 636 bp, Artificial Sequence
  derived and/or modified sequence
atgaaccggaagaagctacagaagctgacagacacattaactaagaattgcaaacacttcaacaaattcgaagtcaactgtttgatcaagctcttttacgatctggtcggcggagtagaacgccaagggttggttgtgggcctggatagaaacgcctttcggaacatcctgcacgtcacgttcggcatgactgacgatatgataatggatcgggtgttcagagggttcgataaagataatgacggatgtgtcaatgtgctcgaatggatccatggcttgagtttgttccttagagggtcgctagaagagaagatgaagtattgctttgaagtgttcgatctgaacggggacgggtttattagtaaagaagaaatgttccacatgctcaagaacagtctgcttaagcagccttccgaggaggaccccgatgagggaataaaggacctagtggagattaccttaaaaaagatggaccatgatcacgacgggaaattatcattcgctgactacgagcttgccgttagagaagaaaccctcttgctggaggctttcggaccatgtctcccggatccgaaatctcagatggagtttgaagctcaggtgttcaaggaccccaacgagttcaatgacatgtag

SEQ ID NO: 308995 - DNA, 636 bp, Artificial Sequence
  derived and/or modified sequence
atgaatagaaaaaagctgcagaagctgaccgacaccctaacaaagaactgtaagcactttaataagtttgaggtgaattgcctgatcaaactcttctatgacctggtaggaggagtggaacggcagggcctggtggtgggattggaccgcaatgcctttcgcaatattctccacgtgactttcggcatgactgacgacatgattatggatcgcgtatttagagggttcgataaggataatgacggctgcgtcaatgtgttggagtggattcacgggctgagcttgtttctcagaggctcacttgaagaaaagatgaaatattgtttcgaggttttcgatctcaatggggacgggtttatcagcaaagaggaaatgttccatatgttgaagaacagcttactgaagcagccgagcgaggaggaccccgacgaaggcatcaaagacctggtcgagattactctgaaaaaaatggatcacgaccacgatgggaaactgagcttcgccgattacgagttggctgtcagggaagaaacgctcttactggaggcgttcggcccatgtttgccggaccccaagtctcagatggagtttgaagcccaagtgttcaaagaccctaacgagttcaacgatatgtag

SEQ ID NO: 308996 - DNA, 390 bp, Artificial Sequence
  derived and/or modified sequence
tgagtgaacgtgctggagtggatccacggcctgagcctgttcctgagaggcagcctggaggagaagatgaagtactgcttcgaggtgttcgacctgaacggcgacggcttcatcagcaaggaggagatgttccacatgctgaagaacagcctgctgaagcagcccagcgaggaggaccccgacgagggcatcaaggacctggtggagatcaccctgaagaagatggaccacgaccacgacggcaagctgagcttcgccgactacgagctggccgtgagagaggagaccctgctgctggaggccttcggcccctgcctgcccgaccccaagagccagatggagttcgaggcccaggtgttcaaggaccccaacgagttcaacgacatgtag

SEQ ID NO: 308997 - DNA, 390 bp, Artificial Sequence
  derived and/or modified sequence
tgagtgaatgtgctggagtggatccatggcctgagcctgttcctgagggggtccctggaggagaagatgaagtattgcttcgaagtgttcgatctaaatggcgatggttttatatccaaagaggagatgtttcacatgctgaaaaactctctgttaaaacagccatcagaggaggatccagatgaagggattaaggacctcgtcgagataactctgaaaaagatggaccacgaccacgacggcaaactgtccttcgctgactacgagctcgcagtgagggaggaaactctcttactggaggctttcggcccttgcttgcccgatccaaagtcacagatggaattcgaggctcaggtgtttaaggacccaaatgaatttaacgacatgtag

SEQ ID NO: 308998 - DNA, 639 bp, Artificial Sequence
  derived and/or modified sequence
tgtaaatgtattggagtggattcatggattatcactgtttcttcgaggatctttggaagaaaaaatgaaatattgctttgaagtgtttgatttgaatggtgacggattcatttcaaaggaggaaatgtttcacatgttgaagaacagccttctcaaacagccatctgaggaagaccctgatgaaggaattaaagatttggttgaaataacactgaagaaaatggatcatgaccatgatgggaagctgtcttttgcagactatgaactggctgtgagagaagagactcttctactggaggcctttgggccatgtcttcctgatccaaagagccagatggaatttgaagctcaagtattcaaagatccaaatgaattcaatgatatgtgaataactaaatgtctatattgtctcaaggtgaagatgaggttcacttacatatatcatttaacatcagtgtaagatgcaattaaaatagatggaagacaagaagtcccttattagatgatgggtttggcaagacagttaacttttctacagatgttttatcacatagactatctgtcgaagcacataactggcataaaacctttgggttcattaaatgaatagagagattacataattatgaattgttaata

SEQ ID NO: 308999 - DNA, 390 bp, Artificial Sequence
  derived and/or modified sequence
tgagtgaatgtgctggagtggattcatggcctgagcctcttcctgcggggcagcctggaggagaagatgaagtactgctttgaggtgtttgacctgaatggagatggcttcatcagcaaggaggagatgttccacatgctgaagaacagcctgctgaagcagcccagcgaggaggaccctgatgagggcatcaaggacctggtggagatcaccctgaagaagatggaccatgaccatgatggcaagctgagctttgctgactatgagctggccgtgcgggaggagaccctgctgctggaggccttcggcccctgcctgcctgaccccaagagccagatggagtttgaggcccaggtgttcaaggaccccaatgagttcaatgacatgtag

SEQ ID NO: 309000 - DNA, 390 bp, Artificial Sequence
  derived and/or modified sequence
tgagtgaacgtgctggagtggatccacggcctgagcctgttcctgagaggttctttagaggaaaagatgaagtattgctttgaggtgttcgatcttaacggcgacggcttcatttcaaaggaggagatgtttcacatgttgaagaacagcctcctcaagcagccctcagaagaggatccagacgaaggcatcaaagacctcgtggagatcacgctaaagaagatggaccacgatcacgacggcaaattgtcattcgctgattacgaacttgcagtcagagaggaaacccttttgctggaggcctttggcccatgtctaccagatcccaagagtcagatggagtttgaggcacaggtgtttaaagaccctaacgaattcaatgacatgtag

SEQ ID NO: 309001 - DNA, 390 bp, Artificial Sequence
  derived and/or modified sequence
tgagttaatgtgctagagtggatccacggtcttagcctgttcctccgagggtctctggaggaaaagatgaaatattgcttcgaagtgttcgacctgaacggagacggcttcataagcaaagaggaaatgttccacatgctaaagaattcccttctgaaacagccgtccgaggaggaccctgacgaaggaatcaaggacctcgtggaaattactcttaaaaaaatggaccatgaccatgacggcaagttgtccttcgctgactacgagcttgccgtgcgggaggaaacattgctgcttgaagcatttggaccctgccttcctgatccgaaaagtcagatggagttcgaggcacaggtgtttaaggacccaaacgagttcaacgacatgtag

SEQ ID NO: 309002 - protein, 3600 aa, Artificial Sequence
  derived and/or modified sequence
METCDSPPISRQENGQSTSKLCGTTQLDNEVPEKVAGMEPDRENSSTDDNLKTDERKSEALLGFSVENAAATQVTSAKEIPCNECATSFPSLQKYMEHHCPNARLPVLKDDNESEISELEDSDVENLTGEIVYQPDGSAYIIEDSKESGQNAQTGANSKLFSTAMFLDSLASAGEKSDQSASAPMSFYPQIINTFHIASSLGKPFTADQAFPNTSALAGVGPVLHSFRVYDLRHKREKDYLTSDGSAKNSCVSKDVPNNVDLSKFDGCVSDGKRKPVLMCFLCKLSFGYIRSFVTHAVHDHRMTLNDEEQKLLSNKCVSAIIQGIGKDKEPLISFLEPKKSTSVYPHFSTTNLIGPDPTFRGLWSAFHVENGDSLPAGFAFLKGSASTSSSAEQPLGITQMPKAEVNLGGLSSLVVNTPITSVSLSHSSSESSKMSESKDQENNCERPKESNVLHPNGECPVKSEPTEPGDEDEEDAYSNELDDEEVLGELTDSIGNKDFPLLNQSISPLSSSVLKFIEKGTSSSSATVSDDTEKKKQTAAVRASGSVASNYGISGKDFADASASKDSATAAHPSEIARGDEDSSATPHQHGFTPSTPGTPGPGGDGSPGSGIECPKCDTVLGSSRSLGGHMTMMHSRNSCKTLKCPKCNWHYKYQQTLEAHMKEKHPEPGGSCVYCKTGQPHPRLARGESYTCGYKPFRCEVCNYSTTTKGNLSIHMQSDKHLNNVQNLQNGNGEQVFGHSAPAPNTSLSGCGTPSPSKPKQKPTWRCEVCDYETNVARNLRIHMTSEKHMHNMMLLQQNMKQIQHNLHLGLAPAEAELYQYYLAQNIGLTGMKLENPADPQLMINPFQLDPATAAALAPGLVNNELPPEIRLASGQLMGDDLSLLTAGELSPYISDPALKLFQCAVCNKFTSDSLEALSVHVSSERSLPEEEWRAVIGDIYQCKLCNYNTQLKANFQLHCKTDKHMQKYQLVAHIKEGGKSNEWRLKCIAIGNPVHLKCNACDYYTNSVDKLRLHTTNHRHEAALKLYKHLQKQEGAVNPESCYYYCAVCDYTTKVKLNLVQHVRSVKHQQTEGLRKLQLHQQGLAPEEDNLSEIFFVKDCPPNELETASLGARTCDDDLTEQQLRSTSEEQSEEAEGAIKPTAVAEDDEKDTSERDNSEGKNSNKDSGIITPEKELKVSVAGGTQPLLLAKEEDVATKRSKPTEDNKFCHEQFYQCPYCNYNSRDQSRIQMHVLSQHSVQPVICCPLCQDVLSNKMHLQLHLTHLHSVSPDCVEKLLMTVPVPDVMMPNSMLLPAAASEKSERDTPAAVTAEGSGKYSGESPMDDKSMAGLEDSKANVEVKNEEQKPTKEPLEVSEWNKNSSKDVKIPDTLQDQLNEQQKRQPLSVSDRHVYKYRCNHCSLAFKTMQKLQIHSQYHAIRAATMCNLCQRSFRTFQALKKHLEAGHPELSEAELQQLYASLPVNGELWAESETMSQDDHGLEQEMEREYEVDHEGKASPVGSDSSSIPDDMGSEPKRTLPFRKGPNFTMEKFLDPSRPYKCTVCKESFTQKNILLVHYNSVSHLHKLKKVLQEASSPVPQETNSNTDNKPYKCSICNVAYSQSSTLEIHMRSVLHQTKARAAKLEPSGHVAGGHSIAANVNSPGQGMLDSMSLAAVNSKDTHLDAKELNKKQTPDLISAQPAHHPPQSPAQIQMQLQHELQQQAAFFQPQFLNPAFLPHFPMTPEALLQFQQPQFLFPFYIPGTEFSLGPDLGLPGSATFGMPGMTGMAGSLLEDLKQQIQTQHHVGQTQLQILQQQAQQYQATQPQLQPQKQQQQPPPPQQQQQQQASKLLKQEQSNIVSADCQIMKDVPSYKEAEDISEKPEKPKQEFISEGEGLKEGKDTKKQKSLEPSIPPPRIASGARGNAAKALLENFGFELVIQYNENRQKVQKKGKSGEGENTDKLECGTCGKLFSNVLILKSHQEHVHGQFFPYAALEKFARQYREAYDKLYPISPSSPETPPPPPPPPPLPPAPPQPSSMGPVKIPNTVSTPLQAPPPTPPPPSAPPQVQLPVSLDLPLFPSIMMQPVQHPALPPQLALQLPQMDALSADLTQLCQQQLGLDPNFLRHSQFKRPRTRITDDQLKILRAYFDINNSPSEEQIQEMAEKSGLSQKVIKHWFRNTLFKERQRNKDSPYNFSNPPITVLEDIRIDPQPTSLEHYKSDASFSKRSSRTRFTDYQLRVLQDFFDTNAYPKDDEIEQLSTVLNLPTRVIVVWFQNARQKARKSYENQAETKDNEKRELTNERYIRTSNMQYQCKKCNVVFPRIFDLITHQKKQCYKDEDDDAQDESQTEDSMDATDQVVYKHCTVSGQTDAAKNAAAPAASSGSGTSTPLIPSPKPEPEKTSPKPEYPAEKPKQSDPSPPSQGTKPALPLASTSSDPPQASTAQPQPQPQPPKQPQLIGRPPSASQTPVPSSPLQISMTSLQNSLPPQLLQYQCDQCTVAFPTLELWQEHQHMHFLAAQNQFLHSPFLERPMDMPYMIFDPNNPLMTGQLLGSSLTQMPPQASSSHTTAPTTVAASLKRKLDDKEDNNCSEKEGGNSGEDQHRDKRLRTTITPEQLEILYEKYLLDSNPTRKMLDHIAREVGLKKRVVQVWFQNTRARERKGQFRAVGPAQSHKRCPFCRALFKAKSALESHIRSRHWNEGKQAGYSLPPSPLISTEDGGESPQKYIYFDYPSLPLTKIDLSSENELASTVSTPVSKTAELSPKNLLSPSSFKAECSEDVENLNAPPAEAGYDQNKTDFDETSSINTAISDATTGDEGNTEMESTTGSSGDVKPALSPKEPKTLDTLPKPATTPTTEVCDDKFLFSLTSPSIHFNDKDGDHDQSFYITDDPDDNADRSETSSIADPSSPNPFGSSNPFKSKSNDRPGHKRFRTQMSNLQLKVLKACFSDYRTPTMQECEMLGNEIGLPKRVVQVWFQNARAKEKKFKINIGKPFMINQGGTEGTKPECTLCGVKYSARLSIRDHIFSKQHISKVRETVGSQLDREKDYLAPTTVRQLMAQQELDRIKKASDVLGLTVQQPGMMDSSSLHGISLPTAYPGLPGLPPVLLPGMNGPSSLPGFPQNSNTLTPPGAGMLGFPTSATSSPALSLSSAPTKPLLQTPPPPPPPPPPPPSSSLSGQQTEQQNKESEKKQTKPNKVKKIKEEELEATKPEKHPKKEEKISSALSVLGKVVGETHVDPIQLQALQNAIAGDPASFIGGQFLPYFIPGFASYFTPQLPGTVQGGYFPPVCGMESLFPYGPTMPQTLAGLSPGALLQQYQQYQQNLQESLQKQQKQQQEQQQKPVQAKTSKVESDQPQNSNDASETKEDKSTATESTKEEPQLESKSADFSDTYVVPFVKYEFICRKCQMMFTDEDAAVNHQKSFCYFGQPLIDPQETVLRVPVSKYQCLACDVAISGNEALSQHLQSSLHKEKTIKQAMRNAKEHVRLLPHSVCSPNPNTTSTSQSAASSNNTYPHLSCFSMKSWPNILFQASARRAASPPSSPPSLSLPSTVTSSLCSTSGVQTSLPTESCSDESDSELSQKLEDLDNSLEVKAKPASGLDGNFNSIRMDMFSV

SEQ ID NO: 309003 - protein, 3616 aa, Artificial Sequence
  derived and/or modified sequence
METCDSPPISRQENGQSTSKLCGTTQLDNEVPEKVAGMEPDRENSSTDDNLKTDERKSEALLGFSVENAAATQVTSAKEIPCNECATSFPSLQKYMEHHCPNARLPVLKDDNESEISELEDSDVENLTGEIVYQPDGSAYIIEDSKESGQNAQTGANSKLFSTAMFLDSLASAGEKSDQSASAPMSFYPQIINTFHIASSLGKPFTADQAFPNTSALAGVGPVLHSFRVYDLRHKREKDYLTSDGSAKNSCVSKDVPNNVDLSKFDGCVSDGKRKPVLMCFLCKLSFGYIRSFVTHAVHDHRMTLNDEEQKLLSNKCVSAIIQGIGKDKEPLISFLEPKKSTSVYPHFSTTNLIGPDPTFRGLWSAFHVENGDSLPAGFAFLKGSASTSSSAEQPLGITQMPKAEVNLGGLSSLVVNTPITSVSLSHSSSESSKMSESKDQENNCERPKESNVLHPNGECPVKSEPTEPGDEDEEDAYSNELDDEEVLGELTDSIGNKDFPLLNQSISPLSSSVLKFIEKGTSSSSATVSDDTEKKKQTAAVRASGSVASNYGISGKDFADASASKDSATAAHPSEIARGDEDSSATPHQHGFTPSTPGTPGPGGDGSPGSGIECPKCDTVLGSSRSLGGHMTMMHSRNSCKTLKCPKCNWHYKYQQTLEAHMKEKHPEPGGSCVYCKTGQPHPRLARGESYTCGYKPFRCEVCNYSTTTKGNLSIHMQSDKHLNNVQNLQNGNGEQVFGHSAPAPNTSLSGCGTPSPSKPKQKPTWRCEVCDYETNVARNLRIHMTSEKHMHNMMLLQQNMKQIQHNLHLGLAPAEAELYQYYLAQNIGLTGMKLENPADPQLMINPFQLDPATAAALAPGLVNNELPPEIRLASGQLMGDDLSLLTAGELSPYISDPALKLFQCAVCNKFTSDSLEALSVHVSSERSLPEEEWRAVIGDIYQCKLCNYNTQLKANFQLHCKTDKHMQKYQLVAHIKEGGKSNEWRLKCIAIGNPVHLKCNACDYYTNSVDKLRLHTTNHRHEAALKLYKHLQKQEGAVNPESCYYYCAVCDYTTKVKLNLVQHVRSVKHQQTEGLRKLQLHQQGLAPEEDNLSEIFFVKDCPPNELETASLGARTCDDDLTEQQLRSTSEEQSEEAEGAIKPTAVAEDDEKDTSERDNSEGKNSNKDSGIITPEKELKVSVAGGTQPLLLAKEEDVATKRSKPTEDNKFCHEQFYQCPYCNYNSRDQSRIQMHVLSQHSVQPVICCPLCQDVLSNKMHLQLHLTHLHSVSPDCVEKLLMTVPVPDVMMPNSMLLPAAASEKSERDTPAAVTAEGSGKYSGESPMDDKSMAGLEDSKANVEVKNEEQKPTKEPLEVSEWNKNSSKDVKIPDTLQDQLNEQQKRQPLSVSDRHVYKYRCNHCSLAFKTMQKLQIHSQYHAIRAATMCNLCQRSFRTFQALKKHLEAGHPELSEAELQQLYASLPVNGELWAESETMSQDDHGLEQEMEREYEVDHEGKASPVGSDSSSIPDDMGSEPKRTLPFRKGPNFTMEKFLDPSRPYKCTVCKESFTQKNILLVHYNSVSHLHKLKKVLQEASSPVPQETNSNTDNKPYKCSICNVAYSQSSTLEIHMRSVLHQTKARAAKLEPSGHVAGGHSIAANVNSPGQGMLDSMSLAAVNSKDTHLDAKELNKKQTPDLISAQPAHHPPQSPAQIQMQLQHELQQQAAFFQPQFLNPAFLPHFPMTPEALLQFQQPQFLFPFYIPGTEFSLGPDLGLPGSATFGMPGMTGMAGSLLEDLKQQIQTQHHVGQTQLQILQQQAQQYQATQPQLQPQKQQQQPPPPQQQQQQQASKLLKQEQSNIVSADCQIMKDVPSYKEAEDISEKPEKPKQEFISEGEGLKEGKDTKKQKSLEPSIPPPRIASGARGNAAKALLENFGFELVIQYNENRQKVQKKGKSGEGENTDKLECGTCGKLFSNVLILKSHQEHVHGQFFPYAALEKFARQYREAYDKLYPISPSSPETPPPPPPPPPLPPAPPQPSSMGPVKIPNTVSTPLQAPPPTPPPPPPPPPPPPPPPPPPPPSAPPQVQLPVSLDLPLFPSIMMQPVQHPALPPQLALQLPQMDALSADLTQLCQQQLGLDPNFLRHSQFKRPRTRITDDQLKILRAYFDINNSPSEEQIQEMAEKSGLSQKVIKHWFRNTLFKERQRNKDSPYNFSNPPITVLEDIRIDPQPTSLEHYKSDASFSKRSSRTRFTDYQLRVLQDFFDTNAYPKDDEIEQLSTVLNLPTRVIVVWFQNARQKARKSYENQAETKDNEKRELTNERYIRTSNMQYQCKKCNVVFPRIFDLITHQKKQCYKDEDDDAQDESQTEDSMDATDQVVYKHCTVSGQTDAAKNAAAPAASSGSGTSTPLIPSPKPEPEKTSPKPEYPAEKPKQSDPSPPSQGTKPALPLASTSSDPPQASTAQPQPQPQPPKQPQLIGRPPSASQTPVPSSPLQISMTSLQNSLPPQLLQYQCDQCTVAFPTLELWQEHQHMHFLAAQNQFLHSPFLERPMDMPYMIFDPNNPLMTGQLLGSSLTQMPPQASSSHTTAPTTVAASLKRKLDDKEDNNCSEKEGGNSGEDQHRDKRLRTTITPEQLEILYEKYLLDSNPTRKMLDHIAREVGLKKRVVQVWFQNTRARERKGQFRAVGPAQSHKRCPFCRALFKAKSALESHIRSRHWNEGKQAGYSLPPSPLISTEDGGESPQKYIYFDYPSLPLTKIDLSSENELASTVSTPVSKTAELSPKNLLSPSSFKAECSEDVENLNAPPAEAGYDQNKTDFDETSSINTAISDATTGDEGNTEMESTTGSSGDVKPALSPKEPKTLDTLPKPATTPTTEVCDDKFLFSLTSPSIHFNDKDGDHDQSFYITDDPDDNADRSETSSIADPSSPNPFGSSNPFKSKSNDRPGHKRFRTQMSNLQLKVLKACFSDYRTPTMQECEMLGNEIGLPKRVVQVWFQNARAKEKKFKINIGKPFMINQGGTEGTKPECTLCGVKYSARLSIRDHIFSKQHISKVRETVGSQLDREKDYLAPTTVRQLMAQQELDRIKKASDVLGLTVQQPGMMDSSSLHGISLPTAYPGLPGLPPVLLPGMNGPSSLPGFPQNSNTLTPPGAGMLGFPTSATSSPALSLSSAPTKPLLQTPPPPPPPPPPPPSSSLSGQQTEQQNKESEKKQTKPNKVKKIKEEELEATKPEKHPKKEEKISSALSVLGKVVGETHVDPIQLQALQNAIAGDPASFIGGQFLPYFIPGFASYFTPQLPGTVQGGYFPPVCGMESLFPYGPTMPQTLAGLSPGALLQQYQQYQQNLQESLQKQQKQQQEQQQKPVQAKTSKVESDQPQNSNDASETKEDKSTATESTKEEPQLESKSADFSDTYVVPFVKYEFICRKCQMMFTDEDAAVNHQKSFCYFGQPLIDPQETVLRVPVSKYQCLACDVAISGNEALSQHLQSSLHKEKTIKQAMRNAKEHVRLLPHSVCSPNPNTTSTSQSAASSNNTYPHLSCFSMKSWPNILFQASARRAASPPSSPPSLSLPSTVTSSLCSTSGVQTSLPTESCSDESDSELSQKLEDLDNSLEVKAKPASGLDGNFNSIRMDMFSV

SEQ ID NO: 309004 - protein, 101 aa, Artificial Sequence
  derived and/or modified sequence
METCDSPPISRQENGQSTSKLCGTTQLDNEVPEKVAGMEPDRENSSTDDNLKTDERKSEALLGFSVENAAATQVTSAKEIPCNECATSFPSLQKYMEHHCP

SEQ ID NO: 309005 - DNA, 13975 bp, Artificial Sequence
  derived and/or modified sequence
atttttttaaacagggctaaaacgataataattagcagaataaagacatatcggattttcatttcctttcctccttttcccaaccccttcacaaccaaacagcgagaccgcggtcggcacatgctttaactcctcccggacccccgaggaccgctccatgccccccactttctgctccagcgtttttattttcacccaataaagttcgaggattattttttattttttttgtttttttaatgaaccctctcgttttacttggatgtgatcagctgtaagtaaaataaaagcaaaacaaaaaagaggcgaagatcgagtaggaactgcaggggaaatggaaagtccctgacaggctggatgaaatgagatccccatgtagcaattgccatggaaacctgtgactcccctcctatctcaaggcaggaaaatgggcagagcacatcaaagctatgtggaacgacacaacttgataatgaggtgccagagaaagttgcagggatggagcctgacagggaaaacagctccacagatgacaacctgaaaacggatgagcgcaaaagtgaagccttgctgggtttcagcgttgagaatgcagctgccactcaggttacctcagcaaaggagataccctgcaacgaatgtgccacttcttttcccagtttacagaaatacatggaacaccactgccctaatgcccgccttcctgtcctgaaggatgacaacgagagcgagatcagcgagttagaggacagtgacgtggaaaatctaacaggggagatcgtttaccagcctgatgggtcagcatatataattgaggactccaaagaaagtgggcagaatgcacagactggggcaaatagcaaactcttttctacagcgatgttcctggactccctggcatctgctggagagaagagtgatcagtctgcttctgcacctatgtcgttctacccacagatcatcaacacttttcatatcgcttcatccctcgggaaaccatttacagccgatcaggctttcccaaatacctcagcattagcaggagttggtcctgtgttgcacagtttccgtgtctatgatctccgacacaagagagagaaagactatctaaccagtgatggctcagccaaaaactcctgtgtgtccaaagatgtccctaacaatgtggacttgtccaaattcgatggttgtgttagcgatgggaaaaggaaacctgttttaatgtgtttcttgtgcaagttgtcttttggttatatcaggtcatttgtaacccatgctgtgcatgatcatcggatgaccctcaatgacgaggagcagaagctcctcagtaataaatgcgtctccgccataatacaggggattggcaaagacaaagaacctcttataagctttctggaaccaaaaaaatccacttctgtttatccccatttttctactacaaacctcataggacccgatccaaccttccgcggtttatggagcgcttttcatgttgaaaatggtgactctttgccggctggctttgccttcttaaaaggaagcgcgagcacctcgagctcagcagagcagccgctggggattacccaaatgccaaaggctgaagtgaatctgggggggctgtctagtttagtagtgaacaccccaattacctctgtctccctcagccactcatcgtctgagtctagcaagatgtcagagagcaaagaccaagagaacaactgtgaaaggccaaaagaaagcaacgttttacacccaaacggggagtgccctgtcaaaagtgaacccactgaaccgggagatgaggatgaagaagatgcgtactccaatgaacttgatgacgaggaagtattaggtgaactcaccgatagtattggtaacaaagatttccctctcttaaaccaaagcatttctcctttatcatccagtgtgctaaaatttattgaaaagggtacctcgtcctcctcggcgactgtttctgatgacacagaaaagaaaaaacagactgctgctgttagggccagtggcagtgttgctagtaactatggcatcagtggcaaggactttgcagacgcaagtgccagtaaagacagtgccacagctgctcatccaagtgaaatagcccggggagacgaagacagttcagccactcctcaccagcatggctttaccccgagtactcctggcacaccagggcctggaggagacggctcaccgggcagtggcatcgagtgtccaaagtgcgacactgtgttggggtcttcgaggtctcttggtggtcatatgactatgatgcactcgaggaactcatgcaaaaccctcaaatgtcctaaatgtaactggcactacaaatatcagcagaccctggaggcccatatgaaggagaaacaccctgagccgggtggctcttgtgtttattgtaagactggacagcctcaccccaggcttgcccggggtgagagttacacgtgtggctataaacccttccgttgtgaggtttgtaactactctaccactaccaaaggcaacctcagtattcatatgcagtcggacaagcacctgaacaatgttcagaatctccaaaatggcaatggtgagcaggtgtttggccactctgccccagcccccaacaccagcctcagtggctgcggaacaccctctccgtccaaacccaaacagaaacccacctggcggtgtgaagtttgtgattatgaaaccaatgtcgccaggaacctccgaattcatatgaccagcgaaaagcacatgcataatatgatgcttttgcagcagaacatgaagcagatccagcataatctgcacttgggcctcgccccggcggaagcagagctttatcagtactacctagcccagaacataggcctgaccggaatgaagctggaaaaccctgccgaccctcagctgatgatcaatccattccagctggatccagcgacagcagcggctttggcaccagggctcgtaaataatgagctgccgcctgaaatccggcttgccagtggtcagctaatgggtgatgacctgtccctccttactgcaggagagctgtcaccttatatcagtgacccagcgctgaagctattccagtgtgctgtttgcaacaaattcacctctgacagcctggaggccctaagtgtgcatgtgagcagtgagcgctctctccctgaagaggaatggagggcagtaattggagatatctaccagtgcaagctctgcaactacaacactcagctcaaagccaacttccagctacactgcaagactgataaacatatgcagaaatatcaactggtggctcacattaaagaagggggcaaaagcaatgagtggaggttgaagtgtattgccattggcaaccctgttcacctaaaatgtaacgcctgtgactattacaccaacagtgtggataaattacgcttgcataccaccaatcacaggcacgaggcggccctgaagctctacaagcacttgcagaagcaagagggtgcagtgaatcccgaatcctgctattactactgtgccgtgtgtgattacaccaccaaggtcaagttgaatctggtacaacatgtccgttcggtgaagcatcagcagactgagggcctacggaagctccagctccaccagcaaggcctggcaccagaggaggacaacctcagtgagatcttttttgttaaagattgcccaccaaatgagcttgaaactgcctcattgggagccaggacttgtgatgatgatcttacagagcagcagttgagatcgacctcagaagaacaaagtgaggaggcagaaggagctattaagcctacagcagtggccgaggacgatgaaaaagacacaagtgagagagacaatagtgaaggcaaaaactctaataaagactctgggataatcacaccagagaaggaactaaaagttagtgtggcagggggtacccagccactcctgctggcaaaagaagaggatgttgcaacaaaaaggtcaaaacctacagaggacaataaattctgtcatgaacagttctatcaatgtccttattgtaactacaatagtagggaccaaagtcgtatccagatgcacgtcctatcacagcactcggtgcagccggtcatctgctgtcctctctgtcaggacgtcctcagcaacaaaatgcatctccaactgcatctgacgcatttgcacagtgtgtctccagactgtgtggagaagctgcttatgacagtgcctgtccctgatgtgatgatgccaaacagtatgctactgccagcagctgcctctgagaaatcagagcgggacacacctgcagccgtgacagctgaggggtctgggaaatattcaggtgaaagtccaatggatgacaaaagcatggcaggtctcgaggattcaaaggctaatgtggaagtaaagaatgaggagcagaaaccgactaaagaacccttggaagtctcagaatggaataaaaatagcagtaaggatgtgaaaatccccgacacactgcaagatcaattaaatgaacagcaaaaaaggcaaccgctctctgtttctgaccgtcatgtctacaagtatcgctgtaaccattgtagcttggctttcaaaactatgcagaagcttcagatacattcccagtatcatgcaattcgggctgcgacaatgtgtaacctctgccagcgcagtttccgtacattccaggctttaaaaaaacacttggaagcaggccaccctgaactgagtgaagctgaacttcaacagctatatgcctccttgcccgtgaatggagaactgtgggcagagagcgaaactatgtcccaggatgaccatggcctagagcaggaaatggagagagagtatgaggtggaccacgaagggaaagcaagtcctgtaggaagtgatagtagctctattccagatgacatgggctctgaaccaaagcggaccttaccttttagaaaagggcccaattttacgatggaaaaattccttgatccatctcgtccatataaatgtacagtgtgtaaagagtcattcacccaaaagaacattctcttggtccactataattcagtttctcacttgcataagctgaaaaaagttttgcaggaagcctccagtcctgtcccacaagaaaccaacagcaacacagataacaaaccctacaagtgcagcatctgcaatgttgcatacagccaaagctcaacattggaaatccacatgaggtctgtgctccaccagacaaaggctagggctgcaaagctggagcccagtggtcatgtggctggtgggcacagcattgcagcaaatgtcaacagccctggccaggggatgttagattccatgagtttagcagctgtaaacagcaaagatacccatttagatgccaaagaattaaataaaaagcaaactcctgatttaatctctgctcaacctgcacatcacccaccacagtcaccagcacaaattcagatgcaactacagcacgaattacaacagcaagccgcattctttcagcctcagtttctaaacccagcctttttgcctcattttcctatgaccccagaagcactgctgcagtttcagcagcctcagtttctctttccattttatatacctgggacggagttcagcttggggccagatttgggcttgccaggctctgccacatttgggatgcctggcatgacaggaatggctggctccttgcttgaagacctaaagcagcagattcaaacccaacatcacgttggtcaaactcaactccagatactacagcaacaagcacaacaataccaagccacacagccccagctgcagcctcaaaaacaacagcagcagccaccacctccacagcagcagcagcaacagcaggcaagcaaattattgaaacaagagcaaagtaacatagtgagtgcagactgccaaatcatgaaggatgtgccatcttataaggaggcagaagatatttctgaaaagccagaaaaaccaaagcaggaatttataagtgaaggtgaaggactcaaagaaggcaaagacacaaagaagcaaaaatccttggaaccatccatcccaccaccccgaatagcttcaggggccagaggaaatgctgccaaagcgttattggaaaactttggttttgaactggtcattcagtataacgaaaacaggcagaaggtacagaagaagggcaaaagtggtgaaggcgaaaacactgacaaactagaatgtggaacatgtggtaaattgttttccaatgttcttattttaaagagtcaccaagaacatgtacatgggcaattttttccatatgcagcgctagaaaaatttgctcgtcaatacagggaggcctatgacaagctttatccaatttctccatcttctccagaaacgccgcccccgccacctcctcctcctcccttgcctccggctcctccacagccttcttctatgggtcctgtaaagatccccaacacggtttctactcctctgcaagctccaccacccactcctcccccaccaccaccacctcctcctcctcctcctcctccccccccacctcctccaccttctgctcctccacaggtccaactgccggtttctctggacctgccgctctttccttccattatgatgcaacctgtgcaacaccctgcgcttcctccccagcttgccctgcagctgccacagatggacgcactctctgcagacctcacccaactttgccagcagcagctcggattagatcccaacttcttaagacattctcagttcaaacgcccacggacaagaattacagatgatcagctaaaaatcctgagggcttattttgacattaataattctccaagtgaagaacagatccaggaaatggcagagaaatctggcctctcccaaaaagttatcaaacactggtttagaaatacgctttttaaggaacgacagagaaataaagattcaccatacaacttcagtaaccctcctataacggttttagaagatatcagaattgatccacagcccacctctttagaacattacaaatctgatgcatcattcagtaaaaggtcttctagaacgagatttactgactaccagcttagggttctgcaagacttttttgacacaaacgcttacccaaaagatgatgaaatagaacaactctccactgttctcaatctgcctacccgggttattgttgtatggttccagaatgctcgtcagaaagcacgaaagagttatgagaatcaagcagaaacaaaagataatgaaaaaagagaactcactaatgaacggtacattcgaacaagcaacatgcagtaccagtgtaaaaagtgcaatgtggttttccccaggatctttgacttgattacgcatcagaaaaagcagtgttacaaggatgaagatgatgatgcccaagatgaaagccaaacagaagactccatggatgccactgatcaagtggtatacaagcattgcacagtgtctggccaaacggatgcagctaaaaacgctgctgcccctgcagcaagttctggctctgggaccagcacccccctgattccatcacccaaaccagaacctgagaagacttctccaaaacctgaatatcccgcagaaaagccaaagcagagtgacccctctcccccttctcaaggcaccaaaccagccctgccattagcatcgacttcctcggacccaccacaggcatccacagcccagccacagccacagccacagccaccaaaacaaccccaacttatcggaagacctccctcggcctctcaaacaccggtcccttccagtccactgcaaatttccatgacgtctctccagaacagtctacctccacagttactacaataccaatgtgatcagtgtacagttgccttcccaactctggaactctggcaggaacaccagcacatgcacttccttgctgctcaaaaccaattccttcactctccgttcttggaaaggcccatggacatgccctacatgatatttgaccccaacaatccgctgatgactggacaactgctgggcagttccctcactcaaatgccccctcaggccagttcctcccacaccacagcccccacaacggttgctgcttccctaaaaaggaaactagacgataaagaagataataattgcagtgaaaaagaaggagggaatagcggtgaagaccaacaccgagataaacgcttgagaaccacgatcaccccggaacagctggaaatactctatgaaaaatacttgctggattccaatcctaccagaaaaatgcttgatcatattgcccgcgaagtcgggctgaaaaaaagggtcgtgcaagtctggttccagaatacacgagcgcgggagaggaaaggccagttccgggcggtgggtccagcacagtctcataaacggtgtccgttttgccgagccctgtttaaagcaaagtcggccttagaaagccacattcgctctcggcactggaatgaaggaaagcaggcaggttacagcttgccaccaagccctttaatatccaccgaagatgggggagaaagcccacagaaatacatctattttgattacccatctttgccattaactaaaattgatctatcaagtgagaatgaattggcttctacagtgtcaacacctgttagtaaaacagcagagctgtcaccgaagaatcttttaagcccttcttcttttaaagcagagtgttctgaggatgtagagaatttaaatgcccctcctgctgaggctgggtatgatcaaaataaaaccgattttgatgagacttcatcgattaatacggcaatcagtgacgccaccaccggagacgagggaaacactgaaatggaaagcaccacaggaagttccggagatgtgaaaccggctttgtctcccaaagagccaaaaactctggatactctgccaaaacctgcaaccacacctaccacggaggtctgcgatgacaaatttctcttttctctcacaagcccatccatccatttcaatgacaaagatggcgaccacgaccaaagcttttacatcacagatgacccggatgacaacgccgaccgcagcgaaacgtccagcatagcggacccgagctccccaaatccattcggatccagcaatccctttaaatccaaaagtaatgatcggccgggtcacaagcgttttcgaacgcaaatgagcaatcttcaactcaaggttctcaaggcttgctttagtgactaccgaactccaaccatgcaagaatgtgaaatgttagggaatgagattggtctgcccaaacgcgtagtccaggtgtggttccaaaatgcaagggcaaaggaaaagaaatttaaaattaacatagggaagcctttcatgatcaatcaaggcggaacggaaggcaccaaaccagagtgtaccctctgcggggtgaagtactctgcccgcttgtccatcagagatcacattttctccaaacagcacatttcaaaagtgagggagaccgttggcagtcagctcgatcgggagaaagattacttggctccgaccacggttcggcagctgatggcacagcaagaacttgatcgtataaagaaagcttcagacgtgctgggcttgacggtacagcagccaggcatgatggacagcagttctctccacggcatcagcctgccaacagcctaccccggactccccggccttcctccagtccttctccccggaatgaacggtccatcctccttgccgggatttccacaaaattcaaacactttaacacctcccggtgcaggcatgcttgggtttcctacttcagctacttcgtctcctgccctgtctctcagcagtgcccccaccaaacctttgctgcagactccaccacctccaccacctcctcctcctcctcctccttcatcctctctgtcaggacagcagaccgagcaacagaacaaagaatctgagaaaaagcaaactaagccaaacaaggtgaaaaaaatcaaagaggaggaattagaggccaccaaacccgaaaaacaccccaaaaaagaggaaaaaatctcatctgctctttcagtgttgggcaaagttgtaggtgaaacacatgtcgatcctattcagttgcaggcattacagaatgcaattgctggtgacccagcttcctttataggcggacagttcttgccatactttatccctgggtttgcttcttattttacacctcagctccctggaacagtgcaggggggatacttcccacctgtctgtggcatggagagcctctttccttatggccctacaatgccccagacactggcaggtctgtccccaggtgcactgttgcagcagtaccaacagtatcagcagaacctgcaggagtccctgcaaaagcagcaaaagcaacagcaagaacagcagcagaaaccagttcaggcaaagacatccaaagtagaaagtgaccagccgcaaaactccaacgatgcttcagaaacaaaggaagacaaaagtactgctacagaaagcacaaaagaagaaccccagttagaatccaaaagtgcagacttttcagacacttacgttgttccattcgtcaagtatgagtttatatgcagaaagtgccagatgatgtttactgatgaagacgccgcagtaaatcatcaaaagtccttctgttatttcggtcagcctttgattgacccacaagagacagtgcttcgtgtcccagtcagcaaatatcagtgtcttgcctgtgatgtggctatcagtgggaatgaagcacttagccaacacctccagtcaagcttgcacaaagagaaaacaatcaaacaagcaatgagaaatgccaaagagcatgttagattattacctcactcagtctgctcccctaatcctaacaccacatctacctcgcagtctgcagcttcttctaataacacctatcctcatctttcttgcttctccatgaagtcctggcctaatatccttttccaagcgtctgccaggagagctgcttctcccccttcttctcctccttccctttccttgccttcaacggttacctcaagtttgtgcagcacctcaggggttcaaacctcactacccacagaaagttgttcagatgagtctgacagtgagctgagccagaagctagaagacttagataattctttggaagtgaaggctaagcctgcttctggcctagatggtaatttcaatagcatccgaatggatatgttcagtgtgtaggagtgaagacaggatcccgtgcttaaaaaaataaaaaataaaaaaataaaaaaaaaataagactttaactgcagttccaaagcttctctaacccaaaaattacagtaccaaatgattgactcaggattgtttttcccatattgatatgctggcaatataggatggtatgtaatggacagaactgatgcagatggttgaatgcgcttgtactatatgctaaaatatggaaaaggaaaaaaaaatctcacaagttcttttggaacttgtttcaagccaaaaactctcaagaaagcaaattgcacctcagctggattgatttccaaatgctagcatgtactgtatgggaggatgatccagatgtttcaaagagaatttctcttagtttagttaggtgtaattcagtagctttaaattctcaggtcagaacataacatttctcatttgttaaaagcagcaagaagcctggtaaaactgtgacttttccccaaacgtcaatctttattagaaagcattttctaggtgtgtttagtgtacaaagagactttataacccttactggacaacacacagatccttgagctcacgctgcaggatagtacagttttaccgcagagggaatctggaacagtggaatcatgtgtctgccctgtgtattgcagtttgtattgccacaagctatatttataccagtgtcacccttttcttgtagaatatactaataatctgtgccaactctaccttctcacttttacctctgacgtcattctttttttctgaaagaggtaataattctagttttgatagactctgaggattatgtgaacaggacatttttcatttgtgaatttaatgctatactgtcaaggtacttgcttgtgtctgaactctagtgcacttatgattttgtagaccatgtgaaatttaataagataccttttttttcctttctttgtgtgtagtgcagcaacagtttggtctgcatttgttagaagtttaactcctaacaacccaaagacctatttaacaattggtgcataaatgaaagtagtactgtatacttgaaactgtttaagtacaagttgaacaaaaattatgaaaaggtatatttgcttctcgggaaagcaaagaagctgctttaaaaaataaaaaggggactaaaaatttgttttgtataaagaggttagccctgcgcacgtaggactgaattcagtgatatccctatacactgccatttagtggataggttattgtacttccattcatactctgggcacttgtgttgtattgttctgttacatactttttttaacctgttttgttttatcatatatgcattaaaagtattatctttatcaacatttgctgctactgtgttaacatttttgttttgcttgccatgaatttcaacttccaccacccagtgaattgatttataaattgctatgctttgctgtttttctgttgctgtggaacttaaagaatgtgaaagctgtcaaagggtattttacgaatcacttttgtgtttgatatagtaaaacaatgtgattcattccaaagtaacagaaggttatttgtaagaaagttaaaggcttgtgaacaaagaaagctaagctgttgtacatatttgtagttggctgtgcatggtacaaatttattaatatgaagaaatgcaaaatgtattgcttttgatatttctcttccgagatgaacaagtagcatgtaatgcaactgtttgacagtttaactcaagtcatgcttcaaactgttttaatgatcaaatcaagacacatttcattttacattttattattgtacagtttttgtttcggatgatgatcacagcaatctttattctatacattttatgtgaacttttttaatgtctttaatttggattttttttttttttagtattttaacatttattttaatcctgaagacacttttttgattgtgtttcgtaagagacaacatggcctcctaaggtgcaatcctgccgctatagtgagctaatgtcctgaatccaaaggcttcagaaaattgcttttgcctttttcatgaatgttaagcagcagcattgtgagatcgatctgtcctggcagttaacacgatgtgcaacagtgtgttagcatggaacagaacgcttttcacaaaacaaaggactgttttacaaatgattattccgacagtgtgtcgacataaacttttacaactgcacagcagccaaaaaaagaaaaaaaaaagaaaaaaaactttaactggatggacgttgttagggtgagaaataaaaggacagcctccaaaggttgagaatgagaattgttttttcctggatatcaaagggattatcacagcgcaatcattgtctacacaacatgtactctcaacgcctgggttacataggaaatgcaccctgaggttttaataaaagcccctatggctataactttaaataaactaaaccaaaaatgttattgatgttttatatatagagagtagtctcattagtttttgttactgtaatgtttgaagtctcaaatgcaccgtattacggtaaataacatggttttgaaaacttttttttattttgtcacagacctgttgtcatagttgaaatgatgtttattgtagatggtatttgaacttattcttctggaaatagttcatcaagtatgtttgttgctcattgtgatacattaaaaactgtatctacatatttaaaaaaaaaaaaaaaaaa

SEQ ID NO: 309006 - DNA, 10803 bp, Artificial Sequence
  derived and/or modified sequence
atggagacctgcgacagcccccccatcagcagacaggagaacggccagagcaccagcaagctgtgcggcaccacccagctggacaacgaggtgcccgagaaggtggccggcatggagcccgacagagagaacagcagcaccgacgacaacctgaagaccgacgagagaaagagcgaggccctgctgggcttcagcgtggagaacgccgccgccacccaggtgaccagcgccaaggagatcccctgcaacgagtgcgccaccagcttccccagcctgcagaagtacatggagcaccactgccccaacgccagactgcccgtgctgaaggacgacaacgagagcgagatcagcgagctggaggacagcgacgtggagaacctgaccggcgagatcgtgtaccagcccgacggcagcgcctacatcatcgaggacagcaaggagagcggccagaacgcccagaccggcgccaacagcaagctgttcagcaccgccatgttcctggacagcctggccagcgccggcgagaagagcgaccagagcgccagcgcccccatgagcttctacccccagatcatcaacaccttccacatcgccagcagcctgggcaagcccttcaccgccgaccaggccttccccaacaccagcgccctggccggcgtgggccccgtgctgcacagcttcagagtgtacgacctgagacacaagagagagaaggactacctgaccagcgacggcagcgccaagaacagctgcgtgagcaaggacgtgcccaacaacgtggacctgagcaagttcgacggctgcgtgagcgacggcaagagaaagcccgtgctgatgtgcttcctgtgcaagctgagcttcggctacatcagaagcttcgtgacccacgccgtgcacgaccacagaatgaccctgaacgacgaggagcagaagctgctgagcaacaagtgcgtgagcgccatcatccagggcatcggcaaggacaaggagcccctgatcagcttcctggagcccaagaagagcaccagcgtgtacccccacttcagcaccaccaacctgatcggccccgaccccaccttcagaggcctgtggagcgccttccacgtggagaacggcgacagcctgcccgccggcttcgccttcctgaagggcagcgccagcaccagcagcagcgccgagcagcccctgggcatcacccagatgcccaaggccgaggtgaacctgggcggcctgagcagcctggtggtgaacacccccatcaccagcgtgagcctgagccacagcagcagcgagagcagcaagatgagcgagagcaaggaccaggagaacaactgcgagagacccaaggagagcaacgtgctgcaccccaacggcgagtgccccgtgaagagcgagcccaccgagcccggcgacgaggacgaggaggacgcctacagcaacgagctggacgacgaggaggtgctgggcgagctgaccgacagcatcggcaacaaggacttccccctgctgaaccagagcatcagccccctgagcagcagcgtgctgaagttcatcgagaagggcaccagcagcagcagcgccaccgtgagcgacgacaccgagaagaagaagcagaccgccgccgtgagagccagcggcagcgtggccagcaactacggcatcagcggcaaggacttcgccgacgccagcgccagcaaggacagcgccaccgccgcccaccccagcgagatcgccagaggcgacgaggacagcagcgccaccccccaccagcacggcttcacccccagcacccccggcacccccggccccggcggcgacggcagccccggcagcggcatcgagtgccccaagtgcgacaccgtgctgggcagcagcagaagcctgggcggccacatgaccatgatgcacagcagaaacagctgcaagaccctgaagtgccccaagtgcaactggcactacaagtaccagcagaccctggaggcccacatgaaggagaagcaccccgagcccggcggcagctgcgtgtactgcaagaccggccagccccaccccagactggccagaggcgagagctacacctgcggctacaagcccttcagatgcgaggtgtgcaactacagcaccaccaccaagggcaacctgagcatccacatgcagagcgacaagcacctgaacaacgtgcagaacctgcagaacggcaacggcgagcaggtgttcggccacagcgcccccgcccccaacaccagcctgagcggctgcggcacccccagccccagcaagcccaagcagaagcccacctggagatgcgaggtgtgcgactacgagaccaacgtggccagaaacctgagaatccacatgaccagcgagaagcacatgcacaacatgatgctgctgcagcagaacatgaagcagatccagcacaacctgcacctgggcctggcccccgccgaggccgagctgtaccagtactacctggcccagaacatcggcctgaccggcatgaagctggagaaccccgccgacccccagctgatgatcaaccccttccagctggaccccgccaccgccgccgccctggcccccggcctggtgaacaacgagctgccccccgagatcagactggccagcggccagctgatgggcgacgacctgagcctgctgaccgccggcgagctgagcccctacatcagcgaccccgccctgaagctgttccagtgcgccgtgtgcaacaagttcaccagcgacagcctggaggccctgagcgtgcacgtgagcagcgagagaagcctgcccgaggaggagtggagagccgtgatcggcgacatctaccagtgcaagctgtgcaactacaacacccagctgaaggccaacttccagctgcactgcaagaccgacaagcacatgcagaagtaccagctggtggcccacatcaaggagggcggcaagagcaacgagtggagactgaagtgcatcgccatcggcaaccccgtgcacctgaagtgcaacgcctgcgactactacaccaacagcgtggacaagctgagactgcacaccaccaaccacagacacgaggccgccctgaagctgtacaagcacctgcagaagcaggagggcgccgtgaaccccgagagctgctactactactgcgccgtgtgcgactacaccaccaaggtgaagctgaacctggtgcagcacgtgagaagcgtgaagcaccagcagaccgagggcctgagaaagctgcagctgcaccagcagggcctggcccccgaggaggacaacctgagcgagatcttcttcgtgaaggactgcccccccaacgagctggagaccgccagcctgggcgccagaacctgcgacgacgacctgaccgagcagcagctgagaagcaccagcgaggagcagagcgaggaggccgagggcgccatcaagcccaccgccgtggccgaggacgacgagaaggacaccagcgagagagacaacagcgagggcaagaacagcaacaaggacagcggcatcatcacccccgagaaggagctgaaggtgagcgtggccggcggcacccagcccctgctgctggccaaggaggaggacgtggccaccaagagaagcaagcccaccgaggacaacaagttctgccacgagcagttctaccagtgcccctactgcaactacaacagcagagaccagagcagaatccagatgcacgtgctgagccagcacagcgtgcagcccgtgatctgctgccccctgtgccaggacgtgctgagcaacaagatgcacctgcagctgcacctgacccacctgcacagcgtgagccccgactgcgtggagaagctgctgatgaccgtgcccgtgcccgacgtgatgatgcccaacagcatgctgctgcccgccgccgccagcgagaagagcgagagagacacccccgccgccgtgaccgccgagggcagcggcaagtacagcggcgagagccccatggacgacaagagcatggccggcctggaggacagcaaggccaacgtggaggtgaagaacgaggagcagaagcccaccaaggagcccctggaggtgagcgagtggaacaagaacagcagcaaggacgtgaagatccccgacaccctgcaggaccagctgaacgagcagcagaagagacagcccctgagcgtgagcgacagacacgtgtacaagtacagatgcaaccactgcagcctggccttcaagaccatgcagaagctgcagatccacagccagtaccacgccatcagagccgccaccatgtgcaacctgtgccagagaagcttcagaaccttccaggccctgaagaagcacctggaggccggccaccccgagctgagcgaggccgagctgcagcagctgtacgccagcctgcccgtgaacggcgagctgtgggccgagagcgagaccatgagccaggacgaccacggcctggagcaggagatggagagagagtacgaggtggaccacgagggcaaggccagccccgtgggcagcgacagcagcagcatccccgacgacatgggcagcgagcccaagagaaccctgcccttcagaaagggccccaacttcaccatggagaagttcctggaccccagcagaccctacaagtgcaccgtgtgcaaggagagcttcacccagaagaacatcctgctggtgcactacaacagcgtgagccacctgcacaagctgaagaaggtgctgcaggaggccagcagccccgtgccccaggagaccaacagcaacaccgacaacaagccctacaagtgcagcatctgcaacgtggcctacagccagagcagcaccctggagatccacatgagaagcgtgctgcaccagaccaaggccagagccgccaagctggagcccagcggccacgtggccggcggccacagcatcgccgccaacgtgaacagccccggccagggcatgctggacagcatgagcctggccgccgtgaacagcaaggacacccacctggacgccaaggagctgaacaagaagcagacccccgacctgatcagcgcccagcccgcccaccaccccccccagagccccgcccagatccagatgcagctgcagcacgagctgcagcagcaggccgccttcttccagccccagttcctgaaccccgccttcctgccccacttccccatgacccccgaggccctgctgcagttccagcagccccagttcctgttccccttctacatccccggcaccgagttcagcctgggccccgacctgggcctgcccggcagcgccaccttcggcatgcccggcatgaccggcatggccggcagcctgctggaggacctgaagcagcagatccagacccagcaccacgtgggccagacccagctgcagatcctgcagcagcaggcccagcagtaccaggccacccagccccagctgcagccccagaagcagcagcagcagcccccccccccccagcagcagcagcagcagcaggccagcaagctgctgaagcaggagcagagcaacatcgtgagcgccgactgccagatcatgaaggacgtgcccagctacaaggaggccgaggacatcagcgagaagcccgagaagcccaagcaggagttcatcagcgagggcgagggcctgaaggagggcaaggacaccaagaagcagaagagcctggagcccagcatccccccccccagaatcgccagcggcgccagaggcaacgccgccaaggccctgctggagaacttcggcttcgagctggtgatccagtacaacgagaacagacagaaggtgcagaagaagggcaagagcggcgagggcgagaacaccgacaagctggagtgcggcacctgcggcaagctgttcagcaacgtgctgatcctgaagagccaccaggagcacgtgcacggccagttcttcccctacgccgccctggagaagttcgccagacagtacagagaggcctacgacaagctgtaccccatcagccccagcagccccgagacccccccccccccccccccccccccccccctgccccccgcccccccccagcccagcagcatgggccccgtgaagatccccaacaccgtgagcacccccctgcaggcccccccccccaccccccccccccccagcgcccccccccaggtgcagctgcccgtgagcctggacctgcccctgttccccagcatcatgatgcagcccgtgcagcaccccgccctgcccccccagctggccctgcagctgccccagatggacgccctgagcgccgacctgacccagctgtgccagcagcagctgggcctggaccccaacttcctgagacacagccagttcaagagacccagaaccagaatcaccgacgaccagctgaagatcctgagagcctacttcgacatcaacaacagccccagcgaggagcagatccaggagatggccgagaagagcggcctgagccagaaggtgatcaagcactggttcagaaacaccctgttcaaggagagacagagaaacaaggacagcccctacaacttcagcaacccccccatcaccgtgctggaggacatcagaatcgacccccagcccaccagcctggagcactacaagagcgacgccagcttcagcaagagaagcagcagaaccagattcaccgactaccagctgagagtgctgcaggacttcttcgacaccaacgcctaccccaaggacgacgagatcgagcagctgagcaccgtgctgaacctgcccaccagagtgatcgtggtgtggttccagaacgccagacagaaggccagaaagagctacgagaaccaggccgagaccaaggacaacgagaagagagagctgaccaacgagagatacatcagaaccagcaacatgcagtaccagtgcaagaagtgcaacgtggtgttccccagaatcttcgacctgatcacccaccagaagaagcagtgctacaaggacgaggacgacgacgcccaggacgagagccagaccgaggacagcatggacgccaccgaccaggtggtgtacaagcactgcaccgtgagcggccagaccgacgccgccaagaacgccgccgcccccgccgccagcagcggcagcggcaccagcacccccctgatccccagccccaagcccgagcccgagaagaccagccccaagcccgagtaccccgccgagaagcccaagcagagcgaccccagcccccccagccagggcaccaagcccgccctgcccctggccagcaccagcagcgaccccccccaggccagcaccgcccagccccagccccagccccagccccccaagcagccccagctgatcggcagaccccccagcgccagccagacccccgtgcccagcagccccctgcagatcagcatgaccagcctgcagaacagcctgcccccccagctgctgcagtaccagtgcgaccagtgcaccgtggccttccccaccctggagctgtggcaggagcaccagcacatgcacttcctggccgcccagaaccagttcctgcacagccccttcctggagagacccatggacatgccctacatgatcttcgaccccaacaaccccctgatgaccggccagctgctgggcagcagcctgacccagatgcccccccaggccagcagcagccacaccaccgcccccaccaccgtggccgccagcctgaagagaaagctggacgacaaggaggacaacaactgcagcgagaaggagggcggcaacagcggcgaggaccagcacagagacaagagactgagaaccaccatcacccccgagcagctggagatcctgtacgagaagtacctgctggacagcaaccccaccagaaagatgctggaccacatcgccagagaggtgggcctgaagaagagagtggtgcaggtgtggttccagaacaccagagccagagagagaaagggccagttcagagccgtgggccccgcccagagccacaagagatgccccttctgcagagccctgttcaaggccaagagcgccctggagagccacatcagaagcagacactggaacgagggcaagcaggccggctacagcctgccccccagccccctgatcagcaccgaggacggcggcgagagcccccagaagtacatctacttcgactaccccagcctgcccctgaccaagatcgacctgagcagcgagaacgagctggccagcaccgtgagcacccccgtgagcaagaccgccgagctgagccccaagaacctgctgagccccagcagcttcaaggccgagtgcagcgaggacgtggagaacctgaacgccccccccgccgaggccggctacgaccagaacaagaccgacttcgacgagaccagcagcatcaacaccgccatcagcgacgccaccaccggcgacgagggcaacaccgagatggagagcaccaccggcagcagcggcgacgtgaagcccgccctgagccccaaggagcccaagaccctggacaccctgcccaagcccgccaccacccccaccaccgaggtgtgcgacgacaagttcctgttcagcctgaccagccccagcatccacttcaacgacaaggacggcgaccacgaccagagcttctacatcaccgacgaccccgacgacaacgccgacagaagcgagaccagcagcatcgccgaccccagcagccccaaccccttcggcagcagcaaccccttcaagagcaagagcaacgacagacccggccacaagagattcagaacccagatgagcaacctgcagctgaaggtgctgaaggcctgcttcagcgactacagaacccccaccatgcaggagtgcgagatgctgggcaacgagatcggcctgcccaagagagtggtgcaggtgtggttccagaacgccagagccaaggagaagaagttcaagatcaacatcggcaagcccttcatgatcaaccagggcggcaccgagggcaccaagcccgagtgcaccctgtgcggcgtgaagtacagcgccagactgagcatcagagaccacatcttcagcaagcagcacatcagcaaggtgagagagaccgtgggcagccagctggacagagagaaggactacctggcccccaccaccgtgagacagctgatggcccagcaggagctggacagaatcaagaaggccagcgacgtgctgggcctgaccgtgcagcagcccggcatgatggacagcagcagcctgcacggcatcagcctgcccaccgcctaccccggcctgcccggcctgccccccgtgctgctgcccggcatgaacggccccagcagcctgcccggcttcccccagaacagcaacaccctgaccccccccggcgccggcatgctgggcttccccaccagcgccaccagcagccccgccctgagcctgagcagcgcccccaccaagcccctgctgcagaccccccccccccccccccccccccccccccccccccccagcagcagcctgagcggccagcagaccgagcagcagaacaaggagagcgagaagaagcagaccaagcccaacaaggtgaagaagatcaaggaggaggagctggaggccaccaagcccgagaagcaccccaagaaggaggagaagatcagcagcgccctgagcgtgctgggcaaggtggtgggcgagacccacgtggaccccatccagctgcaggccctgcagaacgccatcgccggcgaccccgccagcttcatcggcggccagttcctgccctacttcatccccggcttcgccagctacttcaccccccagctgcccggcaccgtgcagggcggctacttcccccccgtgtgcggcatggagagcctgttcccctacggccccaccatgccccagaccctggccggcctgagccccggcgccctgctgcagcagtaccagcagtaccagcagaacctgcaggagagcctgcagaagcagcagaagcagcagcaggagcagcagcagaagcccgtgcaggccaagaccagcaaggtggagagcgaccagccccagaacagcaacgacgccagcgagaccaaggaggacaagagcaccgccaccgagagcaccaaggaggagccccagctggagagcaagagcgccgacttcagcgacacctacgtggtgcccttcgtgaagtacgagttcatctgcagaaagtgccagatgatgttcaccgacgaggacgccgccgtgaaccaccagaagagcttctgctacttcggccagcccctgatcgacccccaggagaccgtgctgagagtgcccgtgagcaagtaccagtgcctggcctgcgacgtggccatcagcggcaacgaggccctgagccagcacctgcagagcagcctgcacaaggagaagaccatcaagcaggccatgagaaacgccaaggagcacgtgagactgctgccccacagcgtgtgcagccccaaccccaacaccaccagcaccagccagagcgccgccagcagcaacaacacctacccccacctgagctgcttcagcatgaagagctggcccaacatcctgttccaggccagcgccagaagagccgccagcccccccagcagcccccccagcctgagcctgcccagcaccgtgaccagcagcctgtgcagcaccagcggcgtgcagaccagcctgcccaccgagagctgcagcgacgagagcgacagcgagctgagccagaagctggaggacctggacaacagcctggaggtgaaggccaagcccgccagcggcctggacggcaacttcaacagcatcagaatggacatgttcagcgtgtag

SEQ ID NO: 309007 - DNA, 468 bp, Artificial Sequence
  derived and/or modified sequence
atggagacctgcgacagcccccccatcagcagacaggagaacggccagagcaccagcaagctgtgcggcaccacccagctggacaacgaggtgcccgagaaggtggccggcatggagcccgacagagagaacagcagcaccgacgacaacctgaagaccgacgagagaaagagcgaggccctgctgggcttcagcgtggagaacgccgccgccacccaggtgaccagcgccaaggagatcccctgcaacgagtgcgccaccagcttccccagcctgcagaagtacatggagcaccactgccccaacgccagactgcccgtgctgaaggacgacaacgagagcgagatcagcgagctggaggacagcgacgtggagaacctgaccggcgagatcgtgtaccagcccgacggcagcgcctacatcatcgaggacagcaaggagagcggccagaacgcccagaccggctag

SEQ ID NO: 309008 - DNA, 10851 bp, Artificial Sequence
  derived and/or modified sequence
atggagacctgcgacagcccccccatcagcagacaggagaacggccagagcaccagcaagctgtgcggcaccacccagctggacaacgaggtgcccgagaaggtggccggcatggagcccgacagagagaacagcagcaccgacgacaacctgaagaccgacgagagaaagagcgaggccctgctgggcttcagcgtggagaacgccgccgccacccaggtgaccagcgccaaggagatcccctgcaacgagtgcgccaccagcttccccagcctgcagaagtacatggagcaccactgccccaacgccagactgcccgtgctgaaggacgacaacgagagcgagatcagcgagctggaggacagcgacgtggagaacctgaccggcgagatcgtgtaccagcccgacggcagcgcctacatcatcgaggacagcaaggagagcggccagaacgcccagaccggcgccaacagcaagctgttcagcaccgccatgttcctggacagcctggccagcgccggcgagaagagcgaccagagcgccagcgcccccatgagcttctacccccagatcatcaacaccttccacatcgccagcagcctgggcaagcccttcaccgccgaccaggccttccccaacaccagcgccctggccggcgtgggccccgtgctgcacagcttcagagtgtacgacctgagacacaagagagagaaggactacctgaccagcgacggcagcgccaagaacagctgcgtgagcaaggacgtgcccaacaacgtggacctgagcaagttcgacggctgcgtgagcgacggcaagagaaagcccgtgctgatgtgcttcctgtgcaagctgagcttcggctacatcagaagcttcgtgacccacgccgtgcacgaccacagaatgaccctgaacgacgaggagcagaagctgctgagcaacaagtgcgtgagcgccatcatccagggcatcggcaaggacaaggagcccctgatcagcttcctggagcccaagaagagcaccagcgtgtacccccacttcagcaccaccaacctgatcggccccgaccccaccttcagaggcctgtggagcgccttccacgtggagaacggcgacagcctgcccgccggcttcgccttcctgaagggcagcgccagcaccagcagcagcgccgagcagcccctgggcatcacccagatgcccaaggccgaggtgaacctgggcggcctgagcagcctggtggtgaacacccccatcaccagcgtgagcctgagccacagcagcagcgagagcagcaagatgagcgagagcaaggaccaggagaacaactgcgagagacccaaggagagcaacgtgctgcaccccaacggcgagtgccccgtgaagagcgagcccaccgagcccggcgacgaggacgaggaggacgcctacagcaacgagctggacgacgaggaggtgctgggcgagctgaccgacagcatcggcaacaaggacttccccctgctgaaccagagcatcagccccctgagcagcagcgtgctgaagttcatcgagaagggcaccagcagcagcagcgccaccgtgagcgacgacaccgagaagaagaagcagaccgccgccgtgagagccagcggcagcgtggccagcaactacggcatcagcggcaaggacttcgccgacgccagcgccagcaaggacagcgccaccgccgcccaccccagcgagatcgccagaggcgacgaggacagcagcgccaccccccaccagcacggcttcacccccagcacccccggcacccccggccccggcggcgacggcagccccggcagcggcatcgagtgccccaagtgcgacaccgtgctgggcagcagcagaagcctgggcggccacatgaccatgatgcacagcagaaacagctgcaagaccctgaagtgccccaagtgcaactggcactacaagtaccagcagaccctggaggcccacatgaaggagaagcaccccgagcccggcggcagctgcgtgtactgcaagaccggccagccccaccccagactggccagaggcgagagctacacctgcggctacaagcccttcagatgcgaggtgtgcaactacagcaccaccaccaagggcaacctgagcatccacatgcagagcgacaagcacctgaacaacgtgcagaacctgcagaacggcaacggcgagcaggtgttcggccacagcgcccccgcccccaacaccagcctgagcggctgcggcacccccagccccagcaagcccaagcagaagcccacctggagatgcgaggtgtgcgactacgagaccaacgtggccagaaacctgagaatccacatgaccagcgagaagcacatgcacaacatgatgctgctgcagcagaacatgaagcagatccagcacaacctgcacctgggcctggcccccgccgaggccgagctgtaccagtactacctggcccagaacatcggcctgaccggcatgaagctggagaaccccgccgacccccagctgatgatcaaccccttccagctggaccccgccaccgccgccgccctggcccccggcctggtgaacaacgagctgccccccgagatcagactggccagcggccagctgatgggcgacgacctgagcctgctgaccgccggcgagctgagcccctacatcagcgaccccgccctgaagctgttccagtgcgccgtgtgcaacaagttcaccagcgacagcctggaggccctgagcgtgcacgtgagcagcgagagaagcctgcccgaggaggagtggagagccgtgatcggcgacatctaccagtgcaagctgtgcaactacaacacccagctgaaggccaacttccagctgcactgcaagaccgacaagcacatgcagaagtaccagctggtggcccacatcaaggagggcggcaagagcaacgagtggagactgaagtgcatcgccatcggcaaccccgtgcacctgaagtgcaacgcctgcgactactacaccaacagcgtggacaagctgagactgcacaccaccaaccacagacacgaggccgccctgaagctgtacaagcacctgcagaagcaggagggcgccgtgaaccccgagagctgctactactactgcgccgtgtgcgactacaccaccaaggtgaagctgaacctggtgcagcacgtgagaagcgtgaagcaccagcagaccgagggcctgagaaagctgcagctgcaccagcagggcctggcccccgaggaggacaacctgagcgagatcttcttcgtgaaggactgcccccccaacgagctggagaccgccagcctgggcgccagaacctgcgacgacgacctgaccgagcagcagctgagaagcaccagcgaggagcagagcgaggaggccgagggcgccatcaagcccaccgccgtggccgaggacgacgagaaggacaccagcgagagagacaacagcgagggcaagaacagcaacaaggacagcggcatcatcacccccgagaaggagctgaaggtgagcgtggccggcggcacccagcccctgctgctggccaaggaggaggacgtggccaccaagagaagcaagcccaccgaggacaacaagttctgccacgagcagttctaccagtgcccctactgcaactacaacagcagagaccagagcagaatccagatgcacgtgctgagccagcacagcgtgcagcccgtgatctgctgccccctgtgccaggacgtgctgagcaacaagatgcacctgcagctgcacctgacccacctgcacagcgtgagccccgactgcgtggagaagctgctgatgaccgtgcccgtgcccgacgtgatgatgcccaacagcatgctgctgcccgccgccgccagcgagaagagcgagagagacacccccgccgccgtgaccgccgagggcagcggcaagtacagcggcgagagccccatggacgacaagagcatggccggcctggaggacagcaaggccaacgtggaggtgaagaacgaggagcagaagcccaccaaggagcccctggaggtgagcgagtggaacaagaacagcagcaaggacgtgaagatccccgacaccctgcaggaccagctgaacgagcagcagaagagacagcccctgagcgtgagcgacagacacgtgtacaagtacagatgcaaccactgcagcctggccttcaagaccatgcagaagctgcagatccacagccagtaccacgccatcagagccgccaccatgtgcaacctgtgccagagaagcttcagaaccttccaggccctgaagaagcacctggaggccggccaccccgagctgagcgaggccgagctgcagcagctgtacgccagcctgcccgtgaacggcgagctgtgggccgagagcgagaccatgagccaggacgaccacggcctggagcaggagatggagagagagtacgaggtggaccacgagggcaaggccagccccgtgggcagcgacagcagcagcatccccgacgacatgggcagcgagcccaagagaaccctgcccttcagaaagggccccaacttcaccatggagaagttcctggaccccagcagaccctacaagtgcaccgtgtgcaaggagagcttcacccagaagaacatcctgctggtgcactacaacagcgtgagccacctgcacaagctgaagaaggtgctgcaggaggccagcagccccgtgccccaggagaccaacagcaacaccgacaacaagccctacaagtgcagcatctgcaacgtggcctacagccagagcagcaccctggagatccacatgagaagcgtgctgcaccagaccaaggccagagccgccaagctggagcccagcggccacgtggccggcggccacagcatcgccgccaacgtgaacagccccggccagggcatgctggacagcatgagcctggccgccgtgaacagcaaggacacccacctggacgccaaggagctgaacaagaagcagacccccgacctgatcagcgcccagcccgcccaccaccccccccagagccccgcccagatccagatgcagctgcagcacgagctgcagcagcaggccgccttcttccagccccagttcctgaaccccgccttcctgccccacttccccatgacccccgaggccctgctgcagttccagcagccccagttcctgttccccttctacatccccggcaccgagttcagcctgggccccgacctgggcctgcccggcagcgccaccttcggcatgcccggcatgaccggcatggccggcagcctgctggaggacctgaagcagcagatccagacccagcaccacgtgggccagacccagctgcagatcctgcagcagcaggcccagcagtaccaggccacccagccccagctgcagccccagaagcagcagcagcagcccccccccccccagcagcagcagcagcagcaggccagcaagctgctgaagcaggagcagagcaacatcgtgagcgccgactgccagatcatgaaggacgtgcccagctacaaggaggccgaggacatcagcgagaagcccgagaagcccaagcaggagttcatcagcgagggcgagggcctgaaggagggcaaggacaccaagaagcagaagagcctggagcccagcatccccccccccagaatcgccagcggcgccagaggcaacgccgccaaggccctgctggagaacttcggcttcgagctggtgatccagtacaacgagaacagacagaaggtgcagaagaagggcaagagcggcgagggcgagaacaccgacaagctggagtgcggcacctgcggcaagctgttcagcaacgtgctgatcctgaagagccaccaggagcacgtgcacggccagttcttcccctacgccgccctggagaagttcgccagacagtacagagaggcctacgacaagctgtaccccatcagccccagcagccccgagacccccccccccccccccccccccccccccctgccccccgcccccccccagcccagcagcatgggccccgtgaagatccccaacaccgtgagcacccccctgcaggcccccccccccaccccccccccccccccccccccccccccccccccccccccccccccccccccccccccccccagcgcccccccccaggtgcagctgcccgtgagcctggacctgcccctgttccccagcatcatgatgcagcccgtgcagcaccccgccctgcccccccagctggccctgcagctgccccagatggacgccctgagcgccgacctgacccagctgtgccagcagcagctgggcctggaccccaacttcctgagacacagccagttcaagagacccagaaccagaatcaccgacgaccagctgaagatcctgagagcctacttcgacatcaacaacagccccagcgaggagcagatccaggagatggccgagaagagcggcctgagccagaaggtgatcaagcactggttcagaaacaccctgttcaaggagagacagagaaacaaggacagcccctacaacttcagcaacccccccatcaccgtgctggaggacatcagaatcgacccccagcccaccagcctggagcactacaagagcgacgccagcttcagcaagagaagcagcagaaccagattcaccgactaccagctgagagtgctgcaggacttcttcgacaccaacgcctaccccaaggacgacgagatcgagcagctgagcaccgtgctgaacctgcccaccagagtgatcgtggtgtggttccagaacgccagacagaaggccagaaagagctacgagaaccaggccgagaccaaggacaacgagaagagagagctgaccaacgagagatacatcagaaccagcaacatgcagtaccagtgcaagaagtgcaacgtggtgttccccagaatcttcgacctgatcacccaccagaagaagcagtgctacaaggacgaggacgacgacgcccaggacgagagccagaccgaggacagcatggacgccaccgaccaggtggtgtacaagcactgcaccgtgagcggccagaccgacgccgccaagaacgccgccgcccccgccgccagcagcggcagcggcaccagcacccccctgatccccagccccaagcccgagcccgagaagaccagccccaagcccgagtaccccgccgagaagcccaagcagagcgaccccagcccccccagccagggcaccaagcccgccctgcccctggccagcaccagcagcgaccccccccaggccagcaccgcccagccccagccccagccccagccccccaagcagccccagctgatcggcagaccccccagcgccagccagacccccgtgcccagcagccccctgcagatcagcatgaccagcctgcagaacagcctgcccccccagctgctgcagtaccagtgcgaccagtgcaccgtggccttccccaccctggagctgtggcaggagcaccagcacatgcacttcctggccgcccagaaccagttcctgcacagccccttcctggagagacccatggacatgccctacatgatcttcgaccccaacaaccccctgatgaccggccagctgctgggcagcagcctgacccagatgcccccccaggccagcagcagccacaccaccgcccccaccaccgtggccgccagcctgaagagaaagctggacgacaaggaggacaacaactgcagcgagaaggagggcggcaacagcggcgaggaccagcacagagacaagagactgagaaccaccatcacccccgagcagctggagatcctgtacgagaagtacctgctggacagcaaccccaccagaaagatgctggaccacatcgccagagaggtgggcctgaagaagagagtggtgcaggtgtggttccagaacaccagagccagagagagaaagggccagttcagagccgtgggccccgcccagagccacaagagatgccccttctgcagagccctgttcaaggccaagagcgccctggagagccacatcagaagcagacactggaacgagggcaagcaggccggctacagcctgccccccagccccctgatcagcaccgaggacggcggcgagagcccccagaagtacatctacttcgactaccccagcctgcccctgaccaagatcgacctgagcagcgagaacgagctggccagcaccgtgagcacccccgtgagcaagaccgccgagctgagccccaagaacctgctgagccccagcagcttcaaggccgagtgcagcgaggacgtggagaacctgaacgccccccccgccgaggccggctacgaccagaacaagaccgacttcgacgagaccagcagcatcaacaccgccatcagcgacgccaccaccggcgacgagggcaacaccgagatggagagcaccaccggcagcagcggcgacgtgaagcccgccctgagccccaaggagcccaagaccctggacaccctgcccaagcccgccaccacccccaccaccgaggtgtgcgacgacaagttcctgttcagcctgaccagccccagcatccacttcaacgacaaggacggcgaccacgaccagagcttctacatcaccgacgaccccgacgacaacgccgacagaagcgagaccagcagcatcgccgaccccagcagccccaaccccttcggcagcagcaaccccttcaagagcaagagcaacgacagacccggccacaagagattcagaacccagatgagcaacctgcagctgaaggtgctgaaggcctgcttcagcgactacagaacccccaccatgcaggagtgcgagatgctgggcaacgagatcggcctgcccaagagagtggtgcaggtgtggttccagaacgccagagccaaggagaagaagttcaagatcaacatcggcaagcccttcatgatcaaccagggcggcaccgagggcaccaagcccgagtgcaccctgtgcggcgtgaagtacagcgccagactgagcatcagagaccacatcttcagcaagcagcacatcagcaaggtgagagagaccgtgggcagccagctggacagagagaaggactacctggcccccaccaccgtgagacagctgatggcccagcaggagctggacagaatcaagaaggccagcgacgtgctgggcctgaccgtgcagcagcccggcatgatggacagcagcagcctgcacggcatcagcctgcccaccgcctaccccggcctgcccggcctgccccccgtgctgctgcccggcatgaacggccccagcagcctgcccggcttcccccagaacagcaacaccctgaccccccccggcgccggcatgctgggcttccccaccagcgccaccagcagccccgccctgagcctgagcagcgcccccaccaagcccctgctgcagaccccccccccccccccccccccccccccccccccccccagcagcagcctgagcggccagcagaccgagcagcagaacaaggagagcgagaagaagcagaccaagcccaacaaggtgaagaagatcaaggaggaggagctggaggccaccaagcccgagaagcaccccaagaaggaggagaagatcagcagcgccctgagcgtgctgggcaaggtggtgggcgagacccacgtggaccccatccagctgcaggccctgcagaacgccatcgccggcgaccccgccagcttcatcggcggccagttcctgccctacttcatccccggcttcgccagctacttcaccccccagctgcccggcaccgtgcagggcggctacttcccccccgtgtgcggcatggagagcctgttcccctacggccccaccatgccccagaccctggccggcctgagccccggcgccctgctgcagcagtaccagcagtaccagcagaacctgcaggagagcctgcagaagcagcagaagcagcagcaggagcagcagcagaagcccgtgcaggccaagaccagcaaggtggagagcgaccagccccagaacagcaacgacgccagcgagaccaaggaggacaagagcaccgccaccgagagcaccaaggaggagccccagctggagagcaagagcgccgacttcagcgacacctacgtggtgcccttcgtgaagtacgagttcatctgcagaaagtgccagatgatgttcaccgacgaggacgccgccgtgaaccaccagaagagcttctgctacttcggccagcccctgatcgacccccaggagaccgtgctgagagtgcccgtgagcaagtaccagtgcctggcctgcgacgtggccatcagcggcaacgaggccctgagccagcacctgcagagcagcctgcacaaggagaagaccatcaagcaggccatgagaaacgccaaggagcacgtgagactgctgccccacagcgtgtgcagccccaaccccaacaccaccagcaccagccagagcgccgccagcagcaacaacacctacccccacctgagctgcttcagcatgaagagctggcccaacatcctgttccaggccagcgccagaagagccgccagcccccccagcagcccccccagcctgagcctgcccagcaccgtgaccagcagcctgtgcagcaccagcggcgtgcagaccagcctgcccaccgagagctgcagcgacgagagcgacagcgagctgagccagaagctggaggacctggacaacagcctggaggtgaaggccaagcccgccagcggcctggacggcaacttcaacagcatcagaatggacatgttcagcgtgtag

SEQ ID NO: 309009 - DNA, 423 bp, Artificial Sequence
  derived and/or modified sequence
atggagacctgcgacagcccccccatcagcagacaggagaacggccagagcaccagcaagctgtgcggcaccacccagctggacaacgaggtgcccgagaaggtggccggcatggagcccgacagagagaacagcagcaccgacgacaacctgaagaccgacgagagaaagagcgaggccctgctgggcttcagcgtggagaacgccgccgccacccaggtgaccagcgccaaggagatcccctgcaacgagtgcgccaccagcttccccagcctgcagaagtacatggagcaccactgccccaacgccagactgcccgtgctgaaggacgacaacgagagcgagatcagcgagctggaggacagcgacgtggagaacctgaccggcgagatcgtgtaccagcccgacggcagcgcctactag

SEQ ID NO: 309010 - DNA, 306 bp, Artificial Sequence
  derived and/or modified sequence
atggagacctgcgacagcccccccatcagcagacaggagaacggccagagcaccagcaagctgtgcggcaccacccagctggacaacgaggtgcccgagaaggtggccggcatggagcccgacagagagaacagcagcaccgacgacaacctgaagaccgacgagagaaagagcgaggccctgctgggcttcagcgtggagaacgccgccgccacccaggtgaccagcgccaaggagatcccctgcaacgagtgcgccaccagcttccccagcctgcagaagtacatggagcaccactgcccctag

SEQ ID NO: 309011 - DNA, 10803 bp, Artificial Sequence
  derived and/or modified sequence
atggaaacatgcgattcaccgcctatttcacggcaagaaaatgggcaatctacttctaagttatgcggtactacacagctggacaacgaggtgccagaaaaagtcgcgggtatggagccggaccgggaaaacagtagcactgacgacaacctcaagacagatgagcgtaagtctgaggccctgcttggctttagtgtggagaatgcagccgccacccaagtgactagcgctaaagagataccctgcaatgagtgcgctacctcattcccctccctccagaagtacatggagcatcactgtcccaacgcaagattgcctgttttgaaggacgataacgaaagtgagattagtgagctggaagactctgatgtcgaaaacctaacaggcgaaatcgtctatcagccggatggctcggcttacattatagaagatagcaaggaatcagggcagaacgcgcaaaccggggccaactccaagctattttcaactgctatgtttctagattcactcgctagcgcaggcgagaagagcgaccagagtgcctctgctccaatgtcattctatccacagattattaacacattccacatcgcgtctagcttggggaagccctttaccgcggatcaggcattccctaataccagcgccctagccggcgtggggccggtcctgcattcttttagggtgtatgaccttcgacataaacgtgaaaaggactatcttactagcgacgggtctgcaaagaattcatgcgtttctaaggacgtgccgaataacgtagatctgtccaagttcgatgggtgcgtgagtgacggcaagcgcaagcctgttttaatgtgttttctgtgcaaactgtcttttggttatattagatctttcgtcacgcatgccgtgcatgatcaccggatgaccctcaacgatgaggaacagaagctgttatctaataagtgtgtctcagccattattcaggggatcggcaaggataaggagccattaatctcattcctcgagcccaaaaaatctacttccgtctatccacatttctctaccacgaatctcatcggccctgacccaacctttaggggcctgtggagtgctttccacgtggaaaacggcgactctctacccgccgggttcgcatttctgaaggggtccgcctctacgtcctcgagcgcagagcagcccttaggcataacacagatgccaaaggctgaagtaaacttgggcggactctcaagtcttgtggtgaacaccccaattaccagcgtgtccctgtctcacagttcctctgagagtagcaagatgagcgagagcaaggaccaagaaaataactgtgagagacccaaagagtctaacgtgctgcaccccaacggggaatgccctgtgaagtctgaacccacagaacctggcgatgaagatgaagaggacgcgtactccaatgaactggatgatgaggaagtgctaggcgagttgacagattctattggtaataaagattttcccctgttaaaccagagtatatcaccactaagctcatccgttctcaaattcatcgaaaaaggcactagttcctcatctgctacagtgtctgatgacactgagaagaagaaacagacggctgccgtgcgcgcgtccgggtctgtggccagcaactacggtatcagtggaaaagactttgccgacgcctccgcgagcaaggacagtgccacagcagctcacccctccgaaattgctcgtggagatgaggatagctccgcgaccccccaccaacatggctttacccctagcaccccaggcaccccaggccctgggggagatggatcgccaggatccgggatcgagtgccccaagtgcgatactgtacttgggtcgtctagatctctgggcggacacatgactatgatgcactcgcgtaatagctgcaagacacttaagtgtcccaagtgcaactggcattataaataccagcagacactggaggcccacatgaaagaaaagcaccccgagcctggcggctcatgcgtctactgcaaaacaggacagccccatcctcgcctggcccggggggagtcttacacatgcggatacaagcccttcaggtgtgaagtttgtaattacagcacaactaccaagggcaatttgtcaatccacatgcagtccgacaagcatcttaataacgttcagaacctgcagaatggtaacggtgaacaggtctttggccacagtgctccggcacctaatacaagcctttccgggtgcggaacaccttcacccagcaagccaaagcagaagcctacctggcgctgcgaggtttgcgactacgagaccaatgtggcgcggaatctcaggatacatatgacttctgaaaagcacatgcacaacatgatgctgctacagcagaatatgaagcagatccagcacaatttgcacttaggcttggcacccgccgaggctgagctctatcaatactatcttgcccagaatattggcctcactggcatgaaacttgaaaatcctgcagatcctcagctgatgatcaatccgttccaattagaccccgccacagccgctgcattggccccaggactcgtgaataatgaattaccccctgaaatcaggttagccagcggccaactgatgggggacgacctctcactgctgactgcgggggagctgtcaccgtatatctcagatcccgcactgaagctcttccagtgcgccgtctgtaacaagtttacctcggactcactggaagctctgagtgtgcacgtctcttccgagcgaagcctcccagaggaggagtggagggcggttattggggacatataccagtgtaagctgtgcaactataatactcaactcaaggctaacttccaactgcactgcaagactgacaagcacatgcagaagtatcaactggtggcacatattaaagagggtggcaagtctaatgaatggaggctgaagtgtatcgctatcgggaacccagtccaccttaagtgtaacgcttgcgattactacaccaactccgttgacaagctgcggctgcataccaccaaccaccgtcacgaggctgcgttgaagttgtacaaacatctgcagaagcaagagggtgccgtgaacccagaaagctgctactactactgtgcagtatgtgactacaccacaaaagtcaaactgaatctggtccagcacgtcagaagtgtcaaacaccaacagaccgagggtctgcggaaattacagctgcaccagcaggggctcgctccagaggaagataacttgtccgaaattttttttgtcaaagactgcccacctaacgagctcgaaacagcatcgctaggcgctagaacctgcgacgatgacttgacagagcagcagctgcgatctacttcagaggagcagagcgaggaggcagagggcgctattaagcctaccgcagtcgccgaggacgatgaaaaagatacttctgagcgcgacaacagtgaaggaaagaactcaaataaggactcgggcatcataacccccgaaaaggagcttaaagtctcggttgcaggcggaacgcagcccctactgctagcgaaagaggaggacgtcgcgacaaaaaggagcaaacctaccgaggacaataagttctgtcacgaacaattctaccagtgcccatattgcaactataacagccgcgaccagtcacggatccaaatgcatgtgctgagtcagcacagtgttcagccagtgatatgctgtccattgtgtcaggatgttctgtcgaacaaaatgcacctgcaactgcatctgacacacctgcatagcgtatcgcctgactgtgtggagaagctgttaatgacagtgcctgtacctgacgtgatgatgccaaactcgatgctactccccgcggccgccagcgagaaaagtgagagggacactcccgccgcagtaacagccgagggctcaggtaagtatagtggagaatctccaatggatgacaagtctatggccggtctggaggattcaaaagccaacgtggaggttaaaaacgaggaacagaagcctacgaaagagcccctggaagtgagcgaatggaataagaattccagtaaggacgtcaaaatacccgacacccttcaggaccaactaaacgaacagcaaaagcggcagcctttaagtgtatctgatagacacgtttataagtatagatgtaatcactgcagtctggcttttaagaccatgcagaagctgcagatccattcccagtaccacgcaatccgcgcggctacgatgtgtaatctgtgccaaagatcattccgcaccttccaggccctgaagaagcatctcgaagcaggccaccctgaactgtctgaggccgaactgcaacagctgtatgccagcttacccgtgaacggtgagctgtgggctgaatctgaaacaatgtctcaggatgaccacggactggagcaggaaatggagcgggagtatgaagtcgaccatgagggaaaggcctcccccgttggttctgatagcagctcaattccagacgacatgggatccgagccgaaaaggaccctgcccttcagaaaaggccctaacttcactatggaaaagtttctggacccctctcggccctataaatgcacagtctgcaaggaatccttcactcagaagaacatccttcttgtgcattacaatagcgtctcccatcttcataagttgaagaaggtgctccaggaggcaagttctcctgtgccacaggagaccaacagcaacactgataacaagccatacaaatgcagcatatgtaatgtggcctactcccagtcaagcaccctcgagattcatatgcggagtgtactccatcagacaaaagcaagggctgcaaaacttgaacctagtgggcatgtggcaggcggtcattccattgcggctaatgtaaactcgcccggccaaggcatgttagactccatgagcctggcagctgtcaacagcaaagatactcatctggacgcaaaagagctcaacaaaaaacaaacacctgacctgatctctgctcagcccgcgcaccacccaccacagagccccgcacaaattcaaatgcaactccaacacgagctgcagcagcaggcagcgttcttccagcctcagttcctgaatccagcattcctgcctcacttccccatgacccctgaagccttgctccagttccagcagccccaattcctcttccccttctacatacccggaacagagttctcgctggggccagacctgggcttgccaggcagcgccacgttcgggatgcccgggatgacgggaatggcagggtcactgttggaagatttgaaacagcaaatacagacccagcatcacgtcggtcagacccagctgcagatcttgcaacagcaagctcagcagtatcaggcaacccaaccgcagctacagccccagaaacagcagcagcaacctcctccgccccagcagcagcagcagcagcaagctagcaaactcctgaaacaggaacaaagtaacatagtctcagcagactgtcaaatcatgaaggatgttcctagctataaggaggctgaggatattagtgagaaaccggagaagcccaaacaggagttcattagcgagggtgaaggacttaaggagggtaaagataccaagaaacagaagtcactggagccatccattccccctcctcgcattgcaagtggagcaagaggtaatgcggctaaagcattgctggagaacttcgggtttgagctggtaatccagtataacgagaaccggcagaaggttcagaaaaaaggcaaatccggtgaaggcgaaaacactgataagctcgaatgcgggacttgtggcaagctgttttcaaatgttctgatccttaagtctcatcaagagcatgtccacggccagttctttccctacgcagccttggaaaaattcgcaagacaatatagggaggcttacgacaaactttatcctatctctccatccagccctgagactccaccccctccccctcctccgcctcccctgccacccgctccaccccaaccctctagcatgggcccagtcaaaattcctaacacagtaagcacacccttgcaggctccgccacccactcctccacccccgagcgccccgcctcaggttcagctgcccgtttcactggatcttcccctctttccgagtattatgatgcagccggttcaacatccagcactgcctcctcaattggcccttcagctgccacagatggacgcactgtcagctgatttaacccagctttgccagcagcaactaggtctggaccccaatttcctgagacactcccagttcaaacgcccaaggacacgaatcactgatgaccaactgaaaattttgcgcgcctacttcgatataaacaattcccccagtgaggagcaaattcaggaaatggccgaaaaatccggcctcagccaaaaagttattaagcactggtttcgcaatacacttttcaaagagaggcagaggaacaaggattccccatacaatttcagtaatccccccatcacagtgctcgaagacattcggatcgaccctcaaccaacgagcctggagcattacaagtccgacgcatctttttccaagcgtagctcacgcacccgatttaccgactatcaactcagggtcttgcaggacttttttgacacaaatgcctacccaaaggacgacgagatcgaacaattatcaacagtcttaaatctgcctacccgcgtaattgtggtgtggttccagaacgcaagacagaaagccaggaagagttatgagaatcaggcagagacgaaagacaatgagaagagagaattaacaaatgaaaggtatattaggaccagcaatatgcagtaccagtgtaaaaagtgtaatgtggtgtttccccgtatttttgacctcatcacgcaccagaagaaacaatgctacaaggatgaggacgatgacgcccaggatgagagccagaccgaagactctatggacgccacagatcaggtggtttataaacattgcactgtgtctggtcagaccgatgcggccaaaaatgcagcagcgccagctgcaagctccggaagtgggacgagtacccccctaattcccagcccaaagcctgaaccagaaaagacctcccctaagcccgagtacccggccgagaaacccaaacagtcagacccttctccaccttctcagggtacgaaacctgcccttcctctggcttcgacaagctccgacccaccccaggcctctacagcgcaaccccagcctcagccccagccacctaaacagcctcaactgatagggcgaccaccaagcgctagtcaaacaccagttccctctagtcctctccagatttccatgacttccttgcagaacagcctgcctccgcagctgctccagtaccaatgcgaccagtgcactgtggcttttccgacactggagctgtggcaggagcaccagcacatgcactttctggctgctcagaatcaatttctgcacagtcccttcctggagaggcccatggatatgccgtacatgatctttgatccaaacaaccccctaatgacaggacagctgctgggctcaagccttacacagatgcctcctcaagcatccagctcacacactaccgcccccacgactgtcgccgccagcttgaagcgcaagctcgacgataaagaggataacaattgcagcgagaaggaggggggcaactctggcgaggatcagcaccgagataaaaggctccggacaaccatcacccccgagcagctcgagatattgtacgaaaaatacttgctcgactcaaacccaaccagaaaaatgctcgatcatatcgctagggaggttgggctgaagaagcgggttgtccaggtttggttccagaatacccgggcacgagagaggaagggacagttccgcgcagtggggcctgctcaatcccacaagcgctgcccattctgccgagcattgttcaaagctaaaagcgcattggagtcccatatccgttccagacactggaatgagggtaagcaggccggctacagtctgcctccatccccactcatcagtacggaggatgggggagaatccccgcagaagtacatttattttgattacccatccctaccgctcaccaagatcgacttgtcgagcgaaaacgagctcgcctctacagtcagcacaccggtctcaaagacagccgagctgtctcctaagaacctccttagccccagctccttcaaggccgagtgctcggaggacgtggaaaatctgaacgctccgcctgccgaggctggctacgatcagaacaaaactgatttcgatgagactagctccatcaatacagctatctccgatgctaccacaggagatgagggtaataccgaaatggagagcactactggttctagcggcgatgttaagcccgcacttagccccaaagaacccaagaccttagacacattgcctaaaccagccactacacccacgacagaggtgtgtgatgacaaatttttattctccctgacaagtccatctattcacttcaatgataaagatggcgaccacgaccagtcgttctatataactgacgatccggacgataatgcagacaggtccgaaacctcatctatagcggacccatcaagtccaaacccattcgggtccagcaacccttttaagagcaagagcaacgatcgaccaggccataaaagattcagaacccagatgtcaaacctgcagctgaaagtgttaaaggcctgcttttcagactacaggactccgaccatgcaggagtgcgagatgttgggaaatgagatagggctgcctaagcgggttgtccaggtctggttccagaacgcacgggcaaaggagaaaaagtttaagatcaacatagggaaacccttcatgataaaccagggaggaaccgaaggaaccaaaccagagtgtaccttgtgtggggtgaagtatagcgctagactttccattcgcgaccatatcttttctaaacagcacattagtaaagttcgagaaactgtgggttcacaattggaccgcgaaaaagactatttggcccctactactgtgcgccagctgatggcgcagcaggagctcgatcgaatcaagaaggcctctgacgtgctaggcctgactgtgcagcagcctggaatgatggattctagctccctgcacggcataagcttaccaaccgcttatcctggacttcccgggttaccccccgttctgctccccggaatgaacggccccagttctctgccgggatttccacagaatagtaatactctaacacctcccggggccggtatgcttggtttcccaacctccgccacgtcctcgccagccttatccctgtcatcggcacctaccaagccattgcttcaaacccctccgcctccacccccacccccacctcccccaccctcttctagtctgagcggacagcagacagagcagcagaataaggagagcgaaaagaagcagacaaaaccgaataaggtgaaaaagattaaagaggaggagctggaagccactaagcccgaaaagcatccaaaaaaggaggagaaaatctcttcagctctgagtgtgttgggaaaagttgtgggcgagacccacgttgaccccatccaactgcaggcgcttcagaatgccatcgccggggaccccgcatcatttatcgggggccagttcctgccctatttcatcccaggctttgcctcatattttacaccccaactaccagggactgttcaaggcggctatttcccacctgtgtgtggcatggagtcactctttccctacggtcccactatgcctcaaacattggcaggcctgagtcctggcgctctcttgcagcaatatcagcaataccagcaaaacttacaagagtcactccagaaacagcaaaagcagcaacaggagcagcagcagaaacccgtacaagccaaaaccagcaaggtcgaatctgaccagcctcagaacagcaatgatgccagcgagaccaaggaggataagtctacagcaactgaatctaccaaagaggagcctcagctggaatccaagtctgccgacttttcagatacctacgtggtgccgttcgtgaagtacgaatttatatgccgtaaatgtcagatgatgtttaccgacgaagacgccgccgtgaaccatcagaagtccttttgctatttcggacagcctctgatcgaccctcaagagaccgtgctccgagttcctgtgtctaagtaccagtgcttagcatgtgatgtcgctatctctgggaacgaagccctttctcagcacctgcagagcagcctgcacaaggaaaaaaccattaagcaggctatgcggaatgcaaaggaacatgtgcgcctcttgccccactccgtgtgctcgcccaatcccaataccactagtacctcccagtcagccgcatcttcaaataatacctacccccatctctcttgtttttcaatgaagagttggccaaacattctttttcaagcttcggcaaggagagctgcctcacccccatcaagccccccctccctttccttgcccagcactgtaactagtagtctttgctccacctccggtgttcagacatcattgcctaccgaatcatgcagcgatgaatcggactctgaattatctcaaaaactggaggacctggacaacagtctggaggtgaaagcaaagccggcttcaggcctggatggcaacttcaactccattcggatggatatgtttagcgtgtag

SEQ ID NO: 309012 - DNA, 468 bp, Artificial Sequence
  derived and/or modified sequence
atggagacctgcgatagcccaccaatctcccggcaagagaacggacagagtacgtccaaactgtgcggcacaactcagttggacaatgaggtgcctgagaaagtggcaggcatggagcccgatagagagaattcttccaccgacgataaccttaagactgatgagcggaagagcgaggctcttctgggcttctccgtcgagaatgccgccgctacacaagtcacctctgccaaggagatcccctgtaatgaatgtgcaacatcttttccctctctacagaaatacatggagcaccactgtcctaatgcccgccttcccgtgcttaaagacgataatgaatccgaaatttccgagctggaggatagcgatgttgagaaccttactggcgaaatcgtgtatcagcccgacggctccgcgtacatcatcgaagacagtaaggagtccggccagaatgctcaaaccgggtag

SEQ ID NO: 309013 - DNA, 468 bp, Artificial Sequence
  derived and/or modified sequence
atggaaacttgtgactctcctcccatcagtcgtcaggagaatgggcaatctacgagtaagctgtgcgggactacccagctggacaatgaggtgccagagaaggtggcaggcatggagccagatcgtgagaattcctctacagacgacaatttgaaaacggacgagcggaagtctgaggcactcctcggtttttctgtggagaacgccgctgcaactcaggtgacctccgcaaaagaaattccttgtaatgagtgcgcgacaagttttccgtctcttcagaagtacatggagcatcattgcccaaacgctcgtctgcctgtcctgaaggatgataatgagagcgaaattagtgaactcgaggattcagatgtggagaacctgacaggcgagatcgtctaccagccagatggatcagcgtacatcattgaagacagtaaggaatccggccagaatgctcaaaccggatag

SEQ ID NO: 309014 - DNA, 10851 bp, Artificial Sequence
  derived and/or modified sequence
atggagacatgtgactcacctcccatttcaaggcaagagaacgggcaaagcaccagcaagctctgcggcacaacccagctggacaacgaggtaccagaaaaggtggcaggaatggagccggatcgggagaactcatcaacagatgataatctaaagacagacgagcgaaagtcagaggcgctgctcggcttcagcgttgagaatgcagccgccacccaggtcacaagcgccaaagagatcccctgcaacgaatgcgctacgtctttcccaagcttacagaagtatatggaacatcactgcccaaacgctaggctcccagttctgaaagacgacaatgagtccgagatttcagaactggaggatagcgacgttgagaacctgactggcgagatagtctatcagcccgacgggagtgcttacatcattgaggacagcaaagagagcggacagaatgcccagactggagcaaattccaaactgttctctactgcaatgtttctcgactctttggccagcgcaggagagaagtcagaccagtccgcgagtgcccccatgtcgttctacccacagataattaacacgttccacattgccagcagcctgggaaagccatttaccgcggatcaggcttttcctaacacatccgcactcgcaggagtgggtccagtactgcatagttttcgcgtgtacgatctgagacataaaagggagaaggactacttgacaagtgacgggagtgcgaagaattcctgtgtgagtaaagacgtgccaaacaacgtagatctctctaagtttgatggttgcgtgagcgatggtaagcgtaagcccgtgctgatgtgttttttgtgtaaactgtcgttcggctatataaggtcattcgtgacccacgctgtgcatgaccatagaatgacgctgaacgatgaagagcaaaagctgctgtccaacaagtgtgtgagcgcaatcatacaagggatcggcaaagataaggaacccctgatttcctttctggagcccaaaaagagcacttcagtgtatccccatttctccactactaacctaatcggccctgatccgacttttcgcggactgtggagtgcattccatgtggaaaacggcgatagcctacccgctggattcgcctttctgaagggctccgcttccacctcatcctctgccgagcagccgcttggcattacgcagatgcctaaggcagaagtgaacctagggggactgtccagtcttgtggttaacaccccaattacttcggtgtccctgagtcactcatcgtcagagtcctccaagatgtccgagtccaaggaccaggagaataattgcgagagaccaaaggagagtaatgtgctgcacccaaacggtgagtgtccggtgaagtccgaacctactgagccaggcgatgaagatgaggaggatgcatactccaatgaactcgatgatgaagaagtgctgggcgagctgactgattccatcggcaacaaagattttccattactcaatcaaagtatttcgcccctcagttcctccgtcttgaaattcattgaaaaaggtacatcttctagctcagcgaccgtctctgatgataccgagaagaagaagcaaaccgccgctgttcgggcctctgggtcagtagcttctaattatgggatttctgggaaagacttcgcggacgcgtccgccagtaaggatagcgccaccgcggcacatccttctgagatagctcgaggtgatgaagattccagcgccaccccccaccagcatggttttacaccttcgaccccgggaacacccggaccggggggcgacggcagcccaggctctggaatcgagtgccctaaatgcgacaccgtcctgggcagcagccgttctctaggcggccacatgactatgatgcactcgaggaacagctgcaaaactctgaagtgtcccaaatgcaattggcactacaaataccaacagactctggaagcacatatgaaggagaagcatcccgaaccaggaggctcttgtgtgtactgcaagacaggccagccacatcctcgacttgcccgtggagagtcttacacatgcggatacaaaccctttaggtgtgaggtgtgtaactattcaaccaccacgaagggcaatctgagtattcatatgcagtccgataaacatctgaataacgtgcagaacctacagaacggcaatggcgagcaggtctttggtcatagtgcaccagccccgaacacgagtctttcaggttgtggtaccccctcaccctcaaaaccgaagcaaaagccaacctggagatgcgaggtgtgtgattatgaaaccaatgtggctcggaacctgaggatccacatgacgtctgagaagcacatgcacaatatgatgctgttgcagcaaaatatgaaacagattcaacacaaccttcaccttggtctggccccagcagaagctgaattgtaccagtactacttggctcaaaacattggtcttacgggcatgaaattggaaaacccagctgaccctcagctcatgattaacccttttcagcttgaccctgccactgccgccgccctggccccagggctggtgaataatgagctccctcccgagattcggctggcttctgggcaactgatgggagacgatcttagtttgcttaccgctggagagctgtccccctacattagcgaccccgctctcaagctgtttcaatgcgccgtgtgtaacaaattcacctctgacagcttagaggccctgtcagtgcacgtctccagcgagaggtcccttcctgaggaggagtggagagccgttatcggagatatataccagtgcaaactctgcaactacaatacgcagctcaaagctaactttcagctgcactgtaagaccgacaaacatatgcagaagtaccagctcgtggcacacatcaaggagggagggaagagcaacgaatggagacttaagtgcatcgctatcggaaaccccgtccacctcaaatgcaacgcatgcgactactacacgaactcagtcgacaaactccgattgcacaccaccaaccaccgtcacgaggccgctctgaaattatataagcatctacaaaagcaggagggtgccgtgaatcctgagagctgttactattattgcgcggtttgtgactacactacaaaggtaaagctgaatctggttcagcacgtgcgcagtgtgaaacaccagcagacggagggcctgaggaagctgcagctgcaccagcaaggtctggcgcccgaggaggataatttatcggaaattttcttcgttaaagactgtcccccaaatgagttagaaaccgctagccttggtgcccggacttgcgatgacgacctgaccgagcagcaactccgctccacctctgaggaacagagcgaggaggcagagggcgctataaagcccacagcagtggcggaagacgacgaaaaagataccagtgaacgggacaactctgaggggaagaatagcaacaaagacagtggaattattacccccgagaaggaactcaaggtctctgtcgccggcggcacgcaacccctactgctggcgaaggaagaagacgtggctacgaagagatccaaaccaaccgaagacaataagttttgtcacgaacagttctatcagtgcccatattgcaattataatagccgcgaccagtcccgtatccagatgcacgtgctgtcccagcactctgtgcagcccgttatttgctgccccctgtgccaggatgtactgtctaacaagatgcatctccagctccatctgacacacctgcactctgtctcacccgattgtgttgagaaactccttatgaccgtgccggtcccagatgtaatgatgcctaatagtatgttattaccagcagctgcctcagagaaaagtgagcgagacactcccgccgcggtcactgctgagggctccgggaagtattcaggggaatcccccatggacgacaagtcaatggcaggcctagaagactccaaggctaatgttgaggtcaagaatgaggagcaaaagccaaccaaggaacccctggaagtgtcggaatggaataaaaattcttcaaaggacgtgaaaatcccagatacacttcaagatcagctgaacgagcagcagaagcggcagcctctgagcgtgtcggatagacacgtctacaagtacagatgtaatcattgtagcctagcatttaaaactatgcagaagctgcagatccattcacagtatcatgctatacgtgcagcaactatgtgcaacctgtgccagagatcttttaggacattccaagcccttaagaaacatctggaggcaggacatcctgaactttccgaggctgagctccagcagctgtacgctagtctcccagttaacggggagttgtgggccgaatctgaaacaatgtctcaagatgatcatggtctggagcaggaaatggagagagagtacgaggtggatcacgagggaaaggcctccccggtcgggtcggacagctcctctatcccagatgatatgggcagcgaacccaagagaacacttccatttagaaaagggcctaacttcaccatggagaaatttctggacccctccagaccgtacaagtgcactgtgtgtaaagagtccttcacacaaaaaaatattctgttggttcattataacagcgtgtcccaccttcataagctgaaaaaagtactgcaagaagcaagctctccagtgccccaagaaactaacagcaacacagataataaaccatacaagtgtagcatctgtaatgttgcatatagccagagctcaaccctggagatccacatgaggtcagtccttcaccagaccaaagcacgggcggcaaaactcgagcctagtggccacgtggcgggggggcacagcatcgctgccaatgttaatagtcctggacagggcatgctcgacagcatgtctctggccgccgtgaacagcaaagacacccacctcgatgctaaggagttgaataaaaagcaaaccccagatctgatctcagcacagcctgcgcatcatcccccccagtctcctgcccaaatccaaatgcagctgcagcatgagcttcagcaacaagcggctttcttccagccacagtttctgaatccggcatttttgcctcattttccgatgacccctgaagccctgctgcagttccagcagcctcagtttctctttccattctatattcctggcacagaattttctttgggaccagatctgggcctaccaggcagcgccacgtttggcatgcctgggatgaccgggatggctggatctttactggaggacctgaagcaacaaattcagacccagcatcacgtgggacagactcagctccagattctccagcaacaggctcagcagtatcaagccacacagcctcagctccaaccccagaagcagcagcagcagcctccacccccccagcagcagcagcagcagcaggcctccaagctgctcaagcaggaacaatccaacatcgtctccgccgattgtcagattatgaaagacgtacccagctacaaggaggcagaggacattagcgagaagccagaaaagccaaaacaggaatttatttctgagggagaaggactgaaagagggcaaagacacaaaaaaacagaagagcctcgaaccaagtatcccaccaccacggatcgcaagcggagccagggggaatgccgctaaggcgctactcgagaactttgggtttgagttagtgattcaatacaacgagaatagacagaaggtccagaaaaagggcaagtctggagagggagagaatacggataaactcgagtgcggtacctgcggcaagctgttctccaatgttctgatcctcaaaagtcatcaggaacacgttcacggccaattcttcccctacgccgccttagagaagtttgcccgacagtatcgcgaagcctatgacaagctgtaccccatcagccctagtagcccggagactccacccccaccgcctccccctccacccctgcctcccgcaccaccccaaccgtctagtatggggcccgttaagatcccaaacacagtgtccacacccctgcaggcccctcccccgactccccctcctccccccccaccgccccctccccccccaccacctcctccccctcctcccccgtctgcacctccacaggttcaattacccgtgagtcttgatttaccactgtttccatctattatgatgcagcccgtccagcaccctgcactgccaccacagctcgccttgcagcttcctcagatggacgcgctgtccgctgatctgactcagctttgtcaacagcagctgggcctcgatcccaatttcttacgccatagccagtttaagcgcccgaggacacgcattaccgacgatcagctgaaaatcctgcgggcttacttcgatatcaataattccccatctgaagaacagatccaggagatggccgaaaagtctgggttgtcacagaaagtgatcaaacactggtttcgcaatacattgttcaaggaaaggcagaggaacaaggatagcccatataatttttccaacccacccatcaccgtgctcgaagatatccgtattgatcctcagcctacgagtctggagcactataaatcagatgcttcttttagcaaacgctccagccgcacgcgatttacagattatcagctgagggttctgcaggatttcttcgataccaatgcttatcccaaagacgacgaaatagaacagctgagtacggtgctgaacttacctacccgtgttattgttgtgtggttccagaacgcgcggcagaaagcgcggaagtcatacgagaaccaggccgaaaccaaggataacgagaagagagaactgacaaatgaaaggtacatccggacgtcaaatatgcagtaccagtgcaagaaatgtaacgtcgtgtttcctaggatttttgacctgataactcaccagaaaaagcagtgttacaaggatgaggacgatgatgctcaggatgaaagtcagactgaggacagcatggacgctacagatcaggtagtttacaagcattgcaccgtatccggtcaaactgacgcagctaagaatgctgcagctcctgctgcaagcagcggaagcggcacctctacaccactgattccgagtccaaagccggagcccgagaagacctcacccaaacctgaatacccagcagaaaaaccaaaacaaagcgatccttcccctccatcccagggaactaagcccgctctgccattggcgtcaacaagcagcgatcctccccaagcatccactgcccagccccagccacaaccccaacccccaaagcagcctcagctgattggacgccctccttcagctagccagactccggtcccctcatcacctctccagatctcaatgacttcactgcagaacagtctgccacctcagctgctgcagtaccagtgcgaccagtgtacagtagctttcccgactcttgagctatggcaggaacaccagcatatgcactttctggctgcccagaatcaattcctccacagccccttcctggaaagaccaatggatatgccctacatgatattcgaccccaacaaccccctcatgacaggtcagctgctcggttcaagcctgacccagatgcctccccaggcttcttcctcacacaccaccgcccccaccactgtggccgcatcgctgaagcggaagcttgatgacaaagaggataataactgttctgaaaaggagggaggcaatagtggcgaagatcagcacagagacaaaaggctgaggaccacgattacaccggaacagctcgagatcctttatgagaagtacctgttagattcgaaccccacgagaaagatgctcgatcacatcgcgagagaagtcggcctgaaaaagagagtggtacaggtgtggttccaaaataccagggcccgggagaggaaaggccagttccgtgccgtgggtcctgctcagtcacataagaggtgtccgttttgccgagcactctttaaagccaagagtgccttggagtcgcacatcagatcacgccactggaatgaaggaaaacaggcaggatattctctacctccctctccccttatttccaccgaagatgggggggagtcaccccagaagtacatctatttcgactatccgagtctcccactaacaaagattgatctcagttcagagaatgagctcgcaagtactgtgagcacacccgtttctaagacagctgagctcagccctaagaatctcctatctccttcctcgtttaaggcagaatgcagcgaggatgtcgagaacctgaacgctccccctgcagaggccgggtacgaccagaacaagacagacttcgatgagacaagcagcatcaatacggcaatctccgacgccacaacaggcgacgaggggaacacggagatggaaagtacaactggcagttcaggagacgtgaagcccgccctaagcccgaaagaaccgaaaactctcgacactttgccaaagccagcaacaacacccacaaccgaggtatgcgacgataaattcctcttctctttaaccagcccgtcgatccatttcaatgataaggatggcgatcacgatcagagcttctatataaccgacgatcctgatgataacgcagacaggagcgagacctcatctattgctgacccatcctcgccgaatccatttggaagttctaacccttttaaatcgaaatctaacgaccggccaggacacaagcgcttccgcacacagatgagcaacctgcagttgaaagtcctcaaagcctgcttcagtgactacagaactccaaccatgcaggaatgtgagatgcttggcaacgaaatcgggttgccaaaaagggtggttcaggtctggtttcagaacgcccgcgccaaagagaaaaaatttaaaatcaacatcggcaagcctttcatgattaaccagggcggtactgaggggactaaacccgagtgtaccctgtgtggagtaaaatactccgccaggctgagcatccgggaccatatttttagtaaacagcacatctcaaaggtgagagagacagtgggctctcagttggatagggagaaggattatctggcacccaccactgtcagacaactcatggcacagcaggagctcgaccgcattaagaaagcgtctgatgtcctgggtctgacagtccaacaacccggcatgatggattcaagctcactacatgggatcagccttccaactgcttacccaggtttgccaggcttgcctcccgttctgttaccagggatgaacggacccagcagcttaccgggctttccgcagaacagcaacactcttaccccccctggggcaggtatgctgggttttcctaccagcgccaccagctcacctgctctctctctctcttctgctcctaccaaacccctcctacagactccccctcctccgcccccgcctccaccaccacctccctcgtcctctctgtcgggccagcagactgaacagcagaacaaggaatcagagaaaaagcagaccaagcccaacaaagttaagaagatcaaagaggaagaactggaggctacaaagccagagaagcatcctaaaaaagaagagaagatcagcagtgcgctgtcagtgctcgggaaggtcgtgggcgaaacgcacgtcgaccctatccagctgcaggctttacagaatgccattgcaggcgacccagcctcattcataggagggcagttcctgccctactttattccaggctttgcctcgtatttcaccccccaactgccgggtactgtacagggcgggtatttccccccggtgtgcggcatggagtcacttttcccctacggtcccacaatgccacagaccctcgccggcctttcacctggagccctactccagcaatatcagcaatatcaacagaatctgcaggaaagcctgcagaagcagcagaaacaacagcaggaacagcagcagaagcctgtgcaggccaaaacgtccaaagttgaatccgaccagcctcaaaacagtaacgatgcatcggagaccaaggaagataagtcaacagccacagaatccaccaaggaggagcctcagttagagtctaaaagtgcagacttcagcgatacttacgttgtgccatttgtcaagtatgagttcatctgcagaaagtgccaaatgatgttcacagatgaagatgcagccgtcaaccatcagaaaagtttctgctacttcggacagccactcatcgacccgcaggaaacagtgctacgggtcccagtttctaaataccagtgcctggcttgtgatgtggctatatctggcaatgaagctctctcgcaacacctgcagtcttcgctgcacaaagaaaagacaatcaaacaggccatgcgcaatgcaaaggaacacgtgagattactgccccatagtgtgtgctcaccaaatcccaacactacaagtaccagccagagcgctgcctcatctaataatacctatccacacctgtcctgcttttccatgaaaagctggccaaacattctgttccaagcgagcgccagaagggccgcttcacctccaagttcccccccgagccttagcctcccctccactgtcacgtctagtttgtgcagcacgtcgggcgtccagacatccttacccaccgagtcttgctctgatgagagcgatagcgagctgagccaaaagcttgaggacctggacaactccctggaggttaaagccaagcctgcgtctggtctggacgggaatttcaatagcattagaatggacatgttttcggtttag

SEQ ID NO: 309015 - DNA, 423 bp, Artificial Sequence
  derived and/or modified sequence
atggagacatgcgattcaccgccgatcagccggcaagaaaacggccagagtacgagtaaactgtgcggcactacacaactggataacgaagttccagagaaggtagctggcatggaaccagaccgggagaattccagcactgacgataaccttaaaacagacgaaagaaaaagtgaagcactactcggttttagcgtggaaaatgcagcggcaacccaagtgacctcagcgaaggaaatcccttgtaacgagtgtgccacatctttcccctccttgcagaaatatatggagcatcactgccctaatgcaagactccctgttttgaaggacgacaacgagtccgaaatctccgaactcgaggacagcgacgtggaaaacttgacaggtgaaatagtgtatcagcctgatggctcagcctactag

SEQ ID NO: 309016 - DNA, 306 bp, Artificial Sequence
  derived and/or modified sequence
atggaaacgtgcgactccccaccaatcagccggcaggagaatggccagtccacttccaagctctgcggcacaactcagttggacaatgaagtgccggagaaggtggcgggcatggagcccgacagagaaaattcttccacagatgacaatctcaagacagatgagaggaagtcggaggctctgttaggattttcagtagagaacgccgctgcaacccaagtgacgagcgccaaagaaatcccctgtaatgagtgcgccacgtcatttccttcgctccagaagtatatggagcaccattgcccgtag

SEQ ID NO: 309017 - DNA, 10803 bp, Artificial Sequence
  derived and/or modified sequence
atggagacctgtgacagcccccccatcagccggcaggagaatggccagagcaccagcaagctgtgtggcaccacccagctggacaatgaggtgcctgagaaggtggccggcatggagccagaccgggagaacagcagcacagatgacaacctgaagacagatgagaggaagtctgaggccctgctgggcttctctgtggagaatgctgctgccacccaggtgaccagcgccaaggagatcccctgcaatgaatgtgccaccagcttccccagcctgcagaagtacatggagcaccactgccccaatgcccggctgcctgtgctgaaggatgacaatgaaagtgagatcagcgagctggaggacagtgatgtggagaacctgaccggggagatcgtgtaccagccagatggcagcgcctacatcatcgaggacagcaaggagagcggccagaatgcccagacaggagccaacagcaagctgttcagcacagccatgttcctggacagcctggccagcgctggggagaagagtgaccagagcgccagcgcccccatgtccttctacccccagatcatcaacaccttccacatcgccagcagcctgggcaagcccttcaccgctgaccaggccttccccaacaccagcgccctggccggcgtgggccctgtgctgcacagcttccgggtgtatgacctgcggcacaagcgggagaaggactacctgaccagtgatggcagcgccaagaacagctgtgtgtccaaggatgtgcccaacaacgtggacctgagcaagtttgatggctgtgtgtctgatggcaagaggaagcctgtgctgatgtgcttcctgtgcaagctgagctttggctacatccgcagctttgtgacccatgctgtgcatgaccacaggatgaccctgaatgatgaggagcagaagctgctgagcaacaagtgtgtgtctgccatcatccagggcatcggcaaggacaaggagcccctcatctccttcctggagcccaagaagagcacctctgtgtacccccacttcagcaccaccaacctgattggccctgaccccaccttccggggcctgtggagcgccttccacgtggagaatggagacagcctgcctgctggctttgccttcctgaagggcagcgccagcaccagcagcagcgctgagcagcccctgggcatcacccagatgcccaaggccgaggtgaacctgggcggcctgagcagcctggtggtgaacacccccatcacctctgtgtccctgagccacagcagcagcgagagcagcaagatgtctgagagcaaggaccaggagaacaactgtgagcggcccaaggagagcaatgtgctgcaccccaatggagaatgtcctgtgaagtctgagcccacagagcctggagatgaagatgaagaagatgcctacagcaatgagctggatgatgaggaggtgctgggggagctgacagacagcatcggcaacaaggacttccccctgctgaaccagagcatcagccccctgagcagctctgtgctgaagttcatcgagaagggcaccagcagcagcagcgccaccgtgtctgatgacacagagaagaagaagcagacagctgctgtgcgggccagcggctctgtggccagcaactacggcatcagcggcaaggactttgctgatgccagcgccagcaaggacagcgccacagctgcccaccccagcgagatcgcccggggagatgaggacagcagcgccaccccccaccagcacggcttcacccccagcaccccaggcaccccaggccctggaggagatggcagccctggcagcggcatcgagtgccccaagtgtgacacagtgctgggcagcagccgcagcctgggcggccacatgaccatgatgcacagcaggaacagctgcaagaccctgaagtgccccaagtgcaactggcactacaagtaccagcagaccctggaggcccacatgaaggagaagcaccctgagcccggcggcagctgtgtgtactgcaagacaggccagccccacccccggctggcccggggggagagctacacctgtggctacaagcccttccgctgtgaggtgtgcaactacagcaccaccaccaagggcaacctgagcatccacatgcagagcgacaagcacctgaacaacgtgcagaacctgcagaatggaaatggagagcaggtgtttggccacagcgccccagcccccaacaccagcctgagcggctgcggcacccccagccccagcaagcccaagcagaagcccacctggaggtgtgaggtgtgtgactatgagaccaacgtggccaggaacctgcgcatccacatgaccagcgagaagcacatgcacaacatgatgctgctgcagcagaacatgaagcagatccagcacaacctgcacctgggcctggccccagctgaggccgagctgtaccagtactacctggcccagaacatcggcctgaccggcatgaagctggagaacccagctgacccccagctgatgatcaaccccttccagctggaccctgccacagctgctgccctggcccctggcctggtgaacaatgagctgcccccagagatccggctggccagcggccagctgatgggagatgacctgagcctgctgacagctggggagctgagcccctacatcagtgaccctgccctgaagctgttccagtgtgctgtgtgcaacaagttcaccagtgacagcctggaggccctgtctgtgcacgtgagcagcgagaggagcctgcctgaggaggagtggagggctgtgattggagacatctaccagtgcaagctgtgcaactacaacacccagctgaaggccaacttccagctgcactgcaagacagacaagcacatgcagaagtaccagctggtggcccacatcaaggagggcggcaagagcaatgagtggaggctgaagtgcatcgccatcggcaaccctgtgcacctgaagtgcaatgcctgtgactactacaccaacagcgtggacaagctgcggctgcacaccaccaaccacagacatgaagctgccctgaagctgtacaagcacctgcagaagcaggagggcgctgtgaaccctgagagctgctactactactgtgctgtgtgtgactacaccaccaaggtgaagctgaacctggtgcagcacgtgcgctctgtgaagcaccagcagacagagggcctgaggaagctgcagctgcaccagcagggcctggcccctgaggaggacaacctgtctgagatcttctttgtgaaggactgccccccaaatgagctggagacagccagcctgggcgcccggacctgtgatgatgacctgacagagcagcagctgcggagcaccagcgaggagcagagcgaggaggccgagggcgccatcaagcccacagctgtggctgaagatgatgagaaggacaccagcgagcgggacaacagcgagggcaagaacagcaacaaggacagcggcatcatcaccccagagaaggagctgaaggtgtctgtggccggcggcacccagcccctgctgctggccaaggaggaggatgtggccaccaagaggagcaagcccacagaggacaacaagttctgccacgagcagttctaccagtgcccctactgcaactacaacagccgggaccagagccgcatccagatgcacgtgctgagccagcacagcgtgcagcccgtcatctgctgccccctgtgccaggatgtgctgagcaacaagatgcacctgcagctgcacctgacccacctgcacagcgtgtccccagactgtgtggagaagctgctgatgacagtgcctgtgcctgatgtgatgatgcccaacagcatgctgctgcctgctgctgccagcgagaagtctgagcgggacaccccagctgctgtgacagctgagggcagcggcaagtacagcggggagagccccatggatgacaagtccatggccggcctggaggacagcaaggccaacgtggaggtgaagaatgaggagcagaagcccaccaaggagcccctggaggtgtctgagtggaacaagaacagcagcaaggatgtgaagatcccagacaccctgcaggaccagctgaatgagcagcagaagaggcagcccctgtctgtgtctgacagacatgtgtacaagtaccgctgcaaccactgcagcctggccttcaagaccatgcagaagctgcagatccacagccagtaccacgccatccgggccgccaccatgtgcaacctgtgccagaggagcttccgcaccttccaggccctgaagaagcacctggaggccggccaccctgagctgtctgaggccgagctgcagcagctgtatgccagcctgcctgtgaatggagagctgtgggccgagagcgagaccatgagccaggatgaccacggcctggagcaggagatggagcgggagtatgaggtggaccacgagggcaaggccagccctgtgggcagtgacagcagcagcatcccagatgacatgggcagcgagcccaagaggaccctgcccttcaggaagggccccaacttcaccatggagaagttcctggaccccagccggccctacaagtgcaccgtgtgcaaggagagcttcacccagaagaacatcctgctggtgcactacaacagcgtgagccacctgcacaagctgaagaaggtgctgcaggaggccagcagccctgtgccccaggagaccaacagcaacacagacaacaagccctacaagtgcagcatctgcaatgtggcctacagccagagcagcaccctggagatccacatgaggtctgtgctgcaccagaccaaggcccgggccgccaagctggagcccagcggccacgtggccggcggccacagcattgctgccaacgtgaacagccctggccagggcatgctggacagcatgagcctggccgctgtgaacagcaaggacacccacctggatgccaaggagctgaacaagaagcagaccccagacctgatcagcgcccagcctgcccaccaccccccccagagccctgcccagatccagatgcagctgcagcacgagctgcagcagcaggccgccttcttccagccccagttcctgaacccagccttcctgccccacttccccatgaccccagaggccctgctgcagttccagcagccccagttcctgttccccttctacatccctggaacagagttcagcctgggccctgacctgggcctgcccggcagcgccaccttcggcatgcctggcatgacaggcatggccggcagcctgctggaggacctgaagcagcagatccagacccagcaccacgtgggccagacccagctgcagatcctgcagcagcaggcccagcagtaccaggccacccagccccagctgcagccccagaagcagcagcagcagcccccaccaccccagcagcagcagcagcagcaggccagcaagctgctgaagcaggagcagagcaacatcgtgtctgctgactgccagatcatgaaggatgtgcccagctacaaggaggccgaggacatcagcgagaagccagagaagcccaagcaggagttcatcagcgagggggagggcctgaaggagggcaaggacaccaagaagcagaagagcctggagcccagcatccccccaccccgcatcgccagcggggcccggggaaatgctgccaaggccctgctggagaactttggatttgagctggtgatccagtacaatgaaaatcggcagaaggtgcagaagaagggcaagtctggagaaggagaaaatacagacaagctggagtgtggcacctgtgggaagctgttcagcaatgtgctgatcctgaagagccaccaggagcacgtgcacggccagttcttcccctatgctgccctggagaagtttgcccggcagtaccgggaggcctatgacaagctgtaccccatcagccccagcagccctgagaccccacctcctcctcctcctcctccacccctgcccccagccccaccccagcccagctccatgggccctgtgaagatccccaacacagtgtccacccccctgcaggcccccccacccaccccacctccacccagcgccccaccccaggtgcagctgcctgtgtccctggacctgcccctcttccccagcatcatgatgcagcctgtgcagcacccagccctgcccccccagctggccctgcagctgccccagatggatgccctgtctgctgacctgacccagctgtgccagcagcagctgggcctggaccccaacttcctgcggcacagccagttcaagaggcccaggacccgcatcacagatgaccagctgaagatcctgcgggcctactttgacatcaacaacagccccagcgaggagcagatccaggagatggccgagaagagcggcctgagccagaaggtgatcaagcactggttcaggaacaccctcttcaaggagcggcagaggaacaaggacagcccctacaacttcagcaacccccccatcaccgtgctggaggacatcagaattgacccccagcccaccagcctggagcactacaagagtgatgccagcttcagcaagaggagcagcaggacccgcttcacagactaccagctgcgggtgctgcaggacttctttgacaccaatgcctaccccaaggatgatgaaattgagcagctgagcacagtgctgaacctgcccaccagggtcatcgtggtgtggttccagaatgcccggcagaaggccaggaagagctatgagaaccaggccgagaccaaggacaatgagaagcgggagctgaccaatgaaagatacatccgcaccagcaacatgcagtaccagtgcaagaagtgcaatgtggtgttcccccgcatctttgacctgatcacccaccagaagaagcagtgctacaaggatgaagatgatgatgcccaggatgagagccagacagaggacagcatggatgccacagaccaggtggtgtacaagcactgcaccgtgtctggccagacagatgctgccaagaatgctgctgccccagctgccagcagcggcagcggcaccagcacccccctcatccccagccccaagccagagcctgagaagaccagccccaagccagagtacccagctgagaagcccaagcagagcgaccccagcccccccagccagggcaccaagccagccctgcccctggccagcaccagcagtgaccccccccaggccagcacagcccagccccagccccagccccagccccccaagcagccccagctgattggccggccccccagcgccagccagacccctgtgcccagcagccccctgcagatctccatgaccagcctgcagaacagcctgcccccccagctgctgcagtaccagtgtgaccagtgcaccgtggccttccccaccctggagctgtggcaggagcaccagcacatgcacttcctggccgcccagaaccagttcctgcacagccccttcctggagcggcccatggacatgccctacatgatctttgaccccaacaaccccctgatgacaggccagctgctgggcagcagcctgacccagatgccaccccaggccagcagcagccacaccacagcccccaccaccgtggccgccagcctgaagaggaagctggatgacaaggaggacaacaactgcagcgagaaggagggcggcaacagcggggaggaccagcaccgggacaagaggctgcggaccaccatcaccccagagcagctggagatcctgtatgagaagtacctgctggacagcaaccccaccaggaagatgctggaccacatcgcccgggaggtgggcctgaagaagagggtggtgcaggtgtggttccagaacacccgggcccgggagaggaagggccagttccgggctgtgggccctgcccagagccacaagcgctgccccttctgccgggccctcttcaaggccaagagcgccctggagagccacatccgcagccgccactggaatgaaggcaagcaggccggctacagcctgccccccagccccctcatcagcacagaagatggaggagagagcccccagaagtacatctactttgactaccccagcctgcccctgaccaagattgacctgagcagtgaaaatgagctggccagcacagtgtccacccctgtgtccaagacagctgagctgagccccaagaacctgctgagccccagcagcttcaaggccgagtgcagtgaagatgtggagaacctgaatgcccctcctgctgaggccggctatgaccagaacaagacagactttgatgagaccagcagcatcaacacagccatcagtgatgccaccactggagatgagggcaacacagagatggagagcaccaccggcagcagtggagatgtgaagccagccctgagccccaaggagcccaagaccctggacaccctgcccaagccagccaccacccccaccacagaggtgtgtgatgacaagttcctgttcagcctgaccagccccagcatccacttcaatgacaaggatggagaccatgaccagagcttctacatcacagatgatcctgatgacaatgctgacagaagtgagaccagcagcattgctgaccccagcagccccaaccccttcggcagcagcaaccccttcaagagcaagagcaatgacaggcctggccacaagcgcttccgcacccagatgagcaacctgcagctgaaggtgctgaaggcctgcttcagtgactaccgcacccccaccatgcaggagtgtgagatgctgggcaatgagatcggcctgcccaagagggtggtgcaggtgtggttccagaatgcccgggccaaggagaagaagttcaagatcaacatcggcaagcccttcatgatcaaccagggcggcacagagggcaccaagccagagtgcaccctgtgtggggtgaagtacagcgcccggctgagcatccgggaccacatcttcagcaagcagcacatcagcaaggtgcgggagaccgtgggcagccagctggaccgggagaaggactacctggcccccaccaccgtgcggcagctgatggcccagcaggagctggaccgcatcaagaaggccagtgatgtgctgggcctgactgtgcagcagcccggcatgatggacagcagcagcctgcacggcatcagcctgcccacagcctacccaggcctgcccggcctgccccctgtgctgctgcccggcatgaatggccccagcagcctgcccggcttcccccagaacagcaacaccctgaccccacctggagctggcatgctgggcttccccaccagcgccaccagcagccctgccctgagcctgagcagcgcccccaccaagcccctgctgcagaccccacctcctcctcctcctcctcctcctcctccacccagcagcagcctgagcggccagcagacagagcagcagaacaaggagagcgagaagaagcagaccaagcccaacaaggtgaagaagatcaaggaggaggagctggaggccaccaagccagagaagcaccccaagaaggaggagaagatcagcagcgccctgtctgtgctgggcaaggtggtgggggagacccacgtggaccccatccagctgcaggccctgcagaatgccatcgccggggaccctgccagcttcatcggcggccagttcctgccctacttcatccctggctttgccagctacttcaccccccagctgcccggcaccgtgcagggcggctacttcccccctgtgtgtggcatggagagcctcttcccctacggccccaccatgccccagaccctggccggcctgagccctggggccctgctgcagcagtaccagcagtaccagcagaacctgcaggagagcctgcagaagcagcagaagcagcagcaggagcagcagcagaagcctgtgcaggccaagaccagcaaggtggagagtgaccagccccagaacagcaatgatgccagcgagaccaaggaggacaagagcacagccacagagagcaccaaggaggagccccagctggagagcaagtctgctgacttcagtgacacctacgtggtgccctttgtgaagtatgagttcatctgcaggaagtgccagatgatgttcacagatgaagatgctgctgtgaaccaccagaagagcttctgctacttcggccagcccctgattgacccccaggagaccgtgctgcgggtgcctgtgtccaagtaccagtgcctggcctgtgatgtggccatctctggaaatgaggccctgagccagcacctgcagagcagcctgcacaaggagaagaccatcaagcaggccatgagaaatgccaaggagcacgtgcggctgctgccccacagcgtgtgcagccccaaccccaacaccaccagcaccagccagagcgctgccagcagcaacaacacctacccccacctgagctgcttctccatgaagtcctggcccaacatcctcttccaggccagcgcccggcgggccgccagcccccccagcagcccccccagcctgagcctgcccagcacagtgaccagcagcctgtgcagcaccagcggcgtgcagaccagcctgcccacagagagctgcagtgatgaaagtgacagcgagctgagccagaagctggaggacctggacaacagcctggaggtgaaggccaagccagccagcggcctggatggcaacttcaacagcatccgcatggacatgttttctgtgtag

SEQ ID NO: 309018 - DNA, 468 bp, Artificial Sequence
  derived and/or modified sequence
atggagacctgtgacagcccccccatcagccggcaggagaatggccagagcaccagcaagctgtgtggcaccacccagctggacaatgaggtgcctgagaaggtggccggcatggagccagaccgggagaacagcagcacagatgacaacctgaagacagatgagaggaagtctgaggccctgctgggcttctctgtggagaatgctgctgccacccaggtgaccagcgccaaggagatcccctgcaatgaatgtgccaccagcttccccagcctgcagaagtacatggagcaccactgccccaatgcccggctgcctgtgctgaaggatgacaatgaaagtgagatcagcgagctggaggacagtgatgtggagaacctgaccggggagatcgtgtaccagccagatggcagcgcctacatcatcgaggacagcaaggagagcggccagaatgcccagacaggatag

SEQ ID NO: 309019 - DNA, 10851 bp, Artificial Sequence
  derived and/or modified sequence
atggagacctgtgacagcccccccatcagccggcaggagaatggccagagcaccagcaagctgtgtggcaccacccagctggacaatgaggtgcctgagaaggtggccggcatggagccagaccgggagaacagcagcacagatgacaacctgaagacagatgagaggaagtctgaggccctgctgggcttctctgtggagaatgctgctgccacccaggtgaccagcgccaaggagatcccctgcaatgaatgtgccaccagcttccccagcctgcagaagtacatggagcaccactgccccaatgcccggctgcctgtgctgaaggatgacaatgaaagtgagatcagcgagctggaggacagtgatgtggagaacctgaccggggagatcgtgtaccagccagatggcagcgcctacatcatcgaggacagcaaggagagcggccagaatgcccagacaggagccaacagcaagctgttcagcacagccatgttcctggacagcctggccagcgctggggagaagagtgaccagagcgccagcgcccccatgtccttctacccccagatcatcaacaccttccacatcgccagcagcctgggcaagcccttcaccgctgaccaggccttccccaacaccagcgccctggccggcgtgggccctgtgctgcacagcttccgggtgtatgacctgcggcacaagcgggagaaggactacctgaccagtgatggcagcgccaagaacagctgtgtgtccaaggatgtgcccaacaacgtggacctgagcaagtttgatggctgtgtgtctgatggcaagaggaagcctgtgctgatgtgcttcctgtgcaagctgagctttggctacatccgcagctttgtgacccatgctgtgcatgaccacaggatgaccctgaatgatgaggagcagaagctgctgagcaacaagtgtgtgtctgccatcatccagggcatcggcaaggacaaggagcccctcatctccttcctggagcccaagaagagcacctctgtgtacccccacttcagcaccaccaacctgattggccctgaccccaccttccggggcctgtggagcgccttccacgtggagaatggagacagcctgcctgctggctttgccttcctgaagggcagcgccagcaccagcagcagcgctgagcagcccctgggcatcacccagatgcccaaggccgaggtgaacctgggcggcctgagcagcctggtggtgaacacccccatcacctctgtgtccctgagccacagcagcagcgagagcagcaagatgtctgagagcaaggaccaggagaacaactgtgagcggcccaaggagagcaatgtgctgcaccccaatggagaatgtcctgtgaagtctgagcccacagagcctggagatgaagatgaagaagatgcctacagcaatgagctggatgatgaggaggtgctgggggagctgacagacagcatcggcaacaaggacttccccctgctgaaccagagcatcagccccctgagcagctctgtgctgaagttcatcgagaagggcaccagcagcagcagcgccaccgtgtctgatgacacagagaagaagaagcagacagctgctgtgcgggccagcggctctgtggccagcaactacggcatcagcggcaaggactttgctgatgccagcgccagcaaggacagcgccacagctgcccaccccagcgagatcgcccggggagatgaggacagcagcgccaccccccaccagcacggcttcacccccagcaccccaggcaccccaggccctggaggagatggcagccctggcagcggcatcgagtgccccaagtgtgacacagtgctgggcagcagccgcagcctgggcggccacatgaccatgatgcacagcaggaacagctgcaagaccctgaagtgccccaagtgcaactggcactacaagtaccagcagaccctggaggcccacatgaaggagaagcaccctgagcccggcggcagctgtgtgtactgcaagacaggccagccccacccccggctggcccggggggagagctacacctgtggctacaagcccttccgctgtgaggtgtgcaactacagcaccaccaccaagggcaacctgagcatccacatgcagagcgacaagcacctgaacaacgtgcagaacctgcagaatggaaatggagagcaggtgtttggccacagcgccccagcccccaacaccagcctgagcggctgcggcacccccagccccagcaagcccaagcagaagcccacctggaggtgtgaggtgtgtgactatgagaccaacgtggccaggaacctgcgcatccacatgaccagcgagaagcacatgcacaacatgatgctgctgcagcagaacatgaagcagatccagcacaacctgcacctgggcctggccccagctgaggccgagctgtaccagtactacctggcccagaacatcggcctgaccggcatgaagctggagaacccagctgacccccagctgatgatcaaccccttccagctggaccctgccacagctgctgccctggcccctggcctggtgaacaatgagctgcccccagagatccggctggccagcggccagctgatgggagatgacctgagcctgctgacagctggggagctgagcccctacatcagtgaccctgccctgaagctgttccagtgtgctgtgtgcaacaagttcaccagtgacagcctggaggccctgtctgtgcacgtgagcagcgagaggagcctgcctgaggaggagtggagggctgtgattggagacatctaccagtgcaagctgtgcaactacaacacccagctgaaggccaacttccagctgcactgcaagacagacaagcacatgcagaagtaccagctggtggcccacatcaaggagggcggcaagagcaatgagtggaggctgaagtgcatcgccatcggcaaccctgtgcacctgaagtgcaatgcctgtgactactacaccaacagcgtggacaagctgcggctgcacaccaccaaccacagacatgaagctgccctgaagctgtacaagcacctgcagaagcaggagggcgctgtgaaccctgagagctgctactactactgtgctgtgtgtgactacaccaccaaggtgaagctgaacctggtgcagcacgtgcgctctgtgaagcaccagcagacagagggcctgaggaagctgcagctgcaccagcagggcctggcccctgaggaggacaacctgtctgagatcttctttgtgaaggactgccccccaaatgagctggagacagccagcctgggcgcccggacctgtgatgatgacctgacagagcagcagctgcggagcaccagcgaggagcagagcgaggaggccgagggcgccatcaagcccacagctgtggctgaagatgatgagaaggacaccagcgagcgggacaacagcgagggcaagaacagcaacaaggacagcggcatcatcaccccagagaaggagctgaaggtgtctgtggccggcggcacccagcccctgctgctggccaaggaggaggatgtggccaccaagaggagcaagcccacagaggacaacaagttctgccacgagcagttctaccagtgcccctactgcaactacaacagccgggaccagagccgcatccagatgcacgtgctgagccagcacagcgtgcagcccgtcatctgctgccccctgtgccaggatgtgctgagcaacaagatgcacctgcagctgcacctgacccacctgcacagcgtgtccccagactgtgtggagaagctgctgatgacagtgcctgtgcctgatgtgatgatgcccaacagcatgctgctgcctgctgctgccagcgagaagtctgagcgggacaccccagctgctgtgacagctgagggcagcggcaagtacagcggggagagccccatggatgacaagtccatggccggcctggaggacagcaaggccaacgtggaggtgaagaatgaggagcagaagcccaccaaggagcccctggaggtgtctgagtggaacaagaacagcagcaaggatgtgaagatcccagacaccctgcaggaccagctgaatgagcagcagaagaggcagcccctgtctgtgtctgacagacatgtgtacaagtaccgctgcaaccactgcagcctggccttcaagaccatgcagaagctgcagatccacagccagtaccacgccatccgggccgccaccatgtgcaacctgtgccagaggagcttccgcaccttccaggccctgaagaagcacctggaggccggccaccctgagctgtctgaggccgagctgcagcagctgtatgccagcctgcctgtgaatggagagctgtgggccgagagcgagaccatgagccaggatgaccacggcctggagcaggagatggagcgggagtatgaggtggaccacgagggcaaggccagccctgtgggcagtgacagcagcagcatcccagatgacatgggcagcgagcccaagaggaccctgcccttcaggaagggccccaacttcaccatggagaagttcctggaccccagccggccctacaagtgcaccgtgtgcaaggagagcttcacccagaagaacatcctgctggtgcactacaacagcgtgagccacctgcacaagctgaagaaggtgctgcaggaggccagcagccctgtgccccaggagaccaacagcaacacagacaacaagccctacaagtgcagcatctgcaatgtggcctacagccagagcagcaccctggagatccacatgaggtctgtgctgcaccagaccaaggcccgggccgccaagctggagcccagcggccacgtggccggcggccacagcattgctgccaacgtgaacagccctggccagggcatgctggacagcatgagcctggccgctgtgaacagcaaggacacccacctggatgccaaggagctgaacaagaagcagaccccagacctgatcagcgcccagcctgcccaccaccccccccagagccctgcccagatccagatgcagctgcagcacgagctgcagcagcaggccgccttcttccagccccagttcctgaacccagccttcctgccccacttccccatgaccccagaggccctgctgcagttccagcagccccagttcctgttccccttctacatccctggaacagagttcagcctgggccctgacctgggcctgcccggcagcgccaccttcggcatgcctggcatgacaggcatggccggcagcctgctggaggacctgaagcagcagatccagacccagcaccacgtgggccagacccagctgcagatcctgcagcagcaggcccagcagtaccaggccacccagccccagctgcagccccagaagcagcagcagcagcccccaccaccccagcagcagcagcagcagcaggccagcaagctgctgaagcaggagcagagcaacatcgtgtctgctgactgccagatcatgaaggatgtgcccagctacaaggaggccgaggacatcagcgagaagccagagaagcccaagcaggagttcatcagcgagggggagggcctgaaggagggcaaggacaccaagaagcagaagagcctggagcccagcatccccccaccccgcatcgccagcggggcccggggaaatgctgccaaggccctgctggagaactttggatttgagctggtgatccagtacaatgaaaatcggcagaaggtgcagaagaagggcaagtctggagaaggagaaaatacagacaagctggagtgtggcacctgtgggaagctgttcagcaatgtgctgatcctgaagagccaccaggagcacgtgcacggccagttcttcccctatgctgccctggagaagtttgcccggcagtaccgggaggcctatgacaagctgtaccccatcagccccagcagccctgagaccccacctcctcctcctcctcctccacccctgcccccagccccaccccagcccagctccatgggccctgtgaagatccccaacacagtgtccacccccctgcaggcccccccacccaccccacctcctcctcctcctcctcctcctcctcctcctcctcctcctcctcctcctccacccagcgccccaccccaggtgcagctgcctgtgtccctggacctgcccctcttccccagcatcatgatgcagcctgtgcagcacccagccctgcccccccagctggccctgcagctgccccagatggatgccctgtctgctgacctgacccagctgtgccagcagcagctgggcctggaccccaacttcctgcggcacagccagttcaagaggcccaggacccgcatcacagatgaccagctgaagatcctgcgggcctactttgacatcaacaacagccccagcgaggagcagatccaggagatggccgagaagagcggcctgagccagaaggtgatcaagcactggttcaggaacaccctcttcaaggagcggcagaggaacaaggacagcccctacaacttcagcaacccccccatcaccgtgctggaggacatcagaattgacccccagcccaccagcctggagcactacaagagtgatgccagcttcagcaagaggagcagcaggacccgcttcacagactaccagctgcgggtgctgcaggacttctttgacaccaatgcctaccccaaggatgatgaaattgagcagctgagcacagtgctgaacctgcccaccagggtcatcgtggtgtggttccagaatgcccggcagaaggccaggaagagctatgagaaccaggccgagaccaaggacaatgagaagcgggagctgaccaatgaaagatacatccgcaccagcaacatgcagtaccagtgcaagaagtgcaatgtggtgttcccccgcatctttgacctgatcacccaccagaagaagcagtgctacaaggatgaagatgatgatgcccaggatgagagccagacagaggacagcatggatgccacagaccaggtggtgtacaagcactgcaccgtgtctggccagacagatgctgccaagaatgctgctgccccagctgccagcagcggcagcggcaccagcacccccctcatccccagccccaagccagagcctgagaagaccagccccaagccagagtacccagctgagaagcccaagcagagcgaccccagcccccccagccagggcaccaagccagccctgcccctggccagcaccagcagtgaccccccccaggccagcacagcccagccccagccccagccccagccccccaagcagccccagctgattggccggccccccagcgccagccagacccctgtgcccagcagccccctgcagatctccatgaccagcctgcagaacagcctgcccccccagctgctgcagtaccagtgtgaccagtgcaccgtggccttccccaccctggagctgtggcaggagcaccagcacatgcacttcctggccgcccagaaccagttcctgcacagccccttcctggagcggcccatggacatgccctacatgatctttgaccccaacaaccccctgatgacaggccagctgctgggcagcagcctgacccagatgccaccccaggccagcagcagccacaccacagcccccaccaccgtggccgccagcctgaagaggaagctggatgacaaggaggacaacaactgcagcgagaaggagggcggcaacagcggggaggaccagcaccgggacaagaggctgcggaccaccatcaccccagagcagctggagatcctgtatgagaagtacctgctggacagcaaccccaccaggaagatgctggaccacatcgcccgggaggtgggcctgaagaagagggtggtgcaggtgtggttccagaacacccgggcccgggagaggaagggccagttccgggctgtgggccctgcccagagccacaagcgctgccccttctgccgggccctcttcaaggccaagagcgccctggagagccacatccgcagccgccactggaatgaaggcaagcaggccggctacagcctgccccccagccccctcatcagcacagaagatggaggagagagcccccagaagtacatctactttgactaccccagcctgcccctgaccaagattgacctgagcagtgaaaatgagctggccagcacagtgtccacccctgtgtccaagacagctgagctgagccccaagaacctgctgagccccagcagcttcaaggccgagtgcagtgaagatgtggagaacctgaatgcccctcctgctgaggccggctatgaccagaacaagacagactttgatgagaccagcagcatcaacacagccatcagtgatgccaccactggagatgagggcaacacagagatggagagcaccaccggcagcagtggagatgtgaagccagccctgagccccaaggagcccaagaccctggacaccctgcccaagccagccaccacccccaccacagaggtgtgtgatgacaagttcctgttcagcctgaccagccccagcatccacttcaatgacaaggatggagaccatgaccagagcttctacatcacagatgatcctgatgacaatgctgacagaagtgagaccagcagcattgctgaccccagcagccccaaccccttcggcagcagcaaccccttcaagagcaagagcaatgacaggcctggccacaagcgcttccgcacccagatgagcaacctgcagctgaaggtgctgaaggcctgcttcagtgactaccgcacccccaccatgcaggagtgtgagatgctgggcaatgagatcggcctgcccaagagggtggtgcaggtgtggttccagaatgcccgggccaaggagaagaagttcaagatcaacatcggcaagcccttcatgatcaaccagggcggcacagagggcaccaagccagagtgcaccctgtgtggggtgaagtacagcgcccggctgagcatccgggaccacatcttcagcaagcagcacatcagcaaggtgcgggagaccgtgggcagccagctggaccgggagaaggactacctggcccccaccaccgtgcggcagctgatggcccagcaggagctggaccgcatcaagaaggccagtgatgtgctgggcctgactgtgcagcagcccggcatgatggacagcagcagcctgcacggcatcagcctgcccacagcctacccaggcctgcccggcctgccccctgtgctgctgcccggcatgaatggccccagcagcctgcccggcttcccccagaacagcaacaccctgaccccacctggagctggcatgctgggcttccccaccagcgccaccagcagccctgccctgagcctgagcagcgcccccaccaagcccctgctgcagaccccacctcctcctcctcctcctcctcctcctccacccagcagcagcctgagcggccagcagacagagcagcagaacaaggagagcgagaagaagcagaccaagcccaacaaggtgaagaagatcaaggaggaggagctggaggccaccaagccagagaagcaccccaagaaggaggagaagatcagcagcgccctgtctgtgctgggcaaggtggtgggggagacccacgtggaccccatccagctgcaggccctgcagaatgccatcgccggggaccctgccagcttcatcggcggccagttcctgccctacttcatccctggctttgccagctacttcaccccccagctgcccggcaccgtgcagggcggctacttcccccctgtgtgtggcatggagagcctcttcccctacggccccaccatgccccagaccctggccggcctgagccctggggccctgctgcagcagtaccagcagtaccagcagaacctgcaggagagcctgcagaagcagcagaagcagcagcaggagcagcagcagaagcctgtgcaggccaagaccagcaaggtggagagtgaccagccccagaacagcaatgatgccagcgagaccaaggaggacaagagcacagccacagagagcaccaaggaggagccccagctggagagcaagtctgctgacttcagtgacacctacgtggtgccctttgtgaagtatgagttcatctgcaggaagtgccagatgatgttcacagatgaagatgctgctgtgaaccaccagaagagcttctgctacttcggccagcccctgattgacccccaggagaccgtgctgcgggtgcctgtgtccaagtaccagtgcctggcctgtgatgtggccatctctggaaatgaggccctgagccagcacctgcagagcagcctgcacaaggagaagaccatcaagcaggccatgagaaatgccaaggagcacgtgcggctgctgccccacagcgtgtgcagccccaaccccaacaccaccagcaccagccagagcgctgccagcagcaacaacacctacccccacctgagctgcttctccatgaagtcctggcccaacatcctcttccaggccagcgcccggcgggccgccagcccccccagcagcccccccagcctgagcctgcccagcacagtgaccagcagcctgtgcagcaccagcggcgtgcagaccagcctgcccacagagagctgcagtgatgaaagtgacagcgagctgagccagaagctggaggacctggacaacagcctggaggtgaaggccaagccagccagcggcctggatggcaacttcaacagcatccgcatggacatgttttctgtgtag

SEQ ID NO: 309020 - DNA, 423 bp, Artificial Sequence
  derived and/or modified sequence
atggagacctgtgacagcccccccatcagccggcaggagaatggccagagcaccagcaagctgtgtggcaccacccagctggacaatgaggtgcctgagaaggtggccggcatggagccagaccgggagaacagcagcacagatgacaacctgaagacagatgagaggaagtctgaggccctgctgggcttctctgtggagaatgctgctgccacccaggtgaccagcgccaaggagatcccctgcaatgaatgtgccaccagcttccccagcctgcagaagtacatggagcaccactgccccaatgcccggctgcctgtgctgaaggatgacaatgaaagtgagatcagcgagctggaggacagtgatgtggagaacctgaccggggagatcgtgtaccagccagatggcagcgcctactag

SEQ ID NO: 309021 - DNA, 306 bp, Artificial Sequence
  derived and/or modified sequence
atggagacctgtgacagcccccccatcagccggcaggagaatggccagagcaccagcaagctgtgtggcaccacccagctggacaatgaggtgcctgagaaggtggccggcatggagccagaccgggagaacagcagcacagatgacaacctgaagacagatgagaggaagtctgaggccctgctgggcttctctgtggagaatgctgctgccacccaggtgaccagcgccaaggagatcccctgcaatgaatgtgccaccagcttccccagcctgcagaagtacatggagcaccactgcccctag

SEQ ID NO: 309022 - DNA, 10803 bp, Artificial Sequence
  derived and/or modified sequence
atggagacctgcgacagcccccccatcagccggcaggagaacggccagtcaaccagcaagctctgcgggacaactcaactcgataacgaggtccccgaaaaggtcgctgggatggagcccgatcgcgaaaacagtagtactgacgataacctgaaaacggatgagcgcaagagtgaggcgctgctgggattttcagtcgagaatgccgcagccacccaagtgaccagcgctaaggaaatcccctgtaacgagtgcgctaccagttttccatctctacagaaatacatggaacatcactgccctaatgcacgcctaccagtgctgaaggatgacaatgagtcagagatctctgagctggaggacagcgatgtcgaaaatctgactggcgaaattgtttaccagccggatggctccgcttacatcattgaggattccaaagaatccggccagaatgcccaaactggcgccaattccaaactgttcagcacggctatgttccttgactccctggcttccgccggtgagaagtcagaccagagtgctagcgcaccgatgagcttctatccccagatcataaacactttccatatcgcctctagcctcggcaagcccttcacggcagatcaagctttccctaacacctcagccctggccggggtcggacctgtgttgcattcattccgtgtttacgatctacggcataagcgggaaaaggattatctaaccagcgacggctcggccaaaaatagttgcgtctcaaaagacgtgcccaataacgtggatttgtctaagttcgacggttgtgtttcggacgggaagcgaaaaccagtcctgatgtgtttcctgtgtaaactgagcttcggctatattcggtcttttgttacccacgcggtgcacgatcaccggatgacgcttaacgatgaggaacagaagttattgtcgaacaagtgtgtgtccgccatcatacagggaattgggaaagacaaggaaccacttatctcctttctggagcccaaaaagagtacaagtgtgtatccccactttagcaccaccaatctcatcgggcctgaccccacattccggggactttggtccgcatttcatgtcgagaacggcgactcactgcctgccgggttcgcattcctaaaggggagcgctagcacatcttcctccgcagaacaacctctcggaatcacacagatgccaaaggcggaggtgaatctcgggggattaagctcactagtggtgaacactcccataactagcgtttctctgtcacattcctccagcgaaagctctaaaatgagcgaaagcaaggaccaagagaacaattgcgagagacccaaagagtctaacgtgctccatccaaacggtgagtgcccagtcaagtctgaacctaccgagccaggcgatgaagatgaggaagatgcatacagcaacgaacttgacgacgaagaggtactaggcgagctcaccgactctatcggtaacaaggattttccgctgctcaatcagtcaatctccccactgagcagtagcgtgctaaagtttatcgaaaaaggcacaagtagcagttccgccacagtgtccgacgatacagagaagaagaagcagacagccgccgtgcgcgccagtggcagtgttgctagtaattacgggatttctggaaaggacttcgcagatgcttcggcctcaaaagatagcgccaccgccgcccacccgagcgagatcgcacgaggagatgaagactccagcgcgactccacaccagcacgggttcaccccgtcaacccctggaactcccggtcctggcggtgacggctctcctggcagtggaattgagtgtccaaaatgcgacactgtcctcgggtcctcccgctcacttggtggacatatgacaatgatgcactcccgcaacagctgcaagaccctgaaatgccctaaatgtaactggcactacaagtaccagcagactcttgaggcccacatgaaggagaagcatccagagccgggcggatcatgtgtgtactgcaaaacgggacagccacatcctcgattagccagaggggagagttacacctgcgggtataaacccttccggtgtgaggtttgcaactacagcacaaccacaaaggggaatctgagcattcacatgcaaagtgataaacatctcaacaatgtccagaaccttcagaatggaaacggcgaacaggtgttcggacatagcgcgcctgctcccaatacctccctgtccgggtgcggcacgcccagtcccagcaaaccgaaacaaaagcccacctggcgctgcgaggtatgcgactacgaaactaacgtcgcacgaaacctgaggatccacatgaccagcgagaagcacatgcataatatgatgctgctgcagcagaacatgaaacagatccaacacaacctgcatctcggtctggctcctgcagaggctgaactgtaccagtattacttggcccaaaacatcggcttaacaggaatgaagctggagaacccagctgatccacagttgatgattaatcccttccagctggatcctgcgacggccgccgccttggcgccaggcctggtgaacaacgaattgccacctgaaatacgactggccagcggtcagttgatgggcgatgacctgtcactcttgacagctggcgagctgtccccctatatatccgatcctgctttgaagctgtttcagtgcgcagtctgtaataaattcacctccgattccctggaggccctctcagtgcacgtctcatctgagcgctctctgcctgaggaagaatggcgggctgtgattggcgacatctaccaatgtaaattatgtaactacaatacccagctaaaggccaatttccagctgcactgcaaaaccgacaagcacatgcagaaatatcagctggttgctcatatcaaggaaggaggaaaatccaacgaatggcgcctgaagtgtatcgccattgggaaccctgtgcacctaaaatgcaacgcctgcgattactataccaacagcgttgataagctccgtctccatactacaaatcacaggcacgaggcagcactgaaactatacaagcacctgcagaaacaagagggagcggtgaacccagaatcatgctactactactgcgctgtgtgtgactataccactaaggttaagctcaatctcgtgcagcacgtacgctccgttaaacaccagcagaccgaagggctccggaaactgcagcttcatcagcaaggcttggcacccgaggaagacaatctgtccgaaatctttttcgtgaaggactgtcctcctaacgagctcgagacggcctctctgggtgcccggacttgtgatgacgacttgaccgagcaacagctgcgctccactagcgaagaacagtccgaggaagcagagggcgctatcaagcccactgcggtggccgaggacgacgaaaaagatacaagcgagagggataattcagaaggaaaaaatagcaacaaggattcaggcattattacacccgaaaaagagcttaaggtgagcgtcgcagggggtacccagccacttctgctcgcaaaagaggaggatgtcgcaactaagcgatcaaagcccactgaagacaacaagttttgccacgagcaattttatcagtgcccttattgtaactacaactcacgggaccagagccgcattcagatgcacgtgctcagtcagcatagcgttcagcccgtgatatgctgtcctctctgccaggatgtgcttagcaataagatgcatctgcaattgcacctcacacatctacactctgtttctccagattgtgtcgaaaaactcctcatgaccgtgcccgtacctgatgtgatgatgcctaacagcatgcttcttcccgctgcagcctccgagaagtctgagagggacacccctgcagctgtaacagcagagggcagcggaaagtacagcggtgagagccccatggacgataagtctatggccggcctggaggactccaaggctaacgtcgaagtaaaaaacgaagaacagaagccaaccaaagagccattggaagtaagcgagtggaataagaatagcagcaaagacgtaaagattcccgacactctgcaagatcagctgaacgagcagcaaaagaggcaacccctgtccgtaagcgaccggcacgtgtacaaataccgctgtaatcactgcagcctggctttcaaaacgatgcagaagttacagattcactcccagtatcatgctattcgggcagcgaccatgtgtaatctgtgccagcgatctttccgcacctttcaagctttgaaaaaacacctggaggccgggcaccccgaactgtctgaagccgagctccaacagctgtacgccagcctgccggtgaatggcgaactttgggcagaaagtgagaccatgtctcaggacgatcacggccttgaacaagagatggaacgtgagtatgaagttgatcacgagggtaaagcttcacccgtgggtagtgactccagtagcatccctgatgacatggggtccgagcctaagaggacactgcctttccgaaagggcccgaactttacaatggagaagtttctggaccccagccgcccctataagtgcactgtttgtaaggaatcttttacgcagaagaatatcctgctagtccactataattccgtgtcacatttgcacaagctgaaaaaggtgctgcaggaagcttcaagccccgtcccgcaagaaacaaactcaaacaccgataataaaccgtacaaatgttctatttgtaatgtggcttatagtcagagctccaccctcgagatccacatgaggagtgttttgcaccagactaaggctcgggcagctaagcttgaaccctccggccatgtcgccggtggacacagtatagcagcgaacgtgaacagccctgggcagggcatgctagactctatgagcctggctgcagtgaattctaaggacacgcacttagacgctaaggagctcaataagaagcaaacccccgacctcattagcgcacagcccgcccatcacccaccccagtcccccgcacagatacagatgcaactgcagcacgaactacaacagcaagctgccttcttccagccgcaatttttgaatccagcctttcttccacacttcccgatgactccagaagccctcttacaatttcagcaaccccagttcctttttcccttctatatacctggcaccgagttcagccttggcccagacctaggcctgccaggtagcgccacctttggaatgcccgggatgaccgggatggccggatctctgttggaagatctgaagcagcagatacagacccagcaccacgtcggacagacccagctgcagatactccagcagcaagcccagcagtaccaggccacacaaccccagttgcagccccagaagcagcagcagcagcctccccctccccagcaacagcaacaacaacaggcttccaaactgctcaagcaggaacaatcaaatatagtcagtgctgactgtcagattatgaaagatgtccccagttataaggaggccgaggatataagcgaaaagcctgagaaaccaaagcaggagttcattagtgaaggggagggattaaaggagggtaaagacactaagaagcagaagtcccttgaaccaagcattcccccacctcggatcgcatccggggccagaggaaacgctgctaaggccctcctggaaaatttcgggttcgagctcgtgattcagtacaatgagaataggcagaaagtgcaaaagaaaggcaagtcgggcgagggggaaaataccgacaaactcgaatgtggcacatgtggaaaactcttttcgaatgtgttaatcttgaagtcacaccaggagcacgtccacggccaattcttcccctatgccgccttagagaagtttgccagacagtatcgggaggcctacgataagctctatcctatctcaccctcctccccagagactcctcctcctcccccgccgccccctccactgccgccagcgccaccccagccatcctcgatgggtcctgtaaagattcctaacaccgtgtccaccccgttgcaggcccctccaccgaccccccctccaccgtccgcacctccccaggtacagcttccggtctctttagatctgccacttttcccgtctattatgatgcaacctgtccagcacccagcactgcccccgcagctggccttgcagctacctcaaatggacgccctgtctgccgatcttactcagctctgtcagcagcagttgggcctggaccccaatttcctaaggcacagccagtttaagaggccgcgcaccaggatcaccgacgatcaactaaaaattctccgggcctatttcgatatcaataactcaccatcggaggagcagattcaggagatggccgaaaaatctggtctctcgcaaaaagtgataaaacactggtttcgcaacaccttgttcaaggagcgacaacggaataaagatagcccctacaattttagcaatccgcctatcactgtcctcgaagacatccgcatcgatccacagcctacctccctggaacattataagagcgacgcttccttttcaaagagaagctccagaaccagattcacggattatcaattgagggtgctgcaggacttcttcgacacaaacgcctatcctaaggatgatgaaattgaacagttgtcaaccgtactcaatctaccaaccagagtcatcgtggtttggtttcagaacgcgcgccagaaggctcggaagtcctacgagaaccaagcagaaacaaaggataacgagaaaagagagctaaccaacgagcgctacatccggactagcaacatgcagtatcaatgtaagaagtgtaatgtggtttttcctagaatcttcgatctgatcacacaccagaaaaagcaatgttacaaagacgaggatgacgatgctcaagacgaatcccagacggaggattcaatggacgccaccgatcaggtggtgtacaaacattgtacagtgagcggccagacagatgctgcaaaaaacgctgccgccccggcagcctccagcgggtctggcacaagcacgcccctgattcctagtcccaagcctgagccagaaaaaaccagtccaaaaccagagtaccccgccgagaagcccaagcagtctgatcccagccccccatcgcaggggacgaaaccagctctgcccctggcgagcacaagctcggatcccccccaagcttccacggcccagccacagccccaacctcagccgccaaaacagccccagttaatcggacgcccgccaagcgcgagccagacacccgttccctctagccccctccaaatctctatgacctcactccagaatagcctccctccgcagctgttacaatatcagtgcgaccagtgcacagtggcatttcctacattagaactctggcaggagcatcaacatatgcatttcttagctgcccaaaatcaatttttacattctcccttcttagaacgtcctatggatatgccttatatgatcttcgaccctaataacccgctaatgactgggcagctgctgggctccagcctcacgcagatgcctcctcaggcttcatctagtcacacgacggcccctactaccgtggccgctagtctcaagcggaagctagacgataaggaggacaacaactgcagcgagaaagaaggagggaactcaggagaggatcagcacagagacaaacgcttgcggacaaccataactccagagcagctagagatactttatgaaaaatacctcctcgattccaatccaactcggaagatgcttgatcacatcgctcgagaggtgggattaaaaaaacgggtagtgcaggtgtggtttcagaatacacgagccagagagcggaaggggcagttcagagcagtcggaccggcgcaatcacacaagaggtgccctttctgcagagcacttttcaaggcaaagtccgccctcgagtcacacattcgctctcgtcattggaacgaaggcaagcaggccggctattctctgccgcctagtcctttaatcagtaccgaggacgggggggaaagccctcaaaagtatatctacttcgactatccctccttacctctgactaaaatcgatttaagttccgaaaacgagctcgcaagcaccgtctctactcctgtgagtaagacagcggagttgagccctaaaaatctactgtcaccatccagttttaaggctgaatgctctgaggatgttgagaatctgaatgccccacctgctgaggctgggtacgaccaaaacaagacagactttgatgagacctcctcgatcaacactgctatctctgatgccactacgggagatgagggtaacaccgaaatggaatccactactgggtcctcaggggacgtcaagccggcactctcccctaaagagccaaaaacacttgatacattacccaaaccagcaaccacaccaacgacagaagtgtgtgatgataaattcttgttttccttgacatcaccgtcaattcacttcaacgacaaagatggagaccacgatcaaagcttttacatcactgacgatcccgacgataacgccgacaggtctgaaaccagctcaattgcagatccttcctccccaaatcctttcggatcgtcaaacccgtttaagtcaaagagcaatgatcgaccaggccacaagagatttcgaacccagatgtccaacctgcagctgaaggtccttaaggcctgcttttctgactataggaccccgaccatgcaggaatgcgagatgcttggcaatgagatcgggctccccaagagggtggtgcaggtgtggttccagaacgctagagctaaagaaaaaaagtttaagatcaacattggcaagccttttatgatcaaccaggggggcaccgaggggaccaagccagagtgtacattatgcggggtgaagtatagcgcaagactgagtatacgggatcacattttctctaagcagcacatctccaaggtccgcgaaaccgtgggatcgcagctcgatagagagaaggactatcttgcgcctactacggtgaggcagctgatggcccagcaggagttagatagaataaaaaaggctagtgatgttctcggtctgacagtccagcaacctggcatgatggattcttcctcactgcacggcatctccctccctaccgcctaccccggattgcccgggcttcccccagtgctgctcccaggcatgaatgggccctccagtcttccaggtttccctcaaaatagcaatactctgactccccctggcgccggtatgctcggtttccccactagtgcaacatcgtcgccggcgctgagcttatctagcgcccccaccaagcccttgctgcaaactcccccacctcccccccctccccccccgccacccccaagttccagccttagcggtcagcagacagaacagcagaacaaagaatcggagaaaaagcaaacgaaaccaaacaaagtaaagaaaattaaagaagaggaattggaggccactaagcccgaaaaacacccgaagaaggaggagaagattagctccgccctgtcggtcctcggcaaagtagtgggtgaaacccacgtcgacccaatccagctgcaagctctgcagaatgctatcgccggcgatcctgcaagcttcattggcggtcagtttctgccctatttcattcctggatttgcatcctattttacaccacagttgcccggtaccgtgcagggcggttacttccccccagtgtgtgggatggagtccctctttccatacggccccaccatgccacagaccctagccgggctctcacccggggccctcctgcaacaataccagcagtatcaacagaatcttcaggagagcctccagaagcagcagaaacaacagcaagagcagcagcagaaaccagtgcaggctaagacatcaaaggtggaaagcgatcagccacagaattctaatgacgcctctgagacgaaggaagacaagtcaacagcaactgaatccacaaaggaggagcctcagctggagtccaagtcagccgacttcagcgacacttacgttgtgccctttgtaaagtacgaattcatctgcaggaaatgccagatgatgttcactgatgaggacgccgcagtgaaccatcagaaaagtttttgctactttggccagcctcttattgacccccaggaaacggtcctgagggttcctgtctcaaagtatcagtgtttagcttgtgacgtggcaatcagtggaaacgaggctctgagtcagcacctgcagtccagcctgcataaggagaagacaatcaagcaagccatgcgcaacgctaaggaacacgtgcgtctgctccctcattctgtatgcagccccaacccaaatacaacctcaacttctcagagtgcagccagtagtaataacacttatccacacctttcttgtttctccatgaaaagctggcctaacatcctgtttcaggccagcgctcgacgggcggcctcgcccccttcctccccaccgtcgctgagtctcccctctactgtgacctcctccctgtgctcaacaagtggcgtgcaaacgagtctgcccactgaaagctgttccgacgagtctgactccgaattgtcacagaagcttgaggatctggataattcattagaagtcaaggctaagccagccagtgggttagatggcaactttaatagcatacggatggacatgttttcagtctag

SEQ ID NO: 309023 - DNA, 468 bp, Artificial Sequence
  derived and/or modified sequence
atggagacctgcgacagcccccccatcagccggcaggagaacggccagagcactagcaaactgtgcggaacgacacagttggataacgaagtccccgaaaaagtagccggcatggaacccgatagagagaatagctcaaccgacgacaaccttaagacagacgaacggaaatcggaagccctactgggctttagtgtagaaaacgctgccgccacccaggtgacttccgctaaggaaatcccttgtaacgaatgcgccaccagctttccctcgctccagaaatacatggagcatcattgcccaaacgcccgcctgcctgttcttaaagacgataacgaatcagaaatttccgagctcgaggattccgacgtggagaacttgacaggtgaaatcgtgtaccagcccgacggcagcgcctatattattgaagactcaaaagagtccggccaaaacgctcagaccgggtag

SEQ ID NO: 309024 - DNA, 468 bp, Artificial Sequence
  derived and/or modified sequence
atggagacctgcgacagcccccccatcagccggcaggagaacggccagagcactagtaagttgtgtggaaccacacagctcgacaatgaagtgcctgaaaaggtcgctggcatggaaccagaccgggagaacagttccacagacgataatctgaaaaccgatgaacgtaagagcgaggctttacttggctttagcgttgagaatgctgcagcgacgcaggttacttcagccaaagaaattccatgtaatgagtgtgccacatcttttccatccctccaaaagtacatggaacaccattgccctaacgcacggctgcccgtcctgaaagatgataacgaatcagagattagtgagttggaggatagcgacgtcgaaaatctgaccggagagatcgtttaccagccagatggaagcgcctacattatcgaagattcaaaagaatcaggacagaatgctcagaccggctag

SEQ ID NO: 309025 - DNA, 10851 bp, Artificial Sequence
  derived and/or modified sequence
atggagacctgcgacagcccccccatcagccggcaggagaacggccagagtacatctaaactgtgcggaactacccagctcgacaacgaggtgcctgaaaaggtcgcgggtatggagccagaccgtgagaacagcagtactgatgacaatcttaaaaccgatgagcgaaagagcgaggccctgctgggatttagcgttgaaaatgctgccgctacgcaggtcactagtgctaaggaaatcccttgtaacgagtgtgcgacctcattccccagtctgcagaagtacatggaacatcactgccctaacgccagattgcctgtcctgaaagatgacaatgagtcagagatttcagaacttgaggactcagacgtggagaatctgaccggggaaattgtttatcagcctgatggatctgcttacatcattgaagacagcaaagagtccggacaaaacgcccagacaggcgctaacagcaagttgttctccactgcgatgttcctagactccctggccagcgcgggcgagaaatcagatcagagcgccagtgcgcccatgtccttctacccccagataattaataccttccacatcgcttcctccctgggcaagcctttcaccgccgaccaagcctttccaaataccagtgcgctggcgggcgttggcccagtgcttcactccttcagagtgtatgatcttcggcacaagcgggagaaggactatctgacgtccgacggtagcgccaaaaatagctgtgtgagcaaggacgtgcccaacaatgtcgacttgtccaaatttgacggatgcgtgtctgacgggaaacgaaaacctgttctgatgtgcttcctgtgtaagctgtctttcgggtacatccgcagctttgtgacccatgctgtccacgaccatagaatgactctcaacgatgaggaacagaagctgctcagcaacaaatgtgtctcagctattatccaaggaatcggcaaggacaaagaaccgctcatcagtttcctggagcccaagaagtcaaccagcgtttacccgcatttttctacgacaaatctaattgggccagatcctacttttagaggtctgtggtccgcattccacgtggagaacggggacagtctccccgcggggtttgcatttctcaagggctcagcctctacatcttccagcgcagaacagccactcggaattacacagatgcccaaggccgaagtgaatttgggcggcctgagttctctggtggtgaacacccccatcacctcagtaagcctgagtcattcttcctccgagtcgtccaaaatgagcgagtccaaggatcaagagaacaactgcgagcgacctaaggaaagtaatgttttgcaccccaacggggaatgcccagtaaagtctgagccaaccgaaccaggcgacgaggacgaggaagacgcctatagcaatgagttggacgatgaagaagtcttaggtgaactcacagacagtattggcaacaaggatttcccactgctaaaccagagtatttcgccactgtcttcctctgtcctgaagttcattgagaaaggaactagcagttcttccgcaacggtgtcagatgacaccgagaagaagaagcagaccgccgctgtccgcgctagcgggagcgtcgctagtaattatgggatcagcggcaaagattttgctgatgcctctgcaagcaaagactcggcaaccgccgcccacccctccgaaatcgccaggggagacgaagattcaagtgctacacctcaccagcatgggttcacaccatccacccccggaaccccgggaccaggcggagatggctcccctggttcgggcattgaatgccccaaatgcgataccgtgttggggagctcgcgctcattgggcgggcatatgaccatgatgcattcacgtaattcctgcaagacactgaagtgtcctaaatgtaattggcactataagtatcagcagaccctggaggctcacatgaaggagaagcaccccgagcctgggggcagttgcgtgtattgcaagaccgggcagcctcacccacggctcgcgcgcggcgaaagttacacctgtggatacaagcctttccgctgcgaggtctgcaactactcgacgaccaccaagggaaatctgtccatccacatgcaatccgacaagcatcttaataatgtgcagaatctacagaacggtaacggggaacaggtttttgggcactctgctcccgccccaaacacctcactctcgggctgtgggactcctagtccaagtaagcctaagcagaaacccacttggcgttgcgaagtatgcgactacgaaaccaatgttgcaaggaatttacgcattcatatgacttccgaaaaacatatgcataatatgatgttgctgcagcaaaacatgaagcagattcagcacaatctgcatctgggtttagccccggcagaagcggaactgtatcagtactatctggcgcagaatatagggctgacgggcatgaaactcgaaaatcccgccgatccacagctgatgataaaccctttccagttagatccggcaaccgcggccgctctggctcctggcctcgtgaataatgagcttccgccagagatccgcttagcctcagggcagctcatgggagacgacttatctctgctgaccgccggggaattgtccccttacatttccgaccccgctctcaagctctttcagtgcgcagtctgtaacaaatttacatcagattctttagaggcactgagcgtccatgtgagttctgagcggagtctgcccgaggaggagtggagggccgtgattggcgatatctatcagtgcaaactgtgcaattacaatactcagcttaaagctaattttcaactgcattgcaaaactgacaaacacatgcaaaagtaccagctagtcgcccacatcaaagagggcgggaagtccaatgaatggcgcttgaaatgtattgcgatcggtaacccggtgcatctgaaatgtaacgcgtgcgattattacacaaattctgttgacaagctccgccttcacactaccaaccacagacatgaggctgcgctgaagctttataagcatctgcagaaacaagagggagctgtgaatcctgagtcttgttactactactgcgccgtctgtgattataccaccaaggtaaagctgaatctggtacaacatgtgcgctcagtgaaacatcaacaaactgaggggctgcgaaaactccagctgcatcaacaaggccttgctcccgaggaagataatctatctgagatttttttcgtcaaagattgcccccccaatgaactcgagacagcaagtttaggggccaggacctgtgatgacgatttaaccgaacagcagctcaggtccacttccgaggaacagagtgaggaggctgaaggggctatcaaacctaccgccgtggccgaggacgacgaaaaggatacttccgaaagggacaatagtgaaggtaagaactccaacaaagattcaggtattatcacacctgaaaaggagctcaaagtgtccgtggctggagggacacagccactgctgcttgccaaggaagaagacgtagcgacaaagagaagtaaaccaaccgaggataacaagttctgccacgagcagttctaccagtgtccatactgtaactataactcaagagatcagtctaggatacaaatgcacgtgttgagccagcattccgtccaaccagttatatgttgccccttgtgccaggacgtcctttcaaacaagatgcacctgcagctgcatttgacccatctgcattcggtgtctcccgattgcgtggaaaaacttctgatgaccgtacccgttccagatgtcatgatgcccaactcaatgctgctccctgctgctgctagcgaaaaaagcgaaagagacacacccgcagcagtgacagccgaagggagcggaaaatatagcggtgaatccccaatggatgataagtccatggccggcctggaggactctaaggctaatgtggaggtaaaaaacgaggagcagaagcccactaaggaaccactggaggtctctgagtggaacaagaattcctctaaagacgtgaaaataccagatactctgcaggatcagcttaacgagcagcagaaaaggcaaccgctaagcgtgagcgaccggcatgtgtacaagtacaggtgtaaccactgttcgctagctttcaaaacgatgcagaagcttcagattcattcacaataccatgccattagagcggcaactatgtgtaacttatgccaacgtagcttcagaacatttcaagctctgaaaaaacatcttgaagccggccatcccgagctgagcgaggccgagctgcagcagctatatgcttcgttgcctgtcaatggtgagctttgggctgaatcggaaactatgagccaggatgaccacggcctcgagcaagagatggagagggaatacgaggtcgatcacgagggtaaagcctctcccgtaggctcagactcatcttcgatcccagatgacatgggctcagagcctaaacgtacactccccttccggaagggccccaactttaccatggagaaattcctcgacccaagccgtccgtacaagtgcactgtttgcaaggagagcttcactcagaaaaatatcctgcttgtgcactacaatagtgtctctcatttacataagctcaaaaaggtgctgcaagaggctagtagcccagtcccccaggaaaccaacagcaatactgacaacaagccatataaatgttcgatctgtaatgtcgcctacagtcagtcatcaacattggagatccatatgagaagcgtactacatcagaccaaggcccgtgcggcaaagctggaacccagcgggcacgtggccgggggtcactccatcgctgcgaacgtgaattcgccagggcaggggatgctggacagcatgagtttagcggcggtgaactctaaagatacacaccttgacgccaaggagctaaacaaaaaacagacccccgatttgatttctgctcagcccgcacatcaccccccccagtctcccgcccaaatccaaatgcagctacaacacgaattgcagcagcaggccgcattctttcagccgcagtttttgaacccggccttcctgccacatttcccaatgactcctgaggctttacttcagtttcagcagccacagtttttgttccctttttacattccaggcacagaattttctcttgggccagatctcgggctgcctggcagcgcaacgttcggcatgccagggatgactggtatggccggcagtttgctggaggacctcaagcagcagatccaaacacagcaccacgtcggccagacccagttgcagatcctacagcagcaagcccagcagtatcaggccacccagcctcagctgcagcctcagaagcaacaacagcagcctccaccccctcagcagcagcaacagcagcaggcctccaaactcctcaagcaggagcagtcaaatattgtcagtgccgattgtcaaatcatgaaggacgtccccagctacaaggaggcagaagacatcagcgaaaaaccggagaagcccaagcaggagtttatctcagagggcgagggcctgaaagagggtaaggacacaaagaaacagaaatcccttgaaccctctatcccaccacctcggattgccagcggggcccgcggcaacgctgctaaggctctgctcgaaaactttggctttgaattggttatccagtacaacgagaatcgccagaaagttcaaaagaagggaaaaagcggagaaggtgaaaacactgacaagctcgagtgtggcacatgtggaaagctgttcagtaatgtcttaatcctgaagagtcaccaggaacatgtgcatggacagttcttcccctatgccgccctagagaaatttgcacggcaatacagggaagcatacgataagctgtatccaataagcccctctagccctgagactcccccacctcctcctccccctcctcctcttccacccgcgccaccacaaccaagttccatgggccccgtcaaaatcccaaataccgtcagcacccctttgcaagctccaccacccacgcccccaccccctcctcctcctccacctccccctccgccccctccaccccccccccctccgtccgcccctccccaggtgcagctgccggtgagcttagatttgcctctgttcccatcaatcatgatgcagcccgtccaacaccccgctctaccgccacagctcgccctccagttgcctcaaatggacgcactgagcgcagacctaacccagctgtgccagcagcagctcggactcgatccaaattttctgcggcacagccaattcaaaagacctcgcacaagaattacagacgaccagctgaaaatcctgagggcctacttcgatattaataactctccctcagaggaacagatacaggaaatggccgaaaagtctgggttatctcagaaagtcatcaaacattggttccgaaatactcttttcaaagaaagacagcgtaacaaagattctccatataatttttcaaacccaccaattacagttctggaggacattagaattgatccccagccaacgtctctggaacactataagtccgacgcaagtttttccaaacgctcctctagaacccgattcactgattatcagttgagggtattgcaagacttctttgatactaatgcttatccaaaagacgatgaaatcgaacagctctctaccgtcttaaacctgcccacccgcgtcatagttgtgtggtttcagaacgcccgccagaaagctagaaagagttatgaaaaccaggcagaaacaaaagataatgaaaagcgggagctcacgaatgagaggtatatccgtacaagtaatatgcaatatcagtgcaagaaatgcaatgtggtgttcccccggatttttgatctgatcacccaccagaaaaagcagtgctacaaagatgaggatgacgatgcccaggatgaatcgcagacggaggacagcatggatgcaaccgatcaggtagtttataagcactgtacagtctccggccagaccgacgcagcgaaaaacgcggcagcccccgctgcaagtagcggtagcgggacgtcaacccctctaatcccaagtcccaaacctgagcccgagaaaacttccccaaagccagaatacccagccgagaaacctaagcaaagtgatccaagccctccttctcagggcaccaagcccgctctgccattggcctccacttcttccgaccctccacaagcgtcaaccgctcaacctcagccccagccgcagccaccgaagcaaccacagctgataggaaggcctccatctgctagccagacacccgtgccaagtagccctctccagatatccatgacatccttacaaaatagccttcctccacagcttctgcaatatcagtgcgaccaatgtaccgtcgcctttcccactttagaactgtggcaggaacatcagcatatgcacttcctggccgcacaaaaccaatttcttcattctccttttctggaacgacctatggatatgccctatatgatctttgacccaaataatccattaatgacgggccagctcctcggtagtagcctcacacagatgcccccacaggcaagttcgtcccacacgacagccccaaccactgttgctgcgtctctgaagcgcaagctggatgacaaggaagacaataactgttccgagaaggagggggggaactcaggagaggaccaacacagagacaagagactccggacgactatcacgcccgaacagctcgaaatcctttacgaaaagtacctcttggattctaatcccacacgcaagatgcttgaccatatcgctagagaggtcggcttaaaaaagagagttgtccaggtctggttccaaaataccagggccagggagaggaagggccagtttcgcgcggtgggtcctgcccagtctcacaagagatgccccttctgtcgcgccctcttcaaggcgaaaagcgccctggagagccatatccggtcacggcactggaatgaggggaagcaggctggctacagcctcccgccatccccgctgatttccacggaagatggaggtgagtctccccagaaatatatctatttcgactacccgagtcttcctttgacaaaaatcgacctgtcctcagagaatgagcttgcctctactgttagcacaccagtgtccaagactgcggagctgagccccaagaacctcctttcgccttcttcatttaaagcagaatgcagtgaagacgttgagaatctcaacgctccccccgcagaagccggttatgaccagaacaaaacagacttcgacgagacatctagtatcaacactgccataagcgatgcgacaaccggggacgaaggaaacacagagatggaaagcacaacaggaagctccggtgacgtgaagcctgccctttcccccaaagagccaaagacgctggataccctgcccaagccagctactacccctacaaccgaggtgtgcgacgataagtttttgttcagcctgacgtcaccttcaatccactttaacgacaaagacggagaccacgatcagagtttctatatcaccgatgaccctgacgataacgcagatagatccgagacttcgtccatcgcagacccttcttctcccaacccatttggctcctccaacccattcaaatccaagagcaacgatcggcccggccacaaaagattccgcacccaaatgagcaatctccagctgaaggtgctgaaggcctgtttcagcgactatcggacaccaaccatgcaggagtgcgagatgctgggcaacgaaataggcttaccaaaacgggtcgtgcaggtttggtttcagaacgctcgagcaaaagaaaagaaattcaagatcaatattggcaaacccttcatgatcaatcaaggggggacagagggtaccaagcccgagtgcacattgtgtggagtgaagtacagtgcaagactcagcattcgcgatcacattttctcaaaacagcacatcagtaaggtgagagagactgtgggcagccagctagatcgagagaaagattacctggctccaactacagtgcggcagcttatggctcagcaggagctcgatcgcatcaagaaggcctcagatgtactgggtctgactgtgcagcaacccgggatgatggactctagctcactgcacgggatttcgctgcccacagcctaccccggcctccccgggctccccccagtgctattgccgggcatgaacggcccctcaagcctgccagggtttcctcagaacagcaatacattgactccacccggcgcaggtatgctgggttttcctacttctgctacctcctccccggcgttgtctttatcaagtgcgccaacaaaacccctccttcagacgccgccgccccccccacccccccctccgccacctccttcttcttctctgtcaggccagcaaaccgagcagcaaaataaagagtccgaaaagaagcagactaaaccaaacaaggtgaagaaaatcaaggaggaggagctagaggctacaaaaccagaaaagcacccaaagaaggaagaaaagatatcttcagccctgagcgtactgggcaaagtggtaggagagacccatgtggaccctattcaattgcaggcccttcagaacgccattgccggtgatcctgctagcttcatcggcggtcagttcctgccatatttcatccccggatttgcgtcctatttcacaccacaattgccaggaaccgtacagggcgggtatttcccaccggtgtgcggaatggagagcctatttccttatgggcctactatgccccagacattggctggactgagccccggcgcactgttgcagcagtatcagcagtatcagcagaatctacaggagtctctccaaaaacaacagaaacaacaacaagaacagcaacaaaagcctgtgcaggcaaagacttccaaagtggagagcgatcagccgcagaacagcaacgacgcgagcgagacgaaagaagacaagtcaactgctaccgaatctacaaaagaggagcctcaacttgagtccaaatccgcggacttctcagatacatacgtcgtgccatttgtgaagtacgaattcatctgcaggaaatgccagatgatgttcactgacgaagatgcagcagtgaaccaccagaaatcattctgttactttggacagccattaatcgatcctcaagagaccgtcttgcgcgtgcctgtctccaagtatcaatgccttgcttgcgacgtcgcgataagcgggaatgaagccctgagccaacacttacagagtagtttgcacaaagagaagacaatcaaacaagccatgcggaatgccaaggagcacgtgcggttgttaccacactccgtgtgctcacccaatccaaatactaccagcacatcccagtccgctgcgtccagcaataacacttacccccaccttagctgtttctctatgaagtcgtggcccaatattttgttccaggccagcgcacggagagcagcctcaccacctagttcgccaccctctctttcactgccctccacagttacatccagtttgtgttctacatccggggtccagaccagccttccaacagaatcatgcagtgatgagagcgactccgagttaagtcagaagctggaagacctcgataatagcttagaggtgaaagctaagccagctagcggccttgatggaaatttcaacagtatcagaatggatatgttcagtgtatag

SEQ ID NO: 309026 - DNA, 423 bp, Artificial Sequence
  derived and/or modified sequence
atggagacctgcgacagcccccccatcagccggcaggagaacggccaatcgacttcaaaactgtgtgggaccactcagctggataacgaggttcccgagaaagtcgccggcatggaacctgatagggagaactcctctacagatgataatctaaaaaccgatgaacgaaaatctgaagccctgctagggttctccgtggaaaatgctgccgccactcaagtcacatcggcaaaggaaataccctgtaacgagtgcgctacctcttttccatccctccaaaaatacatggagcatcactgcccgaacgccaggctgccagtgctcaaggatgacaacgaaagcgagataagcgaacttgaggatagtgacgtggagaatctcacaggtgagatcgtctaccagcctgatggatctgcgtactag

SEQ ID NO: 309027 - DNA, 306 bp, Artificial Sequence
  derived and/or modified sequence
atggagacctgcgacagcccccccatcagccggcaggagaacggccagtcaacatctaaactttgtggcaccacacagttggataacgaagtgcccgagaaagttgcagggatggaaccggacagagaaaatagctccaccgacgacaatctgaagacggatgagagaaagtccgaggctcttctggggttctcagtagagaacgccgcagccacacaggtgacttcagccaaagagattccttgcaatgagtgtgcaacatcttttccgtctttgcagaagtacatggaacatcactgcccctag

SEQ ID NO: 309028 - DNA, 10803 bp, Artificial Sequence
  derived and/or modified sequence
atggagacctgtgattctcccccaatcagtcggcaggagaacggccaatcgacaagcaagttgtgcggaacaactcaactcgataatgaagtgccagaaaaagtggcaggcatggagcccgacagggaaaactcatctacagacgataatctgaaaacagacgagcgtaaaagcgaggccctgctcgggttcagcgtggagaatgccgcagctacacaagtcacctctgccaaagaaataccatgtaacgaatgtgccactagtttccctagcctgcagaagtacatggaacatcactgcccgaacgctcggctacctgtattgaaagacgataatgaatccgaaatcagtgagctggaggatagcgatgtggaaaatcttaccggtgagattgtatatcaaccagacggctcagcttatatcattgaagacagtaaagaatccgggcagaacgcccagacaggcgctaattcaaagctgtttagtacagctatgtttttggactcactggccagcgcaggcgagaaaagcgatcagtccgcatctgcccctatgtctttttacccccaaattattaacacctttcatatcgctagctccctcggaaagccatttacagccgaccaggcatttcccaatacctctgccctggcaggggtgggaccggttctgcattccttccgggtctatgacctgagacataaaagagagaaagattacctgacctccgatggcagcgccaagaattcatgtgtttctaaagatgtccctaacaatgtagacctcagtaagttcgatggttgtgtgtccgacggcaagaggaaacctgttttgatgtgttttctgtgtaagcttagctttgggtatataaggtcctttgtgacccacgcagtgcatgatcatcgaatgacgctcaatgacgaggaacagaaactgttaagtaacaaatgcgtgagcgcaattattcagggcatcggtaaggacaaggagccgcttataagttttctcgaaccaaaaaagtccacttctgtataccctcatttcagtacaacgaacctgattggacccgatcccacattccgtggactctggagtgcatttcacgtggagaacggagactcgctgccagccggattcgcttttctgaagggcagtgcttccacctcttcttctgctgaacagcctctgggcatcacacaaatgccaaaagccgaggtgaatctgggaggattatccagtctggtggtgaacactcctatcacttcagtcagcctgagtcactccagctccgaaagctcaaaaatgtctgagtctaaggaccaagaaaacaattgcgagcgcccaaaggagtccaacgttttgcaccccaacggagaatgtcctgtgaagtctgaacccacagagcccggagatgaagacgaagaggacgcttactccaatgagctcgacgacgaagaagtcctgggcgagctaacagacagcatcggaaataaggactttccactcctgaatcagtccatctctcccctgtcttcctctgttctaaaatttatcgagaaagggaccagctcaagcagtgccacagtatccgatgatacagagaaaaagaaacagacagcagccgtaagggctagcggctctgtcgcctcaaactacggaatttccggtaaggactttgcagatgcgagcgcctctaaagactcagccacagccgctcatccctcggaaatcgcccgaggggacgaggactccagtgctaccccacaccaacatggatttactccgagtacacctggcactcccggacctggaggggacggttctccagggagcggaatcgagtgcccaaagtgtgacactgtcttgggtagtagtcgtagcctggggggtcacatgactatgatgcattctcggaatagttgcaaaacgttgaaatgcccaaaatgcaactggcactacaagtaccagcaaaccctggaagcccacatgaaagagaagcaccccgagccaggtgggtcatgcgtgtattgcaaaacggggcaacctcaccctcgccttgccaggggcgagtcttacacttgcgggtataaacctttccgatgcgaggtgtgcaattactccaccaccaccaaggggaatctgtcgattcacatgcagagcgataagcacctaaacaacgtacaaaatctccagaatggcaatggtgagcaagtgttcggacatagcgcaccagcgcctaacaccagtctgagcggttgtgggacaccgtctcctagcaaacccaagcagaaacccacctggaggtgcgaggtgtgcgactacgaaacaaacgtagcacggaaccttcgaatccacatgactagcgagaaacacatgcacaacatgatgctgctgcagcagaatatgaagcagattcagcacaacctgcatctcggcctggctcccgcagaagctgaactgtatcaatactatctggcccagaacattgggctgactggcatgaagctggagaacccagctgaccctcagcttatgatcaatcccttccagcttgaccctgctactgctgcggctctggcacctggccttgtgaacaacgagctgccgcctgaaatcagactcgctagtggccagctcatgggcgatgacctctcccttctgacggcgggtgagctgtccccttatatcagtgacccagcactgaaactgtttcaatgcgcggtatgcaataagtttacgtctgattccctcgaggctctgtcggtgcacgtgtctagcgagaggagcctcccggaggaggagtggagagcagttatcggcgacatctaccagtgtaagctctgtaactataatacccaattaaaagcgaactttcagctgcactgtaagacagataagcacatgcagaaatatcaacttgtcgcccatattaaggagggaggaaagtctaatgagtggcggttaaagtgtatcgctattggaaatcctgtgcatcttaagtgcaacgcatgtgactattatacaaacagtgtagataagttgcgcctgcacacaaccaaccaccggcatgaagccgctcttaaactttacaagcacctccagaagcaagagggtgcggttaaccccgaaagctgttattattactgtgccgtgtgtgattacactacgaaagttaagctgaacctggtccagcatgtgaggagcgtcaagcaccagcagacggagggcctacgcaagctgcaactacaccagcaggggctggcaccggaagaggacaacctgagcgaaatcttcttcgtcaaagactgtccacccaacgagttggagaccgccagccttggcgcaagaacttgcgacgacgatctgacagagcaacagctgaggtcaacctccgaagagcagagcgaggaggccgagggcgctattaaacccacggccgtggccgaagacgatgaaaaggatacgtcagaacgggacaacagtgagggtaaaaactcgaacaaagactccgggatcatcacacctgagaaagagttaaaggttagtgtggccggaggtacccaacctctactgttggcgaaagaagaggacgtggccactaaaagaagcaaacctactgaggacaataaattttgtcacgaacagttttaccaatgtccgtattgtaactacaattcccgagaccagagtcggatccaaatgcacgtcttatcgcagcactccgtacaaccggttatctgctgtccactgtgtcaggacgtgttgagcaataagatgcaccttcagctgcacctcactcatctccactccgtgtctcccgattgcgtggaaaagctgttaatgaccgttcctgtcccggacgtaatgatgccgaatagtatgctcttgccagccgctgccagtgagaaaagcgaacgcgataccccggcagccgtgacagctgaggggagcggaaaatattctggagagagtcccatggatgataagtcaatggccggactggaggatagcaaagccaatgtggaggtgaagaatgaagagcaaaagccaactaaagaacccctcgaggttagtgagtggaacaaaaatagttctaaagacgtgaaaatcccagatacgctccaggaccagctgaatgaacagcaaaagcggcagccccttagcgtgtcggatcggcacgtctataaatatagatgtaatcattgttccctcgcatttaaaaccatgcagaagctccaaattcactcccagtatcatgctataagggcagcgactatgtgtaacttatgtcagcggagttttcgaaccttccaggctcttaaaaagcaccttgaagcaggacaccctgaattgagcgaggctgagctgcagcagttatacgccagcctccccgtcaacggagaactgtgggccgagtccgaaaccatgagtcaggatgaccacggacttgagcaggagatggagcgagaatacgaagtggatcatgagggcaaggctagtcctgtaggcagtgattcatcttccatccccgacgacatggggagcgaacctaagcggactcttcctttccgcaagggacccaattttactatggagaagttccttgatccgagccggccatacaagtgcacagtgtgtaaagagtcctttacacaaaaaaacatccttctggttcattataatagtgtttctcacctccacaaactcaaaaaagtccttcaagaggccagttctccagtgcctcaggagacaaattcaaacaccgacaacaagccctacaagtgcagcatctgtaacgtggcctactcacagtccagcaccctggaaatccatatgcggtccgtgctccaccagactaaggccagggccgctaaacttgagcccagcgggcatgtagctggtggtcattcaatcgccgctaacgtgaattctcccggtcaaggcatgctggacagcatgtctctggcggctgtgaatagcaaagacactcacttggacgctaaggagctgaataaaaagcagaccccggacctgatttcagcccagccggcacatcacccacctcagtcgccagcacagattcagatgcagcttcagcatgagttacagcagcaggcagcattcttccagccacagttcctgaacccagcttttctgccccacttccctatgacccctgaggccctacttcagtttcagcagccacagtttttgtttccattttacattccgggtaccgagttcagtctggggcctgacctgggattgcccggatccgccacgttcgggatgcccggaatgaccggtatggccggaagtctgctcgaagacctgaaacagcagattcagactcagcatcatgttggccagacacagctccagattctgcagcagcaggcccagcagtaccaggcaactcagccgcagctgcagccacagaagcagcagcagcagccaccaccccctcagcagcagcagcagcagcaagcaagcaagctcctcaagcaggaacagagtaatatcgtcagcgccgattgccagataatgaaagacgtaccgtcctacaaagaggcagaggatataagtgagaagcctgaaaagcccaagcaggaattcatcagcgaaggggaaggtttgaaagagggaaaagacaccaagaagcagaagtcactggagccctccattcccccaccccgaatcgccagtggagcccgtggcaatgctgccaaggctcttctcgagaatttcggattcgaacttgtaatccagtataacgagaaccggcaaaaggtgcagaaaaaagggaagagcggtgaaggcgaaaacactgacaagctggagtgtggcacatgcggaaaactattctccaatgtgttgatcctgaagagtcaccaggagcacgtgcacggccagttttttccgtacgccgcattagagaagttcgcaagacagtatcgggaggcatatgacaagctttatcccattagcccctcgtcccctgagactccgcctcctcccccaccccctccgcctctgccacccgctccaccgcaaccctcgagcatgggcccagtcaagattccaaacacagtgagtactccacttcaggccccacctcctaccccgcctccaccgagcgcccctccccaagtgcagctcccggtgagcttggatttaccgttgtttccctctattatgatgcagcctgtacagcacccagctctgcctcctcagctggccctgcagctgccacagatggacgctctttctgccgatcttacccagctgtgccaacagcagcttgggctggacccaaatttcctgcgacacagccaatttaaacgcccaagaaccaggattaccgacgaccaattgaaaatcctcagagcatatttcgacatcaacaatagcccttccgaggagcaaattcaggaaatggccgaaaagtccgggctgagccagaaagtgattaagcattggttcaggaacacactgttcaaggagaggcagaggaacaaagactcaccttacaacttctctaatcctcctattacggtccttgaggacattagaatagatccccagcccaccagtcttgagcactacaagtctgatgcttctttttccaaacggtcctcaagaaccaggtttaccgattatcagctgagggtgctccaggatttctttgacacaaacgcttacccaaaggatgatgagatagagcagctgtccactgtcctgaatttgccaacccgcgtgatcgtcgtttggttccaaaatgctagacaaaaggcacggaagtcttacgagaaccaagccgagactaaggataatgaaaagagggagctgacaaacgagagatacatcaggaccagcaacatgcagtatcagtgcaagaaatgcaacgtcgtttttccaagaatttttgacctcattactcaccagaagaaacagtgctacaaggacgaagacgatgatgcccaggatgaatcccagaccgaagattccatggatgcaaccgatcaagtggtatacaagcactgcacagtttctggacagaccgacgccgctaagaatgccgcagcacccgcagcgtcctcgggcagcggcaccagcacccccctcataccaagccctaagcctgagcctgagaagaccagccccaaacctgagtatccagcagaaaaacccaagcagagcgacccatctccaccatctcaagggactaaacccgcattgcccctagccagcacttcctccgaccctccacaggcaagcacagctcagccacagccccagccacaaccccctaaacagcctcagctgatcggacgccctcccagtgcctctcagacaccagtcccttcatctccgctccaaatatcaatgaccagcttgcagaactccctgccgcctcagttgctccagtaccagtgtgatcagtgcactgtggcctttcctacgcttgagttatggcaggagcatcagcacatgcactttctagccgcacagaatcagttcctccattccccgttccttgagaggccgatggacatgccctacatgatcttcgacccaaataacccattgatgacagggcaactactgggttcttccctgactcagatgccccctcaggcttccagttcgcatactacggctcctactacagtcgcggcatctttaaaacggaaactggacgataaggaggataataactgctccgagaaagagggaggcaatagcggagaggatcagcacagagataagcgcctacggactactatcactcccgagcagctggagatcctgtatgagaaatatctgttggattctaaccccacacgcaaaatgttagaccacatagcgcgtgaagtagggctgaaaaagcgggtggtgcaggtgtggttccagaatactagagcgagggaacggaaagggcagtttagagccgtggggcctgcgcagtcccacaagcgttgtcccttctgtcgagctcttttcaaagccaagtcagccctggagagccatatacgctcaaggcattggaatgagggaaagcaggcagggtactcattgccaccctcccccctgatctccacagaggatgggggagagagtccgcagaagtacatatattttgattatccttctctgccactaactaaaattgacctgagctctgaaaacgaattggctagcacggtctccaccccagtgtctaagaccgccgagctgagccctaaaaatttattgtcaccttccagttttaaagctgagtgtagcgaagatgtggaaaatctgaacgccccacccgctgaggccggttacgatcagaacaaaaccgactttgacgagactagcagtatcaacacagcaatttcggacgctacaaccggcgacgaggggaacaccgagatggagtctaccacagggtctagcggggatgtgaagccagccttgtccccaaaagagccaaagactttggatacactgcctaagcctgccactacccccactacggaagtgtgcgacgacaaatttctgttttccctcacttccccctctatacacttcaacgacaaggacggggatcacgaccagtccttttacatcaccgacgaccccgacgacaacgctgacaggagtgagacatcctcaattgctgatccgtcatctcccaacccctttggcagcagcaatccctttaagtcgaagagcaatgataggcccggtcataaacgttttcgaacgcagatgtccaaccttcagctcaaagtgctgaaggcttgtttctcagactacaggactccgacaatgcaagaatgcgagatgctgggcaacgagataggcctgccaaaaagggtggttcaggtatggtttcagaacgccagagcgaaggaaaagaagtttaagatcaatatcggaaaaccattcatgatcaaccaagggggaactgaggggaccaaacctgagtgcaccctgtgtggggtcaaatactctgcaagactttctataagagaccacatattttctaaacagcatatcagcaaggtgcgcgaaactgtgggatcgcagctcgatcgcgaaaaggactaccttgcacctactacagtgagacaactcatggcacaacaggaactggaccggattaagaaagcgagtgacgtcctaggccttaccgttcagcaaccaggtatgatggactcctctagcctccatggcatcagtctgccaaccgcctatcctggcctcccaggccttccaccggtgctgctgcccggaatgaacggacctagctccctgcctggattcccccagaactctaacaccttaaccccccctggtgctggcatgctaggattcccaacctccgcgacttcctctcctgctttaagcctgagctcagctcctacaaaacctctgcttcagactccgccaccccctcctcctcctccccctccacctccatcctcatcactgtctggacagcagaccgagcagcagaataaggaaagtgaaaagaaacagaccaagccgaacaaggttaaaaaaattaaggaagaggagctcgaagccacaaaaccagagaaacacccaaaaaaggaggaaaagatcagctctgcattgagtgtgctcggcaaggtggtgggcgagactcatgttgatcccatacagttgcaagctctacaaaacgcaatagccggtgatcccgcttcttttataggtgggcagttcttgccctactttatacccggattcgcgtcctacttcaccccgcaactccccggaaccgtgcaggggggttactttccacctgtctgcgggatggaaagcctgtttccttacggaccaacaatgcctcagaccctggccggactgagtcctggagccctcttgcaacagtaccagcagtaccagcagaacctgcaggaatctcttcagaaacagcagaagcagcagcaggaacagcagcaaaagccggtgcaggcgaagacaagcaaagtggagagcgaccagcctcagaattcgaatgatgcttctgagacaaaagaggataagtctaccgcaacagaatcaaccaaagaggaaccacaactggagagcaaatcagccgacttctctgatacttacgtggttccttttgtgaaatacgagttcatttgtcggaagtgtcaaatgatgtttacagatgaggacgccgctgtgaaccaccagaagagcttttgctattttggccagccgctgattgacccccaggagacggtgctgagggtgccagtatccaaataccagtgccttgcctgtgacgtggctatttcaggcaatgaggcgttaagtcagcatctccagtcatccctgcataaagaaaaaaccattaaacaggccatgagaaacgccaaagaacacgtacgactccttccccactcagtctgctctcctaatcctaacacaacctcaacttcccagagcgcagcctcctctaataatacttaccctcacttgagttgctttagtatgaagtcctggccgaatatcctctttcaggcatcagcgcgtagggctgccagtccaccgtcctctcctccatccctcagcctgccctccacagtcacctcaagcttgtgttctaccagcggggtccagacaagccttccgactgagagctgcagcgacgaatcagactccgagctgagccagaaattggaagacctggacaattcattagaggtgaaagcaaaacctgctagcgggttggacggcaatttcaatagcattcgcatggacatgttttcagtttaa

SEQ ID NO: 309029 - DNA, 468 bp, Artificial Sequence
  derived and/or modified sequence
atggaaacctgcgatagtcctcctatttcaaggcaggagaatgggcagtccacgtcaaagctgtgcggcacgacacagttagataatgaggtcccagaaaaggtggccggtatggagcccgaccgcgaaaactcctctaccgatgacaaccttaagacggatgagcgcaagtctgaagctttgctggggttttctgtagaaaacgctgctgctactcaggtcactagtgcgaaggaaattccttgcaatgaatgtgccacctcttttccttcactgcagaaatacatggagcatcattgcccgaatgctcggttgcctgtgttgaaagacgacaatgagagtgaaatcagcgagctggaggattccgacgtggagaacctcacaggtgaaatagtctatcagcctgatgggtcagcctatattatcgaggattcaaaagagagcggccagaacgcgcagacagggtag

SEQ ID NO: 309030 - DNA, 468 bp, Artificial Sequence
  derived and/or modified sequence
atggagacctgtgactccccacccatttcaagacaggagaatggccaaagcacatccaagctctgtggaacaacgcagctagacaacgaggttccagaaaaggtcgccggaatggagcccgatcgagaaaactcctccaccgatgacaatctgaagactgacgagaggaaatctgaagcactgcttggatttagtgtggaaaacgctgcggcaacccaggtgacaagtgctaaggagatcccttgtaatgaatgcgccacatccttcccctccttgcagaagtacatggagcatcattgccccaacgcaaggctgcccgtacttaaggacgacaacgagtccgaaatatcagaactagaagatagtgatgtagagaatctgacaggcgagatcgtgtaccagcccgacggaagcgcatacatcatagaagattcaaaagaaagtggacagaacgctcaaaccggatag

SEQ ID NO: 309031 - DNA, 10851 bp, Artificial Sequence
  derived and/or modified sequence
atggaaacctgtgattctcctcctattagcagacaagagaacggtcaatccacatcaaagctgtgcgggacaacacagctggataatgaagtgcccgaaaaagtagcaggaatggaacccgaccgtgagaactctagtactgacgataatctcaagacggacgagaggaagtccgaggctctgttagggttcagtgtagaaaatgctgcagccactcaggtcacgtctgccaaagagataccttgtaacgaatgtgccacctcctttccttccttacagaaatacatggagcaccactgcccaaacgcacgcttaccagtgttaaaagacgacaatgagtcggaaatctcagagctggaagacagcgacgtcgaaaacttgacgggcgaaatagtgtaccaaccagatggcagtgcatatattatagaagactccaaagagtctggccaaaatgcccaaacgggtgcgaattctaaactgttctctaccgccatgtttctcgactccctggcttccgcaggcgagaaatcggatcagagcgcatccgcccctatgtcattctatccccagatcatcaacacattccacattgcttccagcctaggaaagccgttcactgcagatcaagccttccctaatacatctgctctggcgggagtgggccctgtactccactcgtttcgggtgtatgacctgagacacaagcgagagaaggactatctgactagcgacggcagtgctaagaactcatgtgttagcaaagatgtccccaataatgtcgacctgagcaagtttgacggttgcgtctccgacggtaagaggaaaccggtcctcatgtgcttcctttgtaaacttagcttcggctacatccgctcctttgttactcacgccgtccatgaccaccgtatgacactcaacgacgaagagcagaaactgctcagtaataagtgcgttagcgcaataatacaaggcatcggtaaagacaaagagcccctcatttcgtttctcgagccaaaaaaatccacgagcgtttatccccacttcagcaccacaaacctgattggcccagatcccacctttcgaggcctgtggtccgcttttcacgttgaaaacggggatagtctgcccgcaggctttgcctttctgaagggtagcgcttcaaccagctcttcagctgaacaaccattgggaatcactcagatgcctaaggctgaggtcaatctgggtggactcagcagtctggtggtcaacacccccataaccagcgtttctctcagccactccagtagcgagtcctcaaagatgagtgagtcaaaggatcaagaaaacaattgtgaacgcccaaaggagagcaacgtgctacacccaaatggtgaatgtccggtgaagagcgaaccaaccgaaccaggtgatgaggacgaagaagacgcttattccaatgagctggatgatgaagaggtcctgggtgaactgactgacagcataggtaataaagatttcccccttctgaatcaatctatctccccactgtcatcctcggtgttgaaattcatcgagaaaggtacctcaagcagctcagctaccgtgagtgatgataccgagaagaagaaacagactgccgctgtgcgggcatctggaagcgtggcatctaactacggaatatctggaaaagatttcgctgacgctagcgctagcaaggattctgcaacagcggctcatccctccgagatcgccaggggggatgaagacagttccgccactcctcaccagcacggcttcactccaagtacgccaggcacgcctgggcctggtggcgatggatcaccgggtagtggtatcgagtgtccgaagtgtgacaccgtgctgggcagttctcggagtttaggcggacacatgaccatgatgcactctagaaatagctgcaagaccctgaagtgcccaaagtgtaactggcactacaagtatcaacagacattagaggcccacatgaaagaaaaacatccagaaccaggcggtagctgtgtgtattgcaagacaggacagccacaccccagactggccagaggtgagagttatacctgcggctacaagcctttccgctgcgaggtgtgtaactattcgacgaccactaagggaaacctgagcatccacatgcaaagcgacaagcaccttaacaacgtccagaacctccagaacgggaacggcgagcaggtgttcgggcactctgccccagcccctaacacctctctgagcggttgtggtacacccagcccttctaagccaaagcagaagcccacctggcgctgcgaggtatgtgactatgagactaatgtcgccaggaatcttaggatacatatgacatctgagaagcatatgcataatatgatgctgttgcaacagaatatgaaacagattcaacacaatctgcatctgggactagccccagcagaagccgaattgtatcagtattatcttgcacagaacatcggcctgaccgggatgaaactggagaatcctgccgacccacagctgatgattaacccatttcaactcgacccggctactgcagctgccctggcacccggtctagtcaataatgagcttccccctgagataagactcgccagcgggcagctgatgggagacgacttgtcattactgactgccggagagctgagcccctacataagcgatcctgctctaaaactcttccagtgtgcagtgtgcaacaaattcacgagtgatagcttggaagctctgagtgtgcacgtctcttcagagcgctctttacccgaagaagaatggcgcgctgttatcggagatatctaccagtgcaaactgtgtaactataatacgcaattaaaggcaaatttccagctacattgtaagacagacaaacacatgcagaaatatcaactggtcgctcacataaaggagggcggtaaatccaacgagtggaggctgaagtgcatcgccatcgggaaccccgtacacttaaaatgcaatgcgtgcgattactacaccaacagtgtagataagctgcgcctacacactacaaatcatcggcacgaggccgcattgaagctgtataaacacctccaaaagcaggagggcgctgtcaaccccgagagttgctattattactgcgccgtgtgtgactatactaccaaagtgaaactgaatctggtccaacacgttcgtagcgtgaaacaccagcagaccgagggattgagaaagctacagcttcaccagcagggcttggcacccgaggaggataacctgtctgagatcttctttgttaaggattgtcctccgaatgaattggaaacagcgtccctcggcgctcgaacttgtgacgacgacttgaccgagcagcagctgaggtctacctccgaagagcaatctgaggaagctgagggagccatcaaacctactgccgttgccgaggatgatgaaaaggatacgtcggagagagacaattccgagggaaaaaattcgaataaggattctggcattatcacaccggaaaaggaactgaaggtctccgttgcgggaggcacccaaccgctgctgctcgctaaagaggaagatgtcgccactaagcggtctaagccaactgaagataataaattctgtcacgagcaattctaccagtgcccatactgcaattataactccagagaccagtctaggattcagatgcacgtactgagccagcattctgttcagcccgtaatttgttgcccattgtgtcaggatgtgctgtctaataagatgcatctgcagcttcatctgacacatcttcatagcgtctctccagattgcgtcgaaaaactgctcatgaccgttccggtacccgatgtcatgatgcctaattcaatgttgctgcctgccgctgcgagtgaaaaaagcgagagggatacccccgctgccgtgactgccgaaggctctgggaagtatagcggagaaagtccaatggacgacaagtctatggctggcctcgaggacagcaaggcgaatgtggaggttaaaaatgaggagcagaaaccaacaaaggaaccattggaggtgtctgaatggaacaaaaattctagcaaggacgtgaagataccagacacactacaggatcagctcaacgagcagcagaaacgccagcccttgagtgtctccgacagacatgtttataagtaccgctgtaaccactgctcattggcctttaaaaccatgcaaaagttgcagatccactctcagtatcatgcaatccgggctgccacaatgtgtaatctgtgccagagatcctttaggacgtttcaagctctgaaaaagcatctggaagctgggcatccagaacttagcgaagccgagcttcaacagttatacgcatcactgcccgtgaacggcgagttgtgggctgagagtgaaaccatgagtcaggacgaccacggcttggaacaagagatggagcgagagtatgaggttgatcacgaaggcaaggcatcacctgtcgggagtgactcttcctctattccagatgacatgggcagtgaacctaaacgaactctgcctttcagaaagggccctaacttcacgatggaaaaattccttgacccttctcgtccttataaatgcacagtgtgcaaagaaagctttacccagaagaacatcctgcttgtacattataattccgtttcacatcttcacaagctgaaaaaggtgcttcaagaagcatcttctcccgtgccccaggagactaacagcaacacagataacaaaccctataagtgttcaatctgcaatgtagcttattcgcaatcttcaactctcgagattcacatgcgctcagtcctgcaccaaaccaaggccagagcagctaaattagaaccctccgggcatgtagccggtgggcattccatagccgctaatgtaaactcccctgggcaggggatgctcgacagcatgagcctcgcagccgtgaattcgaaagatacacatttagacgccaaagaactgaacaagaaacaaacacctgacctgatttccgcacagccagcgcaccaccctccccaatcgcccgctcagatccagatgcagctccagcacgagctgcagcagcaggccgctttctttcagcctcagttcctgaatccagccttcctcccccacttccccatgacaccagaggcattgttgcaattccaacagccacaatttctgtttcccttctacatccccggaacagaattcagccttggtcctgacctcgggctccccggatcagcaacatttggcatgccgggaatgacaggaatggctggcagtctgctggaggacctgaaacaacagattcagactcaacatcatgtgggacagacacagttgcaaattctccaacagcaagcacagcagtatcaggcaactcaaccgcagctgcagccccagaagcagcagcaacaaccccctccgcctcaacagcagcagcagcagcaggcgagcaagttactgaagcaagaacagagtaatatcgtgtccgccgattgccaaattatgaaagacgtgccatcgtataaggaggccgaggacatctccgagaaaccggagaagcctaagcaggagtttatatctgaaggagaaggactcaaagagggcaaagacaccaagaagcagaagagtctcgaaccatccattccccctccaagaatagcttccggtgctcgcggaaacgctgccaaggctttactggaaaacttcggtttcgagctggttatacagtataacgagaatcgccaaaaggtgcagaaaaaaggcaaatccggcgagggcgaaaataccgacaagctggaatgcggtacgtgcggcaagctattttctaacgttcttattctcaagtcccaccaagagcacgtccatggtcaattctttccatatgctgctttagagaaattcgccaggcaatatcgggaagcttacgataaactgtaccctattagcccatcttcacctgagaccccacccccaccccctccaccccctccactaccacctgcccctccgcagcccagctctatggggccagtaaagattccgaacactgtgagcacaccgctgcaggcccctccccctacgcccccacctcctcccccaccaccccctccaccgcctccaccaccgccaccacccccaccatctgcgccacctcaggtgcaactgcccgtgtccctcgatttgccactgtttccatcaataatgatgcagccagttcaacacccggctcttccaccccagctggctcttcagttgccccagatggatgctctgtccgctgacctgacccaactgtgtcagcagcagctcggtctggatcccaactttctgcggcattcacagtttaaaagacctcggaccagaattacggatgaccagctgaaaatcctccgggcatactttgatattaataattcacctagtgaagagcagattcaagagatggcggaaaagtccggcctgagccagaaagtcattaagcattggtttcgtaataccttgtttaaggagcgccagagaaacaaggattctccctataatttcagcaatccccctattacagtcctcgaagatattcgtatagatccccagcctacatcacttgagcactacaagtcagacgcatccttctctaaacgcagctcgcggacgcgtttcaccgattaccagttaagagtcttgcaggatttttttgacacaaatgcctaccccaaagatgatgaaattgagcagttatccactgtgctcaacctgccgacccgggtgatcgtggtttggtttcagaacgctcggcaaaaagctcgtaagagctacgagaaccaggcagagactaaggacaacgagaaaagggagctgaccaatgagagatacattcgtaccagcaatatgcagtatcaatgtaagaagtgcaacgttgtcttcccaaggatctttgatctaatcacacaccaaaagaagcagtgttataaggacgaggatgacgatgcccaggacgaatctcagaccgaggactccatggacgccacagaccaggtggtttataaacattgtaccgtgtccggccagacagacgctgctaagaacgcagctgctccagccgcatcgagcgggtctggcacttccactcccttgatcccgtccccaaagcccgagcctgaaaaaacttctccgaagcccgaatatccggcagagaagccgaagcagtctgaccccagtccaccttctcagggaactaagccggctttgccgctggccagcacttcaagcgatccaccgcaggcaagtactgcccagcctcaaccacagccacagccccctaagcaacctcagctaattgggagacccccatcggccagtcaaactcctgttccgagctctccactccaaatctccatgacctccttgcaaaattccctcccaccacagctcttacagtatcaatgcgatcagtgcacggtagctttcccaacgctcgagctttggcaggagcaccaacacatgcactttctggccgctcaaaaccagtttctccatagtccttttttggagagaccgatggacatgccgtatatgatttttgaccccaacaatccacttatgactggccagctgctgggaagtagtctcacccagatgcccccacaggcttcatctagccatacaacggccccaactaccgtggcggcttcgctgaaacggaaacttgacgacaaagaagacaacaactgttccgaaaaggaggggggaaacagcggcgaagatcagcacagggataagaggcttaggactactattactccagagcagctggagattctgtacgaaaagtacctgctggacagcaaccctaccagaaagatgctcgaccacatagcacgggaggtcggtctgaaaaaaagggtggtgcaggtttggtttcagaacacacgcgcaagagaacggaagggacaatttagagcggtcggaccagcccagtctcataaacggtgcccgttttgtcgcgcactgtttaaagctaagtccgcccttgaaagccatatcagaagccgacattggaatgaaggtaaacaggccggatattctctcccaccatcccccctgattagtacggaggatggaggtgaatctccccagaaatacatttacttcgattatcccagccttccacttacaaagatcgatctgagtagtgagaacgaacttgcgtctacggtgagtacacccgtttccaaaaccgctgagctctccccaaagaatctcctcagccctagttctttcaaggccgaatgttctgaggacgtcgagaacctgaacgctccccctgctgaggctggatatgaccaaaataagaccgatttcgacgaaactagctctatcaacaccgctattagcgacgccacaaccggtgatgaaggcaataccgaaatggagagcacaactggaagtagtggggacgtgaaaccagcgctcagccccaaggagccaaaaactttagacacactccccaagccagcaacgactccaacaaccgaggtttgtgatgataaatttctgtttagtctcacaagtccgagtattcattttaatgataaggacggtgaccacgaccaatctttctacatcactgatgacccagatgataacgccgaccggagcgaaacctctagtatcgccgatccaagctccccaaatccctttgggtctagtaaccctttcaagagtaagagtaacgatcggccaggacataaacgctttaggacacagatgtcaaatcttcagttaaaggtgcttaaggcctgcttttccgactatagaactcctaccatgcaagagtgtgaaatgttgggaaatgaaatcgggcttcccaaacgagtggttcaggtttggttccagaacgcgagagccaaggaaaagaaatttaaaattaacattgggaagccatttatgattaaccagggcggtactgagggcacaaaacccgagtgcactctgtgtggcgtcaaatacagcgccagattgagtatcagagatcacatattctctaaacagcacatcagcaaggttcgagagacagtgggaagtcagttggaccgagagaaggactatctggccccaactaccgttaggcagcttatggcgcaacaggaactcgacagaattaagaaggcgtctgacgtactcggtctcacagtgcagcagccaggaatgatggatagctcctccttgcatggtatttctctgcctactgcctatcctggtctacccggactcccacccgtgctccttcccggaatgaatggtccatcatcacttccagggttcccacagaacagtaacacgctgactccaccaggagcagggatgctgggtttcccgacttccgcaacgagttctccagcccttagcctctcatccgctccgaccaagccacttttgcagaccccacccccaccaccacccccacctcctccacctccctcttctagcctgtcagggcagcaaacagaacaacagaacaaggagagcgagaagaagcaaacaaaacccaacaaggtgaaaaaaatcaaagaagaggaactcgaagcgaccaagccagaaaagcatcccaaaaaagaggagaagatctcaagcgctctgtccgtgttaggcaaggttgtgggggagacccatgtagatccgattcaactgcaagcactgcagaatgctatcgccggtgaccccgcatcttttatagggggacagtttctgccctacttcatccctggctttgccagctactttaccccacagctcccaggcaccgtccagggagggtattttcctccagtatgtggtatggaatcgcttttcccatacggaccaaccatgccccagacactggcaggccttagtcccggagcgctgcttcaacaataccagcagtaccagcaaaacctacaggaaagcctacagaagcagcaaaagcagcaacaggaacagcagcaaaaacccgtgcaggccaagacctccaaggtggagtcagaccagccacagaactctaatgatgcctcggagaccaaagaggataagtccactgccacagagtccactaaagaggaaccgcagctggaaagcaaatctgccgatttctcagatacttacgtggtcccatttgtcaaatatgagtttatttgtaggaaatgtcaaatgatgtttacagatgaagacgccgcagtcaaccaccagaagagtttctgttatttcggccagccccttatagatccgcaagaaacggttctgagggtgccagtctctaaataccagtgcctggcttgtgatgtggccatctcaggcaacgaagcgctgtcccagcatctgcagagctccctgcataaagagaagactattaaacaggcaatgcggaatgcaaaggagcacgtaagattgctaccccacagcgtttgcagtcccaatcccaacaccacaagtacgtctcaatccgccgcaagttccaataatacttacccccatctaagctgtttcagcatgaagtcatggccaaatatcctgtttcaggcatctgccaggagagccgcaagtcctccaagttcccctccaagtctgtcattgcccagtacggtcacatccagtctttgctctacatccggggtgcagacatccctgcctaccgaaagctgcagcgatgagagtgactccgaattgtctcagaaactggaggacttggataactcactcgaggtgaaggccaaacccgcaagcggcctcgatgggaatttcaattcaatccggatggacatgttcagcgtgtac

SEQ ID NO: 309032 - DNA, 423 bp, Artificial Sequence
  derived and/or modified sequence
atggagacatgtgattctccacctatctctaggcaagagaatgggcaaagcacatcaaagctctgtgggacaactcaactggacaacgaagtgcccgagaaggtggctggaatggagcctgaccgggagaactcttctaccgacgataatctcaagaccgacgagaggaaaagtgaggcccttctgggctttagtgtggaaaatgccgcagccacccaagtgacttccgcaaaggaaatcccttgtaacgaatgtgccacgtccttccccagcttgcagaagtacatggaacaccattgcccgaacgcccgattgcctgtccttaaagacgacaacgaatctgagatcagtgagctcgaagacagcgacgtggagaacctaacaggagagatcgtgtaccaacctgatgggagcgcctactag

SEQ ID NO: 309033 - DNA, 306 bp, Artificial Sequence
  derived and/or modified sequence
atggaaacctgcgatagtcccccaatttctcgacaggaaaacggacagtcaacctctaaactgtgcggcacgacgcagttggacaacgaagtacccgagaaggtcgcaggcatggaaccagaccgcgagaacagctccacggacgataaccttaaaaccgatgagcggaagtctgaggctcttcttggcttttccgtcgagaatgctgcagccactcaggtcactagcgccaaggagattccatgcaacgagtgtgctacttccttcccctctttgcagaaatacatggagcatcattgcccatag

SEQ ID NO: 309034 - DNA, 13909 bp, Artificial Sequence
  derived and/or modified sequence
atttttttaaacagggctaaaacgataataattagcagaataaagacatatcggattttcatttcctttcctccttttcccaaccccttcacaaccaaacagcgagaccgcggtcggcacatgctttaactcctcccggacccccgaggaccgctccatgccccccactttctgctccagcgtttttattttcacccaataaagttcgaggattattttttattttttttgtttttttaatgaaccctctcgttttacttggatgtgatcagctgtaagtaaaataaaagcaaaacaaaaaagaggcgaagatcgagtaggaactgcaggggaaatggaaagtccctgacaggctggatgaaatgagatccccatgtagcaattgccatggaaacctgtgactcccctcctatctcaaggcaggaaaatgggcagagcacatcaaagctatgtggaacgacacaacttgataatgaggtgccagagaaagttgcagggatggagcctgacagggaaaacagctccacagatgacaacctgaaaacggatgagcgcaaaagtgaagccttgctgggtttcagcgttgagaatgcagctgccactcaggttacctcagcaaaggagataccctgcaacgaatgtgccacttcttttcccagtttacagaaatacatggaacaccactgccctaatgcccgccttcctgtcctgaaggatgacaacgagagcgagatcagcgagttagaggacagtgacgtggaaaatctaacaggggagatcgtttaccagcctgatgggtcagcatatataattgaggactccaaagaaagtgggcagaatgcacagactggggcaaatagcaaactcttttctacagcgatgttcctggactccctggcatctgctggagagaagagtgatcagtctgcttctgcacctatgtcgttctacccacagatcatcaacacttttcatatcgcttcatccctcgggaaaccatttacagccgatcaggctttcccaaatacctcagcattagcaggagttggtcctgtgttgcacagtttccgtgtctatgatctccgacacaagagagagaaagactatctaaccagtgatggctcagccaaaaactcctgtgtgtccaaagatgtccctaacaatgtggacttgtccaaattcgatggttgtgttagcgatgggaaaaggaaacctgttttaatgtgtttcttgtgcaagttgtcttttggttatatcaggtcatttgtaacccatgctgtgcatgatcatcggatgaccctcaatgacgaggagcagaagctcctcagtaataaatgcgtctccgccataatacaggggattggcaaagacaaagaacctcttataagctttctggaaccaaaaaaatccacttctgtttatccccatttttctactacaaacctcataggacccgatccaaccttccgcggtttatggagcgcttttcatgttgaaaatggtgactctttgccggctggctttgccttcttaaaaggaagcgcgagcacctcgagctcagcagagcagccgctggggattacccaaatgccaaaggctgaagtgaatctgggggggctgtctagtttagtagtgaacaccccaattacctctgtctccctcagccactcatcgtctgagtctagcaagatgtcagagagcaaagaccaagagaacaactgtgaaaggccaaaagaaagcaacgttttacacccaaacggggagtgccctgtcaaaagtgaacccactgaaccgggagatgaggatgaagaagatgcgtactccaatgaacttgatgacgaggaagtattaggtgaactcaccgatagtattggtaacaaagatttccctctcttaaaccaaagcatttctcctttatcatccagtgtgctaaaatttattgaaaagggtacctcgtcctcctcggcgactgtttctgatgacacagaaaagaaaaaacagactgctgctgttagggccagtggcagtgttgctagtaactatggcatcagtggcaaggactttgcagacgcaagtgccagtaaagacagtgccacagctgctcatccaagtgaaatagcccggggagacgaagacagttcagccactcctcaccagcatggctttaccccgagtactcctggcacaccagggcctggaggagacggctcaccgggcagtggcatcgagtgtccaaagtgcgacactgtgttggggtcttcgaggtctcttggtggtcatatgactatgatgcactcgaggaactcatgcaaaaccctcaaatgtcctaaatgtaactggcactacaaatatcagcagaccctggaggcccatatgaaggagaaacaccctgagccgggtggctcttgtgtttattgtaagactggacagcctcaccccaggcttgcccggggtgagagttacacgtgtggctataaacccttccgttgtgaggtttgtaactactctaccactaccaaaggcaacctcagtattcatatgcagtcggacaagcacctgaacaatgttcagaatctccaaaatggcaatggtgagcaggtgtttggccactctgccccagcccccaacaccagcctcagtggctgcggaacaccctctccgtccaaacccaaacagaaacccacctggcggtgtgaagtttgtgattatgaaaccaatgtcgccaggaacctccgaattcatatgaccagcgaaaagcacatgcataatatgatgcttttgcagcagaacatgaagcagatccagcataatctgcacttgggcctcgccccggcggaagcagagctttatcagtactacctagcccagaacataggcctgaccggaatgaagctggaaaaccctgccgaccctcagctgatgatcaatccattccagctggatccagcgacagcagcggctttggcaccagggctcgtaaataatgagctgccgcctgaaatccggcttgccagtggtcagctaatgggtgatgacctgtccctccttactgcaggagagctgtcaccttatatcagtgacccagcgctgaagctattccagtgtgctgtttgcaacaaattcacctctgacagcctggaggccctaagtgtgcatgtgagcagtgagcgctctctccctgaagaggaatggagggcagtaattggagatatctaccagtgcaagctctgcaactacaacactcagctcaaagccaacttccagctacactgcaagactgataaacatatgcagaaatatcaactggtggctcacattaaagaagggggcaaaagcaatgagtggaggttgaagtgtattgccattggcaaccctgttcacctaaaatgtaacgcctgtgactattacaccaacagtgtggataaattacgcttgcataccaccaatcacaggcacgaggcggccctgaagctctacaagcacttgcagaagcaagagggtgcagtgaatcccgaatcctgctattactactgtgccgtgtgtgattacaccaccaaggtcaagttgaatctggtacaacatgtccgttcggtgaagcatcagcagactgagggcctacggaagctccagctccaccagcaaggcctggcaccagaggaggacaacctcagtgagatcttttttgttaaagattgcccaccaaatgagcttgaaactgcctcattgggagccaggacttgtgatgatgatcttacagagcagcagttgagatcgacctcagaagaacaaagtgaggaggcagaaggagctattaagcctacagcagtggccgaggacgatgaaaaagacacaagtgagagagacaatagtgaaggcaaaaactctaataaagactctgggataatcacaccagagaaggaactaaaagttagtgtggcagggggtacccagccactcctgctggcaaaagaagaggatgttgcaacaaaaaggtcaaaacctacagaggacaataaattctgtcatgaacagttctatcaatgtccttattgtaactacaatagtagggaccaaagtcgtatccagatgcacgtcctatcacagcactcggtgcagccggtcatctgctgtcctctctgtcaggacgtcctcagcaacaaaatgcatctccaactgcatctgacgcatttgcacagtgtgtctccagactgtgtggagaagctgcttatgacagtgcctgtccctgatgtgatgatgccaaacagtatgctactgccagcagctgcctctgagaaatcagagcgggacacacctgcagccgtgacagctgaggggtctgggaaatattcaggtgaaagtccaatggatgacaaaagcatggcaggtctcgaggattcaaaggctaatgtggaagtaaagaatgaggagcagaaaccgactaaagaacccttggaagtctcagaatggaataaaaatagcagtaaggatgtgaaaatccccgacacactgcaagatcaattaaatgaacagcaaaaaaggcaaccgctctctgtttctgaccgtcatgtctacaagtatcgctgtaaccattgtagcttggctttcaaaactatgcagaagcttcagatacattcccagtatcatgcaattcgggctgcgacaatgtgtaacctctgccagcgcagtttccgtacattccaggctttaaaaaaacacttggaagcaggccaccctgaactgagtgaagctgaacttcaacagctatatgcctccttgcccgtgaatggagaactgtgggcagagagcgaaactatgtcccaggatgaccatggcctagagcaggaaatggagagagagtatgaggtggaccacgaagggaaagcaagtcctgtaggaagtgatagtagctctattccagatgacatgggctctgaaccaaagcggaccttaccttttagaaaagggcccaattttacgatggaaaaattccttgatccatctcgtccatataaatgtacagtgtgtaaagagtcattcacccaaaagaacattctcttggtccactataattcagtttctcacttgcataagctgaaaaaagttttgcaggaagcctccagtcctgtcccacaagaaaccaacagcaacacagataacaaaccctacaagtgcagcatctgcaatgttgcatacagccaaagctcaacattggaaatccacatgaggtctgtgctccaccagacaaaggctagggctgcaaagctggagcccagtggtcatgtggctggtgggcacagcattgcagcaaatgtcaacagccctggccaggggatgttagattccatgagtttagcagctgtaaacagcaaagatacccatttagatgccaaagaattaaataaaaagcaaactcctgatttaatctctgctcaacctgcacatcacccaccacagtcaccagcacaaattcagatgcaactacagcacgaattacaacagcaagccgcattctttcagcctcagtttctaaacccagcctttttgcctcattttcctatgaccccagaagcactgctgcagtttcagcagcctcagtttctctttccattttatatacctgggacggagttcagcttggggccagatttgggcttgccaggctctgccacatttgggatgcctggcatgacaggaatggctggctccttgcttgaagacctaaagcagcagattcaaacccaacatcacgttggtcaaactcaactccagatactacagcaacaagcacaacaataccaagccacacagccccagctgcagcctcaaaaacaacagcagcagccaccacctccacagcagcagcagcaacagcaggcaagcaaattattgaaacaagagcaaagtaacatagtgagtgcagactgccaaatcatgaaggatgtgccatcttataaggaggcagaagatatttctgaaaagccagaaaaaccaaagcaggaatttataagtgaaggtgaaggactcaaagaaggcaaagacacaaagaagcaaaaatccttggaaccatccatcccaccaccccgaatagcttcaggggccagaggaaatgctgccaaagcgttattggaaaactttggttttgaactggtcattcagtataacgaaaacaggcagaaggtacagaagaagggcaaaagtggtgaaggcgaaaacactgacaaactagaatgtggaacatgtggtaaattgttttccaatgttcttattttaaagagtcaccaagaacatgtacatgggcaattttttccatatgcagcgctagaaaaatttgctcgtcaatacagggaggcctatgacaagctttatccaatttctccatcttctccagaaacgccgcccccgccacctcctcctcctcccttgcctccggctcctccacagccttcttctatgggtcctgtaaagatccccaacacggtttctactcctctgcaagctccaccacccactcctcccccaccttctgctcctccacaggtccaactgccggtttctctggacctgccgctctttccttccattatgatgcaacctgtgcaacaccctgcgcttcctccccagcttgccctgcagctgccacagatggacgcactctctgcagacctcacccaactttgccagcagcagctcggattagatcccaacttcttaagacattctcagttcaaacgcccacggacaagaattacagatgatcagctaaaaatcctgagggcttattttgacattaataattctccaagtgaagaacagatccaggaaatggcagagaaatctggcctctcccaaaaagttatcaaacactggtttagaaatacgctttttaaggaacgacagagaaataaagattcaccatacaacttcagtaaccctcctataacggttttagaagatatcagaattgatccacagcccacctctttagaacattacaaatctgatgcatcattcagtaaaaggtcttctagaacgagatttactgactaccagcttagggttctgcaagacttttttgacacaaacgcttacccaaaagatgatgaaatagaacaactctccactgttctcaatctgcctacccgggttattgttgtatggttccagaatgctcgtcagaaagcacgaaagagttatgagaatcaagcagaaacaaaagataatgaaaaaagagaactcactaatgaacggtacattcgaacaagcaacatgcagtaccagtgtaaaaagtgcaatgtggttttccccaggatctttgacttgattacgcatcagaaaaagcagtgttacaaggatgaagatgatgatgcccaagatgaaagccaaacagaagactccatggatgccactgatcaagtggtatacaagcattgcacagtgtctggccaaacggatgcagctaaaaacgctgctgcccctgcagcaagttctggctctgggaccagcacccccctgattccatcacccaaaccagaacctgagaagacttctccaaaacctgaatatcccgcagaaaagccaaagcagagtgacccctctcccccttctcaaggcaccaaaccagccctgccattagcatcgacttcctcggacccaccacaggcatccacagcccagccacagccacagccacagccaccaaaacaaccccaacttatcggaagacctccctcggcctctcaaacaccggtcccttccagtccactgcaaatttccatgacgtctctccagaacagtctacctccacagttactacaataccaatgtgatcagtgtacagttgccttcccaactctggaactctggcaggaacaccagcacatgcacttccttgctgctcaaaaccaattccttcactctccgttcttggaaaggcccatggacatgccctacatgatatttgaccccaacaatccgctgatgactggacaactgctgggcagttccctcactcaaatgccccctcaggccagttcctcccacaccacagcccccacaacggttgctgcttccctaaaaaggaaactagacgataaagaagataataattgcagtgaaaaagaaggagggaatagcggtgaagaccaacaccgagataaacgcttgagaaccacgatcaccccggaacagctggaaatactctatgaaaaatacttgctggattccaatcctaccagaaaaatgcttgatcatattgcccgcgaagtcgggctgaaaaaaagggtcgtgcaagtctggttccagaatacacgagcgcgggagaggaaaggccagttccgggcggtgggtccagcacagtctcataaacggtgtccgttttgccgagccctgtttaaagcaaagtcggccttagaaagccacattcgctctcggcactggaatgaaggaaagcaggcaggttacagcttgccaccaagccctttaatatccaccgaagatgggggagaaagcccacagaaatacatctattttgattacccatctttgccattaactaaaattgatctatcaagtgagaatgaattggcttctacagtgtcaacacctgttagtaaaacagcagagctgtcaccgaagaatcttttaagcccttcttcttttaaagcagagtgttctgaggatgtagagaatttaaatgcccctcctgctgaggctgggtatgatcaaaataaaaccgattttgatgagacttcatcgattaatacggcaatcagtgacgccaccaccggagacgagggaaacactgaaatggaaagcaccacaggaagttccggagatgtgaaaccggctttgtctcccaaagagccaaaaactctggatactctgccaaaacctgcaaccacacctaccacggaggtctgcgatgacaaatttctcttttctctcacaagcccatccatccatttcaatgacaaagatggcgaccacgaccaaagcttttacatcacagatgacccggatgacaacgccgaccgcagcgaaacgtccagcatagcggacccgagctccccaaatccattcggatccagcaatccctttaaatccaaaagtaatgatcggccgggtcacaagcgttttcgaacgcaaatgagcaatcttcaactcaaggttctcaaggcttgctttagtgactaccgaactccaaccatgcaagaatgtgaaatgttagggaatgagattggtctgcccaaacgcgtagtccaggtgtggttccaaaatgcaagggcaaaggaaaagaaatttaaaattaacatagggaagcctttcatgatcaatcaaggcggaacggaaggcaccaaaccagagtgtaccctctgcggggtgaagtactctgcccgcttgtccatcagagatcacattttctccaaacagcacatttcaaaagtgagggagaccgttggcagtcagctcgatcgggagaaagattacttggctccgaccacggttcggcagctgatggcacagcaagaacttgatcgtataaagaaagcttcagacgtgctgggcttgacggtacagcagccaggcatgatggacagcagttctctccacggcatcagcctgccaacagcctaccccggactccccggccttcctccagtccttctccccggaatgaacggtccatcctccttgccgggatttccacaaaattcaaacactttaacacctcccggtgcaggcatgcttgggtttcctacttcagctacttcgtctcctgccctgtctctcagcagtgcccccaccaaacctttgctgcagactccaccacctccaccacctcctcctcctcctcctccttcatcctctctgtcaggacagcagaccgagcaacagaacaaagaatctgagaaaaagcaaactaagccaaacaaggtgaaaaaaatcaaagaggaggaattagaggccaccaaacccgaaaaacaccccaaaaaagaggaaaaaatctcatctgctctttcagtgttgggcaaagttgtaggtgaaacacatgtcgatcctattcagttgcaggcattacagaatgcaattgctggtgacccagcttcctttataggcggacagttcttgccatactttatccctgggtttgcttcttattttacacctcagctccctggaacagtgcaggggggatacttcccacctgtctgtggcatggagagcctctttccttatggccctacaatgccccagacactggcaggtctgtccccaggtgcactgttgcagcagtaccaacagtatcagcagaacctgcaggagtccctgcaaaagcagcaaaagcaacagcaagaacagcagcagaaaccagttcaggcaaagacatccaaagtagaaagtgaccagccgcaaaactccaacgatgcttcagaaacaaaggaagacaaaagtactgctacagaaagcacaaaagaagaaccccagttagaatccaaaagtgcagacttttcagacacttacgttgttccattcgtcaagtatgagtttatatgcagaaagtgccagatgatgtttactgatgaagacgccgcagtaaatcatcaaaagtccttctgttatttcggtcagcctttgattgacccacaagagacagtgcttcgtgtcccagtcagcaaatatcagtgtcttgcctgtgatgtggctatcagtgggaatgaagcacttagccaacacctccagtcaagcttgcacaaagagaaaacaatcaaacaagcaatgagaaatgccaaagagcatgttagattattacctcactcagtctgctcccctaatcctaacaccacatctacctcgcagtctgcagcttcttctaataacacctatcctcatctttcttgcttctccatgaagtcctggcctaatatccttttccaagcgtctgccaggagagctgcttctcccccttcttctcctccttccctttccttgccttcaacggttacctcaagtttgtgcagcacctcaggggttcaaacctcactacccacagaaagttgttcagatgagtctgacagtgagctgagccagaagctagaagacttagataattctttggaagtgaaggctaagcctgcttctggcctagatggtaatttcaatagcatccgaatggatatgttcagtgtgtaggagtgaagacaggatcccgtgcttaaaaaaataaaaaataaaaaaataaaaaaaaaataagactttaactgcagttccaaagcttctctaacccaaaaattacagtaccaaatgattgactcaggattgtttttcccatattgatatgctggcaatataggatggtatgtaatggacagaactgatgcagatggttgaatgcgcttgtactatatgctaaaatatggaaaaggaaaaaaaaatctcacaagttcttttggaacttgtttcaagccaaaaactctcaagaaagcaaattgcacctcagctggattgatttccaaatgctagcatgtactgtatgggaggatgatccagatgtttcaaagagaatttctcttagtttagttaggtgtaattcagtagctttaaattctcaggtcagaacataacatttctcatttgttaaaagcagcaagaagcctggtaaaactgtgacttttccccaaacgtcaatctttattagaaagcattttctaggtgtgtttagtgtacaaagagactttataacccttactggacaacacacagatccttgagctcacgctgcaggatagtacagttttaccgcagagggaatctggaacagtggaatcatgtgtctgccctgtgtattgcagtttgtattgccacaagctatatttataccagtgtcacccttttcttgtagaatatactaataatctgtgccaactctaccttctcacttttacctctgacgtcattctttttttctgaaagaggtaataattctagttttgatagactctgaggattatgtgaacaggacatttttcatttgtgaatttaatgctatactgtcaaggtacttgcttgtgtctgaactctagtgcacttatgattttgtagaccatgtgaaatttaataagataccttttttttcctttctttgtgtgtagtgcagcaacagtttggtctgcatttgttagaagtttaactcctaacaacccaaagacctatttaacaattggtgcataaatgaaagtagtactgtatacttgaaactgtttaagtacaagttgaacaaaaattatgaaaaggtatatttgcttctcgggaaagcaaagaagctgctttaaaaaataaaaaggggactaaaaatttgttttgtataaagaggttagccctgcgcacgtaggactgaattcagtgatatccctatacactgccatttagtggataggttattgtacttccattcatactctgggcacttgtgttgtattgttctgttacatactttttttaacctgttttgttttatcatatatgcattaaaagtattatctttatcaacatttgctgctactgtgttaacatttttgttttgcttgccatgaatttcaacttccaccacccagtgaattgatttataaattgctatgctttgctgtttttctgttgctgtggaacttaaagaatgtgaaagctgtcaaagggtattttacgaatcacttttgtgtttgatatagtaaaacaatgtgattcattccaaagtaacagaaggttatttgtaagaaagttaaaggcttgtgaacaaagaaagctaagctgttgtacatatttgtagttggctgtgcatggtacaaatttattaatatgaagaaatgcaaaatgtattgcttttgatatttctcttccgagatgaacaagtagcatgtaatgcaactgtttgacagtttaactcaagtcatgcttcaaactgttttaatgatcaaatcaagacacatttcattttacattttattattgtacagtttttgtttcggatgatgatcacagcaatctttattctatacattttatgtgaacttttttaatgtctttaatttggattttttttttttttagtattttaacatttattttaatcctgaagacacttttttgattgtgtttcgtaagagacaacatggcctcctaaggtgcaatcctgccgctatagtgagctaatgtcctgaatccaaaggcttcagaaaattgcttttgcctttttcatgaatgttaagcagcagcattgtgagatcgatctgtcctggcagttaacacgatgtgcaacagtgtgttagcatggaacagaacgcttttcacaaaacaaaggactgttttacaaatgattattccgacagtgtgtcgacataaacttttacaactgcacagcagccaaaaaaagaaaaaaaaaagaaaaaaaactttaactggatggacgttgttagggtgagaaataaaaggacagcctccaaaggttgagaatgagaattgttttttcctggatatcaaagggattatcacagcgcaatcattgtctacacaacatgtactctcaacgcctgggttacataggaaatgcaccctgaggttttaataaaagcccctatggctataactttaaataaactaaaccaaaaatgttattgatgttttatatatagagagtagtctcattagtttttgttactgtaatgtttgaagtctcaaatgcaccgtattacggtaaataacatggttttgaaaacttttttttattttgtcacagacctgttgtcatagttgaaatgatgtttattgtagatggtatttgaacttattcttctggaaatagttcatcaagtatgtttgttgctcattgtgatacattaaaaactgtatctacatattt

SEQ ID NO: 309035 - DNA, 613 bp, Artificial Sequence
  derived and/or modified sequence
atagcacaatccccttgtttaaccaatacggaaaccaaagctcatggaaattcctgggaaacatcacataactacagagtgcagctgaagaaattgagtgtgtccctgacaggctggatgaaatgagatccccatgtagcaattgccatggaaacctgtgactcccctcctatctcaaggcaggaaaatgggcagagcacatcaaagctatgtggaacgacacaacttgataatgaggtgccagagaaagttgcagggatggagcctgacagggaaaacagctccacagatgacaacctgaaaacggatgagcgcaaaagtgaagccttgctgggtttcagcgttgagaatgcagctgccactcaggttacctcagcaaaggagataccctgcaacgaatgtgccacttcttttcccagtttacagaaatacatggaacaccactgccctaatgcccgccttcctgtcctgaaggatgacaacgagagcgagatcagcgagttagaggacagtgacgtggaaaatctaacaggggagatcgtttaccagcctgatgggtcagcatatataattgaggactccaaagaaagtgggcagaatgcacagactgggg

SEQ ID NO: 309036 - DNA, 618 bp, Artificial Sequence
  derived and/or modified sequence
atcgcccggcctctgggccagggacccgcgaggcggcggctgcttgctccgaacggaacgccgccgggtgtgcgttagaccagcggatagacgcccgcggcttggggtccctgacaggctggatgaaatgagatccccatgtagcaattgccatggaaacctgtgactcccctcctatctcaaggcaggaaaatgggcagagcacatcaaagctatgtggaacgacacaacttgataatgaggtgccagagaaagttgcagggatggagcctgacagggaaaacagctccacagatgacaacctgaaaacggatgagcgcaaaagtgaagccttgctgggtttcagcgttgagaatgcagctgccactcaggttacctcagcaaaggagataccctgcaacgaatgtgccacttcttttcccagtttacagaaatacatggaacaccactgccctaatgcccgccttcctgtcctgaaggatgacaacgagagcgagatcagcgagttagaggacagtgacgtggaaaatctaacaggggagatcgtttaccagcctgatgggtcagcatatataattgaggactccaaagaaagtgggcagaatgcacagactgggg

SEQ ID NO: 309037 - DNA, 14019 bp, Artificial Sequence
  derived and/or modified sequence
attcccagagtgcatatcgggaatagacacacaaagacatgcgcactcaacttaatcagccatttttttaaacagggctaaaacgataataattagcagaataaagacatatcggattttcatttcctttcctccttttcccaaccccttcacaaccaaacagcgagaccgcggtcggcacatgctttaactcctcccggacccccgaggaccgctccatgccccccactttctgctccagcgtttttattttcacccaataaagttcgaggattattttttattttttttgtttttttaatgaaccctctcgttttacttggatgtgatcagctgtaagtaaaataaaagcaaaacaaaaaagaggcgaagatcgagtaggaactgcaggggaaatggaaagtccctgacaggctggatgaaatgagatccccatgtagcaattgccatggaaacctgtgactcccctcctatctcaaggcaggaaaatgggcagagcacatcaaagctatgtggaacgacacaacttgataatgaggtgccagagaaagttgcagggatggagcctgacagggaaaacagctccacagatgacaacctgaaaacggatgagcgcaaaagtgaagccttgctgggtttcagcgttgagaatgcagctgccactcaggttacctcagcaaaggagataccctgcaacgaatgtgccacttcttttcccagtttacagaaatacatggaacaccactgccctaatgcccgccttcctgtcctgaaggatgacaacgagagcgagatcagcgagttagaggacagtgacgtggaaaatctaacaggggagatcgtttaccagcctgatgggtcagcatatataattgaggactccaaagaaagtgggcagaatgcacagactggggcaaatagcaaactcttttctacagcgatgttcctggactccctggcatctgctggagagaagagtgatcagtctgcttctgcacctatgtcgttctacccacagatcatcaacacttttcatatcgcttcatccctcgggaaaccatttacagccgatcaggctttcccaaatacctcagcattagcaggagttggtcctgtgttgcacagtttccgtgtctatgatctccgacacaagagagagaaagactatctaaccagtgatggctcagccaaaaactcctgtgtgtccaaagatgtccctaacaatgtggacttgtccaaattcgatggttgtgttagcgatgggaaaaggaaacctgttttaatgtgtttcttgtgcaagttgtcttttggttatatcaggtcatttgtaacccatgctgtgcatgatcatcggatgaccctcaatgacgaggagcagaagctcctcagtaataaatgcgtctccgccataatacaggggattggcaaagacaaagaacctcttataagctttctggaaccaaaaaaatccacttctgtttatccccatttttctactacaaacctcataggacccgatccaaccttccgcggtttatggagcgcttttcatgttgaaaatggtgactctttgccggctggctttgccttcttaaaaggaagcgcgagcacctcgagctcagcagagcagccgctggggattacccaaatgccaaaggctgaagtgaatctgggggggctgtctagtttagtagtgaacaccccaattacctctgtctccctcagccactcatcgtctgagtctagcaagatgtcagagagcaaagaccaagagaacaactgtgaaaggccaaaagaaagcaacgttttacacccaaacggggagtgccctgtcaaaagtgaacccactgaaccgggagatgaggatgaagaagatgcgtactccaatgaacttgatgacgaggaagtattaggtgaactcaccgatagtattggtaacaaagatttccctctcttaaaccaaagcatttctcctttatcatccagtgtgctaaaatttattgaaaagggtacctcgtcctcctcggcgactgtttctgatgacacagaaaagaaaaaacagactgctgctgttagggccagtggcagtgttgctagtaactatggcatcagtggcaaggactttgcagacgcaagtgccagtaaagacagtgccacagctgctcatccaagtgaaatagcccggggagacgaagacagttcagccactcctcaccagcatggctttaccccgagtactcctggcacaccagggcctggaggagacggctcaccgggcagtggcatcgagtgtccaaagtgcgacactgtgttggggtcttcgaggtctcttggtggtcatatgactatgatgcactcgaggaactcatgcaaaaccctcaaatgtcctaaatgtaactggcactacaaatatcagcagaccctggaggcccatatgaaggagaaacaccctgagccgggtggctcttgtgtttattgtaagactggacagcctcaccccaggcttgcccggggtgagagttacacgtgtggctataaacccttccgttgtgaggtttgtaactactctaccactaccaaaggcaacctcagtattcatatgcagtcggacaagcacctgaacaatgttcagaatctccaaaatggcaatggtgagcaggtgtttggccactctgccccagcccccaacaccagcctcagtggctgcggaacaccctctccgtccaaacccaaacagaaacccacctggcggtgtgaagtttgtgattatgaaaccaatgtcgccaggaacctccgaattcatatgaccagcgaaaagcacatgcataatatgatgcttttgcagcagaacatgaagcagatccagcataatctgcacttgggcctcgccccggcggaagcagagctttatcagtactacctagcccagaacataggcctgaccggaatgaagctggaaaaccctgccgaccctcagctgatgatcaatccattccagctggatccagcgacagcagcggctttggcaccagggctcgtaaataatgagctgccgcctgaaatccggcttgccagtggtcagctaatgggtgatgacctgtccctccttactgcaggagagctgtcaccttatatcagtgacccagcgctgaagctattccagtgtgctgtttgcaacaaattcacctctgacagcctggaggccctaagtgtgcatgtgagcagtgagcgctctctccctgaagaggaatggagggcagtaattggagatatctaccagtgcaagctctgcaactacaacactcagctcaaagccaacttccagctacactgcaagactgataaacatatgcagaaatatcaactggtggctcacattaaagaagggggcaaaagcaatgagtggaggttgaagtgtattgccattggcaaccctgttcacctaaaatgtaacgcctgtgactattacaccaacagtgtggataaattacgcttgcataccaccaatcacaggcacgaggcggccctgaagctctacaagcacttgcagaagcaagagggtgcagtgaatcccgaatcctgctattactactgtgccgtgtgtgattacaccaccaaggtcaagttgaatctggtacaacatgtccgttcggtgaagcatcagcagactgagggcctacggaagctccagctccaccagcaaggcctggcaccagaggaggacaacctcagtgagatcttttttgttaaagattgcccaccaaatgagcttgaaactgcctcattgggagccaggacttgtgatgatgatcttacagagcagcagttgagatcgacctcagaagaacaaagtgaggaggcagaaggagctattaagcctacagcagtggccgaggacgatgaaaaagacacaagtgagagagacaatagtgaaggcaaaaactctaataaagactctgggataatcacaccagagaaggaactaaaagttagtgtggcagggggtacccagccactcctgctggcaaaagaagaggatgttgcaacaaaaaggtcaaaacctacagaggacaataaattctgtcatgaacagttctatcaatgtccttattgtaactacaatagtagggaccaaagtcgtatccagatgcacgtcctatcacagcactcggtgcagccggtcatctgctgtcctctctgtcaggacgtcctcagcaacaaaatgcatctccaactgcatctgacgcatttgcacagtgtgtctccagactgtgtggagaagctgcttatgacagtgcctgtccctgatgtgatgatgccaaacagtatgctactgccagcagctgcctctgagaaatcagagcgggacacacctgcagccgtgacagctgaggggtctgggaaatattcaggtgaaagtccaatggatgacaaaagcatggcaggtctcgaggattcaaaggctaatgtggaagtaaagaatgaggagcagaaaccgactaaagaacccttggaagtctcagaatggaataaaaatagcagtaaggatgtgaaaatccccgacacactgcaagatcaattaaatgaacagcaaaaaaggcaaccgctctctgtttctgaccgtcatgtctacaagtatcgctgtaaccattgtagcttggctttcaaaactatgcagaagcttcagatacattcccagtatcatgcaattcgggctgcgacaatgtgtaacctctgccagcgcagtttccgtacattccaggctttaaaaaaacacttggaagcaggccaccctgaactgagtgaagctgaacttcaacagctatatgcctccttgcccgtgaatggagaactgtgggcagagagcgaaactatgtcccaggatgaccatggcctagagcaggaaatggagagagagtatgaggtggaccacgaagggaaagcaagtcctgtaggaagtgatagtagctctattccagatgacatgggctctgaaccaaagcggaccttaccttttagaaaagggcccaattttacgatggaaaaattccttgatccatctcgtccatataaatgtacagtgtgtaaagagtcattcacccaaaagaacattctcttggtccactataattcagtttctcacttgcataagctgaaaaaagttttgcaggaagcctccagtcctgtcccacaagaaaccaacagcaacacagataacaaaccctacaagtgcagcatctgcaatgttgcatacagccaaagctcaacattggaaatccacatgaggtctgtgctccaccagacaaaggctagggctgcaaagctggagcccagtggtcatgtggctggtgggcacagcattgcagcaaatgtcaacagccctggccaggggatgttagattccatgagtttagcagctgtaaacagcaaagatacccatttagatgccaaagaattaaataaaaagcaaactcctgatttaatctctgctcaacctgcacatcacccaccacagtcaccagcacaaattcagatgcaactacagcacgaattacaacagcaagccgcattctttcagcctcagtttctaaacccagcctttttgcctcattttcctatgaccccagaagcactgctgcagtttcagcagcctcagtttctctttccattttatatacctgggacggagttcagcttggggccagatttgggcttgccaggctctgccacatttgggatgcctggcatgacaggaatggctggctccttgcttgaagacctaaagcagcagattcaaacccaacatcacgttggtcaaactcaactccagatactacagcaacaagcacaacaataccaagccacacagccccagctgcagcctcaaaaacaacagcagcagccaccacctccacagcagcagcagcaacagcaggcaagcaaattattgaaacaagagcaaagtaacatagtgagtgcagactgccaaatcatgaaggatgtgccatcttataaggaggcagaagatatttctgaaaagccagaaaaaccaaagcaggaatttataagtgaaggtgaaggactcaaagaaggcaaagacacaaagaagcaaaaatccttggaaccatccatcccaccaccccgaatagcttcaggggccagaggaaatgctgccaaagcgttattggaaaactttggttttgaactggtcattcagtataacgaaaacaggcagaaggtacagaagaagggcaaaagtggtgaaggcgaaaacactgacaaactagaatgtggaacatgtggtaaattgttttccaatgttcttattttaaagagtcaccaagaacatgtacatgggcaattttttccatatgcagcgctagaaaaatttgctcgtcaatacagggaggcctatgacaagctttatccaatttctccatcttctccagaaacgccgcccccgccacctcctcctcctcccttgcctccggctcctccacagccttcttctatgggtcctgtaaagatccccaacacggtttctactcctctgcaagctccaccacccactcctcccccaccaccaccacctcctcctcctcctcctcctccccccccacctcctccaccttctgctcctccacaggtccaactgccggtttctctggacctgccgctctttccttccattatgatgcaacctgtgcaacaccctgcgcttcctccccagcttgccctgcagctgccacagatggacgcactctctgcagacctcacccaactttgccagcagcagctcggattagatcccaacttcttaagacattctcagttcaaacgcccacggacaagaattacagatgatcagctaaaaatcctgagggcttattttgacattaataattctccaagtgaagaacagatccaggaaatggcagagaaatctggcctctcccaaaaagttatcaaacactggtttagaaatacgctttttaaggaacgacagagaaataaagattcaccatacaacttcagtaaccctcctataacggttttagaagatatcagaattgatccacagcccacctctttagaacattacaaatctgatgcatcattcagtaaaaggtcttctagaacgagatttactgactaccagcttagggttctgcaagacttttttgacacaaacgcttacccaaaagatgatgaaatagaacaactctccactgttctcaatctgcctacccgggttattgttgtatggttccagaatgctcgtcagaaagcacgaaagagttatgagaatcaagcagaaacaaaagataatgaaaaaagagaactcactaatgaacggtacattcgaacaagcaacatgcagtaccagtgtaaaaagtgcaatgtggttttccccaggatctttgacttgattacgcatcagaaaaagcagtgttacaaggatgaagatgatgatgcccaagatgaaagccaaacagaagactccatggatgccactgatcaagtggtatacaagcattgcacagtgtctggccaaacggatgcagctaaaaacgctgctgcccctgcagcaagttctggctctgggaccagcacccccctgattccatcacccaaaccagaacctgagaagacttctccaaaacctgaatatcccgcagaaaagccaaagcagagtgacccctctcccccttctcaaggcaccaaaccagccctgccattagcatcgacttcctcggacccaccacaggcatccacagcccagccacagccacagccacagccaccaaaacaaccccaacttatcggaagacctccctcggcctctcaaacaccggtcccttccagtccactgcaaatttccatgacgtctctccagaacagtctacctccacagttactacaataccaatgtgatcagtgtacagttgccttcccaactctggaactctggcaggaacaccagcacatgcacttccttgctgctcaaaaccaattccttcactctccgttcttggaaaggcccatggacatgccctacatgatatttgaccccaacaatccgctgatgactggacaactgctgggcagttccctcactcaaatgccccctcaggccagttcctcccacaccacagcccccacaacggttgctgcttccctaaaaaggaaactagacgataaagaagataataattgcagtgaaaaagaaggagggaatagcggtgaagaccaacaccgagataaacgcttgagaaccacgatcaccccggaacagctggaaatactctatgaaaaatacttgctggattccaatcctaccagaaaaatgcttgatcatattgcccgcgaagtcgggctgaaaaaaagggtcgtgcaagtctggttccagaatacacgagcgcgggagaggaaaggccagttccgggcggtgggtccagcacagtctcataaacggtgtccgttttgccgagccctgtttaaagcaaagtcggccttagaaagccacattcgctctcggcactggaatgaaggaaagcaggcaggttacagcttgccaccaagccctttaatatccaccgaagatgggggagaaagcccacagaaatacatctattttgattacccatctttgccattaactaaaattgatctatcaagtgagaatgaattggcttctacagtgtcaacacctgttagtaaaacagcagagctgtcaccgaagaatcttttaagcccttcttcttttaaagcagagtgttctgaggatgtagagaatttaaatgcccctcctgctgaggctgggtatgatcaaaataaaaccgattttgatgagacttcatcgattaatacggcaatcagtgacgccaccaccggagacgagggaaacactgaaatggaaagcaccacaggaagttccggagatgtgaaaccggctttgtctcccaaagagccaaaaactctggatactctgccaaaacctgcaaccacacctaccacggaggtctgcgatgacaaatttctcttttctctcacaagcccatccatccatttcaatgacaaagatggcgaccacgaccaaagcttttacatcacagatgacccggatgacaacgccgaccgcagcgaaacgtccagcatagcggacccgagctccccaaatccattcggatccagcaatccctttaaatccaaaagtaatgatcggccgggtcacaagcgttttcgaacgcaaatgagcaatcttcaactcaaggttctcaaggcttgctttagtgactaccgaactccaaccatgcaagaatgtgaaatgttagggaatgagattggtctgcccaaacgcgtagtccaggtgtggttccaaaatgcaagggcaaaggaaaagaaatttaaaattaacatagggaagcctttcatgatcaatcaaggcggaacggaaggcaccaaaccagagtgtaccctctgcggggtgaagtactctgcccgcttgtccatcagagatcacattttctccaaacagcacatttcaaaagtgagggagaccgttggcagtcagctcgatcgggagaaagattacttggctccgaccacggttcggcagctgatggcacagcaagaacttgatcgtataaagaaagcttcagacgtgctgggcttgacggtacagcagccaggcatgatggacagcagttctctccacggcatcagcctgccaacagcctaccccggactccccggccttcctccagtccttctccccggaatgaacggtccatcctccttgccgggatttccacaaaattcaaacactttaacacctcccggtgcaggcatgcttgggtttcctacttcagctacttcgtctcctgccctgtctctcagcagtgcccccaccaaacctttgctgcagactccaccacctccaccacctcctcctcctcctcctccttcatcctctctgtcaggacagcagaccgagcaacagaacaaagaatctgagaaaaagcaaactaagccaaacaaggtgaaaaaaatcaaagaggaggaattagaggccaccaaacccgaaaaacaccccaaaaaagaggaaaaaatctcatctgctctttcagtgttgggcaaagttgtaggtgaaacacatgtcgatcctattcagttgcaggcattacagaatgcaattgctggtgacccagcttcctttataggcggacagttcttgccatactttatccctgggtttgcttcttattttacacctcagctccctggaacagtgcaggggggatacttcccacctgtctgtggcatggagagcctctttccttatggccctacaatgccccagacactggcaggtctgtccccaggtgcactgttgcagcagtaccaacagtatcagcagaacctgcaggagtccctgcaaaagcagcaaaagcaacagcaagaacagcagcagaaaccagttcaggcaaagacatccaaagtagaaagtgaccagccgcaaaactccaacgatgcttcagaaacaaaggaagacaaaagtactgctacagaaagcacaaaagaagaaccccagttagaatccaaaagtgcagacttttcagacacttacgttgttccattcgtcaagtatgagtttatatgcagaaagtgccagatgatgtttactgatgaagacgccgcagtaaatcatcaaaagtccttctgttatttcggtcagcctttgattgacccacaagagacagtgcttcgtgtcccagtcagcaaatatcagtgtcttgcctgtgatgtggctatcagtgggaatgaagcacttagccaacacctccagtcaagcttgcacaaagagaaaacaatcaaacaagcaatgagaaatgccaaagagcatgttagattattacctcactcagtctgctcccctaatcctaacaccacatctacctcgcagtctgcagcttcttctaataacacctatcctcatctttcttgcttctccatgaagtcctggcctaatatccttttccaagcgtctgccaggagagctgcttctcccccttcttctcctccttccctttccttgccttcaacggttacctcaagtttgtgcagcacctcaggggttcaaacctcactacccacagaaagttgttcagatgagtctgacagtgagctgagccagaagctagaagacttagataattctttggaagtgaaggctaagcctgcttctggcctagatggtaatttcaatagcatccgaatggatatgttcagtgtgtaggagtgaagacaggatcccgtgcttaaaaaaataaaaaataaaaaaataaaaaaaaaataagactttaactgcagttccaaagcttctctaacccaaaaattacagtaccaaatgattgactcaggattgtttttcccatattgatatgctggcaatataggatggtatgtaatggacagaactgatgcagatggttgaatgcgcttgtactatatgctaaaatatggaaaaggaaaaaaaaatctcacaagttcttttggaacttgtttcaagccaaaaactctcaagaaagcaaattgcacctcagctggattgatttccaaatgctagcatgtactgtatgggaggatgatccagatgtttcaaagagaatttctcttagtttagttaggtgtaattcagtagctttaaattctcaggtcagaacataacatttctcatttgttaaaagcagcaagaagcctggtaaaactgtgacttttccccaaacgtcaatctttattagaaagcattttctaggtgtgtttagtgtacaaagagactttataacccttactggacaacacacagatccttgagctcacgctgcaggatagtacagttttaccgcagagggaatctggaacagtggaatcatgtgtctgccctgtgtattgcagtttgtattgccacaagctatatttataccagtgtcacccttttcttgtagaatatactaataatctgtgccaactctaccttctcacttttacctctgacgtcattctttttttctgaaagaggtaataattctagttttgatagactctgaggattatgtgaacaggacatttttcatttgtgaatttaatgctatactgtcaaggtacttgcttgtgtctgaactctagtgcacttatgattttgtagaccatgtgaaatttaataagataccttttttttcctttctttgtgtgtagtgcagcaacagtttggtctgcatttgttagaagtttaactcctaacaacccaaagacctatttaacaattggtgcataaatgaaagtagtactgtatacttgaaactgtttaagtacaagttgaacaaaaattatgaaaaggtatatttgcttctcgggaaagcaaagaagctgctttaaaaaataaaaaggggactaaaaatttgttttgtataaagaggttagccctgcgcacgtaggactgaattcagtgatatccctatacactgccatttagtggataggttattgtacttccattcatactctgggcacttgtgttgtattgttctgttacatactttttttaacctgttttgttttatcatatatgcattaaaagtattatctttatcaacatttgctgctactgtgttaacatttttgttttgcttgccatgaatttcaacttccaccacccagtgaattgatttataaattgctatgctttgctgtttttctgttgctgtggaacttaaagaatgtgaaagctgtcaaagggtattttacgaatcacttttgtgtttgatatagtaaaacaatgtgattcattccaaagtaacagaaggttatttgtaagaaagttaaaggcttgtgaacaaagaaagctaagctgttgtacatatttgtagttggctgtgcatggtacaaatttattaatatgaagaaatgcaaaatgtattgcttttgatatttctcttccgagatgaacaagtagcatgtaatgcaactgtttgacagtttaactcaagtcatgcttcaaactgttttaatgatcaaatcaagacacatttcattttacattttattattgtacagtttttgtttcggatgatgatcacagcaatctttattctatacattttatgtgaacttttttaatgtctttaatttggattttttttttttttagtattttaacatttattttaatcctgaagacacttttttgattgtgtttcgtaagagacaacatggcctcctaaggtgcaatcctgccgctatagtgagctaatgtcctgaatccaaaggcttcagaaaattgcttttgcctttttcatgaatgttaagcagcagcattgtgagatcgatctgtcctggcagttaacacgatgtgcaacagtgtgttagcatggaacagaacgcttttcacaaaacaaaggactgttttacaaatgattattccgacagtgtgtcgacataaacttttacaactgcacagcagccaaaaaaagaaaaaaaaaagaaaaaaaactttaactggatggacgttgttagggtgagaaataaaaggacagcctccaaaggttgagaatgagaattgttttttcctggatatcaaagggattatcacagcgcaatcattgtctacacaacatgtactctcaacgcctgggttacataggaaatgcaccctgaggttttaataaaagcccctatggctataactttaaataaactaaaccaaaaatgttattgatgttttatatatagagagtagtctcattagtttttgttactgtaatgtttgaagtctcaaatgcaccgtattacggtaaataacatggttttgaaaacttttttttattttgtcacagacctgttgtcatagttgaaatgatgtttattgtagatggtatttgaacttattcttctggaaatagttcatcaagtatgtttgttgctcattgtgatacattaaaaactgtatctacatattta

SEQ ID NO: 309038 - DNA, 561 bp, Artificial Sequence
  derived and/or modified sequence
acggaaaccaaagctcatggaaattcctgggaaacatcacataactacagagtgcagctgaagaaattgagtgttcactgcctgataaagaaaaggtccctgacaggctggatgaaatgagatccccatgtagcaattgccatggaaacctgtgactcccctcctatctcaaggcaggaaaatgggcagagcacatcaaagctatgtggaacgacacaacttgataatgaggtgccagagaaagttgcagggatggagcctgacagggaaaacagctccacagatgacaacctgaaaacggatgagcgcaaaagtgaagccttgctgggtttcagcgttgagaatgcagctgccactcaggttacctcagcaaaggagataccctgcaacgaatgtgccacttcttttcccagtttacagaaatacatggaacaccactgccctaatgcccgccttcctgtcctgaaggatgacaacgagagcgagatcagcgagttagaggacagtgacgtggaaaatctaacaggggagatcgtttaccagcctgatgggtcagcatat

SEQ ID NO: 309039 - DNA, 524 bp, Artificial Sequence
  derived and/or modified sequence
gtagtattatatttttagttgggtggatggatggaagagtgagagagaggctgcggctgccgctgccttttcgggtgttgcttagattaaggctgagacttggctgcgattgggacgcgacagtgacacgggcatcgatcgcttccattgagagcaatgcaaaaacacagcccgggtccctgacaggctggatgaaatgagatccccatgtagcaattgccatggaaacctgtgactcccctcctatctcaaggcaggaaaatgggcagagcacatcaaagctatgtggaacgacacaacttgataatgaggtgccagagaaagttgcagggatggagcctgacagggaaaacagctccacagatgacaacctgaaaacggatgagcgcaaaagtgaagccttgctgggtttcagcgttgagaatgcagctgccactcaggttacctcagcaaaggagataccctgcaacgaatgtgccacttcttttcccagtttacagaaatacatggaacaccactgccct

SEQ ID NO: 309040 - protein, 3567 aa, Artificial Sequence
  derived and/or modified sequence
METCDSPPISRQENGQSTSKLCGTTQLDNEVPEKVAGMEPDRENSSTDDNLKTDERKSEALLGFSVENAAATQVTSAKEIPCNECATSFPSLQKYMEHHCPNARLPVLKDDNESEISELEDSDVENLTGEIVYQPDGSAYIIEDSKESGQNAQTGANSKLFSTAMFLDSLASAGEKSDQSASAPMSFYPQIINTFHIASSLGKPFTADQAFPNTSALAGVGPVLHSFRVYDLRHKREKDYLTSDGSAKNSCVSKDVPNNVDLSKFDGCVSDGKRKPVLMCFLCKLSFGYIRSFVTHAVHDHRMTLNDEEQKLLSNKCVSAIIQGIGKDKEPLISFLEPKKSTSVYPHFSTTNLIGPDPTFRGLWSAFHVENGDSLPAGFAFLKGSASTSSSAEQPLGITQMPKAEVNLGGLSSLVVNTPITSVSLSHSSSESSKMSESKDQENNCERPKESNVLHPNGECPVKSEPTEPGDEDEEDAYSNELDDEEVLGELTDSIGNKDFPLLNQSISPLSSSVLKFIEKGTSSSSATVSDDTEKKKQTAAVRASGSVASNYGISGKDFADASASKDSATAAHPSEIARGDEDSSATPHQHGFTPSTPGTPGPGGDGSPGSGIECPKCDTVLGSSRSLGGHMTMMHSRNSCKTLKCPKCNWHYKYQQTLEAHMKEKHPEPGGSCVYCKTGQPHPRLARGESYTCGYKPFRCEVCNYSTTTKGNLSIHMQSDKHLNNVQNLQNGNGEQVFGHSAPAPNTSLSGCGTPSPSKPKQKPTWRCEVCDYETNVARNLRIHMTSEKHMHNMMLLQQNMKQIQHNLHLGLAPAEAELYQYYLAQNIGLTGMKLENPADPQLMINPFQLDPATAAALAPGLGELSPYISDPALKLFQCAVCNKFTSDSLEALSVHVSSERSLPEEEWRAVIGDIYQCKLCNYNTQLKANFQLHCKTDKHMQKYQLVAHIKEGGKSNEWRLKCIAIGNPVHLKCNACDYYTNSVDKLRLHTTNHRHEAALKLYKHLQKQEGAVNPESCYYYCAVCDYTTKVKLNLVQHVRSVKHQQTEGLRKLQLHQQGLAPEEDNLSEIFFVKDCPPNELETASLGARTCDDDLTEQHEEAEGAIKPTAVAEDDEKDTSERDNSEGKNSNKDSVSVAGGTQPLLLAKEEDVATKRSKPTEDNKFCHEQFYQCPYCNYNSRDQSRIQMHVLSQHSVQPVICCPLCQDVLSNKMHLQLHLTHLHSVSPDCVEKLLMTVPVPDVMMPNSMLLPAAASEKSERDTPAAVTAEGSGKYSGESPMDDKSMAGLEDSKANVEVKNEEQKPTKEPLEVSEWNKNSSKDVKIPDTLQDQLNEQQKRQPLSVSDRHVYKYRCNHCSLAFKTMQKLQIHSQYHAIRAATMCNLCQRSFRTFQALKKHLEAGHPELSEAELQQLYASLPVNGELWAESETMSQDDHGLEQEMEREYEVDHEGKASPVGSDSSSIPDDMGSEPKRTLPFRKGPNFTMEKFLDPSRPYKCTVCKESFTQKNILLVHYNSVSHLHKLKKVLQEASSPVPQETNSNTDNKPYKCSICNVAYSQSSTLEIHMRSVLHQTKARAAKLEPSGHVAGGHSIAANVNSPGQGMLDSMSLAAVNSKDTHLDAKELNKKQTPDLISAQPAHHPPQSPAQIQMQLQHELQQQAAFFQPQFLNPAFLPHFPMTPEALLQFQQPQFLFPFYIPGTEFSLGPDLGLPGSATFGMPGMTGMAGSLLEDLKQQIQTQHHVGQTQLQILQQQAQQYQATQPQLQPQKQQQQPPPPQQQQQQQASKLLKQEQSNIVSADCQIMKDVPSYKEAEDISEKPEKPKQEFISEGEGLKEGKDTKKQKSLEPSIPPPRIASGARGNAAKALLENFGFELVIQYNENRQKVQKKGKSGEGENTDKLECGTCGKLFSNVLILKSHQEHVHGQFFPYAALEKFARQYREAYDKLYPISPSSPETPPPPPPPPPLPPAPPQPSSMGPVKIPNTVSTPLQAPPPTPPPPPPPPPPPPPPPPPPPPSAPPQVQLPVSLDLPLFPSIMMQPVQHPALPPQLALQLPQMDALSADLTQLCQQQLGLDPNFLRHSQFKRPRTRITDDQLKILRAYFDINNSPSEEQIQEMAEKSGLSQKVIKHWFRNTLFKERQRNKDSPYNFSNPPITVLEDIRIDPQPTSLEHYKSDASFSKRSSRTRFTDYQLRVLQDFFDTNAYPKDDEIEQLSTVLNLPTRVIVVWFQNARQKARKSYENQAETKDNEKRELTNERYIRTSNMQYQCKKCNVVFPRIFDLITHQKKQCYKDEDDDAQDESQTEDSMDATDQVVYKHCTVSGQTDAAKNAAAPAASSGSGTSTPLIPSPKPEPEKTSPKPEYPAEKPKQSDPSPPSQGTKPALPLASTSSDPPQASTAQPQPQPQPPKQPQLIGRPPSASQTPVPSSPLQISMTSLQNSLPPQLLQYQCDQCTVAFPTLELWQEHQHMHFLAAQNQFLHSPFLERPMDMPYMIFDPNNPLMTGQLLGSSLTQMPPQASSSHTTAPTTVAASLKRKLDDKEDNNCSEKEGGNSGEDQHRDKRLRTTITPEQLEILYEKYLLDSNPTRKMLDHIAREVGLKKRVVQVWFQNTRARERKGQFRAVGPAQSHKRCPFCRALFKAKSALESHIRSRHWNEGKQAGYSLPPSPLISTEDGGESPQKYIYFDYPSLPLTKIDLSSENELASTVSTPVSKTAELSPKNLLSPSSFKAECSEDVENLNAPPAEAGYDQNKTDFDETSSINTAISDATTGDEGNTEMESTTGSSGDVKPALSPKEPKTLDTLPKPATTPTTEVCDDKFLFSLTSPSIHFNDKDGDHDQSFYITDDPDDNADRSETSSIADPSSPNPFGSSNPFKSKSNDRPGHKRFRTQMSNLQLKVLKACFSDYRTPTMQECEMLGNEIGLPKRVVQVWFQNARAKEKKFKINIGKPFMINQGGTEGTKPECTLCGVKYSARLSIRDHIFSKQHISKVRETVGSQLDREKDYLAPTTVRQLMAQQELDRIKKASDVLGLTVQQPGMMDSSSLHGISLPTAYPGLPGLPPVLLPGMNGPSSLPGFPQNSNIASGMLGFPTSATSSPALSLSSAPTKPLLQTPPPPPPPPPPPPSSSLSGQQTEQQNKESEKKQTKPNKVKKIKEEELEATKPEKHPKKEEKISSALSVLGKVVGETHVDPIQLQALQNAIAGDPASFIGGQFLPYFIPGFASYFTPQLPGTVQGGYFPPVCGMESLFPYGPTMPQTLAGLSPGALLQQYQQYQQNLQESLQKQQKQQQEQQQKPVQAKTSKVESDQPQNSNDASETKEDKSTATESTKEEPQLESKSADFSDTYVVPFVKYEFICRKCQMMFTDEDAAVNHQKSFCYFGQPLIDPQETVLRVPVSKYQCLACDVAISGNEALSQHLQSSLHKEKTIKQAMRNAKEHVRLLPHSVCSPNPNTTSTSQSAASSNNTYPHLSCFSMKSWPNILFQASARRAASPPSSPPSLSLPSTVTSSLCSTSGVQTSLPTESCSDESDSELSQKLEDLDNSLEVKAKPASGLDGNFNSIRMDMFSV

SEQ ID NO: 309041 - protein, 3571 aa, Artificial Sequence
  derived and/or modified sequence
METCDSPPISRQENGQSTSKLCGTTQLDNEVPEKVAGMEPDRENSSTDDNLKTDERKSEALLGFSVENAAATQVTSAKEIPCNECATSFPSLQKYMEHHCPNARLPVLKDDNESEISELEDSDVENLTGEIVYQPDGSAYIIEDSKESGQNAQTGANSKLFSTAMFLDSLASAGEKSDQSASAPMSFYPQIINTFHIASSLGKPFTADQAFPNTSALAGVGPVLHSFRVYDLRHKREKDYLTSDGSAKNSCVSKDVPNNVDLSKFDGCVSDGKRKPVLMCFLCKLSFGYIRSFVTHAVHDHRMTLNDEEQKLLSNKCVSAIIQGIGKDKEPLISFLEPKKSTSVYPHFSTTNLIGPDPTFRGLWSAFHVENGDSLPAGFAFLKGSASTSSSAEQPLGITQMPKAEVNLGGLSSLVVNTPITSVSLSHSSSESSKMSESKDQENNCERPKESNVLHPNGECPVKSEPTEPGDEDEEDAYSNELDDEEVLGELTDSIGNKDFPLLNQSISPLSSSVLKFIEKGTSSSSATVSDDTEKKKQTAAVRASGSVASNYGISGKDFADASASKDSATAAHPSEIARGDEDSSATPHQHGFTPSTPGTPGPGGDGSPGSGIECPKCDTVLGSSRSLGGHMTMMHSRNSCKTLKCPKCNWHYKYQQTLEAHMKEKHPEPGGSCVYCKTGQPHPRLARGESYTCGYKPFRCEVCNYSTTTKGNLSIHMQSDKHLNNVQNLQNGNGEQVFGHSAPAPNTSLSGCGTPSPSKPKQKPTWRCEVCDYETNVARNLRIHMTSEKHMHNMMLLQQNMKQIQHNLHLGLAPAEAELYQYYLAQNIGLTGMKLENPADPQLMINPFQLDPATAAALAPGLGELSPYISDPALKLFQCAVCNKFTSDSLEALSVHVSSERSLPEEEWRAVIGDIYQCKLCNYNTQLKANFQLHCKTDKHMQKYQLVAHIKEGGKSNEWRLKCIAIGNPVHLKCNACDYYTNSVDKLRLHTTNHRHEAALKLYKHLQKQEGAVNPESCYYYCAVCDYTTKVKLNLVQHVRSVKHQQTEGLRKLQLHQQGLAPEEDNLSEIFFVKDCPPNELETASLGARTCDDDLTEQHEEAEGAIKPTAVAEDDEKDTSERDNSEGKNSNKDSVSVAGGTQPLLLAKEEDVATKRSKPTEDNKFCHEQFYQCPYCNYNSRDQSRIQMHVLSQHSVQPVICCPLCQDVLSNKMHLQLHLTHLHSVSPDCVEKLLMTVPVPDVMMPNSMLLPAAASEKSERDTPAAVTAEGSGKYSGESPMDDKSMAGLEDSKANVEVKNEEQKPTKEPLEVSEWNKNSSKDVKIPDTLQDQLNEQQKRQPLSVSDRHVYKYRCNHCSLAFKTMQKLQIHSQYHAIRAATMCNLCQRSFRTFQALKKHLEAGHPELSEAELQQLYASLPVNGELWAESETMSQDDHGLEQEMEREYEVDHEGKASPVGSDSSSIPDDMGSEPKRTLPFRKGPNFTMEKFLDPSRPYKCTVCKESFTQKNILLVHYNSVSHLHKLKKVLQEASSPVPQETNSNTDNKPYKCSICNVAYSQSSTLEIHMRSVLHQTKARAAKLEPSGHVAGGHSIAANVNSPGQGMLDSMSLAAVNSKDTHLDAKELNKKQTPDLISAQPAHHPPQSPAQIQMQLQHELQQQAAFFQPQFLNPAFLPHFPMTPEALLQFQQPQFLFPFYIPGTEFSLGPDLGLPGSATFGMPGMTGMAGSLLEDLKQQIQTQHHVGQTQLQILQQQAQQYQATQPQLQPQKQQQQPPPPQQQQQQQASKLLKQEQSNIVSADCQIMKDVPSYKEAEDISEKPEKPKQEFISEGEGLKEGKDTKKQKSLEPSIPPPRIASGARGNAAKALLENFGFELVIQYNENRQKVQKKGKSGEGENTDKLECGTCGKLFSNVLILKSHQEHVHGQFFPYAALEKFARQYREAYDKLYPISPSSPETPPPPPPPPPLPPAPPQPSSMGPVKIPNTVSTPLQAPPPTPPPPPPPPPPPPPPPPPPPPSAPPQVQLPVSLDLPLFPSIMMQPVQHPALPPQLALQLPQMDALSADLTQLCQQQLGLDPNFLRHSQFKRPRTRITDDQLKILRAYFDINNSPSEEQIQEMAEKSGLSQKVIKHWFRNTLFKERQRNKDSPYNFSNPPITVLEDIRIDPQPTSLEHYKSDASFSKRSSRTRFTDYQLRVLQDFFDTNAYPKDDEIEQLSTVLNLPTRVIVVWFQNARQKARKSYENQAETKDNEKRELTNERYIRTSNMQYQCKKCNVVFPRIFDLITHQKKQCYKDEDDDAQDESQTEDSMDATDQVVYKHCTVSGQTDAAKNAAAPAASSGSGTSTPLIPSPKPEPEKTSPKPEYPAEKPKQSDPSPPSQGTKPALPLASTSSDPPQASTAQPQPQPQPPKQPQLIGRPPSASQTPVPSSPLQISMTSLQNSLPPQLLQYQCDQCTVAFPTLELWQEHQHMHFLAAQNQFLHSPFLERPMDMPYMIFDPNNPLMTGQLLGSSLTQMPPQASSSHTTAPTTVAASLKRKLDDKEDNNCSEKEGGNSGEDQHRDKRLRTTITPEQLEILYEKYLLDSNPTRKMLDHIAREVGLKKRVVQVWFQNTRARERKGQFRAVGPAQSHKRCPFCRALFKAKSALESHIRSRHWNEGKQAGYSLPPSPLISTEDGGESPQKYIYFDYPSLPLTKIDLSSENELASTVSTPVSKTAELSPKNLLSPSSFKAECSEDVENLNAPPAEAGYDQNKTDFDETSSINTAISDATTGDEGNTEMESTTGSSGDVKPALSPKEPKTLDTLPKPATTPTTEVCDDKFLFSLTSPSIHFNDKDGDHDQSFYITDDPDDNADRSETSSIADPSSPNPFGSSNPFKSKSNDRPGHKRFRTQMSNLQLKVLKACFSDYRTPTMQECEMLGNEIGLPKRVVQVWFQNARAKEKKFKINIGKPFMINQGGTEGTKPECTLCGVKYSARLSIRDHIFSKQHISKVRETVGSQLDREKDYLAPTTVRQLMAQQELDRIKKASDVLGLTVQQPGMMDSSSLHGISLPTAYPGLPGLPPVLLPGMNGPSSLPGFPQNSNTLTPPGAGMLGFPTSATSSPALSLSSAPTKPLLQTPPPPPPPPPPPPSSSLSGQQTEQQNKESEKKQTKPNKVKKIKEEELEATKPEKHPKKEEKISSALSVLGKVVGETHVDPIQLQALQNAIAGDPASFIGGQFLPYFIPGFASYFTPQLPGTVQGGYFPPVCGMESLFPYGPTMPQTLAGLSPGALLQQYQQYQQNLQESLQKQQKQQQEQQQKPVQAKTSKVESDQPQNSNDASETKEDKSTATESTKEEPQLESKSADFSDTYVVPFVKYEFICRKCQMMFTDEDAAVNHQKSFCYFGQPLIDPQETVLRVPVSKYQCLACDVAISGNEALSQHLQSSLHKEKTIKQAMRNAKEHVRLLPHSVCSPNPNTTSTSQSAASSNNTYPHLSCFSMKSWPNILFQASARRAASPPSSPPSLSLPSTVTSSLCSTSGVQTSLPTESCSDESDSELSQKLEDLDNSLEVKAKPASGLDGNFNSIRMDMFSV

SEQ ID NO: 309042 - protein, 3590 aa, Artificial Sequence
  derived and/or modified sequence
METCDSPPISRQENGQSTSKLCGTTQLDNEVPEKVAGMEPDRENSSTDDNLKTDERKSEALLGFSVENAAATQVTSAKEIPCNECATSFPSLQKYMEHHCPNARLPVLKDDNESEISELEDSDVENLTGEIVYQPDGSAYIIEDSKESGQNAQTGANSKLFSTAMFLDSLASAGEKSDQSASAPMSFYPQIINTFHIASSLGKPFTADQAFPNTSALAGVGPVLHSFRVYDLRHKREKDYLTSDGSAKNSCVSKDVPNNVDLSKFDGCVSDGKRKPVLMCFLCKLSFGYIRSFVTHAVHDHRMTLNDEEQKLLSNKCVSAIIQGIGKDKEPLISFLEPKKSTSVYPHFSTTNLIGPDPTFRGLWSAFHVENGDSLPAGFAFLKGSASTSSSAEQPLGITQMPKAEVNLGGLSSLVVNTPITSVSLSHSSSESSKMSESKDQENNCERPKESNVLHPNGECPVKSEPTEPGDEDEEDAYSNELDDEEVLGELTDSIGNKDFPLLNQSISPLSSSVLKFIEKGTSSSSATVSDDTEKKKQTAAVRASGSVASNYGISGKDFADASASKDSATAAHPSEIARGDEDSSATPHQHGFTPSTPGTPGPGGDGSPGSGIECPKCDTVLGSSRSLGGHMTMMHSRNSCKTLKCPKCNWHYKYQQTLEAHMKEKHPEPGGSCVYCKTGQPHPRLARGESYTCGYKPFRCEVCNYSTTTKGNLSIHMQSDKHLNNVQNLQNGNGEQVFGHSAPAPNTSLSGCGTPSPSKPKQKPTWRCEVCDYETNVARNLRIHMTSEKHMHNMMLLQQNMKQIQHNLHLGLAPAEAELYQYYLAQNIGLTGMKLENPADPQLMINPFQLDPATAAALAPGLGELSPYISDPALKLFQCAVCNKFTSDSLEALSVHVSSERSLPEEEWRAVIGDIYQCKLCNYNTQLKANFQLHCKTDKHMQKYQLVAHIKEGGKSNEWRLKCIAIGNPVHLKCNACDYYTNSVDKLRLHTTNHRHEAALKLYKHLQKQEGAVNPESCYYYCAVCDYTTKVKLNLVQHVRSVKHQQTEGLRKLQLHQQGLAPEEDNLSEIFFVKDCPPNELETASLGARTCDDDLTEQQLRSTSEEQSEEAEGAIKPTAVAEDDEKDTSERDNSEGKNSNKDSGIITPEKELKVSVAGGTQPLLLAKEEDVATKRSKPTEDNKFCHEQFYQCPYCNYNSRDQSRIQMHVLSQHSVQPVICCPLCQDVLSNKMHLQLHLTHLHSVSPDCVEKLLMTVPVPDVMMPNSMLLPAAASEKSERDTPAAVTAEGSGKYSGESPMDDKSMAGLEDSKANVEVKNEEQKPTKEPLEVSEWNKNSSKDVKIPDTLQDQLNEQQKRQPLSVSDRHVYKYRCNHCSLAFKTMQKLQIHSQYHAIRAATMCNLCQRSFRTFQALKKHLEAGHPELSEAELQQLYASLPVNGELWAESETMSQDDHGLEQEMEREYEVDHEGKASPVGSDSSSIPDDMGSEPKRTLPFRKGPNFTMEKFLDPSRPYKCTVCKESFTQKNILLVHYNSVSHLHKLKKVLQEASSPVPQETNSNTDNKPYKCSICNVAYSQSSTLEIHMRSVLHQTKARAAKLEPSGHVAGGHSIAANVNSPGQGMLDSMSLAAVNSKDTHLDAKELNKKQTPDLISAQPAHHPPQSPAQIQMQLQHELQQQAAFFQPQFLNPAFLPHFPMTPEALLQFQQPQFLFPFYIPGTEFSLGPDLGLPGSATFGMPGMTGMAGSLLEDLKQQIQTQHHVGQTQLQILQQQAQQYQATQPQLQPQKQQQQPPPPQQQQQQQASKLLKQEQSNIVSADCQIMKDVPSYKEAEDISEKPEKPKQEFISEGEGLKEGKDTKKQKSLEPSIPPPRIASGARGNAAKALLENFGFELVIQYNENRQKVQKKGKSGEGENTDKLECGTCGKLFSNVLILKSHQEHVHGQFFPYAALEKFARQYREAYDKLYPISPSSPETPPPPPPPPPLPPAPPQPSSMGPVKIPNTVSTPLQAPPPTPPPPPPPPPPPPPPPPPPPPSAPPQVQLPVSLDLPLFPSIMMQPVQHPALPPQLALQLPQMDALSADLTQLCQQQLGLDPNFLRHSQFKRPRTRITDDQLKILRAYFDINNSPSEEQIQEMAEKSGLSQKVIKHWFRNTLFKERQRNKDSPYNFSNPPITVLEDIRIDPQPTSLEHYKSDASFSKRSSRTRFTDYQLRVLQDFFDTNAYPKDDEIEQLSTVLNLPTRVIVVWFQNARQKARKSYENQAETKDNEKRELTNERYIRTSNMQYQCKKCNVVFPRIFDLITHQKKQCYKDEDDDAQDESQTEDSMDATDQVVYKHCTVSGQTDAAKNAAAPAASSGSGTSTPLIPSPKPEPEKTSPKPEYPAEKPKQSDPSPPSQGTKPALPLASTSSDPPQASTAQPQPQPQPPKQPQLIGRPPSASQTPVPSSPLQISMTSLQNSLPPQLLQYQCDQCTVAFPTLELWQEHQHMHFLAAQNQFLHSPFLERPMDMPYMIFDPNNPLMTGQLLGSSLTQMPPQASSSHTTAPTTVAASLKRKLDDKEDNNCSEKEGGNSGEDQHRDKRLRTTITPEQLEILYEKYLLDSNPTRKMLDHIAREVGLKKRVVQVWFQNTRARERKGQFRAVGPAQSHKRCPFCRALFKAKSALESHIRSRHWNEGKQAGYSLPPSPLISTEDGGESPQKYIYFDYPSLPLTKIDLSSENELASTVSTPVSKTAELSPKNLLSPSSFKAECSEDVENLNAPPAEAGYDQNKTDFDETSSINTAISDATTGDEGNTEMESTTGSSGDVKPALSPKEPKTLDTLPKPATTPTTEVCDDKFLFSLTSPSIHFNDKDGDHDQSFYITDDPDDNADRSETSSIADPSSPNPFGSSNPFKSKSNDRPGHKRFRTQMSNLQLKVLKACFSDYRTPTMQECEMLGNEIGLPKRVVQVWFQNARAKEKKFKINIGKPFMINQGGTEGTKPECTLCGVKYSARLSIRDHIFSKQHISKVRETVGSQLDREKDYLAPTTVRQLMAQQELDRIKKASDVLGLTVQQPGMMDSSSLHGISLPTAYPGLPGLPPVLLPGMNGPSSLPGFPQNSNTLTPPGAGMLGFPTSATSSPALSLSSAPTKPLLQTPPPPPPPPPPPPSSSLSGQQTEQQNKESEKKQTKPNKVKKIKEEELEATKPEKHPKKEEKISSALSVLGKVVGETHVDPIQLQALQNAIAGDPASFIGGQFLPYFIPGFASYFTPQLPGTVQGGYFPPVCGMESLFPYGPTMPQTLAGLSPGALLQQYQQYQQNLQESLQKQQKQQQEQQQKPVQAKTSKVESDQPQNSNDASETKEDKSTATESTKEEPQLESKSADFSDTYVVPFVKYEFICRKCQMMFTDEDAAVNHQKSFCYFGQPLIDPQETVLRVPVSKYQCLACDVAISGNEALSQHLQSSLHKEKTIKQAMRNAKEHVRLLPHSVCSPNPNTTSTSQSAASSNNTYPHLSCFSMKSWPNILFQASARRAASPPSSPPSLSLPSTVTSSLCSTSGVQTSLPTESCSDESDSELSQKLEDLDNSLEVKAKPASGLDGNFNSIRMDMFSV

SEQ ID NO: 309043 - protein, 140 aa, Artificial Sequence
  derived and/or modified sequence
METCDSPPISRQENGQSTSKLCGTTQLDNEVPEKVAGMEPDRENSSTDDNLKTDERKSEALLGFSVENAAATQVTSAKEIPCNECATSFPSLQKYMEHHCPNARLPVLKDDNESEISELEDSDVENLTGEIVYQPDGSAY

SEQ ID NO: 309044 - DNA, 10704 bp, Artificial Sequence
  derived and/or modified sequence
atggagacctgcgacagcccccccatcagcagacaggagaacggccagagcaccagcaagctgtgcggcaccacccagctggacaacgaggtgcccgagaaggtggccggcatggagcccgacagagagaacagcagcaccgacgacaacctgaagaccgacgagagaaagagcgaggccctgctgggcttcagcgtggagaacgccgccgccacccaggtgaccagcgccaaggagatcccctgcaacgagtgcgccaccagcttccccagcctgcagaagtacatggagcaccactgccccaacgccagactgcccgtgctgaaggacgacaacgagagcgagatcagcgagctggaggacagcgacgtggagaacctgaccggcgagatcgtgtaccagcccgacggcagcgcctacatcatcgaggacagcaaggagagcggccagaacgcccagaccggcgccaacagcaagctgttcagcaccgccatgttcctggacagcctggccagcgccggcgagaagagcgaccagagcgccagcgcccccatgagcttctacccccagatcatcaacaccttccacatcgccagcagcctgggcaagcccttcaccgccgaccaggccttccccaacaccagcgccctggccggcgtgggccccgtgctgcacagcttcagagtgtacgacctgagacacaagagagagaaggactacctgaccagcgacggcagcgccaagaacagctgcgtgagcaaggacgtgcccaacaacgtggacctgagcaagttcgacggctgcgtgagcgacggcaagagaaagcccgtgctgatgtgcttcctgtgcaagctgagcttcggctacatcagaagcttcgtgacccacgccgtgcacgaccacagaatgaccctgaacgacgaggagcagaagctgctgagcaacaagtgcgtgagcgccatcatccagggcatcggcaaggacaaggagcccctgatcagcttcctggagcccaagaagagcaccagcgtgtacccccacttcagcaccaccaacctgatcggccccgaccccaccttcagaggcctgtggagcgccttccacgtggagaacggcgacagcctgcccgccggcttcgccttcctgaagggcagcgccagcaccagcagcagcgccgagcagcccctgggcatcacccagatgcccaaggccgaggtgaacctgggcggcctgagcagcctggtggtgaacacccccatcaccagcgtgagcctgagccacagcagcagcgagagcagcaagatgagcgagagcaaggaccaggagaacaactgcgagagacccaaggagagcaacgtgctgcaccccaacggcgagtgccccgtgaagagcgagcccaccgagcccggcgacgaggacgaggaggacgcctacagcaacgagctggacgacgaggaggtgctgggcgagctgaccgacagcatcggcaacaaggacttccccctgctgaaccagagcatcagccccctgagcagcagcgtgctgaagttcatcgagaagggcaccagcagcagcagcgccaccgtgagcgacgacaccgagaagaagaagcagaccgccgccgtgagagccagcggcagcgtggccagcaactacggcatcagcggcaaggacttcgccgacgccagcgccagcaaggacagcgccaccgccgcccaccccagcgagatcgccagaggcgacgaggacagcagcgccaccccccaccagcacggcttcacccccagcacccccggcacccccggccccggcggcgacggcagccccggcagcggcatcgagtgccccaagtgcgacaccgtgctgggcagcagcagaagcctgggcggccacatgaccatgatgcacagcagaaacagctgcaagaccctgaagtgccccaagtgcaactggcactacaagtaccagcagaccctggaggcccacatgaaggagaagcaccccgagcccggcggcagctgcgtgtactgcaagaccggccagccccaccccagactggccagaggcgagagctacacctgcggctacaagcccttcagatgcgaggtgtgcaactacagcaccaccaccaagggcaacctgagcatccacatgcagagcgacaagcacctgaacaacgtgcagaacctgcagaacggcaacggcgagcaggtgttcggccacagcgcccccgcccccaacaccagcctgagcggctgcggcacccccagccccagcaagcccaagcagaagcccacctggagatgcgaggtgtgcgactacgagaccaacgtggccagaaacctgagaatccacatgaccagcgagaagcacatgcacaacatgatgctgctgcagcagaacatgaagcagatccagcacaacctgcacctgggcctggcccccgccgaggccgagctgtaccagtactacctggcccagaacatcggcctgaccggcatgaagctggagaaccccgccgacccccagctgatgatcaaccccttccagctggaccccgccaccgccgccgccctggcccccggcctgggcgagctgagcccctacatcagcgaccccgccctgaagctgttccagtgcgccgtgtgcaacaagttcaccagcgacagcctggaggccctgagcgtgcacgtgagcagcgagagaagcctgcccgaggaggagtggagagccgtgatcggcgacatctaccagtgcaagctgtgcaactacaacacccagctgaaggccaacttccagctgcactgcaagaccgacaagcacatgcagaagtaccagctggtggcccacatcaaggagggcggcaagagcaacgagtggagactgaagtgcatcgccatcggcaaccccgtgcacctgaagtgcaacgcctgcgactactacaccaacagcgtggacaagctgagactgcacaccaccaaccacagacacgaggccgccctgaagctgtacaagcacctgcagaagcaggagggcgccgtgaaccccgagagctgctactactactgcgccgtgtgcgactacaccaccaaggtgaagctgaacctggtgcagcacgtgagaagcgtgaagcaccagcagaccgagggcctgagaaagctgcagctgcaccagcagggcctggcccccgaggaggacaacctgagcgagatcttcttcgtgaaggactgcccccccaacgagctggagaccgccagcctgggcgccagaacctgcgacgacgacctgaccgagcagcacgaggaggccgagggcgccatcaagcccaccgccgtggccgaggacgacgagaaggacaccagcgagagagacaacagcgagggcaagaacagcaacaaggacagcgtgagcgtggccggcggcacccagcccctgctgctggccaaggaggaggacgtggccaccaagagaagcaagcccaccgaggacaacaagttctgccacgagcagttctaccagtgcccctactgcaactacaacagcagagaccagagcagaatccagatgcacgtgctgagccagcacagcgtgcagcccgtgatctgctgccccctgtgccaggacgtgctgagcaacaagatgcacctgcagctgcacctgacccacctgcacagcgtgagccccgactgcgtggagaagctgctgatgaccgtgcccgtgcccgacgtgatgatgcccaacagcatgctgctgcccgccgccgccagcgagaagagcgagagagacacccccgccgccgtgaccgccgagggcagcggcaagtacagcggcgagagccccatggacgacaagagcatggccggcctggaggacagcaaggccaacgtggaggtgaagaacgaggagcagaagcccaccaaggagcccctggaggtgagcgagtggaacaagaacagcagcaaggacgtgaagatccccgacaccctgcaggaccagctgaacgagcagcagaagagacagcccctgagcgtgagcgacagacacgtgtacaagtacagatgcaaccactgcagcctggccttcaagaccatgcagaagctgcagatccacagccagtaccacgccatcagagccgccaccatgtgcaacctgtgccagagaagcttcagaaccttccaggccctgaagaagcacctggaggccggccaccccgagctgagcgaggccgagctgcagcagctgtacgccagcctgcccgtgaacggcgagctgtgggccgagagcgagaccatgagccaggacgaccacggcctggagcaggagatggagagagagtacgaggtggaccacgagggcaaggccagccccgtgggcagcgacagcagcagcatccccgacgacatgggcagcgagcccaagagaaccctgcccttcagaaagggccccaacttcaccatggagaagttcctggaccccagcagaccctacaagtgcaccgtgtgcaaggagagcttcacccagaagaacatcctgctggtgcactacaacagcgtgagccacctgcacaagctgaagaaggtgctgcaggaggccagcagccccgtgccccaggagaccaacagcaacaccgacaacaagccctacaagtgcagcatctgcaacgtggcctacagccagagcagcaccctggagatccacatgagaagcgtgctgcaccagaccaaggccagagccgccaagctggagcccagcggccacgtggccggcggccacagcatcgccgccaacgtgaacagccccggccagggcatgctggacagcatgagcctggccgccgtgaacagcaaggacacccacctggacgccaaggagctgaacaagaagcagacccccgacctgatcagcgcccagcccgcccaccaccccccccagagccccgcccagatccagatgcagctgcagcacgagctgcagcagcaggccgccttcttccagccccagttcctgaaccccgccttcctgccccacttccccatgacccccgaggccctgctgcagttccagcagccccagttcctgttccccttctacatccccggcaccgagttcagcctgggccccgacctgggcctgcccggcagcgccaccttcggcatgcccggcatgaccggcatggccggcagcctgctggaggacctgaagcagcagatccagacccagcaccacgtgggccagacccagctgcagatcctgcagcagcaggcccagcagtaccaggccacccagccccagctgcagccccagaagcagcagcagcagcccccccccccccagcagcagcagcagcagcaggccagcaagctgctgaagcaggagcagagcaacatcgtgagcgccgactgccagatcatgaaggacgtgcccagctacaaggaggccgaggacatcagcgagaagcccgagaagcccaagcaggagttcatcagcgagggcgagggcctgaaggagggcaaggacaccaagaagcagaagagcctggagcccagcatccccccccccagaatcgccagcggcgccagaggcaacgccgccaaggccctgctggagaacttcggcttcgagctggtgatccagtacaacgagaacagacagaaggtgcagaagaagggcaagagcggcgagggcgagaacaccgacaagctggagtgcggcacctgcggcaagctgttcagcaacgtgctgatcctgaagagccaccaggagcacgtgcacggccagttcttcccctacgccgccctggagaagttcgccagacagtacagagaggcctacgacaagctgtaccccatcagccccagcagccccgagacccccccccccccccccccccccccccccctgccccccgcccccccccagcccagcagcatgggccccgtgaagatccccaacaccgtgagcacccccctgcaggcccccccccccaccccccccccccccccccccccccccccccccccccccccccccccccccccccccccccccagcgcccccccccaggtgcagctgcccgtgagcctggacctgcccctgttccccagcatcatgatgcagcccgtgcagcaccccgccctgcccccccagctggccctgcagctgccccagatggacgccctgagcgccgacctgacccagctgtgccagcagcagctgggcctggaccccaacttcctgagacacagccagttcaagagacccagaaccagaatcaccgacgaccagctgaagatcctgagagcctacttcgacatcaacaacagccccagcgaggagcagatccaggagatggccgagaagagcggcctgagccagaaggtgatcaagcactggttcagaaacaccctgttcaaggagagacagagaaacaaggacagcccctacaacttcagcaacccccccatcaccgtgctggaggacatcagaatcgacccccagcccaccagcctggagcactacaagagcgacgccagcttcagcaagagaagcagcagaaccagattcaccgactaccagctgagagtgctgcaggacttcttcgacaccaacgcctaccccaaggacgacgagatcgagcagctgagcaccgtgctgaacctgcccaccagagtgatcgtggtgtggttccagaacgccagacagaaggccagaaagagctacgagaaccaggccgagaccaaggacaacgagaagagagagctgaccaacgagagatacatcagaaccagcaacatgcagtaccagtgcaagaagtgcaacgtggtgttccccagaatcttcgacctgatcacccaccagaagaagcagtgctacaaggacgaggacgacgacgcccaggacgagagccagaccgaggacagcatggacgccaccgaccaggtggtgtacaagcactgcaccgtgagcggccagaccgacgccgccaagaacgccgccgcccccgccgccagcagcggcagcggcaccagcacccccctgatccccagccccaagcccgagcccgagaagaccagccccaagcccgagtaccccgccgagaagcccaagcagagcgaccccagcccccccagccagggcaccaagcccgccctgcccctggccagcaccagcagcgaccccccccaggccagcaccgcccagccccagccccagccccagccccccaagcagccccagctgatcggcagaccccccagcgccagccagacccccgtgcccagcagccccctgcagatcagcatgaccagcctgcagaacagcctgcccccccagctgctgcagtaccagtgcgaccagtgcaccgtggccttccccaccctggagctgtggcaggagcaccagcacatgcacttcctggccgcccagaaccagttcctgcacagccccttcctggagagacccatggacatgccctacatgatcttcgaccccaacaaccccctgatgaccggccagctgctgggcagcagcctgacccagatgcccccccaggccagcagcagccacaccaccgcccccaccaccgtggccgccagcctgaagagaaagctggacgacaaggaggacaacaactgcagcgagaaggagggcggcaacagcggcgaggaccagcacagagacaagagactgagaaccaccatcacccccgagcagctggagatcctgtacgagaagtacctgctggacagcaaccccaccagaaagatgctggaccacatcgccagagaggtgggcctgaagaagagagtggtgcaggtgtggttccagaacaccagagccagagagagaaagggccagttcagagccgtgggccccgcccagagccacaagagatgccccttctgcagagccctgttcaaggccaagagcgccctggagagccacatcagaagcagacactggaacgagggcaagcaggccggctacagcctgccccccagccccctgatcagcaccgaggacggcggcgagagcccccagaagtacatctacttcgactaccccagcctgcccctgaccaagatcgacctgagcagcgagaacgagctggccagcaccgtgagcacccccgtgagcaagaccgccgagctgagccccaagaacctgctgagccccagcagcttcaaggccgagtgcagcgaggacgtggagaacctgaacgccccccccgccgaggccggctacgaccagaacaagaccgacttcgacgagaccagcagcatcaacaccgccatcagcgacgccaccaccggcgacgagggcaacaccgagatggagagcaccaccggcagcagcggcgacgtgaagcccgccctgagccccaaggagcccaagaccctggacaccctgcccaagcccgccaccacccccaccaccgaggtgtgcgacgacaagttcctgttcagcctgaccagccccagcatccacttcaacgacaaggacggcgaccacgaccagagcttctacatcaccgacgaccccgacgacaacgccgacagaagcgagaccagcagcatcgccgaccccagcagccccaaccccttcggcagcagcaaccccttcaagagcaagagcaacgacagacccggccacaagagattcagaacccagatgagcaacctgcagctgaaggtgctgaaggcctgcttcagcgactacagaacccccaccatgcaggagtgcgagatgctgggcaacgagatcggcctgcccaagagagtggtgcaggtgtggttccagaacgccagagccaaggagaagaagttcaagatcaacatcggcaagcccttcatgatcaaccagggcggcaccgagggcaccaagcccgagtgcaccctgtgcggcgtgaagtacagcgccagactgagcatcagagaccacatcttcagcaagcagcacatcagcaaggtgagagagaccgtgggcagccagctggacagagagaaggactacctggcccccaccaccgtgagacagctgatggcccagcaggagctggacagaatcaagaaggccagcgacgtgctgggcctgaccgtgcagcagcccggcatgatggacagcagcagcctgcacggcatcagcctgcccaccgcctaccccggcctgcccggcctgccccccgtgctgctgcccggcatgaacggccccagcagcctgcccggcttcccccagaacagcaacatcgccagcggcatgctgggcttccccaccagcgccaccagcagccccgccctgagcctgagcagcgcccccaccaagcccctgctgcagaccccccccccccccccccccccccccccccccccccccagcagcagcctgagcggccagcagaccgagcagcagaacaaggagagcgagaagaagcagaccaagcccaacaaggtgaagaagatcaaggaggaggagctggaggccaccaagcccgagaagcaccccaagaaggaggagaagatcagcagcgccctgagcgtgctgggcaaggtggtgggcgagacccacgtggaccccatccagctgcaggccctgcagaacgccatcgccggcgaccccgccagcttcatcggcggccagttcctgccctacttcatccccggcttcgccagctacttcaccccccagctgcccggcaccgtgcagggcggctacttcccccccgtgtgcggcatggagagcctgttcccctacggccccaccatgccccagaccctggccggcctgagccccggcgccctgctgcagcagtaccagcagtaccagcagaacctgcaggagagcctgcagaagcagcagaagcagcagcaggagcagcagcagaagcccgtgcaggccaagaccagcaaggtggagagcgaccagccccagaacagcaacgacgccagcgagaccaaggaggacaagagcaccgccaccgagagcaccaaggaggagccccagctggagagcaagagcgccgacttcagcgacacctacgtggtgcccttcgtgaagtacgagttcatctgcagaaagtgccagatgatgttcaccgacgaggacgccgccgtgaaccaccagaagagcttctgctacttcggccagcccctgatcgacccccaggagaccgtgctgagagtgcccgtgagcaagtaccagtgcctggcctgcgacgtggccatcagcggcaacgaggccctgagccagcacctgcagagcagcctgcacaaggagaagaccatcaagcaggccatgagaaacgccaaggagcacgtgagactgctgccccacagcgtgtgcagccccaaccccaacaccaccagcaccagccagagcgccgccagcagcaacaacacctacccccacctgagctgcttcagcatgaagagctggcccaacatcctgttccaggccagcgccagaagagccgccagcccccccagcagcccccccagcctgagcctgcccagcaccgtgaccagcagcctgtgcagcaccagcggcgtgcagaccagcctgcccaccgagagctgcagcgacgagagcgacagcgagctgagccagaagctggaggacctggacaacagcctggaggtgaaggccaagcccgccagcggcctggacggcaacttcaacagcatcagaatggacatgttcagcgtgtag

SEQ ID NO: 309045 - DNA, 10716 bp, Artificial Sequence
  derived and/or modified sequence
atggagacctgcgacagcccccccatcagcagacaggagaacggccagagcaccagcaagctgtgcggcaccacccagctggacaacgaggtgcccgagaaggtggccggcatggagcccgacagagagaacagcagcaccgacgacaacctgaagaccgacgagagaaagagcgaggccctgctgggcttcagcgtggagaacgccgccgccacccaggtgaccagcgccaaggagatcccctgcaacgagtgcgccaccagcttccccagcctgcagaagtacatggagcaccactgccccaacgccagactgcccgtgctgaaggacgacaacgagagcgagatcagcgagctggaggacagcgacgtggagaacctgaccggcgagatcgtgtaccagcccgacggcagcgcctacatcatcgaggacagcaaggagagcggccagaacgcccagaccggcgccaacagcaagctgttcagcaccgccatgttcctggacagcctggccagcgccggcgagaagagcgaccagagcgccagcgcccccatgagcttctacccccagatcatcaacaccttccacatcgccagcagcctgggcaagcccttcaccgccgaccaggccttccccaacaccagcgccctggccggcgtgggccccgtgctgcacagcttcagagtgtacgacctgagacacaagagagagaaggactacctgaccagcgacggcagcgccaagaacagctgcgtgagcaaggacgtgcccaacaacgtggacctgagcaagttcgacggctgcgtgagcgacggcaagagaaagcccgtgctgatgtgcttcctgtgcaagctgagcttcggctacatcagaagcttcgtgacccacgccgtgcacgaccacagaatgaccctgaacgacgaggagcagaagctgctgagcaacaagtgcgtgagcgccatcatccagggcatcggcaaggacaaggagcccctgatcagcttcctggagcccaagaagagcaccagcgtgtacccccacttcagcaccaccaacctgatcggccccgaccccaccttcagaggcctgtggagcgccttccacgtggagaacggcgacagcctgcccgccggcttcgccttcctgaagggcagcgccagcaccagcagcagcgccgagcagcccctgggcatcacccagatgcccaaggccgaggtgaacctgggcggcctgagcagcctggtggtgaacacccccatcaccagcgtgagcctgagccacagcagcagcgagagcagcaagatgagcgagagcaaggaccaggagaacaactgcgagagacccaaggagagcaacgtgctgcaccccaacggcgagtgccccgtgaagagcgagcccaccgagcccggcgacgaggacgaggaggacgcctacagcaacgagctggacgacgaggaggtgctgggcgagctgaccgacagcatcggcaacaaggacttccccctgctgaaccagagcatcagccccctgagcagcagcgtgctgaagttcatcgagaagggcaccagcagcagcagcgccaccgtgagcgacgacaccgagaagaagaagcagaccgccgccgtgagagccagcggcagcgtggccagcaactacggcatcagcggcaaggacttcgccgacgccagcgccagcaaggacagcgccaccgccgcccaccccagcgagatcgccagaggcgacgaggacagcagcgccaccccccaccagcacggcttcacccccagcacccccggcacccccggccccggcggcgacggcagccccggcagcggcatcgagtgccccaagtgcgacaccgtgctgggcagcagcagaagcctgggcggccacatgaccatgatgcacagcagaaacagctgcaagaccctgaagtgccccaagtgcaactggcactacaagtaccagcagaccctggaggcccacatgaaggagaagcaccccgagcccggcggcagctgcgtgtactgcaagaccggccagccccaccccagactggccagaggcgagagctacacctgcggctacaagcccttcagatgcgaggtgtgcaactacagcaccaccaccaagggcaacctgagcatccacatgcagagcgacaagcacctgaacaacgtgcagaacctgcagaacggcaacggcgagcaggtgttcggccacagcgcccccgcccccaacaccagcctgagcggctgcggcacccccagccccagcaagcccaagcagaagcccacctggagatgcgaggtgtgcgactacgagaccaacgtggccagaaacctgagaatccacatgaccagcgagaagcacatgcacaacatgatgctgctgcagcagaacatgaagcagatccagcacaacctgcacctgggcctggcccccgccgaggccgagctgtaccagtactacctggcccagaacatcggcctgaccggcatgaagctggagaaccccgccgacccccagctgatgatcaaccccttccagctggaccccgccaccgccgccgccctggcccccggcctgggcgagctgagcccctacatcagcgaccccgccctgaagctgttccagtgcgccgtgtgcaacaagttcaccagcgacagcctggaggccctgagcgtgcacgtgagcagcgagagaagcctgcccgaggaggagtggagagccgtgatcggcgacatctaccagtgcaagctgtgcaactacaacacccagctgaaggccaacttccagctgcactgcaagaccgacaagcacatgcagaagtaccagctggtggcccacatcaaggagggcggcaagagcaacgagtggagactgaagtgcatcgccatcggcaaccccgtgcacctgaagtgcaacgcctgcgactactacaccaacagcgtggacaagctgagactgcacaccaccaaccacagacacgaggccgccctgaagctgtacaagcacctgcagaagcaggagggcgccgtgaaccccgagagctgctactactactgcgccgtgtgcgactacaccaccaaggtgaagctgaacctggtgcagcacgtgagaagcgtgaagcaccagcagaccgagggcctgagaaagctgcagctgcaccagcagggcctggcccccgaggaggacaacctgagcgagatcttcttcgtgaaggactgcccccccaacgagctggagaccgccagcctgggcgccagaacctgcgacgacgacctgaccgagcagcacgaggaggccgagggcgccatcaagcccaccgccgtggccgaggacgacgagaaggacaccagcgagagagacaacagcgagggcaagaacagcaacaaggacagcgtgagcgtggccggcggcacccagcccctgctgctggccaaggaggaggacgtggccaccaagagaagcaagcccaccgaggacaacaagttctgccacgagcagttctaccagtgcccctactgcaactacaacagcagagaccagagcagaatccagatgcacgtgctgagccagcacagcgtgcagcccgtgatctgctgccccctgtgccaggacgtgctgagcaacaagatgcacctgcagctgcacctgacccacctgcacagcgtgagccccgactgcgtggagaagctgctgatgaccgtgcccgtgcccgacgtgatgatgcccaacagcatgctgctgcccgccgccgccagcgagaagagcgagagagacacccccgccgccgtgaccgccgagggcagcggcaagtacagcggcgagagccccatggacgacaagagcatggccggcctggaggacagcaaggccaacgtggaggtgaagaacgaggagcagaagcccaccaaggagcccctggaggtgagcgagtggaacaagaacagcagcaaggacgtgaagatccccgacaccctgcaggaccagctgaacgagcagcagaagagacagcccctgagcgtgagcgacagacacgtgtacaagtacagatgcaaccactgcagcctggccttcaagaccatgcagaagctgcagatccacagccagtaccacgccatcagagccgccaccatgtgcaacctgtgccagagaagcttcagaaccttccaggccctgaagaagcacctggaggccggccaccccgagctgagcgaggccgagctgcagcagctgtacgccagcctgcccgtgaacggcgagctgtgggccgagagcgagaccatgagccaggacgaccacggcctggagcaggagatggagagagagtacgaggtggaccacgagggcaaggccagccccgtgggcagcgacagcagcagcatccccgacgacatgggcagcgagcccaagagaaccctgcccttcagaaagggccccaacttcaccatggagaagttcctggaccccagcagaccctacaagtgcaccgtgtgcaaggagagcttcacccagaagaacatcctgctggtgcactacaacagcgtgagccacctgcacaagctgaagaaggtgctgcaggaggccagcagccccgtgccccaggagaccaacagcaacaccgacaacaagccctacaagtgcagcatctgcaacgtggcctacagccagagcagcaccctggagatccacatgagaagcgtgctgcaccagaccaaggccagagccgccaagctggagcccagcggccacgtggccggcggccacagcatcgccgccaacgtgaacagccccggccagggcatgctggacagcatgagcctggccgccgtgaacagcaaggacacccacctggacgccaaggagctgaacaagaagcagacccccgacctgatcagcgcccagcccgcccaccaccccccccagagccccgcccagatccagatgcagctgcagcacgagctgcagcagcaggccgccttcttccagccccagttcctgaaccccgccttcctgccccacttccccatgacccccgaggccctgctgcagttccagcagccccagttcctgttccccttctacatccccggcaccgagttcagcctgggccccgacctgggcctgcccggcagcgccaccttcggcatgcccggcatgaccggcatggccggcagcctgctggaggacctgaagcagcagatccagacccagcaccacgtgggccagacccagctgcagatcctgcagcagcaggcccagcagtaccaggccacccagccccagctgcagccccagaagcagcagcagcagcccccccccccccagcagcagcagcagcagcaggccagcaagctgctgaagcaggagcagagcaacatcgtgagcgccgactgccagatcatgaaggacgtgcccagctacaaggaggccgaggacatcagcgagaagcccgagaagcccaagcaggagttcatcagcgagggcgagggcctgaaggagggcaaggacaccaagaagcagaagagcctggagcccagcatccccccccccagaatcgccagcggcgccagaggcaacgccgccaaggccctgctggagaacttcggcttcgagctggtgatccagtacaacgagaacagacagaaggtgcagaagaagggcaagagcggcgagggcgagaacaccgacaagctggagtgcggcacctgcggcaagctgttcagcaacgtgctgatcctgaagagccaccaggagcacgtgcacggccagttcttcccctacgccgccctggagaagttcgccagacagtacagagaggcctacgacaagctgtaccccatcagccccagcagccccgagacccccccccccccccccccccccccccccctgccccccgcccccccccagcccagcagcatgggccccgtgaagatccccaacaccgtgagcacccccctgcaggcccccccccccaccccccccccccccccccccccccccccccccccccccccccccccccccccccccccccccagcgcccccccccaggtgcagctgcccgtgagcctggacctgcccctgttccccagcatcatgatgcagcccgtgcagcaccccgccctgcccccccagctggccctgcagctgccccagatggacgccctgagcgccgacctgacccagctgtgccagcagcagctgggcctggaccccaacttcctgagacacagccagttcaagagacccagaaccagaatcaccgacgaccagctgaagatcctgagagcctacttcgacatcaacaacagccccagcgaggagcagatccaggagatggccgagaagagcggcctgagccagaaggtgatcaagcactggttcagaaacaccctgttcaaggagagacagagaaacaaggacagcccctacaacttcagcaacccccccatcaccgtgctggaggacatcagaatcgacccccagcccaccagcctggagcactacaagagcgacgccagcttcagcaagagaagcagcagaaccagattcaccgactaccagctgagagtgctgcaggacttcttcgacaccaacgcctaccccaaggacgacgagatcgagcagctgagcaccgtgctgaacctgcccaccagagtgatcgtggtgtggttccagaacgccagacagaaggccagaaagagctacgagaaccaggccgagaccaaggacaacgagaagagagagctgaccaacgagagatacatcagaaccagcaacatgcagtaccagtgcaagaagtgcaacgtggtgttccccagaatcttcgacctgatcacccaccagaagaagcagtgctacaaggacgaggacgacgacgcccaggacgagagccagaccgaggacagcatggacgccaccgaccaggtggtgtacaagcactgcaccgtgagcggccagaccgacgccgccaagaacgccgccgcccccgccgccagcagcggcagcggcaccagcacccccctgatccccagccccaagcccgagcccgagaagaccagccccaagcccgagtaccccgccgagaagcccaagcagagcgaccccagcccccccagccagggcaccaagcccgccctgcccctggccagcaccagcagcgaccccccccaggccagcaccgcccagccccagccccagccccagccccccaagcagccccagctgatcggcagaccccccagcgccagccagacccccgtgcccagcagccccctgcagatcagcatgaccagcctgcagaacagcctgcccccccagctgctgcagtaccagtgcgaccagtgcaccgtggccttccccaccctggagctgtggcaggagcaccagcacatgcacttcctggccgcccagaaccagttcctgcacagccccttcctggagagacccatggacatgccctacatgatcttcgaccccaacaaccccctgatgaccggccagctgctgggcagcagcctgacccagatgcccccccaggccagcagcagccacaccaccgcccccaccaccgtggccgccagcctgaagagaaagctggacgacaaggaggacaacaactgcagcgagaaggagggcggcaacagcggcgaggaccagcacagagacaagagactgagaaccaccatcacccccgagcagctggagatcctgtacgagaagtacctgctggacagcaaccccaccagaaagatgctggaccacatcgccagagaggtgggcctgaagaagagagtggtgcaggtgtggttccagaacaccagagccagagagagaaagggccagttcagagccgtgggccccgcccagagccacaagagatgccccttctgcagagccctgttcaaggccaagagcgccctggagagccacatcagaagcagacactggaacgagggcaagcaggccggctacagcctgccccccagccccctgatcagcaccgaggacggcggcgagagcccccagaagtacatctacttcgactaccccagcctgcccctgaccaagatcgacctgagcagcgagaacgagctggccagcaccgtgagcacccccgtgagcaagaccgccgagctgagccccaagaacctgctgagccccagcagcttcaaggccgagtgcagcgaggacgtggagaacctgaacgccccccccgccgaggccggctacgaccagaacaagaccgacttcgacgagaccagcagcatcaacaccgccatcagcgacgccaccaccggcgacgagggcaacaccgagatggagagcaccaccggcagcagcggcgacgtgaagcccgccctgagccccaaggagcccaagaccctggacaccctgcccaagcccgccaccacccccaccaccgaggtgtgcgacgacaagttcctgttcagcctgaccagccccagcatccacttcaacgacaaggacggcgaccacgaccagagcttctacatcaccgacgaccccgacgacaacgccgacagaagcgagaccagcagcatcgccgaccccagcagccccaaccccttcggcagcagcaaccccttcaagagcaagagcaacgacagacccggccacaagagattcagaacccagatgagcaacctgcagctgaaggtgctgaaggcctgcttcagcgactacagaacccccaccatgcaggagtgcgagatgctgggcaacgagatcggcctgcccaagagagtggtgcaggtgtggttccagaacgccagagccaaggagaagaagttcaagatcaacatcggcaagcccttcatgatcaaccagggcggcaccgagggcaccaagcccgagtgcaccctgtgcggcgtgaagtacagcgccagactgagcatcagagaccacatcttcagcaagcagcacatcagcaaggtgagagagaccgtgggcagccagctggacagagagaaggactacctggcccccaccaccgtgagacagctgatggcccagcaggagctggacagaatcaagaaggccagcgacgtgctgggcctgaccgtgcagcagcccggcatgatggacagcagcagcctgcacggcatcagcctgcccaccgcctaccccggcctgcccggcctgccccccgtgctgctgcccggcatgaacggccccagcagcctgcccggcttcccccagaacagcaacaccctgaccccccccggcgccggcatgctgggcttccccaccagcgccaccagcagccccgccctgagcctgagcagcgcccccaccaagcccctgctgcagaccccccccccccccccccccccccccccccccccccccagcagcagcctgagcggccagcagaccgagcagcagaacaaggagagcgagaagaagcagaccaagcccaacaaggtgaagaagatcaaggaggaggagctggaggccaccaagcccgagaagcaccccaagaaggaggagaagatcagcagcgccctgagcgtgctgggcaaggtggtgggcgagacccacgtggaccccatccagctgcaggccctgcagaacgccatcgccggcgaccccgccagcttcatcggcggccagttcctgccctacttcatccccggcttcgccagctacttcaccccccagctgcccggcaccgtgcagggcggctacttcccccccgtgtgcggcatggagagcctgttcccctacggccccaccatgccccagaccctggccggcctgagccccggcgccctgctgcagcagtaccagcagtaccagcagaacctgcaggagagcctgcagaagcagcagaagcagcagcaggagcagcagcagaagcccgtgcaggccaagaccagcaaggtggagagcgaccagccccagaacagcaacgacgccagcgagaccaaggaggacaagagcaccgccaccgagagcaccaaggaggagccccagctggagagcaagagcgccgacttcagcgacacctacgtggtgcccttcgtgaagtacgagttcatctgcagaaagtgccagatgatgttcaccgacgaggacgccgccgtgaaccaccagaagagcttctgctacttcggccagcccctgatcgacccccaggagaccgtgctgagagtgcccgtgagcaagtaccagtgcctggcctgcgacgtggccatcagcggcaacgaggccctgagccagcacctgcagagcagcctgcacaaggagaagaccatcaagcaggccatgagaaacgccaaggagcacgtgagactgctgccccacagcgtgtgcagccccaaccccaacaccaccagcaccagccagagcgccgccagcagcaacaacacctacccccacctgagctgcttcagcatgaagagctggcccaacatcctgttccaggccagcgccagaagagccgccagcccccccagcagcccccccagcctgagcctgcccagcaccgtgaccagcagcctgtgcagcaccagcggcgtgcagaccagcctgcccaccgagagctgcagcgacgagagcgacagcgagctgagccagaagctggaggacctggacaacagcctggaggtgaaggccaagcccgccagcggcctggacggcaacttcaacagcatcagaatggacatgttcagcgtgtag

SEQ ID NO: 309046 - DNA, 10773 bp, Artificial Sequence
  derived and/or modified sequence
atggagacctgcgacagcccccccatcagcagacaggagaacggccagagcaccagcaagctgtgcggcaccacccagctggacaacgaggtgcccgagaaggtggccggcatggagcccgacagagagaacagcagcaccgacgacaacctgaagaccgacgagagaaagagcgaggccctgctgggcttcagcgtggagaacgccgccgccacccaggtgaccagcgccaaggagatcccctgcaacgagtgcgccaccagcttccccagcctgcagaagtacatggagcaccactgccccaacgccagactgcccgtgctgaaggacgacaacgagagcgagatcagcgagctggaggacagcgacgtggagaacctgaccggcgagatcgtgtaccagcccgacggcagcgcctacatcatcgaggacagcaaggagagcggccagaacgcccagaccggcgccaacagcaagctgttcagcaccgccatgttcctggacagcctggccagcgccggcgagaagagcgaccagagcgccagcgcccccatgagcttctacccccagatcatcaacaccttccacatcgccagcagcctgggcaagcccttcaccgccgaccaggccttccccaacaccagcgccctggccggcgtgggccccgtgctgcacagcttcagagtgtacgacctgagacacaagagagagaaggactacctgaccagcgacggcagcgccaagaacagctgcgtgagcaaggacgtgcccaacaacgtggacctgagcaagttcgacggctgcgtgagcgacggcaagagaaagcccgtgctgatgtgcttcctgtgcaagctgagcttcggctacatcagaagcttcgtgacccacgccgtgcacgaccacagaatgaccctgaacgacgaggagcagaagctgctgagcaacaagtgcgtgagcgccatcatccagggcatcggcaaggacaaggagcccctgatcagcttcctggagcccaagaagagcaccagcgtgtacccccacttcagcaccaccaacctgatcggccccgaccccaccttcagaggcctgtggagcgccttccacgtggagaacggcgacagcctgcccgccggcttcgccttcctgaagggcagcgccagcaccagcagcagcgccgagcagcccctgggcatcacccagatgcccaaggccgaggtgaacctgggcggcctgagcagcctggtggtgaacacccccatcaccagcgtgagcctgagccacagcagcagcgagagcagcaagatgagcgagagcaaggaccaggagaacaactgcgagagacccaaggagagcaacgtgctgcaccccaacggcgagtgccccgtgaagagcgagcccaccgagcccggcgacgaggacgaggaggacgcctacagcaacgagctggacgacgaggaggtgctgggcgagctgaccgacagcatcggcaacaaggacttccccctgctgaaccagagcatcagccccctgagcagcagcgtgctgaagttcatcgagaagggcaccagcagcagcagcgccaccgtgagcgacgacaccgagaagaagaagcagaccgccgccgtgagagccagcggcagcgtggccagcaactacggcatcagcggcaaggacttcgccgacgccagcgccagcaaggacagcgccaccgccgcccaccccagcgagatcgccagaggcgacgaggacagcagcgccaccccccaccagcacggcttcacccccagcacccccggcacccccggccccggcggcgacggcagccccggcagcggcatcgagtgccccaagtgcgacaccgtgctgggcagcagcagaagcctgggcggccacatgaccatgatgcacagcagaaacagctgcaagaccctgaagtgccccaagtgcaactggcactacaagtaccagcagaccctggaggcccacatgaaggagaagcaccccgagcccggcggcagctgcgtgtactgcaagaccggccagccccaccccagactggccagaggcgagagctacacctgcggctacaagcccttcagatgcgaggtgtgcaactacagcaccaccaccaagggcaacctgagcatccacatgcagagcgacaagcacctgaacaacgtgcagaacctgcagaacggcaacggcgagcaggtgttcggccacagcgcccccgcccccaacaccagcctgagcggctgcggcacccccagccccagcaagcccaagcagaagcccacctggagatgcgaggtgtgcgactacgagaccaacgtggccagaaacctgagaatccacatgaccagcgagaagcacatgcacaacatgatgctgctgcagcagaacatgaagcagatccagcacaacctgcacctgggcctggcccccgccgaggccgagctgtaccagtactacctggcccagaacatcggcctgaccggcatgaagctggagaaccccgccgacccccagctgatgatcaaccccttccagctggaccccgccaccgccgccgccctggcccccggcctgggcgagctgagcccctacatcagcgaccccgccctgaagctgttccagtgcgccgtgtgcaacaagttcaccagcgacagcctggaggccctgagcgtgcacgtgagcagcgagagaagcctgcccgaggaggagtggagagccgtgatcggcgacatctaccagtgcaagctgtgcaactacaacacccagctgaaggccaacttccagctgcactgcaagaccgacaagcacatgcagaagtaccagctggtggcccacatcaaggagggcggcaagagcaacgagtggagactgaagtgcatcgccatcggcaaccccgtgcacctgaagtgcaacgcctgcgactactacaccaacagcgtggacaagctgagactgcacaccaccaaccacagacacgaggccgccctgaagctgtacaagcacctgcagaagcaggagggcgccgtgaaccccgagagctgctactactactgcgccgtgtgcgactacaccaccaaggtgaagctgaacctggtgcagcacgtgagaagcgtgaagcaccagcagaccgagggcctgagaaagctgcagctgcaccagcagggcctggcccccgaggaggacaacctgagcgagatcttcttcgtgaaggactgcccccccaacgagctggagaccgccagcctgggcgccagaacctgcgacgacgacctgaccgagcagcagctgagaagcaccagcgaggagcagagcgaggaggccgagggcgccatcaagcccaccgccgtggccgaggacgacgagaaggacaccagcgagagagacaacagcgagggcaagaacagcaacaaggacagcggcatcatcacccccgagaaggagctgaaggtgagcgtggccggcggcacccagcccctgctgctggccaaggaggaggacgtggccaccaagagaagcaagcccaccgaggacaacaagttctgccacgagcagttctaccagtgcccctactgcaactacaacagcagagaccagagcagaatccagatgcacgtgctgagccagcacagcgtgcagcccgtgatctgctgccccctgtgccaggacgtgctgagcaacaagatgcacctgcagctgcacctgacccacctgcacagcgtgagccccgactgcgtggagaagctgctgatgaccgtgcccgtgcccgacgtgatgatgcccaacagcatgctgctgcccgccgccgccagcgagaagagcgagagagacacccccgccgccgtgaccgccgagggcagcggcaagtacagcggcgagagccccatggacgacaagagcatggccggcctggaggacagcaaggccaacgtggaggtgaagaacgaggagcagaagcccaccaaggagcccctggaggtgagcgagtggaacaagaacagcagcaaggacgtgaagatccccgacaccctgcaggaccagctgaacgagcagcagaagagacagcccctgagcgtgagcgacagacacgtgtacaagtacagatgcaaccactgcagcctggccttcaagaccatgcagaagctgcagatccacagccagtaccacgccatcagagccgccaccatgtgcaacctgtgccagagaagcttcagaaccttccaggccctgaagaagcacctggaggccggccaccccgagctgagcgaggccgagctgcagcagctgtacgccagcctgcccgtgaacggcgagctgtgggccgagagcgagaccatgagccaggacgaccacggcctggagcaggagatggagagagagtacgaggtggaccacgagggcaaggccagccccgtgggcagcgacagcagcagcatccccgacgacatgggcagcgagcccaagagaaccctgcccttcagaaagggccccaacttcaccatggagaagttcctggaccccagcagaccctacaagtgcaccgtgtgcaaggagagcttcacccagaagaacatcctgctggtgcactacaacagcgtgagccacctgcacaagctgaagaaggtgctgcaggaggccagcagccccgtgccccaggagaccaacagcaacaccgacaacaagccctacaagtgcagcatctgcaacgtggcctacagccagagcagcaccctggagatccacatgagaagcgtgctgcaccagaccaaggccagagccgccaagctggagcccagcggccacgtggccggcggccacagcatcgccgccaacgtgaacagccccggccagggcatgctggacagcatgagcctggccgccgtgaacagcaaggacacccacctggacgccaaggagctgaacaagaagcagacccccgacctgatcagcgcccagcccgcccaccaccccccccagagccccgcccagatccagatgcagctgcagcacgagctgcagcagcaggccgccttcttccagccccagttcctgaaccccgccttcctgccccacttccccatgacccccgaggccctgctgcagttccagcagccccagttcctgttccccttctacatccccggcaccgagttcagcctgggccccgacctgggcctgcccggcagcgccaccttcggcatgcccggcatgaccggcatggccggcagcctgctggaggacctgaagcagcagatccagacccagcaccacgtgggccagacccagctgcagatcctgcagcagcaggcccagcagtaccaggccacccagccccagctgcagccccagaagcagcagcagcagcccccccccccccagcagcagcagcagcagcaggccagcaagctgctgaagcaggagcagagcaacatcgtgagcgccgactgccagatcatgaaggacgtgcccagctacaaggaggccgaggacatcagcgagaagcccgagaagcccaagcaggagttcatcagcgagggcgagggcctgaaggagggcaaggacaccaagaagcagaagagcctggagcccagcatccccccccccagaatcgccagcggcgccagaggcaacgccgccaaggccctgctggagaacttcggcttcgagctggtgatccagtacaacgagaacagacagaaggtgcagaagaagggcaagagcggcgagggcgagaacaccgacaagctggagtgcggcacctgcggcaagctgttcagcaacgtgctgatcctgaagagccaccaggagcacgtgcacggccagttcttcccctacgccgccctggagaagttcgccagacagtacagagaggcctacgacaagctgtaccccatcagccccagcagccccgagacccccccccccccccccccccccccccccctgccccccgcccccccccagcccagcagcatgggccccgtgaagatccccaacaccgtgagcacccccctgcaggcccccccccccaccccccccccccccccccccccccccccccccccccccccccccccccccccccccccccccagcgcccccccccaggtgcagctgcccgtgagcctggacctgcccctgttccccagcatcatgatgcagcccgtgcagcaccccgccctgcccccccagctggccctgcagctgccccagatggacgccctgagcgccgacctgacccagctgtgccagcagcagctgggcctggaccccaacttcctgagacacagccagttcaagagacccagaaccagaatcaccgacgaccagctgaagatcctgagagcctacttcgacatcaacaacagccccagcgaggagcagatccaggagatggccgagaagagcggcctgagccagaaggtgatcaagcactggttcagaaacaccctgttcaaggagagacagagaaacaaggacagcccctacaacttcagcaacccccccatcaccgtgctggaggacatcagaatcgacccccagcccaccagcctggagcactacaagagcgacgccagcttcagcaagagaagcagcagaaccagattcaccgactaccagctgagagtgctgcaggacttcttcgacaccaacgcctaccccaaggacgacgagatcgagcagctgagcaccgtgctgaacctgcccaccagagtgatcgtggtgtggttccagaacgccagacagaaggccagaaagagctacgagaaccaggccgagaccaaggacaacgagaagagagagctgaccaacgagagatacatcagaaccagcaacatgcagtaccagtgcaagaagtgcaacgtggtgttccccagaatcttcgacctgatcacccaccagaagaagcagtgctacaaggacgaggacgacgacgcccaggacgagagccagaccgaggacagcatggacgccaccgaccaggtggtgtacaagcactgcaccgtgagcggccagaccgacgccgccaagaacgccgccgcccccgccgccagcagcggcagcggcaccagcacccccctgatccccagccccaagcccgagcccgagaagaccagccccaagcccgagtaccccgccgagaagcccaagcagagcgaccccagcccccccagccagggcaccaagcccgccctgcccctggccagcaccagcagcgaccccccccaggccagcaccgcccagccccagccccagccccagccccccaagcagccccagctgatcggcagaccccccagcgccagccagacccccgtgcccagcagccccctgcagatcagcatgaccagcctgcagaacagcctgcccccccagctgctgcagtaccagtgcgaccagtgcaccgtggccttccccaccctggagctgtggcaggagcaccagcacatgcacttcctggccgcccagaaccagttcctgcacagccccttcctggagagacccatggacatgccctacatgatcttcgaccccaacaaccccctgatgaccggccagctgctgggcagcagcctgacccagatgcccccccaggccagcagcagccacaccaccgcccccaccaccgtggccgccagcctgaagagaaagctggacgacaaggaggacaacaactgcagcgagaaggagggcggcaacagcggcgaggaccagcacagagacaagagactgagaaccaccatcacccccgagcagctggagatcctgtacgagaagtacctgctggacagcaaccccaccagaaagatgctggaccacatcgccagagaggtgggcctgaagaagagagtggtgcaggtgtggttccagaacaccagagccagagagagaaagggccagttcagagccgtgggccccgcccagagccacaagagatgccccttctgcagagccctgttcaaggccaagagcgccctggagagccacatcagaagcagacactggaacgagggcaagcaggccggctacagcctgccccccagccccctgatcagcaccgaggacggcggcgagagcccccagaagtacatctacttcgactaccccagcctgcccctgaccaagatcgacctgagcagcgagaacgagctggccagcaccgtgagcacccccgtgagcaagaccgccgagctgagccccaagaacctgctgagccccagcagcttcaaggccgagtgcagcgaggacgtggagaacctgaacgccccccccgccgaggccggctacgaccagaacaagaccgacttcgacgagaccagcagcatcaacaccgccatcagcgacgccaccaccggcgacgagggcaacaccgagatggagagcaccaccggcagcagcggcgacgtgaagcccgccctgagccccaaggagcccaagaccctggacaccctgcccaagcccgccaccacccccaccaccgaggtgtgcgacgacaagttcctgttcagcctgaccagccccagcatccacttcaacgacaaggacggcgaccacgaccagagcttctacatcaccgacgaccccgacgacaacgccgacagaagcgagaccagcagcatcgccgaccccagcagccccaaccccttcggcagcagcaaccccttcaagagcaagagcaacgacagacccggccacaagagattcagaacccagatgagcaacctgcagctgaaggtgctgaaggcctgcttcagcgactacagaacccccaccatgcaggagtgcgagatgctgggcaacgagatcggcctgcccaagagagtggtgcaggtgtggttccagaacgccagagccaaggagaagaagttcaagatcaacatcggcaagcccttcatgatcaaccagggcggcaccgagggcaccaagcccgagtgcaccctgtgcggcgtgaagtacagcgccagactgagcatcagagaccacatcttcagcaagcagcacatcagcaaggtgagagagaccgtgggcagccagctggacagagagaaggactacctggcccccaccaccgtgagacagctgatggcccagcaggagctggacagaatcaagaaggccagcgacgtgctgggcctgaccgtgcagcagcccggcatgatggacagcagcagcctgcacggcatcagcctgcccaccgcctaccccggcctgcccggcctgccccccgtgctgctgcccggcatgaacggccccagcagcctgcccggcttcccccagaacagcaacaccctgaccccccccggcgccggcatgctgggcttccccaccagcgccaccagcagccccgccctgagcctgagcagcgcccccaccaagcccctgctgcagaccccccccccccccccccccccccccccccccccccccagcagcagcctgagcggccagcagaccgagcagcagaacaaggagagcgagaagaagcagaccaagcccaacaaggtgaagaagatcaaggaggaggagctggaggccaccaagcccgagaagcaccccaagaaggaggagaagatcagcagcgccctgagcgtgctgggcaaggtggtgggcgagacccacgtggaccccatccagctgcaggccctgcagaacgccatcgccggcgaccccgccagcttcatcggcggccagttcctgccctacttcatccccggcttcgccagctacttcaccccccagctgcccggcaccgtgcagggcggctacttcccccccgtgtgcggcatggagagcctgttcccctacggccccaccatgccccagaccctggccggcctgagccccggcgccctgctgcagcagtaccagcagtaccagcagaacctgcaggagagcctgcagaagcagcagaagcagcagcaggagcagcagcagaagcccgtgcaggccaagaccagcaaggtggagagcgaccagccccagaacagcaacgacgccagcgagaccaaggaggacaagagcaccgccaccgagagcaccaaggaggagccccagctggagagcaagagcgccgacttcagcgacacctacgtggtgcccttcgtgaagtacgagttcatctgcagaaagtgccagatgatgttcaccgacgaggacgccgccgtgaaccaccagaagagcttctgctacttcggccagcccctgatcgacccccaggagaccgtgctgagagtgcccgtgagcaagtaccagtgcctggcctgcgacgtggccatcagcggcaacgaggccctgagccagcacctgcagagcagcctgcacaaggagaagaccatcaagcaggccatgagaaacgccaaggagcacgtgagactgctgccccacagcgtgtgcagccccaaccccaacaccaccagcaccagccagagcgccgccagcagcaacaacacctacccccacctgagctgcttcagcatgaagagctggcccaacatcctgttccaggccagcgccagaagagccgccagcccccccagcagcccccccagcctgagcctgcccagcaccgtgaccagcagcctgtgcagcaccagcggcgtgcagaccagcctgcccaccgagagctgcagcgacgagagcgacagcgagctgagccagaagctggaggacctggacaacagcctggaggtgaaggccaagcccgccagcggcctggacggcaacttcaacagcatcagaatggacatgttcagcgtgtag

SEQ ID NO: 309047 - DNA, 10704 bp, Artificial Sequence
  derived and/or modified sequence
atggagacatgcgacagccccccaataagccggcaggagaacggtcaatccactagcaaactctgtggcacgacccaactagacaacgaggtgcctgagaaagttgcgggaatggaacccgaccgagaaaatagctctactgatgataatctcaagacagacgagaggaagtccgaggcccttctgggattcagcgttgaaaatgccgcggcaactcaggtcacctccgccaaggaaattccgtgtaatgaatgcgcaacttcgttcccttccctgcagaagtatatggaacaccactgccccaatgcacgcctgcccgtgctgaaagacgacaacgagagtgaaatcagcgagctggaggattctgacgtggagaacctgacaggggaaatcgtgtatcaacccgacggctccgcctatatcattgaagatagcaaagagtctggtcagaatgctcaaacaggagccaactcgaagttgttctcaactgccatgtttctggacagcctcgcttctgccggcgagaagtccgaccagagcgcctcagcccctatgtccttttatcctcaaatcatcaatacatttcatatcgcgtcatccctcggaaagcctttcacggcagaccaagcctttcctaatacctcagcactcgcaggagttgggccagtgctgcacagttttagagtgtacgatcttaggcacaaaagagagaaagattacctcaccagcgatggtagtgcaaaaaattcatgtgtaagtaaggacgtacccaacaacgtcgaccttagcaaattcgatggctgcgtgtccgacggcaaacgcaaacctgtgttaatgtgctttctgtgcaaattgtctttcggatatatccggtcctttgtgacacacgccgtgcatgatcacagaatgacactaaacgacgaggagcagaagctcctatccaacaaatgcgtgtcagctattattcaaggtatcggcaaagataaggagccactaatctctttcctggaacccaagaaaagcactagtgtgtacccacacttcagcaccacaaaccttatcgggcctgatccgacctttcggggcctttggtctgcctttcacgtggaaaacggcgatagcctgccggcaggtttcgcgttcctcaaaggcagtgcttcgacaagctcgagtgctgagcagcctctgggcataacacagatgcctaaggccgaggtaaacctgggtggactgtctagcttagtcgttaatacacctatcacctctgttagtctgtcccattcaagcagcgagagctccaagatgagcgaaagtaaagaccaggagaacaactgcgagaggccaaaggagagtaatgtactccaccccaatggagaatgtccagtgaagtctgagcccacagaacctggagacgaagacgaagaggacgcctacagtaacgagctcgacgacgaggaggtcctgggagagcttacggatagcattggcaacaaggacttcccacttctgaatcagtcaataagccccttgagctccagtgttctaaaattcatagaaaaaggcacctctagcagctcagctaccgtgtccgatgacactgagaaaaagaaacaaaccgcggccgttcgagcgagtggatctgtagcctccaactacggcatctcaggaaaggatttcgcagatgccagcgccagtaaggactccgccacagccgcccacccctctgaaatcgcaaggggtgacgaagactcctcggcgaccccccaccagcacggcttcaccccttccactcctggaactcctgggccggggggggacggaagccccggttcaggcatcgagtgccccaagtgtgacacggttctcggtagtagtagaagtctgggggggcatatgacaatgatgcacagtcgtaacagttgcaagacattgaagtgtcctaaatgcaattggcactataagtatcaacagactcttgaggctcacatgaaggagaagcaccctgaaccgggaggtagctgcgtgtactgcaagaccgggcagccccacccaaggttggcgaggggagagagctacacatgcggatacaagcctttccgctgtgaagtgtgtaattactctacaaccaccaaagggaacctctccatccacatgcagtcagacaaacacctaaacaatgttcagaatctccagaacggcaacggcgaacaagtcttcggacacagtgcaccggcgcctaacacgagtctcagcgggtgtggcacgcccagcccgtctaagcctaagcagaaaccaacttggcgctgcgaagtgtgcgactatgaaactaacgtcgcacggaacttacggattcatatgacctccgaaaaacacatgcataacatgatgctcctacagcagaacatgaaacaaatccagcataaccttcatctgggcctggcaccagcagaagccgaattgtaccagtactatcttgcccaaaatatcggcttgacgggaatgaagttagaaaaccctgctgacccccaacttatgatcaatccgtttcagcttgatcccgcaacagccgccgcactagcccccggcctcggggagctgagcccctatatctctgatcccgctctcaaactgtttcagtgcgctgtttgtaacaaatttacaagcgatagtctggaggccctctcagttcatgtcagtagtgagaggtctctgcctgaagaggaatggcgcgcagttataggggacatctaccagtgcaagttgtgtaattacaacacccaactgaaagctaactttcagttgcactgcaagaccgacaaacatatgcagaagtatcagctggtcgcacatatcaaggagggcgggaagtccaatgagtggcggctcaagtgtatcgcaatcggaaacccggttcatttaaaatgtaacgcttgtgattattacacaaattctgtcgacaagctacgcctgcatactacaaatcatcggcatgaggcggcattgaaactttataaacaccttcagaagcaggaaggcgccgtaaatccagagagttgttactactactgcgctgtgtgcgattacacaactaaggtcaagctgaacctggttcaacacgttcgcagcgtaaagcaccagcagacagagggactgcgtaagctgcagcttcatcagcaggggctggctcccgaggaggataacctcagcgaaatatttttcgtcaaggactgcccacctaacgagttagagactgccagcctaggcgcacggacatgtgacgacgacttgacagagcagcatgaagaggcggagggtgccattaaacccaccgcggtggctgaagacgacgaaaaggatacaagtgagcgcgacaactcagaaggaaagaattctaacaaagactctgtgagcgtggcgggagggacacagccactcctcctggccaaagaagaggatgtcgcaaccaagcgaagtaagccaaccgaggacaataagttttgccatgaacagttttatcaatgcccatactgcaactataattcaagggatcagtccagaatccaaatgcatgtcctttcccagcacagcgtgcagccagtgatatgttgccctctgtgccaggacgtgctgtctaacaaaatgcacttgcagctccacctcacccacttgcacagcgtatcgccagattgtgtggaaaaactgctaatgactgtcccagtgccagatgtgatgatgcctaacagtatgctgttgcctgcagccgcatccgaaaagtccgagcgggatacccccgccgcagtcactgcggagggatcaggaaagtatagcggggagagtccaatggatgataagagcatggccggcctggaagacagcaaggctaatgttgaagtgaaaaatgaagaacaaaagccaacaaaagaacccctggaggtgtccgagtggaacaagaacagtagtaaagacgtcaaaattcctgatacacttcaagaccaactcaacgagcagcaaaaacgccaaccactgtcagtatccgaccgacatgtctacaagtatagatgtaaccattgcagcctggcatttaagacgatgcagaagctacagattcattctcagtatcatgctatccgtgctgctactatgtgtaacttgtgccagcgcagctttaggacatttcaggcgctcaaaaaacacctggaggcgggccatcccgaactgagtgaagctgaacttcagcagctgtacgcctctttacctgtcaatggggagctgtgggcagagtctgagaccatgagccaggatgatcatggactggagcaggaaatggagcgtgaatatgaggtggaccatgaggggaaggcgtcgccggtgggcagtgattcttctagcattcccgacgatatggggagcgagccaaagcggactctgccattccgtaagggcccaaactttacgatggaaaaattcctagatccatcccgaccttataaatgcacggtatgtaaggaaagcttcacccagaagaacatactgttagttcattataattccgtttctcacctgcataagttgaagaaggtcctgcaggaggcatcttcccccgtccctcaggaaactaattccaatactgataacaagccctataaatgcagtatatgtaatgtggcctactctcagagttctacgttggaaatccacatgcggagcgtgctccaccagaccaaagctagggccgcgaagttggagcccagcggacatgtggccggtggacactccatagctgcgaacgtgaatagcccgggccagggaatgctcgattccatgtcactcgctgctgttaactctaaggatactcatctcgatgcgaaggagctgaataagaagcagacccctgatctgatatctgcgcagcctgcgcaccaccctcctcagtcccccgcccagatccagatgcagctgcaacacgagctccagcagcaggctgcattctttcagcctcaattcctcaatccagcattcttaccacacttcccaatgactcccgaagctctgctgcaattccagcagcctcagttcttattcccattctacattcctggcaccgagttttccctgggccccgacctcggactccccggaagcgccacctttggtatgccaggcatgactgggatggctggaagtttgctggaggatctcaaacagcagatccaaacccagcaccacgtcggtcagacccagctccagatattgcaacagcaggcccagcaataccaggctacacaaccccagcttcagccccagaaacagcaacagcaaccgcccccgcctcagcaacaacagcagcagcaggcctccaagctgctcaagcaagaacagtcaaatatagtatcagccgactgccaaattatgaaagacgtgccgagctataaagaagccgaagacataagcgagaaaccagagaaacctaaacaggaattcatttcagaaggcgagggtctcaaggagggtaaagacacaaagaaacagaagtcacttgagccttcaatcccaccaccccgaatcgcatctggcgctagaggaaacgccgcaaaggccttgctcgaaaacttcggattcgagctcgtgatacagtataatgagaacaggcaaaaagtccagaagaaaggtaagtcaggcgaaggtgagaatacagacaagctagaatgcgggacttgcggtaagcttttctcaaacgtgctcatccttaaaagccaccaggaacatgtccatggccaattttttccctacgccgcgctcgagaaattcgcccggcaataccgagaagcatatgataaattataccctatttccccatcaagtcctgagacgcctcctccaccccccccgccccctcccctcccccccgcgccaccgcagcctagctcaatgggccctgttaaaattccgaacacagtgtcgactccgctgcaggcgcctccccctactccgccaccccctccacccccacctcccccgcctccacctccccctccacccccccctccttctgcgcccccccaagtccagctccccgtgtcactcgatctccccctgtttccctcaattatgatgcagcctgtacagcaccccgccctgccgccgcaactggcgctgcagctccctcaaatggacgcattgtccgctgatctcacccaactgtgccaacagcagcttggcctggacccgaattttctccggcatagtcaatttaaaagaccacgcacgcgcatcactgatgatcagttgaaaattctgcgcgcatacttcgacataaacaattcacctagcgaggagcagatacaagagatggcagaaaaatctgggctgagtcagaaagtgataaaacactggttccgaaacacgttgtttaaagaacggcaaagaaacaaagatagcccctataatttttctaatcctcctattaccgtgttggaggatattcgcatcgaccctcagcccactagcctggagcactataagagcgatgcgtcttttagcaaaaggagttccagaacccgctttacagattaccaactgcgcgtgctccaggacttcttcgacaccaacgcctatcctaaagatgacgagatagaacagttgtctacagtgttaaacttacctacgagggtcatcgtggtatggttccaaaatgcacgacaaaaagcccggaaatcttatgagaatcaggcagagaccaaggacaacgaaaaaagagagttgactaacgaacgctacatacgtacatctaatatgcagtaccaatgcaagaaatgcaatgtggtcttccctagaatctttgatctgattacacatcaaaaaaagcagtgctacaaggatgaggatgatgacgcacaggacgagtcccagactgaggactctatggatgctacggaccaggtggtgtataaacattgtacagtgagcggccaaaccgacgctgctaaaaacgcagccgcacccgctgcctctagtggatccgggacctctactcctctgataccatcccccaaaccagagcccgagaaaacctcaccaaagcccgaatatcccgctgaaaaacctaagcagagcgatccatccccacctagtcaaggcacaaaacccgcactgccattggcttccacctcttcagaccccccgcaggcttcaactgcccaacctcagccacagccgcagccacctaaacagccgcagttaatcggacgaccgccttcagccagccagaccccagtacccagctcacccttgcaaatttcaatgacatcactgcagaatagcctgccgccacagctgctgcagtaccagtgtgatcaatgtaccgttgcttttcctaccttggaactgtggcaggagcaccaacatatgcactttctggctgcccagaatcagttcttacacagcccgttcctggagaggccaatggatatgccctacatgatcttcgaccccaataaccctctgatgaccggccagctcctggggtctagcttgacacagatgcctccacaagcgtcttcttcccacaccacagccccaactaccgtcgccgctagtctgaagaggaaactggacgacaaagaggataacaattgttccgagaaggaggggggtaattccggagaggaccagcaccgggataagcgcctgaggacaaccattacccctgaacagttggaaatattgtacgaaaagtacttgttagacagtaaccccaccagaaagatgctggaccatattgctagagaggtgggcctgaaaaagcgcgttgtccaagtctggtttcagaacaccagggcgagggagcgcaaaggacagttccgcgctgtcggccccgcccagtcacataagcgttgtcctttctgtagagccttgttcaaagccaaatctgccttggaaagccacatccgcagtcgccactggaatgagggtaagcaagctggatattctctaccgccctccccactgataagtactgaggatgggggggaatccccacagaaatacatttactttgattacccgtctctgcctctgacaaaaatcgatctgagctctgaaaatgaactcgcaagtacggtctcaactcccgtgagtaagacagcagagctgtccccaaaaaatcttctatctccttcctcattcaaagctgagtgtagcgaggacgtggagaacttaaacgccccaccggcagaagccggttacgaccagaataagacagacttcgatgaaacctcttccattaacaccgccatctccgacgccactaccggagatgaagggaatacagagatggagtcaaccacaggatcttctggtgacgtcaagccagcacttagcccaaaggagcccaagacattggacacattacccaagccagctactacccctaccactgaggtgtgtgacgacaagtttctgttttcactgaccagtccctctattcattttaatgacaaggatggagaccacgaccagtccttctatattaccgacgatcctgatgacaacgccgacaggagtgagacctcctctattgccgacccatcctccccaaacccattcgggtccagcaatccttttaagtccaagtctaatgacaggccaggacacaagcgattccggactcagatgtcaaatcttcagctgaaggtgctgaaagcttgtttcagcgattatcgaacaccaacaatgcaggagtgtgagatgcttggcaatgagatcggactgccgaagagagttgtgcaggtctggtttcagaatgcccgcgcaaaagagaagaaattcaaaatcaatatcggcaaacctttcatgatcaaccaggggggaaccgagggcaccaagcctgaatgcacgctctgtggagtgaagtatagcgcacggctctcaatccgtgaccacatcttcagtaaacagcatatttcgaaagtgcgcgaaaccgtaggtagtcagctcgaccgtgaaaaggattacctcgcccccacgaccgtacggcagctgatggcccaacaagaacttgacaggattaaaaaagcaagcgacgtccttggccttactgtgcaacagccaggtatgatggactcctcctctttacatggcatctcattgcccacagcatatccagggctgcctggtttacctccagtgcttcttccaggcatgaacggaccttcctcactgcctggctttccgcagaacagcaacatcgcctctggcatgctgggctttcctacctcagccacatcaagcccggctctctccctcagtagtgcccccaccaagcccctgctgcagacccctcccccaccacctccacctccccctcctcctccttcttcctccctttctggccagcagacagaacagcagaacaaggaaagtgagaaaaagcaaaccaagccaaacaaggtgaagaagatcaaagaagaagagcttgaagccactaagccggaaaaacacccaaaaaaggaggaaaaaatctcatcagccctgagtgttcttggcaaggtggtgggtgagacccacgttgaccctatccagttacaggctctgcaaaatgcaatcgccggcgatcccgccagcttcataggcggtcagttcctcccctacttcattcccgggtttgctagttactttacaccacagcttcctggaacagtacagggcgggtatttcccacccgtgtgcggcatggaatccctcttcccttatggtccaactatgccccagacacttgccggtctgtcgcctggcgcactgctccagcaataccagcagtaccagcaaaatctgcaggaaagccttcagaagcaacagaagcagcagcaggagcagcaacaaaagcccgtgcaggcaaagacgtcaaaggttgaatctgaccagccccagaattctaacgacgccagtgagacaaaggaagacaaaagtaccgccacggagagcactaaggaggagccacagctcgaatctaagtccgccgacttttccgacacatacgtggtcccattcgttaaatacgagttcatctgcaggaaatgccagatgatgtttaccgacgaggatgctgcagtgaatcatcaaaagtcattctgctattttggtcagccactcatcgacccccaagagaccgttctaagagtccctgtatccaaataccaatgtctggcctgcgatgttgcgatctccggcaatgaagcattaagtcaacaccttcagtcaagcctgcataaggagaagaccattaagcaggctatgaggaacgccaaagaacacgttcggctgctccctcattctgtctgttccccgaatcctaacaccacctccacctcacagagcgccgctagctcaaacaacacatacccacacctgtcgtgtttttcaatgaagtcctggcccaatatactgttccaggccagcgcccgacgggctgcgagtcccccatcctccccgccatccttgtccctgccgtccacagtgacgtccagtctgtgctcaacctcaggtgtccagacctcgctccccaccgagtcttgcagtgatgaaagcgacagcgagctaagccagaagctcgaggacctggataactcgctagaggttaaggccaagccggccagcggcctcgatggcaactttaattccataaggatggatatgttttctgtctag

SEQ ID NO: 309048 - DNA, 10716 bp, Artificial Sequence
  derived and/or modified sequence
atggaaacttgtgactccccaccgatctctagacaagagaacgggcagagtacttcaaaactatgcgggacgactcaattggacaatgaagttccggaaaaggtggcgggcatggaacccgatcgagagaacagttccaccgatgataatcttaagaccgatgaacgaaagtccgaagccctgcttggatttagcgtcgagaatgccgcagcaactcaggtgactagcgcgaaggaaatcccatgcaacgagtgcgctacaagctttccttccctccagaagtatatggagcaccactgcccaaacgctcgactgcctgtcctgaaagatgacaacgagtcagaaatctctgagctcgaagattccgatgtagaaaaccttactggggagatcgtgtatcagccggatggttcagcgtatattatcgaggatagcaaggagtctggccagaacgcccaaacaggagctaacagtaaactgtttagtaccgcaatgttcctggatagccttgccagcgctggagaaaaatctgaccagagcgcctccgcccctatgtccttttaccctcaaataatcaatacattccatatcgcttcgtctttaggcaagccatttactgccgaccaggcgtttcccaacacaagcgccctcgccggagtaggacccgtgctgcacagtttccgcgtttatgatctccggcacaaacgtgagaaggactacctgacatcagacgggtccgccaaaaattcttgtgtgagcaaagacgtgccaaacaatgtggatctctccaagttcgacggctgcgtgagcgacgggaagagaaagccagtgttgatgtgctttttgtgtaagctgtctttcggctatattaggagctttgttacccatgccgtgcacgatcatcgcatgacactgaatgacgaagagcagaagctgttatctaacaagtgtgtgagtgcgattatccagggaatcggcaaagacaaagagcccctgatctcattcttggagcccaagaagagcacatcagtgtatccacacttctccacaacaaatctcatcgggcctgacccaacattccgcggcctttggtcagcttttcacgtagaaaatggagattccctccccgctgggtttgcgttcttgaaaggcagtgctagcacctctagtagtgctgagcagccgctggggatcacccagatgcctaaggccgaggtgaatctcgggggactaagttctctggtggtaaacaccccaattacctccgtatccctttcccatagtagcagcgaaagcagtaagatgagtgaaagcaaagaccaggagaacaactgcgagcggccaaaggagtctaatgtgttacatccaaacggagagtgccctgtgaagtcagagcctactgaaccaggagacgaggatgaggaggacgcttatagcaatgaattggacgatgaggaagtgcttggagaattgactgactctatcgggaacaaggacttccccctgttgaaccagtccatctcccctttatcctcctctgttctgaagttcattgagaagggaacaagctcatcctcagccacggtgagcgatgacacggaaaagaaaaaacagacagccgccgtaagggcctcaggttcagttgcaagtaattacggcatcagcggtaaggactttgcagacgccagtgcctctaaggatagcgccacggctgcccatccgagcgaaattgccaggggtgatgaagattctagcgccaccccacatcagcatggcttcacaccgtccactccggggactcctgggcccgggggtgatggcagcccaggaagcggaattgaatgccctaagtgtgacaccgtgctgggctcttcccgcagcctgggtggacatatgacaatgatgcacagcagaaactcttgtaaaaccctgaagtgccccaaatgtaactggcactacaaatatcagcagaccctggaggcccacatgaaggaaaagcacccagaaccaggagggtcatgcgtctattgcaaaaccggccagcctcacccccggctagccaggggcgaaagctacacatgcggctacaaaccctttagatgcgaggtctgtaattacagtaccactaccaaaggaaatttgagcattcatatgcagagcgataagcacctcaacaatgtacagaacttacagaatggaaatggggagcaggtgtttggtcactcggctcccgctcctaatacgtctctgagtggctgtgggactccctccccttctaagccaaaacagaagccaacctggcgctgcgaggtgtgcgattatgagacaaatgtcgcccgtaacctgcgtattcacatgaccagcgagaaacacatgcataatatgatgttgctacagcaaaatatgaaacagatacaacataacttgcaccttgggcttgctccagccgaggcggaactctaccagtattacctcgcacagaatattgggcttacggggatgaaactcgagaatccagccgacccacaattgatgatcaatccatttcaactggacccagccaccgcagccgctctggctcccgggctgggtgagctgtcgccctatattagcgaccctgctttgaagttgtttcaatgtgccgtgtgtaataaatttaccagtgactctttagaagcattgagcgtgcatgttagctcagaaagaagcctaccagaggaggaatggagggcagtgattggggatatctaccaatgtaagttgtgcaattacaatactcagcttaaagctaacttccagttgcattgcaaaacggacaagcacatgcagaaataccagctggtggctcacattaaggagggcggtaaaagcaatgaatggcgtcttaagtgtatcgccattggaaatcccgtgcacttaaagtgtaatgcctgtgactattacactaatagtgtggacaagttgaggctccatacaacaaaccacaggcatgaggccgcactcaaactctataagcacctacaaaagcaggagggagcagttaatcctgaaagctgctactactattgcgctgtgtgtgattatacaaccaaagtaaaattgaacctggtgcagcacgtgaggtccgttaaacatcagcagaccgaggggttgagaaaactccagctgcatcagcaggggctggctccagaggaagataatctgagtgagatctttttcgtaaaggattgtccacctaacgagctcgagaccgcttcgttaggagctcgaacgtgcgacgatgacctcaccgagcagcatgaagaggcagagggggcaatcaaaccaaccgccgtcgcagaggatgatgaaaaggacacctcagagcgagataactcagagggtaagaattcaaacaaggattcggtgtcagtggcaggaggaacacagccgcttctactggcgaaagaagaagacgtagccactaagcgctccaagccaactgaagacaataaattctgtcacgaacagttctatcagtgcccatattgcaactacaactcacgggatcagtctagaattcaaatgcacgtgctgagtcagcactcagtccagcccgtgatttgttgccccctgtgtcaagatgtcctgtccaataagatgcatcttcagctccacttgacccacttacattcagtatcccccgactgcgtggagaagctcctgatgaccgtccctgttcctgacgtcatgatgcctaattcgatgctgcttcctgcagctgcttccgagaaaagcgaaagggatacgcccgctgcggtgaccgccgagggaagcggcaagtacagcggggaaagtcccatggatgataagagcatggcaggcctcgaggacagcaaggcaaacgtggaggtgaaaaatgaggagcaaaagcctacgaaggagcccttggaagtgagcgagtggaataagaatagctctaaggacgtgaagatcccagatacactgcaagatcagctaaacgaacaacaaaaaagacaaccactcagtgtgtccgatcggcacgtttacaagtatcggtgtaaccactgttctttggccttcaaaacaatgcagaaattgcagatacactcccagtatcacgccatacgcgccgcgaccatgtgtaatctgtgtcaacggtccttccggaccttccaggcccttaaaaaacatctggaggcaggtcaccctgagctcagtgaggccgagctgcagcaattgtacgctagtttgcctgtcaatggcgagctctgggcagaatcggaaacgatgtcccaggacgaccatggacttgagcaggaaatggaacgggagtacgaggtagaccatgagggaaaggcatctcccgtcgggtccgacagctcctccatccccgacgacatgggaagcgaacctaagagaaccctgccattcagaaaaggtccgaatttcacaatggagaagtttcttgatccttcgagaccctataagtgcaccgtgtgtaaagaatctttcactcaaaaaaacattctgttggtgcattacaactctgtgtcccacctccacaagctcaagaaggtccttcaggaggcaagttcacctgtcccccaggagacgaattctaacaccgataataaaccatacaaatgctctatctgtaacgtggcctacagccaatcctcaaccctggagattcacatgaggtccgtcctgcaccagacgaaggcacgcgctgccaagctggagcccagtggtcatgtggccggcgggcactctatagccgctaacgttaatagtccaggacaggggatgctggacagcatgtccctggcagcagttaacagcaaggacacccatctcgacgcaaaggaactaaacaaaaagcagaccccagacctgatcagcgcacagcctgcccatcacccaccccagagtccagcccaaattcagatgcagctgcagcatgagttgcagcagcaggctgcgttttttcagccacaattccttaaccctgccttcttgccccactttcctatgacgcccgaggcactcctgcagtttcagcagccccaatttttattcccgttctatattcccggcactgaattctctctgggacctgatcttgggctgcctggctctgctaccttcgggatgccgggcatgactggtatggctggctccctcctcgaggacctcaagcaacagatacaaactcagcaccatgtaggacaaacacagctgcagattttgcagcaacaagcccagcaatatcaggccacccagccgcagctgcaaccgcagaagcagcagcagcagccacctccgccacagcagcagcagcagcaacaggcatccaagctgctcaaacaggagcagtctaacattgtcagcgctgattgccagatcatgaaagatgtgccctcttataaagaggcagaggatatcagcgaaaagcctgagaagcccaagcaggaattcatctctgaaggcgaggggcttaaggaaggcaaagatacaaagaagcaaaagtcactcgagccatccattccgccgccccgcattgcgtccggcgcgcgaggtaacgctgccaaggccctattagagaacttcggatttgagctcgtcatccagtataatgaaaacagacaaaaggtgcaaaaaaaggggaagtctggtgagggagaaaacacagacaagctcgagtgtggtacttgcgggaagctgttctcaaacgtacttatcctcaagtctcatcaggagcatgtgcacggacagttctttccctacgccgcattagagaaattcgccaggcagtacagggaagcttatgataagctgtaccccattagtccaagtagccctgagacgccacccccaccaccgccacccccgccactccctcctgctcctccacagcccagcagtatggggcccgtgaaaatacccaacactgtctcaacccccctccaagccccaccgcccactcctccacctcccccgcctcccccaccgcctcctcccccaccccccccaccccctcctcctagtgcccctccccaggtacagctgcctgtatcccttgatctgccattgtttccttctattatgatgcaaccagtgcaacacccagcccttcctccacaactggcccttcaactgccacagatggatgccctgtcggcggacctgacacagctctgccagcagcaattgggcctggatcctaatttcctgcggcactcccaatttaaaaggcctcgcactcgcattactgatgatcagctgaagatcctgagggcttattttgacattaacaattcacctagcgaggagcagatccaggagatggctgagaagagcggactgagccagaaggtgattaagcattggttccggaatacactctttaaagaacgccagaggaacaaagactccccgtacaactttagtaaccctcctatcactgtgctcgaagacattagaatcgatccacaacccacttccttggaacactacaaatccgacgctagctttagcaaaaggagctctcgtacaaggttcactgactatcagctgcgggtcctccaggacttttttgacaccaacgcgtatcctaaggacgacgagatcgagcagctgagcaccgtcctcaacctcccaacacgtgtgatagtagtgtggtttcagaatgcaagacagaaggcccggaagtcttatgaaaaccaggccgaaacaaaagataacgagaaaagggagcttactaatgagcgctatatccggacttcaaacatgcagtatcaatgcaagaagtgtaacgtagtgttcccacggatctttgacttgattacacatcagaagaagcagtgttacaaggacgaggacgatgatgctcaggacgagtcacagacggaagattcaatggatgctaccgaccaggtcgtttataaacactgtacggtgtccgggcagaccgatgccgcaaagaacgctgctgcccctgctgctagcagcggttccgggacatccacgcccctcattcctagccccaaaccagagcccgagaagacatcccctaaacccgagtacccagccgagaagcctaagcagagcgacccttccccaccctcacagggcactaaaccagccctgccgctagctagtacctcttccgatccaccgcaggcaagcaccgctcagccgcagccacagccgcagcccccgaaacagcctcagctcatcggtcggccgccaagtgccagccaaacccccgttccaagttcacccctgcagatctccatgacgagcttgcagaactctctaccaccccagctactccagtatcagtgcgatcaatgtaccgtcgccttccccactctggaattgtggcaagaacaccagcatatgcattttttggccgcccagaaccagtttttgcacagcccgtttctggaacgacccatggacatgccatatatgatctttgaccctaacaaccccctgatgactggccagcttctcggctccagtcttacccagatgcctccccaggcgagtagctctcacacgaccgcaccaacaaccgtcgccgctagcctgaagcgtaagctggacgataaggaagacaataactgctccgaaaaggaaggaggaaacagcggagaggatcagcaccgcgataaacgattacgcacaaccataacccccgagcagctagaaattctctacgaaaaatatttattggattccaatcctacacgtaagatgctcgatcatatcgcccgagaagtgggcctgaagaagagggtggtgcaggtgtggtttcagaatacgcgggctcgtgagaggaagggccagtttcgggctgtcggcccagcccagtctcataagcgttgtccgttttgtagagccctcttcaaggcaaagtctgcactcgaaagccacataagaagtaggcattggaacgaaggcaagcaggccggttacagcctgccaccttccccactgatttccacagaggacggcggggagtcacctcagaaatatatctattttgattatccgtcactcccccttacaaagattgacctgtcgtcagaaaatgaattagcctcaaccgtgagtacaccagtgtccaagacagcagagctgagccccaaaaatttactaagcccctcatcgttcaaagctgaatgcagtgaggatgttgaaaaccttaatgcccctccagcggaagccggttacgatcagaataagaccgacttcgacgagaccagctcaatcaacactgctatctctgatgcaaccaccggggacgagggtaacacggaaatggaaagcactaccggcagttcgggggacgtgaaacccgcactttctcctaaggaacctaaaaccctcgatacactgcctaaacccgctacgacaccaactactgaggtgtgcgacgataagtttctgttcagcttgacttccccttctattcacttcaatgataaagacggtgaccacgatcagtcattctacattacagatgatcctgacgacaacgcagatcgcagcgaaacaagttctattgccgatccctcctcaccgaaccctttcgggtcctcaaacccgttcaaaagcaagtctaacgacaggccaggacacaaacgattccgcacccagatgagtaatcttcaattaaaggtactaaaggcttgttttagcgattaccgaacccctactatgcaggagtgcgaaatgctgggtaatgagatcggcttacctaagagagtggtccaagtttggtttcaaaatgcgagggctaaggaaaaaaagttcaagatcaatatcggtaaaccgtttatgatcaaccagggaggtaccgagggcactaagcccgagtgtaccctctgtggagtgaaatactccgctcggttatctatccgcgaccacatattcagtaagcagcacatttcaaaggttagggaaaccgttggatctcagctcgacagagagaaggactatctggctcctaccacagtacgccagctgatggcccaacaggagctggacaggattaaaaaggcatctgatgtgctgggactgaccgtgcagcagcccggaatgatggatagctcttcgttgcacggtatttctcttccaaccgcatatcctgggctacccggactgcctcccgtgctcctgccaggtatgaacgggccttcctcccttcctggatttccacaaaactcgaataccctcacccctccaggtgcgggcatgctaggctttcccacctctgccacgtcctctccggctctgtcactgtcgtcagcaccaaccaaaccactgctccagacccccccgccacctcctccccccccaccgccacccccctcttcctcactgagcgggcagcaaacagaacaacagaacaaggagtccgagaagaagcagactaagcccaataaggtgaaaaagattaaggaagaagaactcgaggctacgaagcctgagaagcaccctaagaaggaagagaagatttcttctgcattgagcgttctgggcaaagtggttggtgaaacgcacgtcgatccaattcagctgcaggcccttcagaacgccattgccggggatccagctagtttcatcggaggccagttcctgccttacttcataccgggcttcgcatcttattttacgccacagctccccggtaccgtccagggtggctattttcccccagtttgcggaatggaatccttatttccctacggacccacgatgccacagactctggcaggactttccccgggggcactgttgcagcagtaccagcagtatcaacagaatcttcaggagtcactgcaaaagcagcagaagcaacaacaggagcagcagcagaagcctgtgcaggctaagaccagcaaagttgaatccgatcagccacagaacagcaacgatgcttccgaaaccaaagaagataagagcacggctacagagagtactaaggaagagccacaattggagagcaaaagcgctgatttctcagacacatacgtggtcccattcgtgaaatacgagttcatttgccgcaagtgtcagatgatgttcacagatgaggacgcggcggtgaatcaccagaaaagcttttgctacttcggacagccactgatcgacccgcaagagacagtgttaagggttcctgttagcaagtatcagtgtctcgcctgcgacgttgccatatctggtaacgaagctttgagccagcaccttcagtcatcccttcataaagagaagacaattaagcaggcgatgcggaatgccaaagagcatgtgcggctgctcccacactcagtgtgcagcccaaaccccaataccaccagcacatcccagtccgccgcaagctccaataacacttatccccatctctcctgcttctctatgaagtcctggccaaatatcctgtttcaggcatccgcccggagggccgcctccccacctagcagcccgcccagcctgagcctgccttcgacagtaacctcttctctttgctctaccagcggggtgcagacttcactgccaaccgagagttgtagtgacgagtcagactctgagctatctcagaaattggaggacctagacaatagtcttgaagtcaaagcgaagcccgcttctggtctggacggcaatttcaactccattaggatggatatgttctccgtgtag

SEQ ID NO: 309049 - DNA, 10773 bp, Artificial Sequence
  derived and/or modified sequence
atggaaacatgcgattccccacccatttcccgtcaagaaaacggacagagtacttcaaaactatgcggaaccacacaacttgacaacgaagtcccggaaaaagtggccggtatggagccagaccgggagaacagctccaccgatgacaacctgaagacagacgagcgaaagagcgaggcacttctcgggttctcagttgagaatgctgccgctacccaggttacatcggcaaaggaaatcccatgcaatgaatgtgcaacatcattccccagcctccagaagtacatggaacaccattgcccaaatgcccggttacctgtcctcaaagacgacaacgaatcagagatttcggagctggaagattctgatgtggaaaacctgacaggggagatcgtttatcagcccgatggctccgcatacatcatcgaagactctaaggagtccggccagaatgctcagaccggtgctaactccaaactctttagcactgcaatgtttctggattctcttgcatcggcaggggagaagtctgatcagagcgccagcgcgcccatgagtttctacccgcagatcataaacacgtttcatattgcttctagtctcggcaagccgttcactgctgaccaggcgtttccaaatactagtgctctggctggagtgggcccggtcctgcactctttcagagtctacgatctgcggcataagagagagaaggattatttgacgagcgacggctctgctaaaaatagttgcgtgtcgaaggatgtgcctaacaatgttgacctgagcaagttcgacgggtgcgtgagcgatgggaagcgcaagcctgtgttgatgtgctttttgtgtaaactctccttcggttatattcggtcgttcgtaacccacgcggtgcatgaccatagaatgacccttaacgacgaggagcagaagctcctttccaacaagtgcgtctcggcaattattcagggaattggcaaggacaaagaacccctgattagctttctggaacctaaaaagtcgacaagcgtgtacccccatttcagcaccactaacctcatcggccccgatcctacgttccgcggtctttggtctgcttttcatgtggaaaatggagattctctccctgcaggatttgcctttttaaagggttcagccagtactagcagcagtgccgagcaacctctaggtatcacccaaatgcccaaggctgaggtcaacctcggcggactcagctccctggtagtcaatactcctattactagcgtcagcctgagccactcttcaagcgagtcctctaaaatgtccgaatcaaaagaccaggagaataattgtgagcggccaaaggaatcaaacgttctgcatccgaatggtgagtgcccagtcaaatctgagcccaccgagccgggcgacgaggatgaagaggacgcctattctaacgaacttgatgatgaggaagtgcttggcgaactcacagattccataggcaacaaagacttcccacttcttaaccaatccatttcaccactgagctcttccgtgctgaagtttattgaaaaaggcacaagttcttcctcagctacagtgtctgatgacacagaaaagaagaagcaaactgcagccgttcgcgcctcaggctctgtggcatcaaactatggcatatctggcaaagattttgctgacgcctccgccagcaaagattcagctaccgctgctcatcccagcgaaatcgcaagaggagatgaagatagctcggcaaccccccatcaacacggcttcacaccgtcgacccccgggacccctggtcccggtggagacggatcaccaggctctggtatagaatgccccaagtgtgataccgtgcttggctcaagccggtccctcggcgggcatatgacaatgatgcacagtagaaactcctgcaaaaccttgaagtgtcccaaatgtaattggcattataagtatcaacagactctggaagcacacatgaaggaaaaacaccccgagcccggtggaagctgcgtgtactgtaagacaggacagcctcatccccggctggcgcggggcgagagctatacttgcggctacaagcctttcagatgcgaagtttgcaattacagtaccaccacaaagggcaatctctcaattcatatgcagtcggataagcacctgaacaacgttcagaatctgcagaacgggaatggcgagcaagtgttcggtcactcagctcccgccccaaatacaagcctatcaggctgtggtactccaagtccaagtaaaccaaaacaaaaacccacttggcgctgcgaggtgtgcgattacgagactaacgtggcccgtaatttgaggattcacatgacgtcagaaaagcacatgcataatatgatgctgctacagcagaacatgaaacagatccagcataacctgcacctcggactcgccccagcggaagccgagctgtaccaatattacttggcccaaaacataggcctgactggcatgaagttggagaatcctgccgatccacagctcatgatcaacccatttcaactggatcctgcaactgcagcagcccttgcccctggcctcggcgagttgtcaccttacatcagtgaccctgcactgaaactgttccagtgcgccgtgtgcaacaagttcacgtctgactctttagaagccctgtccgtgcacgtgtcgagcgagcgctctctgccagaagaggaatggagggccgtcatcggcgacatctatcagtgtaaactctgcaattataatacccagctgaaagccaatttccagctccattgcaagacagacaagcatatgcagaaataccagctggtggcacatataaaagaaggcggaaagagtaacgaatggcgacttaaatgcattgcaataggaaatcccgttcacctgaaatgcaacgcctgcgactactacactaacagcgtcgataagctaaggctccatactacaaaccacagacacgaagccgccctgaaactgtacaagcatcttcagaaacaggaaggcgccgttaacccagaaagctgttattattattgcgccgtctgtgactataccactaaggtgaagctaaacctcgtccagcatgtgcgcagcgtcaagcaccaacagactgaggggttgcgtaagctgcaacttcatcaacaggggcttgctccagaagaggataatctgtctgagatctttttcgtaaaggattgcccgccgaacgagcttgaaacagcctctctgggggctcgtacctgtgatgatgacctcacagagcaacagctgcgttccacatcggaagagcagtcagaagaggcagaaggggccatcaaacctactgctgtggccgaggacgatgaaaaggatacatccgagagggacaatagtgagggaaaaaattcgaacaaggactcgggcatcatcaccccagaaaaggaattgaaagtgtctgtggctggcggaacccaacccctgctgctggccaaggaagaagatgttgctacaaagcgatctaaaccaacagaagacaataaattctgtcatgaacagttttaccaatgtccgtattgcaactacaacagtagagaccagagtcgcatccaaatgcatgtgctctcccagcattcagtgcagccagttatctgctgccctctgtgccaggatgtcctgtctaataaaatgcaccttcaactgcacctgactcacctgcactccgtcagccccgactgtgtggaaaagttactcatgaccgtgcccgttccggatgtcatgatgcccaacagcatgctgctaccagcagccgctagcgaaaagtcagaaagagacactcccgctgctgtcaccgcggagggatctggaaagtattctggagaatcccccatggatgacaaatccatggccgggctggaagatagcaaggcaaacgtcgaagtgaagaacgaagaacagaaaccaacgaaggagccactcgaggtttctgagtggaacaagaattcatccaaagatgtgaaaatccccgatacattacaagaccagcttaacgaacagcagaagcgacagcctctcagtgttagtgacaggcacgtttacaagtaccgatgcaatcattgcagtctggctttcaaaactatgcagaagctgcagatccattctcagtatcatgctatcagagctgctacaatgtgcaatctgtgtcagaggagctttcgtacatttcaagctctcaagaaacacctggaagctgggcaccctgaactatccgaagccgaactccagcaactttacgctagtctgccagtgaatggggagctttgggccgagtccgaaactatgtctcaagacgaccacggtctcgagcaagaaatggaaagggagtatgaggtagatcatgaaggcaaagcatcccctgtggggagtgatagtagtagcattcccgacgacatgggcagcgagccgaagcggaccctccccttccggaaggggccaaacttcactatggaaaagttcctcgatcccagtcgcccatacaagtgcactgtgtgtaaggaatcattcacccagaagaacattttacttgtacactacaactccgtatcccacctgcataagctgaagaaggtcctgcaggaagcctcctctccggtgccgcaggagacgaatagcaataccgacaacaaaccatacaagtgttcaatctgcaatgtcgcctacagccagtccagtacccttgaaatccacatgcgatctgtgctgcaccagaccaaagcccgcgccgcaaagctggagccgtcaggccacgtcgctggcggacacagcatcgctgcaaatgtaaattcacccggtcagggcatgctggatagcatgtctctcgccgccgtcaacagcaaagacacacacctcgacgcgaaggagctgaataaaaagcagacaccggatttaatctctgcacagccagctcaccacccgccacagagtcctgcacagattcagatgcaactccagcatgagctccagcagcaggctgcattttttcaaccccagttccttaaccctgcattcctccctcacttcccgatgacaccggaggctcttcttcagtttcagcagccccagttcctgtttcctttttatataccggggaccgagttcagcctgggccctgaccttggtttgccaggctcagctacatttggcatgccaggtatgactggcatggcagggagcttgctggaggatctcaaacagcagattcagacgcagcatcatgtgggtcagacacaactccagattcttcaacaacaggcccagcaatatcaggccacccagcctcagctccaaccccagaagcagcagcagcagcccccaccaccgcaacaacaacagcagcaacaggccagcaagctgctcaaacaggaacagtccaacattgtttccgcggattgccaaatcatgaaggatgttccttcttataaagaggcagaagacatcagtgagaagcccgaaaaaccaaagcaggaattcatcagtgagggagagggcttaaaggagggcaaagacacaaagaaacagaaatccttggagccatccataccaccccctaggattgcctcaggcgccagaggaaacgcagcaaaggctctcctggagaattttgggttcgaactggtcatccaatataatgaaaacaggcagaaggtacaaaaaaaaggcaagagtggcgaaggtgagaacaccgacaagctagaatgtgggacatgcggtaaactcttctcaaacgtcctcatactgaaatcccaccaagagcacgttcacggtcagttcttcccctacgccgcccttgagaaatttgctcgccagtatagggaagcctacgataagctctatcccatatctccgtccagtcctgagacaccgccacctccacctcctccaccaccgttgccacccgcacccccccaaccatcgagcatgggaccagtcaagatcccaaataccgtcagtacacctctacaagcaccccctcctactccaccaccccctcctcctccccccccaccccctcccccccctccccccccaccaccccctagtgcgccaccccaagtgcagcttccggtgagtctggacctacctctgtttccttcgatcatgatgcagcctgtccagcatcctgccctgcctccacaactggccctccagctcccccagatggatgctctgtccgctgatctgacccagctgtgccagcagcagctaggtcttgacccaaattttttgcggcacagccagttcaaaagaccaagaaccaggatcactgatgaccagttgaagatccttagggcgtatttcgacattaataacagcccaagtgaggagcagattcaggaaatggctgaaaagtctggactgtcccagaaggtgattaagcactggttcaggaacacactttttaaggaaagacagaggaataaggattccccatacaattttagcaacccacctattactgtgcttgaagatatccgaatcgatcctcagccaacttcactggagcactataagagtgacgcctctttctcaaaacgttcttctcggactcgtttcaccgactaccagcttcgggtcctccaagattttttcgacaccaacgcttatcctaaggatgatgagattgagcaactttccacggtgctaaatcttcccaccagagtgattgtggtttggtttcagaatgcccgacagaaagcaagaaaaagctacgagaatcaggcagagacaaaagacaacgagaaacgcgagcttactaacgaacgatatatcagaacctctaacatgcagtatcagtgcaaaaagtgcaatgtggtgttcccacgaatcttcgatcttatcacacatcaaaagaaacagtgctacaaagatgaagacgatgatgcccaggatgagtcacaaaccgaggactctatggatgctaccgatcaagtggtgtacaagcactgcactgtgtcgggccaaaccgatgccgctaaaaacgccgctgcacctgctgccagtagtggaagcggcacgagcaccccactgatcccctcacccaaacctgagcctgagaagacctctccaaaacccgagtatcctgccgagaagccgaaacagtccgatcccagccccccatcgcagggaactaagcctgcccttccactggctagtacaagctctgatccaccgcaggctagtaccgcccagcctcagcctcagcctcaaccacctaagcagccacagttaatcgggcggccgcccagtgcctcacagacgcctgttccttccagccctctgcagatatccatgacatctttgcagaacagcctgccccctcagttgctgcagtaccagtgcgaccaatgtactgtcgccttccctacactcgagctgtggcaagagcaccagcatatgcatttcctggccgctcagaatcagttcctgcactcacccttccttgaaagaccaatggatatgccttacatgatttttgaccccaacaacccccttatgaccggccaactcctcggcagtagcctgacccagatgccaccccaggcttcttcttcacacactacggcccctacaaccgtggccgcaagcctgaagcgcaagcttgacgacaaggaagataacaactgcagtgaaaaggagggcggaaattcgggggaagatcagcaccgggataagcgccttcgtactacaataacgccagagcagttagagattctatatgaaaaatatttgctggatagtaacccaactcggaagatgctggatcatattgcccgtgaggtggggctgaagaagcgggtggtgcaggtttggttccagaatactcgcgccagggaaagaaagggtcaattcagggcagtgggacccgcccagtctcataaaagatgtccgttttgtcgtgctttgtttaaggccaaatccgctctagaatcacacatccgcagcaggcattggaacgagggaaagcaagccggatattctcttcctcctagcccgctgatttctacggaagacggcggagagagccctcagaaatacatctatttcgattatccctcgctcccactgacaaagatcgatttatccagcgagaacgagctggccagtaccgtttctacacccgtgagtaaaacagctgagctatcccctaagaatttgctgtcacctagctcttttaaagccgagtgtagcgaggatgttgaaaacctgaacgcccctccggctgaagcaggctacgaccaaaataaaaccgattttgatgagacctcaagcatcaataccgcaatctccgacgccaccactggcgacgaaggcaatacagagatggagtcaacgaccggtagcagcggcgatgtaaaaccagctctttcccccaaggaacctaagaccctcgacacattacccaaaccagcgaccacaccgacaacggaggtctgcgatgacaagttccttttctcacttaccagccctagtatccactttaacgacaaggacggcgaccacgaccagagcttttacatcacagacgatcccgatgataatgcagatcggtcagaaacttcctccatcgccgatccttctagcccgaatccgtttggctcatctaacccatttaagtcaaagtcaaacgaccggcccggacacaaaagattcagaacccagatgagcaatctgcagttgaaggttttaaaagcatgcttcagcgattatcgcacccctacaatgcaggaatgtgaaatgttgggaaatgaaattggactgccaaaaagagtcgtccaggtttggttccagaacgctagagctaaggaaaagaagttcaagattaatatcggcaagccctttatgattaatcaagggggtaccgagggcactaagcccgaatgcaccttgtgtggggttaagtactcggctcggttaagtattcgggaccatatatttagcaagcagcatatatcgaaggttagagaaaccgtgggatctcagctggatagagagaaggactacctggcaccgacaaccgttcgacagctaatggcacaacaggaacttgaccgcataaagaaggcatccgacgttctgggattgaccgttcagcaacccgggatgatggatagctcaagcctgcacggcatatctcttcctaccgcctatcctggtctgccaggacttcccccagttctgttgcccgggatgaatggcccatcaagcctacccggcttcccacaaaatagcaacactttgaccccaccgggtgctggtatgctagggttccccacctccgcaacaagctcacctgcattgagtctgtcatctgcccctactaaacccttgttacagacaccccccccacccccaccacccccaccacctccaccctcatcctccctgagcggccagcagactgagcagcagaataaagagtctgagaaaaagcaaactaaaccaaacaaagtaaaaaaaattaaggaggaagaactagaggctactaaaccagagaaacaccctaagaaggaggaaaaaattagctccgccctgtcagtactgggcaaagtcgttggcgaaacgcacgtcgaccccatccagctgcaagctttgcagaatgctattgccggcgatcccgcgtctttcattggagggcagttccttccttatttcatcccaggcttcgcctcgtactttaccccgcagttgccaggtacggtgcaggggggatacttcccaccagtgtgcggcatggaaagtcttttcccctacgggccaactatgccacaaacactggccggtctgagccctggggccctcctccaacaataccagcagtatcagcagaacctgcaggagtcgttgcaaaagcagcagaaacagcaacaggagcagcagcaaaaacccgtgcaggccaaaaccagcaaggttgagtctgatcagccgcaaaacagcaacgacgcttctgagacaaaagaggataaatcgaccgcaaccgagagcaccaaagaagagccccagctcgaatccaagagcgctgatttcagtgacacttacgtcgtgccattcgttaagtacgagtttatctgcaggaagtgccagatgatgttcacagatgaggatgcggccgtgaaccatcagaagagcttctgctacttcgggcagccgcttatagatccccaggaaactgtgctgagggtgcctgtctcgaagtatcaatgtttggcatgtgatgttgcgatttccggcaacgaggcactgagccagcacctacagtcttccctgcacaaagagaaaaccattaagcaggccatgaggaacgcaaaagagcatgtgagactcctcccccattccgtttgctctcctaacccgaacacaacctcgacatcacagtccgccgcctcatccaataatacctacccgcacctgagctgtttctctatgaaatcttggcctaatatcctgtttcaggcttcggcaaggagagccgcctcgcccccgtcatcccctcccagcttgtccctgccatcaaccgtaaccagctctctatgttcaacaagtggggtgcaaacctcccttcccacagagtcatgctctgacgagagtgatagcgaactgtcccagaagttggaagacctcgataactctctggaagtgaaagccaagccagcttcaggccttgacggcaatttcaactccattcggatggacatgttcagtgtctag

SEQ ID NO: 309050 - DNA, 10704 bp, Artificial Sequence
  derived and/or modified sequence
atggagacctgtgacagcccccccatcagccggcaggagaatggccagagcaccagcaagctgtgtggcaccacccagctggacaatgaggtgcctgagaaggtggccggcatggagccagaccgggagaacagcagcacagatgacaacctgaagacagatgagaggaagtctgaggccctgctgggcttctctgtggagaatgctgctgccacccaggtgaccagcgccaaggagatcccctgcaatgaatgtgccaccagcttccccagcctgcagaagtacatggagcaccactgccccaatgcccggctgcctgtgctgaaggatgacaatgaaagtgagatcagcgagctggaggacagtgatgtggagaacctgaccggggagatcgtgtaccagccagatggcagcgcctacatcatcgaggacagcaaggagagcggccagaatgcccagacaggagccaacagcaagctgttcagcacagccatgttcctggacagcctggccagcgctggggagaagagtgaccagagcgccagcgcccccatgtccttctacccccagatcatcaacaccttccacatcgccagcagcctgggcaagcccttcaccgctgaccaggccttccccaacaccagcgccctggccggcgtgggccctgtgctgcacagcttccgggtgtatgacctgcggcacaagcgggagaaggactacctgaccagtgatggcagcgccaagaacagctgtgtgtccaaggatgtgcccaacaacgtggacctgagcaagtttgatggctgtgtgtctgatggcaagaggaagcctgtgctgatgtgcttcctgtgcaagctgagctttggctacatccgcagctttgtgacccatgctgtgcatgaccacaggatgaccctgaatgatgaggagcagaagctgctgagcaacaagtgtgtgtctgccatcatccagggcatcggcaaggacaaggagcccctcatctccttcctggagcccaagaagagcacctctgtgtacccccacttcagcaccaccaacctgattggccctgaccccaccttccggggcctgtggagcgccttccacgtggagaatggagacagcctgcctgctggctttgccttcctgaagggcagcgccagcaccagcagcagcgctgagcagcccctgggcatcacccagatgcccaaggccgaggtgaacctgggcggcctgagcagcctggtggtgaacacccccatcacctctgtgtccctgagccacagcagcagcgagagcagcaagatgtctgagagcaaggaccaggagaacaactgtgagcggcccaaggagagcaatgtgctgcaccccaatggagaatgtcctgtgaagtctgagcccacagagcctggagatgaagatgaagaagatgcctacagcaatgagctggatgatgaggaggtgctgggggagctgacagacagcatcggcaacaaggacttccccctgctgaaccagagcatcagccccctgagcagctctgtgctgaagttcatcgagaagggcaccagcagcagcagcgccaccgtgtctgatgacacagagaagaagaagcagacagctgctgtgcgggccagcggctctgtggccagcaactacggcatcagcggcaaggactttgctgatgccagcgccagcaaggacagcgccacagctgcccaccccagcgagatcgcccggggagatgaggacagcagcgccaccccccaccagcacggcttcacccccagcaccccaggcaccccaggccctggaggagatggcagccctggcagcggcatcgagtgccccaagtgtgacacagtgctgggcagcagccgcagcctgggcggccacatgaccatgatgcacagcaggaacagctgcaagaccctgaagtgccccaagtgcaactggcactacaagtaccagcagaccctggaggcccacatgaaggagaagcaccctgagcccggcggcagctgtgtgtactgcaagacaggccagccccacccccggctggcccggggggagagctacacctgtggctacaagcccttccgctgtgaggtgtgcaactacagcaccaccaccaagggcaacctgagcatccacatgcagagcgacaagcacctgaacaacgtgcagaacctgcagaatggaaatggagagcaggtgtttggccacagcgccccagcccccaacaccagcctgagcggctgcggcacccccagccccagcaagcccaagcagaagcccacctggaggtgtgaggtgtgtgactatgagaccaacgtggccaggaacctgcgcatccacatgaccagcgagaagcacatgcacaacatgatgctgctgcagcagaacatgaagcagatccagcacaacctgcacctgggcctggccccagctgaggccgagctgtaccagtactacctggcccagaacatcggcctgaccggcatgaagctggagaacccagctgacccccagctgatgatcaaccccttccagctggaccctgccacagctgctgccctggcccctggcctgggggagctgagcccctacatcagtgaccctgccctgaagctgttccagtgtgctgtgtgcaacaagttcaccagtgacagcctggaggccctgtctgtgcacgtgagcagcgagaggagcctgcctgaggaggagtggagggctgtgattggagacatctaccagtgcaagctgtgcaactacaacacccagctgaaggccaacttccagctgcactgcaagacagacaagcacatgcagaagtaccagctggtggcccacatcaaggagggcggcaagagcaatgagtggaggctgaagtgcatcgccatcggcaaccctgtgcacctgaagtgcaatgcctgtgactactacaccaacagcgtggacaagctgcggctgcacaccaccaaccacagacatgaagctgccctgaagctgtacaagcacctgcagaagcaggagggcgctgtgaaccctgagagctgctactactactgtgctgtgtgtgactacaccaccaaggtgaagctgaacctggtgcagcacgtgcgctctgtgaagcaccagcagacagagggcctgaggaagctgcagctgcaccagcagggcctggcccctgaggaggacaacctgtctgagatcttctttgtgaaggactgccccccaaatgagctggagacagccagcctgggcgcccggacctgtgatgatgacctgacagagcagcacgaggaggccgagggcgccatcaagcccacagctgtggccgaggatgatgagaaggacaccagcgagcgggacaacagcgagggcaagaacagcaacaaggacagcgtgtctgtggccggcggcacccagcccctgctgctggccaaggaggaggatgtggccaccaagaggagcaagcccacagaggacaacaagttctgccacgagcagttctaccagtgcccctactgcaactacaacagccgggaccagagccgcatccagatgcacgtgctgagccagcacagcgtgcagcctgtgatctgctgccccctgtgccaggatgtgctgagcaacaagatgcacctgcagctgcacctgacccacctgcacagcgtgtccccagactgtgtggagaagctgctgatgacagtgcctgtgcctgatgtgatgatgcccaacagcatgctgctgcctgctgctgccagcgagaagtctgagcgggacaccccagctgctgtgacagctgagggcagcggcaagtacagcggggagagccccatggatgacaagtccatggccggcctggaggacagcaaggccaacgtggaggtgaagaatgaggagcagaagcccaccaaggagcccctggaggtgtctgagtggaacaagaacagcagcaaggatgtgaagatcccagacaccctgcaggaccagctgaatgagcagcagaagaggcagcccctgtctgtgtctgacagacatgtgtacaagtaccgctgcaaccactgcagcctggccttcaagaccatgcagaagctgcagatccacagccagtaccacgccatccgggccgccaccatgtgcaacctgtgccagaggagcttccgcaccttccaggccctgaagaagcacctggaggccggccaccctgagctgtctgaggccgagctgcagcagctgtatgccagcctgcctgtgaatggagagctgtgggccgagagcgagaccatgagccaggatgaccacggcctggagcaggagatggagcgggagtatgaggtggaccacgagggcaaggccagccctgtgggcagtgacagcagcagcatcccagatgacatgggcagcgagcccaagaggaccctgcccttcaggaagggccccaacttcaccatggagaagttcctggaccccagccggccctacaagtgcaccgtgtgcaaggagagcttcacccagaagaacatcctgctggtgcactacaacagcgtgagccacctgcacaagctgaagaaggtgctgcaggaggccagcagccctgtgccccaggagaccaacagcaacacagacaacaagccctacaagtgcagcatctgcaatgtggcctacagccagagcagcaccctggagatccacatgaggtctgtgctgcaccagaccaaggcccgggccgccaagctggagcccagcggccacgtggccggcggccacagcattgctgccaacgtgaacagccctggccagggcatgctggacagcatgagcctggccgctgtgaacagcaaggacacccacctggatgccaaggagctgaacaagaagcagaccccagacctgatcagcgcccagcctgcccaccaccccccccagagccctgcccagatccagatgcagctgcagcacgagctgcagcagcaggccgccttcttccagccccagttcctgaacccagccttcctgccccacttccccatgaccccagaggccctgctgcagttccagcagccccagttcctgttccccttctacatccctggaacagagttcagcctgggccctgacctgggcctgcccggcagcgccaccttcggcatgcctggcatgacaggcatggccggcagcctgctggaggacctgaagcagcagatccagacccagcaccacgtgggccagacccagctgcagatcctgcagcagcaggcccagcagtaccaggccacccagccccagctgcagccccagaagcagcagcagcagcccccaccaccccagcagcagcagcagcagcaggccagcaagctgctgaagcaggagcagagcaacatcgtgtctgctgactgccagatcatgaaggatgtgcccagctacaaggaggccgaggacatcagcgagaagccagagaagcccaagcaggagttcatcagcgagggggagggcctgaaggagggcaaggacaccaagaagcagaagagcctggagcccagcatccccccaccaagaattgccagcggggcccggggaaatgctgccaaggccctgctggagaactttggatttgagctggtgatccagtacaatgaaaatcggcagaaggtgcagaagaagggcaagagcggggagggggagaacacagacaagctggagtgtggcacctgtgggaagctgttcagcaatgtgctgatcctgaagagccaccaggagcacgtgcacggccagttcttcccctatgctgccctggagaagtttgcccggcagtaccgggaggcctatgacaagctgtaccccatcagccccagcagccctgagaccccacctcctcctcctcctcctccacccctgcccccagccccaccccagcccagctccatgggccctgtgaagatccccaacacagtgtccacccccctgcaggcccccccacccaccccacctcctcctcctcctcctcctcctcctcctcctcctcctcctcctcctcctcctccttctgccccaccccaggtgcagctgcctgtgtccctggacctgcccctcttccccagcatcatgatgcagcctgtgcagcacccagccctgcccccccagctggccctgcagctgccccagatggatgccctgtctgctgacctgacccagctgtgccagcagcagctgggcctggaccccaacttcctgcggcacagccagttcaagaggcccaggacccgcatcacagatgaccagctgaagatcctgcgggcctactttgacatcaacaacagccccagcgaggagcagatccaggagatggccgagaagagcggcctgagccagaaggtgatcaagcactggttcaggaacaccctcttcaaggagcggcagaggaacaaggacagcccctacaacttcagcaacccccccatcaccgtgctggaggacatcagaattgacccccagcccaccagcctggagcactacaagagtgatgccagcttcagcaagaggagcagcaggacccgcttcacagactaccagctgcgggtgctgcaggacttctttgacaccaatgcctaccccaaggatgatgaaattgagcagctgagcacagtgctgaacctgcccaccagggtgattgtggtgtggttccagaatgcccggcagaaggccaggaagagctatgagaaccaggccgagaccaaggacaatgagaagcgggagctgaccaatgaaagatacatccgcaccagcaacatgcagtaccagtgcaagaagtgcaatgtggtgttcccccgcatctttgacctgatcacccaccagaagaagcagtgctacaaggatgaagatgatgatgcccaggatgagagccagacagaagattccatggatgccacagaccaggtggtgtacaagcactgcaccgtgtctggccagacagatgctgccaagaatgctgctgccccagctgccagcagcggcagcggcaccagcacccccctcatccccagccccaagccagagcctgagaagaccagccccaagccagagtacccagctgagaagcccaagcagagcgaccccagcccccccagccagggcaccaagccagccctgcccctggccagcaccagcagtgaccccccccaggccagcacagcccagccccagccccagccccagccccccaagcagccccagctgattggccggcccccatctgccagccagacccctgtgcccagcagccccctgcagatctccatgaccagcctgcagaacagcctgcccccccagctgctgcagtaccagtgtgaccagtgcaccgtggccttccccaccctggagctgtggcaggagcaccagcacatgcacttcctggccgcccagaaccagttcctgcacagccccttcctggagcggcccatggacatgccctacatgatctttgaccccaacaaccccctgatgacaggccagctgctgggcagcagcctgacccagatgccaccccaggccagcagcagccacaccacagcccccaccaccgtggccgccagcctgaagaggaagctggatgacaaggaggacaacaactgcagcgagaaggagggcggcaacagcggggaggaccagcaccgggacaagaggctgcggaccaccatcaccccagagcagctggagatcctgtatgagaagtacctgctggacagcaaccccaccaggaagatgctggaccacatcgcccgggaggtgggcctgaagaagagggtggtgcaggtgtggttccagaacacccgggcccgggagaggaagggccagttccgggctgtgggccctgcccagagccacaagcgctgccccttctgccgggccctcttcaaggccaagagcgccctggagagccacatccgcagccgccactggaatgaaggcaagcaggccggctacagcctgccccccagccccctcatcagcacagaagatggaggagagagcccccagaagtacatctactttgactaccccagcctgcccctgaccaagattgacctgagcagtgaaaatgagctggccagcacagtgtccacccctgtgtccaagacagctgagctgagccccaagaacctgctgagccccagcagcttcaaggcagaatgttctgaagatgtggagaacctgaatgcccccccagctgaggccggctatgaccagaacaagacagactttgatgagaccagcagcatcaacacagccatcagtgatgccaccactggagatgagggcaacacagagatggagagcaccaccggcagcagtggagatgtgaagccagccctgagccccaaggagcccaagaccctggacaccctgcccaagccagccaccacccccaccacagaggtgtgtgatgacaagttcctgttcagcctgaccagccccagcatccacttcaatgacaaggatggagaccatgaccagagcttctacatcacagatgatcctgatgacaatgctgacagaagtgagaccagcagcattgctgaccccagcagccccaaccccttcggcagcagcaaccccttcaagagcaagagcaatgaccggcccggccacaagcgcttccgcacccagatgagcaacctgcagctgaaggtgctgaaggcctgcttcagtgactaccgcacccccaccatgcaggagtgtgagatgctgggcaatgaaattggcctgcccaagagggtggtgcaggtgtggttccagaatgcccgggccaaggagaagaagttcaagatcaacatcggcaagcccttcatgatcaaccagggcggcacagagggcaccaagccagaatgtaccctgtgtggggtgaagtacagcgcccggctgagcatccgggaccacatcttcagcaagcagcacatcagcaaggtgcgggagaccgtgggcagccagctggaccgggagaaggactacctggcccccaccaccgtgcggcagctgatggcccagcaggagctggaccgcatcaagaaggccagtgatgtgctgggcctgactgtgcagcagcccggcatgatggacagcagcagcctgcacggcatcagcctgcccacagcctacccaggcctgcccggcctgccccctgtgctgctgcccggcatgaatggccccagcagcctgcccggcttcccccagaacagcaacatcgccagcggcatgctgggcttccccaccagcgccaccagcagccctgccctgagcctgagcagcgcccccaccaagcccctgctgcagaccccacctcctcctcctcctcctcctcctcctccacccagcagcagcctgagcggccagcagacagagcagcagaacaaggagagcgagaagaagcagaccaagcccaacaaggtgaagaagatcaaggaggaggagctggaggccaccaagccagagaagcaccccaagaaggaggagaagatcagcagcgccctgtctgtgctgggcaaggtggtgggggagacccacgtggaccccatccagctgcaggccctgcagaatgccatcgccggggaccctgccagcttcatcggcggccagttcctgccctacttcatccctggctttgccagctacttcaccccccagctgcccggcaccgtgcagggcggctacttcccccctgtgtgtggcatggagagcctcttcccctacggccccaccatgccccagaccctggccggcctgagccctggggccctgctgcagcagtaccagcagtaccagcagaacctgcaggagagcctgcagaagcagcagaagcagcagcaggagcagcagcagaagcctgtgcaggccaagaccagcaaggtggagagtgaccagccccagaacagcaatgatgccagcgagaccaaggaggacaagagcacagccacagagagcaccaaggaggagccccagctggagagcaagtctgctgacttcagtgacacctacgtggtgccctttgtgaagtatgagttcatctgcaggaagtgccagatgatgttcacagatgaagatgctgctgtgaaccaccagaagagcttctgctacttcggccagcccctgattgacccccaggagaccgtgctgcgggtgcctgtgtccaagtaccagtgcctggcctgtgatgtggccatctctggaaatgaggccctgagccagcacctgcagagcagcctgcacaaggagaagaccatcaagcaggccatgagaaatgccaaggagcacgtgcggctgctgccccacagcgtgtgcagccccaaccccaacaccaccagcaccagccagagcgctgccagcagcaacaacacctacccccacctgagctgcttctccatgaagtcctggcccaacatcctcttccaggccagcgccaggagagctgccagcccccccagcagcccccccagcctgagcctgcccagcacagtgaccagcagcctgtgcagcaccagcggcgtgcagaccagcctgcccacagagagctgcagtgatgaaagtgacagcgagctgagccagaagctggaggacctggacaacagcctggaggtgaaggccaagccagccagcggcctggatggcaacttcaacagcatccgcatggacatgttttctgtgtag

SEQ ID NO: 309051 - DNA, 10716 bp, Artificial Sequence
  derived and/or modified sequence
atggagacctgtgacagcccccccatcagccggcaggagaatggccagagcaccagcaagctgtgtggcaccacccagctggacaatgaggtgcctgagaaggtggccggcatggagccagaccgggagaacagcagcacagatgacaacctgaagacagatgagaggaagtctgaggccctgctgggcttctctgtggagaatgctgctgccacccaggtgaccagcgccaaggagatcccctgcaatgaatgtgccaccagcttccccagcctgcagaagtacatggagcaccactgccccaatgcccggctgcctgtgctgaaggatgacaatgaaagtgagatcagcgagctggaggacagtgatgtggagaacctgaccggggagatcgtgtaccagccagatggcagcgcctacatcatcgaggacagcaaggagagcggccagaatgcccagacaggagccaacagcaagctgttcagcacagccatgttcctggacagcctggccagcgctggggagaagagtgaccagagcgccagcgcccccatgtccttctacccccagatcatcaacaccttccacatcgccagcagcctgggcaagcccttcaccgctgaccaggccttccccaacaccagcgccctggccggcgtgggccctgtgctgcacagcttccgggtgtatgacctgcggcacaagcgggagaaggactacctgaccagtgatggcagcgccaagaacagctgtgtgtccaaggatgtgcccaacaacgtggacctgagcaagtttgatggctgtgtgtctgatggcaagaggaagcctgtgctgatgtgcttcctgtgcaagctgagctttggctacatccgcagctttgtgacccatgctgtgcatgaccacaggatgaccctgaatgatgaggagcagaagctgctgagcaacaagtgtgtgtctgccatcatccagggcatcggcaaggacaaggagcccctcatctccttcctggagcccaagaagagcacctctgtgtacccccacttcagcaccaccaacctgattggccctgaccccaccttccggggcctgtggagcgccttccacgtggagaatggagacagcctgcctgctggctttgccttcctgaagggcagcgccagcaccagcagcagcgctgagcagcccctgggcatcacccagatgcccaaggccgaggtgaacctgggcggcctgagcagcctggtggtgaacacccccatcacctctgtgtccctgagccacagcagcagcgagagcagcaagatgtctgagagcaaggaccaggagaacaactgtgagcggcccaaggagagcaatgtgctgcaccccaatggagaatgtcctgtgaagtctgagcccacagagcctggagatgaagatgaagaagatgcctacagcaatgagctggatgatgaggaggtgctgggggagctgacagacagcatcggcaacaaggacttccccctgctgaaccagagcatcagccccctgagcagctctgtgctgaagttcatcgagaagggcaccagcagcagcagcgccaccgtgtctgatgacacagagaagaagaagcagacagctgctgtgcgggccagcggctctgtggccagcaactacggcatcagcggcaaggactttgctgatgccagcgccagcaaggacagcgccacagctgcccaccccagcgagatcgcccggggagatgaggacagcagcgccaccccccaccagcacggcttcacccccagcaccccaggcaccccaggccctggaggagatggcagccctggcagcggcatcgagtgccccaagtgtgacacagtgctgggcagcagccgcagcctgggcggccacatgaccatgatgcacagcaggaacagctgcaagaccctgaagtgccccaagtgcaactggcactacaagtaccagcagaccctggaggcccacatgaaggagaagcaccctgagcccggcggcagctgtgtgtactgcaagacaggccagccccacccccggctggcccggggggagagctacacctgtggctacaagcccttccgctgtgaggtgtgcaactacagcaccaccaccaagggcaacctgagcatccacatgcagagcgacaagcacctgaacaacgtgcagaacctgcagaatggaaatggagagcaggtgtttggccacagcgccccagcccccaacaccagcctgagcggctgcggcacccccagccccagcaagcccaagcagaagcccacctggaggtgtgaggtgtgtgactatgagaccaacgtggccaggaacctgcgcatccacatgaccagcgagaagcacatgcacaacatgatgctgctgcagcagaacatgaagcagatccagcacaacctgcacctgggcctggccccagctgaggccgagctgtaccagtactacctggcccagaacatcggcctgaccggcatgaagctggagaacccagctgacccccagctgatgatcaaccccttccagctggaccctgccacagctgctgccctggcccctggcctgggggagctgagcccctacatcagtgaccctgccctgaagctgttccagtgtgctgtgtgcaacaagttcaccagtgacagcctggaggccctgtctgtgcacgtgagcagcgagaggagcctgcctgaggaggagtggagggctgtgattggagacatctaccagtgcaagctgtgcaactacaacacccagctgaaggccaacttccagctgcactgcaagacagacaagcacatgcagaagtaccagctggtggcccacatcaaggagggcggcaagagcaatgagtggaggctgaagtgcatcgccatcggcaaccctgtgcacctgaagtgcaatgcctgtgactactacaccaacagcgtggacaagctgcggctgcacaccaccaaccacagacatgaagctgccctgaagctgtacaagcacctgcagaagcaggagggcgctgtgaaccctgagagctgctactactactgtgctgtgtgtgactacaccaccaaggtgaagctgaacctggtgcagcacgtgcgctctgtgaagcaccagcagacagagggcctgaggaagctgcagctgcaccagcagggcctggcccctgaggaggacaacctgtctgagatcttctttgtgaaggactgccccccaaatgagctggagacagccagcctgggcgcccggacctgtgatgatgacctgacagagcagcacgaggaggccgagggcgccatcaagcccacagctgtggccgaggatgatgagaaggacaccagcgagcgggacaacagcgagggcaagaacagcaacaaggacagcgtgtctgtggccggcggcacccagcccctgctgctggccaaggaggaggatgtggccaccaagaggagcaagcccacagaggacaacaagttctgccacgagcagttctaccagtgcccctactgcaactacaacagccgggaccagagccgcatccagatgcacgtgctgagccagcacagcgtgcagcctgtgatctgctgccccctgtgccaggatgtgctgagcaacaagatgcacctgcagctgcacctgacccacctgcacagcgtgtccccagactgtgtggagaagctgctgatgacagtgcctgtgcctgatgtgatgatgcccaacagcatgctgctgcctgctgctgccagcgagaagtctgagcgggacaccccagctgctgtgacagctgagggcagcggcaagtacagcggggagagccccatggatgacaagtccatggccggcctggaggacagcaaggccaacgtggaggtgaagaatgaggagcagaagcccaccaaggagcccctggaggtgtctgagtggaacaagaacagcagcaaggatgtgaagatcccagacaccctgcaggaccagctgaatgagcagcagaagaggcagcccctgtctgtgtctgacagacatgtgtacaagtaccgctgcaaccactgcagcctggccttcaagaccatgcagaagctgcagatccacagccagtaccacgccatccgggccgccaccatgtgcaacctgtgccagaggagcttccgcaccttccaggccctgaagaagcacctggaggccggccaccctgagctgtctgaggccgagctgcagcagctgtatgccagcctgcctgtgaatggagagctgtgggccgagagcgagaccatgagccaggatgaccacggcctggagcaggagatggagcgggagtatgaggtggaccacgagggcaaggccagccctgtgggcagtgacagcagcagcatcccagatgacatgggcagcgagcccaagaggaccctgcccttcaggaagggccccaacttcaccatggagaagttcctggaccccagccggccctacaagtgcaccgtgtgcaaggagagcttcacccagaagaacatcctgctggtgcactacaacagcgtgagccacctgcacaagctgaagaaggtgctgcaggaggccagcagccctgtgccccaggagaccaacagcaacacagacaacaagccctacaagtgcagcatctgcaatgtggcctacagccagagcagcaccctggagatccacatgaggtctgtgctgcaccagaccaaggcccgggccgccaagctggagcccagcggccacgtggccggcggccacagcattgctgccaacgtgaacagccctggccagggcatgctggacagcatgagcctggccgctgtgaacagcaaggacacccacctggatgccaaggagctgaacaagaagcagaccccagacctgatcagcgcccagcctgcccaccaccccccccagagccctgcccagatccagatgcagctgcagcacgagctgcagcagcaggccgccttcttccagccccagttcctgaacccagccttcctgccccacttccccatgaccccagaggccctgctgcagttccagcagccccagttcctgttccccttctacatccctggaacagagttcagcctgggccctgacctgggcctgcccggcagcgccaccttcggcatgcctggcatgacaggcatggccggcagcctgctggaggacctgaagcagcagatccagacccagcaccacgtgggccagacccagctgcagatcctgcagcagcaggcccagcagtaccaggccacccagccccagctgcagccccagaagcagcagcagcagcccccaccaccccagcagcagcagcagcagcaggccagcaagctgctgaagcaggagcagagcaacatcgtgtctgctgactgccagatcatgaaggatgtgcccagctacaaggaggccgaggacatcagcgagaagccagagaagcccaagcaggagttcatcagcgagggggagggcctgaaggagggcaaggacaccaagaagcagaagagcctggagcccagcatccccccaccaagaattgccagcggggcccggggaaatgctgccaaggccctgctggagaactttggatttgagctggtgatccagtacaatgaaaatcggcagaaggtgcagaagaagggcaagagcggggagggggagaacacagacaagctggagtgtggcacctgtgggaagctgttcagcaatgtgctgatcctgaagagccaccaggagcacgtgcacggccagttcttcccctatgctgccctggagaagtttgcccggcagtaccgggaggcctatgacaagctgtaccccatcagccccagcagccctgagaccccacctcctcctcctcctcctccacccctgcccccagccccaccccagcccagctccatgggccctgtgaagatccccaacacagtgtccacccccctgcaggcccccccacccaccccacctcctcctcctcctcctcctcctcctcctcctcctcctcctcctcctcctcctccttctgccccaccccaggtgcagctgcctgtgtccctggacctgcccctcttccccagcatcatgatgcagcctgtgcagcacccagccctgcccccccagctggccctgcagctgccccagatggatgccctgtctgctgacctgacccagctgtgccagcagcagctgggcctggaccccaacttcctgcggcacagccagttcaagaggcccaggacccgcatcacagatgaccagctgaagatcctgcgggcctactttgacatcaacaacagccccagcgaggagcagatccaggagatggccgagaagagcggcctgagccagaaggtgatcaagcactggttcaggaacaccctcttcaaggagcggcagaggaacaaggacagcccctacaacttcagcaacccccccatcaccgtgctggaggacatcagaattgacccccagcccaccagcctggagcactacaagagtgatgccagcttcagcaagaggagcagcaggacccgcttcacagactaccagctgcgggtgctgcaggacttctttgacaccaatgcctaccccaaggatgatgaaattgagcagctgagcacagtgctgaacctgcccaccagggtgattgtggtgtggttccagaatgcccggcagaaggccaggaagagctatgagaaccaggccgagaccaaggacaatgagaagcgggagctgaccaatgaaagatacatccgcaccagcaacatgcagtaccagtgcaagaagtgcaatgtggtgttcccccgcatctttgacctgatcacccaccagaagaagcagtgctacaaggatgaagatgatgatgcccaggatgagagccagacagaagattccatggatgccacagaccaggtggtgtacaagcactgcaccgtgtctggccagacagatgctgccaagaatgctgctgccccagctgccagcagcggcagcggcaccagcacccccctcatccccagccccaagccagagcctgagaagaccagccccaagccagagtacccagctgagaagcccaagcagagcgaccccagcccccccagccagggcaccaagccagccctgcccctggccagcaccagcagtgaccccccccaggccagcacagcccagccccagccccagccccagccccccaagcagccccagctgattggccggcccccatctgccagccagacccctgtgcccagcagccccctgcagatctccatgaccagcctgcagaacagcctgcccccccagctgctgcagtaccagtgtgaccagtgcaccgtggccttccccaccctggagctgtggcaggagcaccagcacatgcacttcctggccgcccagaaccagttcctgcacagccccttcctggagcggcccatggacatgccctacatgatctttgaccccaacaaccccctgatgacaggccagctgctgggcagcagcctgacccagatgccaccccaggccagcagcagccacaccacagcccccaccaccgtggccgccagcctgaagaggaagctggatgacaaggaggacaacaactgcagcgagaaggagggcggcaacagcggggaggaccagcaccgggacaagaggctgcggaccaccatcaccccagagcagctggagatcctgtatgagaagtacctgctggacagcaaccccaccaggaagatgctggaccacatcgcccgggaggtgggcctgaagaagagggtggtgcaggtgtggttccagaacacccgggcccgggagaggaagggccagttccgggctgtgggccctgcccagagccacaagcgctgccccttctgccgggccctcttcaaggccaagagcgccctggagagccacatccgcagccgccactggaatgaaggcaagcaggccggctacagcctgccccccagccccctcatcagcacagaagatggaggagagagcccccagaagtacatctactttgactaccccagcctgcccctgaccaagattgacctgagcagtgaaaatgagctggccagcacagtgtccacccctgtgtccaagacagctgagctgagccccaagaacctgctgagccccagcagcttcaaggcagaatgttctgaagatgtggagaacctgaatgcccccccagctgaggccggctatgaccagaacaagacagactttgatgagaccagcagcatcaacacagccatcagtgatgccaccactggagatgagggcaacacagagatggagagcaccaccggcagcagtggagatgtgaagccagccctgagccccaaggagcccaagaccctggacaccctgcccaagccagccaccacccccaccacagaggtgtgtgatgacaagttcctgttcagcctgaccagccccagcatccacttcaatgacaaggatggagaccatgaccagagcttctacatcacagatgatcctgatgacaatgctgacagaagtgagaccagcagcattgctgaccccagcagccccaaccccttcggcagcagcaaccccttcaagagcaagagcaatgaccggcccggccacaagcgcttccgcacccagatgagcaacctgcagctgaaggtgctgaaggcctgcttcagtgactaccgcacccccaccatgcaggagtgtgagatgctgggcaatgaaattggcctgcccaagagggtggtgcaggtgtggttccagaatgcccgggccaaggagaagaagttcaagatcaacatcggcaagcccttcatgatcaaccagggcggcacagagggcaccaagccagaatgtaccctgtgtggggtgaagtacagcgcccggctgagcatccgggaccacatcttcagcaagcagcacatcagcaaggtgcgggagaccgtgggcagccagctggaccgggagaaggactacctggcccccaccaccgtgcggcagctgatggcccagcaggagctggaccgcatcaagaaggccagtgatgtgctgggcctgactgtgcagcagcccggcatgatggacagcagcagcctgcacggcatcagcctgcccacagcctacccaggcctgcccggcctgccccctgtgctgctgcccggcatgaatggccccagcagcctgcccggcttcccccagaacagcaacaccctgaccccacctggggccggcatgctgggcttccccaccagcgccaccagcagccctgccctgagcctgagcagcgcccccaccaagcccctgctgcagaccccacctcctcctcctcctcctcctcctcctccacccagcagcagcctgagcggccagcagacagagcagcagaacaaggagagcgagaagaagcagaccaagcccaacaaggtgaagaagatcaaggaggaggagctggaggccaccaagccagagaagcaccccaagaaggaggagaagatcagcagcgccctgtctgtgctgggcaaggtggtgggggagacccacgtggaccccatccagctgcaggccctgcagaatgccatcgccggggaccctgccagcttcatcggcggccagttcctgccctacttcatccctggctttgccagctacttcaccccccagctgcccggcaccgtgcagggcggctacttcccccctgtgtgtggcatggagagcctcttcccctacggccccaccatgccccagaccctggccggcctgagccctggggccctgctgcagcagtaccagcagtaccagcagaacctgcaggagagcctgcagaagcagcagaagcagcagcaggagcagcagcagaagcctgtgcaggccaagaccagcaaggtggagagtgaccagccccagaacagcaatgatgccagcgagaccaaggaggacaagagcacagccacagagagcaccaaggaggagccccagctggagagcaagtctgctgacttcagtgacacctacgtggtgccctttgtgaagtatgagttcatctgcaggaagtgccagatgatgttcacagatgaagatgctgctgtgaaccaccagaagagcttctgctacttcggccagcccctgattgacccccaggagaccgtgctgcgggtgcctgtgtccaagtaccagtgcctggcctgtgatgtggccatctctggaaatgaggccctgagccagcacctgcagagcagcctgcacaaggagaagaccatcaagcaggccatgagaaatgccaaggagcacgtgcggctgctgccccacagcgtgtgcagccccaaccccaacaccaccagcaccagccagagcgctgccagcagcaacaacacctacccccacctgagctgcttctccatgaagtcctggcccaacatcctcttccaggccagcgccaggagagctgccagcccccccagcagcccccccagcctgagcctgcccagcacagtgaccagcagcctgtgcagcaccagcggcgtgcagaccagcctgcccacagagagctgcagtgatgaaagtgacagcgagctgagccagaagctggaggacctggacaacagcctggaggtgaaggccaagccagccagcggcctggatggcaacttcaacagcatccgcatggacatgttttctgtgtag

SEQ ID NO: 309052 - DNA, 10773 bp, Artificial Sequence
  derived and/or modified sequence
atggagacctgtgacagcccccccatcagccggcaggagaatggccagagcaccagcaagctgtgtggcaccacccagctggacaatgaggtgcctgagaaggtggccggcatggagccagaccgggagaacagcagcacagatgacaacctgaagacagatgagaggaagtctgaggccctgctgggcttctctgtggagaatgctgctgccacccaggtgaccagcgccaaggagatcccctgcaatgaatgtgccaccagcttccccagcctgcagaagtacatggagcaccactgccccaatgcccggctgcctgtgctgaaggatgacaatgaaagtgagatcagcgagctggaggacagtgatgtggagaacctgaccggggagatcgtgtaccagccagatggcagcgcctacatcatcgaggacagcaaggagagcggccagaatgcccagacaggagccaacagcaagctgttcagcacagccatgttcctggacagcctggccagcgctggggagaagagtgaccagagcgccagcgcccccatgtccttctacccccagatcatcaacaccttccacatcgccagcagcctgggcaagcccttcaccgctgaccaggccttccccaacaccagcgccctggccggcgtgggccctgtgctgcacagcttccgggtgtatgacctgcggcacaagcgggagaaggactacctgaccagtgatggcagcgccaagaacagctgtgtgtccaaggatgtgcccaacaacgtggacctgagcaagtttgatggctgtgtgtctgatggcaagaggaagcctgtgctgatgtgcttcctgtgcaagctgagctttggctacatccgcagctttgtgacccatgctgtgcatgaccacaggatgaccctgaatgatgaggagcagaagctgctgagcaacaagtgtgtgtctgccatcatccagggcatcggcaaggacaaggagcccctcatctccttcctggagcccaagaagagcacctctgtgtacccccacttcagcaccaccaacctgattggccctgaccccaccttccggggcctgtggagcgccttccacgtggagaatggagacagcctgcctgctggctttgccttcctgaagggcagcgccagcaccagcagcagcgctgagcagcccctgggcatcacccagatgcccaaggccgaggtgaacctgggcggcctgagcagcctggtggtgaacacccccatcacctctgtgtccctgagccacagcagcagcgagagcagcaagatgtctgagagcaaggaccaggagaacaactgtgagcggcccaaggagagcaatgtgctgcaccccaatggagaatgtcctgtgaagtctgagcccacagagcctggagatgaagatgaagaagatgcctacagcaatgagctggatgatgaggaggtgctgggggagctgacagacagcatcggcaacaaggacttccccctgctgaaccagagcatcagccccctgagcagctctgtgctgaagttcatcgagaagggcaccagcagcagcagcgccaccgtgtctgatgacacagagaagaagaagcagacagctgctgtgcgggccagcggctctgtggccagcaactacggcatcagcggcaaggactttgctgatgccagcgccagcaaggacagcgccacagctgcccaccccagcgagatcgcccggggagatgaggacagcagcgccaccccccaccagcacggcttcacccccagcaccccaggcaccccaggccctggaggagatggcagccctggcagcggcatcgagtgccccaagtgtgacacagtgctgggcagcagccgcagcctgggcggccacatgaccatgatgcacagcaggaacagctgcaagaccctgaagtgccccaagtgcaactggcactacaagtaccagcagaccctggaggcccacatgaaggagaagcaccctgagcccggcggcagctgtgtgtactgcaagacaggccagccccacccccggctggcccggggggagagctacacctgtggctacaagcccttccgctgtgaggtgtgcaactacagcaccaccaccaagggcaacctgagcatccacatgcagagcgacaagcacctgaacaacgtgcagaacctgcagaatggaaatggagagcaggtgtttggccacagcgccccagcccccaacaccagcctgagcggctgcggcacccccagccccagcaagcccaagcagaagcccacctggaggtgtgaggtgtgtgactatgagaccaacgtggccaggaacctgcgcatccacatgaccagcgagaagcacatgcacaacatgatgctgctgcagcagaacatgaagcagatccagcacaacctgcacctgggcctggccccagctgaggccgagctgtaccagtactacctggcccagaacatcggcctgaccggcatgaagctggagaacccagctgacccccagctgatgatcaaccccttccagctggaccctgccacagctgctgccctggcccctggcctgggggagctgagcccctacatcagtgaccctgccctgaagctgttccagtgtgctgtgtgcaacaagttcaccagtgacagcctggaggccctgtctgtgcacgtgagcagcgagaggagcctgcctgaggaggagtggagggctgtgattggagacatctaccagtgcaagctgtgcaactacaacacccagctgaaggccaacttccagctgcactgcaagacagacaagcacatgcagaagtaccagctggtggcccacatcaaggagggcggcaagagcaatgagtggaggctgaagtgcatcgccatcggcaaccctgtgcacctgaagtgcaatgcctgtgactactacaccaacagcgtggacaagctgcggctgcacaccaccaaccacagacatgaagctgccctgaagctgtacaagcacctgcagaagcaggagggcgctgtgaaccctgagagctgctactactactgtgctgtgtgtgactacaccaccaaggtgaagctgaacctggtgcagcacgtgcgctctgtgaagcaccagcagacagagggcctgaggaagctgcagctgcaccagcagggcctggcccctgaggaggacaacctgtctgagatcttctttgtgaaggactgccccccaaatgagctggagacagccagcctgggcgcccggacctgtgatgatgacctgacagagcagcagctgcggagcaccagcgaggagcagagcgaggaggccgagggcgccatcaagcccacagctgtggctgaagatgatgagaaggacaccagcgagcgggacaacagcgagggcaagaacagcaacaaggacagcggcatcatcaccccagagaaggagctgaaggtgtctgtggccggcggcacccagcccctgctgctggccaaggaggaggatgtggccaccaagaggagcaagcccacagaggacaacaagttctgccacgagcagttctaccagtgcccctactgcaactacaacagccgggaccagagccgcatccagatgcacgtgctgagccagcacagcgtgcagcccgtcatctgctgccccctgtgccaggatgtgctgagcaacaagatgcacctgcagctgcacctgacccacctgcacagcgtgtccccagactgtgtggagaagctgctgatgacagtgcctgtgcctgatgtgatgatgcccaacagcatgctgctgcctgctgctgccagcgagaagtctgagcgggacaccccagctgctgtgacagctgagggcagcggcaagtacagcggggagagccccatggatgacaagtccatggccggcctggaggacagcaaggccaacgtggaggtgaagaatgaggagcagaagcccaccaaggagcccctggaggtgtctgagtggaacaagaacagcagcaaggatgtgaagatcccagacaccctgcaggaccagctgaatgagcagcagaagaggcagcccctgtctgtgtctgacagacatgtgtacaagtaccgctgcaaccactgcagcctggccttcaagaccatgcagaagctgcagatccacagccagtaccacgccatccgggccgccaccatgtgcaacctgtgccagaggagcttccgcaccttccaggccctgaagaagcacctggaggccggccaccctgagctgtctgaggccgagctgcagcagctgtatgccagcctgcctgtgaatggagagctgtgggccgagagcgagaccatgagccaggatgaccacggcctggagcaggagatggagcgggagtatgaggtggaccacgagggcaaggccagccctgtgggcagtgacagcagcagcatcccagatgacatgggcagcgagcccaagaggaccctgcccttcaggaagggccccaacttcaccatggagaagttcctggaccccagccggccctacaagtgcaccgtgtgcaaggagagcttcacccagaagaacatcctgctggtgcactacaacagcgtgagccacctgcacaagctgaagaaggtgctgcaggaggccagcagccctgtgccccaggagaccaacagcaacacagacaacaagccctacaagtgcagcatctgcaatgtggcctacagccagagcagcaccctggagatccacatgaggtctgtgctgcaccagaccaaggcccgggccgccaagctggagcccagcggccacgtggccggcggccacagcattgctgccaacgtgaacagccctggccagggcatgctggacagcatgagcctggccgctgtgaacagcaaggacacccacctggatgccaaggagctgaacaagaagcagaccccagacctgatcagcgcccagcctgcccaccaccccccccagagccctgcccagatccagatgcagctgcagcacgagctgcagcagcaggccgccttcttccagccccagttcctgaacccagccttcctgccccacttccccatgaccccagaggccctgctgcagttccagcagccccagttcctgttccccttctacatccctggaacagagttcagcctgggccctgacctgggcctgcccggcagcgccaccttcggcatgcctggcatgacaggcatggccggcagcctgctggaggacctgaagcagcagatccagacccagcaccacgtgggccagacccagctgcagatcctgcagcagcaggcccagcagtaccaggccacccagccccagctgcagccccagaagcagcagcagcagcccccaccaccccagcagcagcagcagcagcaggccagcaagctgctgaagcaggagcagagcaacatcgtgtctgctgactgccagatcatgaaggatgtgcccagctacaaggaggccgaggacatcagcgagaagccagagaagcccaagcaggagttcatcagcgagggggagggcctgaaggagggcaaggacaccaagaagcagaagagcctggagcccagcatccccccaccccgcatcgccagcggggcccggggaaatgctgccaaggccctgctggagaactttggatttgagctggtgatccagtacaatgaaaatcggcagaaggtgcagaagaagggcaagtctggagaaggagaaaatacagacaagctggagtgtggcacctgtgggaagctgttcagcaatgtgctgatcctgaagagccaccaggagcacgtgcacggccagttcttcccctatgctgccctggagaagtttgcccggcagtaccgggaggcctatgacaagctgtaccccatcagccccagcagccctgagaccccacctcctcctcctcctcctccacccctgcccccagccccaccccagcccagctccatgggccctgtgaagatccccaacacagtgtccacccccctgcaggcccccccacccaccccacctcctcctcctcctcctcctcctcctcctcctcctcctcctcctcctcctccacccagcgccccaccccaggtgcagctgcctgtgtccctggacctgcccctcttccccagcatcatgatgcagcctgtgcagcacccagccctgcccccccagctggccctgcagctgccccagatggatgccctgtctgctgacctgacccagctgtgccagcagcagctgggcctggaccccaacttcctgcggcacagccagttcaagaggcccaggacccgcatcacagatgaccagctgaagatcctgcgggcctactttgacatcaacaacagccccagcgaggagcagatccaggagatggccgagaagagcggcctgagccagaaggtgatcaagcactggttcaggaacaccctcttcaaggagcggcagaggaacaaggacagcccctacaacttcagcaacccccccatcaccgtgctggaggacatcagaattgacccccagcccaccagcctggagcactacaagagtgatgccagcttcagcaagaggagcagcaggacccgcttcacagactaccagctgcgggtgctgcaggacttctttgacaccaatgcctaccccaaggatgatgaaattgagcagctgagcacagtgctgaacctgcccaccagggtcatcgtggtgtggttccagaatgcccggcagaaggccaggaagagctatgagaaccaggccgagaccaaggacaatgagaagcgggagctgaccaatgaaagatacatccgcaccagcaacatgcagtaccagtgcaagaagtgcaatgtggtgttcccccgcatctttgacctgatcacccaccagaagaagcagtgctacaaggatgaagatgatgatgcccaggatgagagccagacagaggacagcatggatgccacagaccaggtggtgtacaagcactgcaccgtgtctggccagacagatgctgccaagaatgctgctgccccagctgccagcagcggcagcggcaccagcacccccctcatccccagccccaagccagagcctgagaagaccagccccaagccagagtacccagctgagaagcccaagcagagcgaccccagcccccccagccagggcaccaagccagccctgcccctggccagcaccagcagtgaccccccccaggccagcacagcccagccccagccccagccccagccccccaagcagccccagctgattggccggccccccagcgccagccagacccctgtgcccagcagccccctgcagatctccatgaccagcctgcagaacagcctgcccccccagctgctgcagtaccagtgtgaccagtgcaccgtggccttccccaccctggagctgtggcaggagcaccagcacatgcacttcctggccgcccagaaccagttcctgcacagccccttcctggagcggcccatggacatgccctacatgatctttgaccccaacaaccccctgatgacaggccagctgctgggcagcagcctgacccagatgccaccccaggccagcagcagccacaccacagcccccaccaccgtggccgccagcctgaagaggaagctggatgacaaggaggacaacaactgcagcgagaaggagggcggcaacagcggggaggaccagcaccgggacaagaggctgcggaccaccatcaccccagagcagctggagatcctgtatgagaagtacctgctggacagcaaccccaccaggaagatgctggaccacatcgcccgggaggtgggcctgaagaagagggtggtgcaggtgtggttccagaacacccgggcccgggagaggaagggccagttccgggctgtgggccctgcccagagccacaagcgctgccccttctgccgggccctcttcaaggccaagagcgccctggagagccacatccgcagccgccactggaatgaaggcaagcaggccggctacagcctgccccccagccccctcatcagcacagaagatggaggagagagcccccagaagtacatctactttgactaccccagcctgcccctgaccaagattgacctgagcagtgaaaatgagctggccagcacagtgtccacccctgtgtccaagacagctgagctgagccccaagaacctgctgagccccagcagcttcaaggccgagtgcagtgaagatgtggagaacctgaatgcccctcctgctgaggccggctatgaccagaacaagacagactttgatgagaccagcagcatcaacacagccatcagtgatgccaccactggagatgagggcaacacagagatggagagcaccaccggcagcagtggagatgtgaagccagccctgagccccaaggagcccaagaccctggacaccctgcccaagccagccaccacccccaccacagaggtgtgtgatgacaagttcctgttcagcctgaccagccccagcatccacttcaatgacaaggatggagaccatgaccagagcttctacatcacagatgatcctgatgacaatgctgacagaagtgagaccagcagcattgctgaccccagcagccccaaccccttcggcagcagcaaccccttcaagagcaagagcaatgacaggcctggccacaagcgcttccgcacccagatgagcaacctgcagctgaaggtgctgaaggcctgcttcagtgactaccgcacccccaccatgcaggagtgtgagatgctgggcaatgagatcggcctgcccaagagggtggtgcaggtgtggttccagaatgcccgggccaaggagaagaagttcaagatcaacatcggcaagcccttcatgatcaaccagggcggcacagagggcaccaagccagagtgcaccctgtgtggggtgaagtacagcgcccggctgagcatccgggaccacatcttcagcaagcagcacatcagcaaggtgcgggagaccgtgggcagccagctggaccgggagaaggactacctggcccccaccaccgtgcggcagctgatggcccagcaggagctggaccgcatcaagaaggccagtgatgtgctgggcctgactgtgcagcagcccggcatgatggacagcagcagcctgcacggcatcagcctgcccacagcctacccaggcctgcccggcctgccccctgtgctgctgcccggcatgaatggccccagcagcctgcccggcttcccccagaacagcaacaccctgaccccacctggagctggcatgctgggcttccccaccagcgccaccagcagccctgccctgagcctgagcagcgcccccaccaagcccctgctgcagaccccacctcctcctcctcctcctcctcctcctccacccagcagcagcctgagcggccagcagacagagcagcagaacaaggagagcgagaagaagcagaccaagcccaacaaggtgaagaagatcaaggaggaggagctggaggccaccaagccagagaagcaccccaagaaggaggagaagatcagcagcgccctgtctgtgctgggcaaggtggtgggggagacccacgtggaccccatccagctgcaggccctgcagaatgccatcgccggggaccctgccagcttcatcggcggccagttcctgccctacttcatccctggctttgccagctacttcaccccccagctgcccggcaccgtgcagggcggctacttcccccctgtgtgtggcatggagagcctcttcccctacggccccaccatgccccagaccctggccggcctgagccctggggccctgctgcagcagtaccagcagtaccagcagaacctgcaggagagcctgcagaagcagcagaagcagcagcaggagcagcagcagaagcctgtgcaggccaagaccagcaaggtggagagtgaccagccccagaacagcaatgatgccagcgagaccaaggaggacaagagcacagccacagagagcaccaaggaggagccccagctggagagcaagtctgctgacttcagtgacacctacgtggtgccctttgtgaagtatgagttcatctgcaggaagtgccagatgatgttcacagatgaagatgctgctgtgaaccaccagaagagcttctgctacttcggccagcccctgattgacccccaggagaccgtgctgcgggtgcctgtgtccaagtaccagtgcctggcctgtgatgtggccatctctggaaatgaggccctgagccagcacctgcagagcagcctgcacaaggagaagaccatcaagcaggccatgagaaatgccaaggagcacgtgcggctgctgccccacagcgtgtgcagccccaaccccaacaccaccagcaccagccagagcgctgccagcagcaacaacacctacccccacctgagctgcttctccatgaagtcctggcccaacatcctcttccaggccagcgcccggcgggccgccagcccccccagcagcccccccagcctgagcctgcccagcacagtgaccagcagcctgtgcagcaccagcggcgtgcagaccagcctgcccacagagagctgcagtgatgaaagtgacagcgagctgagccagaagctggaggacctggacaacagcctggaggtgaaggccaagccagccagcggcctggatggcaacttcaacagcatccgcatggacatgttttctgtgtag

SEQ ID NO: 309053 - DNA, 10704 bp, Artificial Sequence
  derived and/or modified sequence
atggagacctgcgacagcccccccatcagccggcaggagaacggccagtcaacgtccaagctgtgtgggacaacacagttagataatgaggtgcccgaaaaagtggcaggcatggaaccggaccgggagaattcaagtactgatgacaacttaaaaaccgacgaaagaaaaagcgaggcgctcctgggattctccgtggaaaacgccgccgccacccaggtcacatctgccaaagaaataccgtgcaatgagtgtgcaacctccttcccaagcctgcaaaagtacatggaacatcattgtccaaacgcccgactgccagtattaaaagacgataacgagtccgagatcagtgaactagaggactccgacgtggagaatctgactggtgaaattgtctaccaacctgacggcagcgcttatataattgaagactctaaagaatccggccagaacgcacagaccggagcgaattcgaaactgttctctaccgcaatgttcctggactccctggcatcagcaggagagaaatccgatcagtcggcatcagccccgatgagcttctaccctcaaattatcaatactttccatatcgcttcctcccttggaaagccctttactgccgatcaggccttccccaatacgtcagcgctcgctggcgtgggtcctgtcctgcattcattcagagtctacgacctgagacataagcgtgaaaaagactatctaacatctgacgggtcggccaagaactcctgtgtctccaaggacgtgccaaacaatgtagatctgtcaaagtttgacggctgcgtgagcgacggcaagcggaagccagtgctgatgtgttttctgtgcaaactctccttcggctacataaggagttttgtaactcacgccgtgcacgaccatcgcatgaccctaaatgatgaggaacaaaagctcctatcgaacaaatgcgtcagcgctatcatacagggcattgggaaggacaaggaaccgcttatcagctttctggaacctaaaaagagcacatccgtgtacccccatttctctaccaccaacctaataggccctgacccaacctttcggggtttatggtcagcttttcatgttgagaatggagacagcttgcccgccggtttcgcatttctgaagggctctgctagcaccagcagtagtgcagaacagcccctggggattacacagatgccaaaggctgaagtcaacctcggggggctttcctctttggtcgtgaacacaccaatcacttccgtgagcttgagccactcatcgagcgaaagcagcaagatgagcgaatcaaaagatcaggagaataactgcgagcgccccaaagaatccaacgttctgcatcctaacggagagtgtcccgtgaagagcgagcccacggagcccggtgatgaggatgaagaggacgcgtacagcaatgagctcgacgatgaagaggttttgggagaactgacagacagcatcggaaacaaagactttccactccttaatcagtcaattagtcctttgtcttctagcgtcttaaaattcatcgaaaagggaacgagctcctcctcagcaacagtttccgatgataccgagaagaagaagcagacggccgcagtccgagcatccgggtcagtggcgtctaactatgggatttccgggaaggattttgccgacgccagcgcctccaaagactcggccacggctgctcatccatcagagatagcccgaggcgatgaggatagctccgccacccctcatcaacacggatttaccccttcaacgcctggaactccaggccctgggggcgacggttcacctggctccgggatagagtgccccaaatgcgacacagttttaggttcatctagatcccttgggggacacatgacaatgatgcatagccgaaactcttgcaagacgctaaaatgtccgaaatgcaattggcactacaaataccagcagacccttgaggcacacatgaaggaaaagcatcccgagcctggtgggtcatgtgtttactgcaagaccggtcagcctcacccacggctggctcggggggagagctacacctgcggctacaagccctttagatgcgaagtatgtaactactcaacaactaccaagggtaatctgtctattcacatgcagtctgacaagcacctgaataacgtgcagaatttgcagaatggcaacggcgaacaagtttttgggcactccgccccagcccccaatacaagcctctctggttgtggaaccccctcccccagcaaacctaaacagaaacccacttggcgctgtgaagtctgtgattatgagactaacgtcgccagaaatctacggatacatatgacctcagagaaacacatgcacaatatgatgctgctccagcagaatatgaagcagatccagcacaatctccatctgggcctggcccctgctgaagctgagctctaccagtattacctcgctcagaacataggtcttacaggcatgaaactggaaaaccccgccgatccccagctgatgataaacccattccagctcgatcctgccaccgccgccgccctggctccgggcctgggtgaactaagcccttacatttcagatccagcgctcaagctgtttcagtgcgccgtttgcaacaagttcacctctgattctctcgaggccctatccgtgcacgtgtccagcgaacggtcgttacccgaagaagaatggagagctgttatcggcgatatttaccaatgtaaactctgtaactacaacactcagttgaaggcgaatttccagctccactgcaaaaccgacaaacatatgcagaagtaccagttagtggcccacattaaggagggcggaaaatcaaatgaatggcggctcaaatgtattgcaataggaaacccagtgcacctgaaatgtaatgcgtgcgattactacactaactccgtggataaactacgcctgcacacaactaaccaccgacatgaggccgcattaaaactgtacaagcatctgcagaaacaggagggcgctgttaatccggagagctgttattactactgtgctgtgtgtgattatactaccaaggtaaaactcaacctggtgcagcatgtccgaagcgtgaaacatcagcagaccgaagggctgcgcaagttacagctgcatcagcagggcctggcccctgaagaagataacttaagtgaaattttcttcgtgaaagattgcccacctaacgagttggagacagcatcactgggagcacgtacatgtgacgacgatttgaccgagcagcacgaggaggctgagggcgcaattaagcccaccgccgtggctgaggatgacgagaaagacaccagcgagcgtgacaactccgagggcaagaactctaacaaggactcggtgagtgttgcaggcggaacccagcccctgctgttggctaaggaagaagatgtcgccaccaagaggtccaaacccacagaagataataagttttgccacgagcagttctaccagtgcccctactgtaattataacagccgggatcagtctcgcattcagatgcacgtgttgtcacaacacagtgttcagccagtaatttgctgcccattatgccaggacgtcctttcaaataagatgcatctccagcttcacctgacacacctccatagtgtcagtccagactgcgtggagaaactcctcatgacggtgcctgtgcctgatgtgatgatgcctaacagcatgctattgcccgcagccgcaagcgagaagagcgagagagatacaccggcagctgtcacggctgaggggtcgggcaagtacagtggagaaagtcccatggacgataagtccatggctggactggaagattctaaagcaaacgtcgaggtgaaaaatgaggagcaaaagcctaccaaggagcccctggaggtctcagagtggaacaaaaactcaagcaaggatgtgaagattccagatactttgcaagaccagctaaatgaacaacagaaaagacagcccctctctgtgtccgataggcacgtgtacaaatatagatgtaatcactgttctctggcatttaaaacaatgcagaagctccagattcatagccaataccacgctattagagcggcgacgatgtgcaacctctgccagcgatcctttaggacatttcaggcactgaagaaacacctcgaggctggccatcccgagctctccgaagccgagctccaacagctttatgcaagcctaccggtgaatggggagctctgggcagagagtgagaccatgagtcaggacgaccatggcctagagcaggaaatggaacgcgagtatgaggtggaccacgaggggaaggcctcgcccgtagggtccgactcttcctctatccctgacgatatgggcagcgagccgaagaggaccctcccttttcggaagggccctaacttcactatggagaaattcctcgaccctagtcggccctataagtgcaccgtatgtaaagagtcttttactcagaaaaacattctcctcgtgcactataactctgtttcacacctgcacaagctgaagaaggtcctgcaggaggcttctagtcctgtgccacaggaaaccaactccaacacagataacaaaccctacaaatgttcaatatgtaacgtggcctatagccagagttccactctggagattcacatgcgctccgtgctacatcaaactaaagctcgcgccgctaagctggagccatctggacacgttgccggcgggcactcaattgccgccaacgtgaactcccctgggcagggcatgctagacagcatgagccttgccgccgtcaatagcaaggacacccatctcgacgccaaagagctcaataagaagcagacacctgacctgatttcagcccagcccgcgcatcaccccccacagtcacccgcacagatccagatgcaactgcaacacgaacttcagcagcaggccgcttttttccagccacaattcctaaatcctgcctttctgcctcatttcccgatgacgccagaagccctgctgcagtttcagcaaccccaatttcttttccccttctacattcccggcacagagttttctctgggccctgatctggggttgccgggatccgctacctttgggatgcccggcatgaccgggatggcaggtagtcttctggaagacttaaaacaacaaattcagacccagcatcacgtggggcagacacagctacagatccttcaacagcaggcccagcagtaccaggccacacaaccacagctgcagccacagaaacagcagcagcagccaccaccaccgcaacagcagcaacagcagcaggcatccaagctgttgaagcaggagcagtctaacattgtgtctgcggattgtcagattatgaaagatgtgccttcttataaagaagctgaagacatttctgagaaacccgaaaaacctaagcaggagttcatctccgaaggtgaagggctcaaggaaggaaaggatacaaaaaaacagaagtctctggagccaagtatcccacctccgaggatcgcttctggagcgcggggcaacgccgctaaagctcttctcgaaaacttcggcttcgaattagtgattcagtataacgaaaacagacagaaggtccagaagaaggggaaaagtggcgagggggaaaacacagataagctggaatgtgggacttgtggaaaactattttctaacgtcctgatcttaaagtcacaccaggagcatgtgcacgggcagttctttccttacgccgcccttgagaagtttgcccggcagtatagggaggcatatgataaactttacccaatctctccatcttctcccgagaccccgcctccacctcctccaccacctcctcttcctccagcaccacctcaaccctcctcaatgggccccgtgaagatcccaaacaccgtgtccacacctctgcaggcccctccaccaacccctcctccaccacccccccctccgcccccaccccctcccccacctcctccccctccaccttctgctccccctcaggtgcagctgcctgtgtctcttgacctcccactgttcccgagcataatgatgcagccggtccagcacccagcactccccccccagctggcccttcagctgccacagatggatgcactgtcagctgacctaactcaactgtgtcagcagcagttgggactggaccctaacttcctgaggcacagccaatttaaacggccaaggactaggatcaccgatgatcagttgaaaattcttcgggcgtatttcgatataaataacagtccctccgaggaacagattcaagagatggctgagaagtccggactgtcccagaaggtcatcaagcattggttcagaaatacactgttcaaagagcgacagcgcaataaagattctccctataatttctccaaccctcctatcacggtgctcgaagatatccgcatcgacccccagcccacaagcctggagcattacaagtctgatgcttcctttagcaagcgctcctcccgcaccagattcactgactaccaactgagggtccttcaagatttctttgatacgaatgcttatcctaaggatgatgagatagagcagctctcgaccgtgcttaatctgcccacaagagtcatcgttgtttggtttcagaacgcgaggcagaaggcgcggaagagctacgagaaccaagcagaaactaaggacaatgaaaagcgagagctgacaaacgagcgctacataagaaccagcaatatgcagtaccaatgcaaaaagtgcaacgttgttttcccacgcatatttgatctaattactcatcagaaaaagcagtgctacaaagatgaagacgacgatgcacaggacgagtcgcaaaccgaggattccatggacgccacggatcaagtagtctataagcactgtactgtttccggccagaccgacgccgctaaaaacgctgcagccccagctgcctcctctggctcaggcacttcaacgccccttatcccctcgccgaagcccgagcccgaaaagacctcacctaagccagaatatcctgctgagaagcccaagcaatcggatccatcaccaccctcccagggcacgaaacccgctctgcccctggctagcaccagtagcgaccccccccaggccagcaccgcccagccgcaaccacagcctcagcccccaaagcagccacaacttattggtcgacccccatcagcttcacagacaccagttcccagcagtcccctgcagatctccatgacaagccttcaaaatagtctgccaccccaactgctgcaatatcagtgtgatcagtgcacggtggctttccccacattggaactgtggcaggagcaccagcacatgcattttttggctgcccaaaaccaattcctccactcaccctttcttgagcgccccatggacatgccatacatgatattcgaccctaataatcccttgatgaccggtcaactgctgggatcatccctgactcagatgccacctcaggccagttcaagccacaccactgcccccaccacagtggctgctagtctgaaacgcaagctggacgacaaggaagacaataactgcagcgaaaaagagggcggaaatagcggagaggatcaacacagagataaacgtctgaggaccaccatcacccccgaacagctggaaatcttatacgagaagtacctgctggatagcaacccgacaagaaagatgctcgatcacatcgccagagaggtgggattgaaaaaacgcgttgtccaggtgtggttccagaataccagagctcgagagcggaagggtcaatttagagccgtcgggcccgcacaatcacacaagagatgtcccttctgcagagctctgttcaaagcaaagagtgcgctcgaaagccacatccgcagtcgccattggaacgaggggaagcaagcaggttactcgttgccccccagtcccttaatcagtaccgaagatggaggcgaatccccccagaaatacatttatttcgactacccttcccttcccctcacaaaaatcgacttgtcctctgagaacgagctagcatccactgtgagcacccctgtaagtaagactgctgaactgtccccaaagaacctcttgtccccctccagctttaaagcggagtgtagtgaggacgtggagaacctaaacgctccaccagctgaagccggctacgaccagaacaagaccgattttgacgagacaagcagcataaataccgcaatctcggacgcaactacgggggacgagggtaatacagagatggagtctaccactggatcaagcggagatgtcaaacccgccctgagccccaaggaacccaaaactctggacactctgccgaagcctgctactaccccaactaccgaggtttgtgatgataaatttctgttctcgctgacatcaccctccatccatttcaatgataaggatggggaccacgatcagagcttttacataacggatgaccccgacgacaacgccgacaggagtgagacttcctcaattgctgatccttcgtctccaaatccctttggcagctccaatcccttcaagagcaaatcaaacgatagacccggacacaaacgttttcgcacacaaatgagtaatctgcaattgaaagtactgaaggcctgttttagtgattatcgcacacctacgatgcaggagtgcgagatgctgggtaacgagatcggcctgcctaaacgcgtcgtccaggtgtggttccagaacgccagagctaaagagaaaaagtttaagataaatatagggaagcctttcatgataaatcaggggggtacagagggtacaaagcccgagtgtactttatgtggtgtgaagtactccgcacggcttagtataagagatcatatcttctccaaacagcacattagtaaggtccgtgagactgtcggtagtcaactggatcgcgagaaagattatttagcccccaccactgtccggcaactgatggcccagcaagagctcgatcggattaaaaaggccagtgacgttttgggcctgaccgtgcagcagcctgggatgatggattcttcctccctgcatggcatttcacttcctaccgcctaccccggcttgcctgggctgccccctgtcctgctgcctggcatgaatggcccatcttccttaccggggtttccacaaaattccaatatcgcctctggcatgttggggtttcctacctcagccacctcctctccagctctgagcctgagctcggcccccaccaaaccacttctccagactccacccccacctcctcctccaccacccccaccaccttcttcatccctctccggccagcagaccgagcagcagaacaaggagtccgagaaaaaacaaacaaagcctaataaagtgaagaagatcaaagaggaagagttagaggctactaagccagagaagcaccccaaaaaggaggagaaaatatcttctgcacttagcgttcttgggaaggtagtgggtgagactcatgtggacccaattcagctccaggcgctgcaaaatgccatcgccggcgacccagcttcgttcattggaggccagttcctcccctatttcatcccgggcttcgcctcatatttcacacctcagttgccagggacagtgcaggggggatacttccctccagtctgtggaatggaatcactgtttccttatggacctactatgccgcagacgctcgctggacttagtcccggagccttgctgcagcagtaccagcagtatcagcaaaacctgcaggaatcactccagaagcagcaaaaacaacagcaggaacagcagcaaaagcctgttcaggccaagactagtaaggtcgaatcagatcagcctcagaatagcaacgatgccagcgagaccaaagaggataaatcaactgccacagagagcaccaaggaagaaccgcagctggaatcaaaaagtgcagacttctctgacacctatgtggtgccctttgtaaagtatgagttcatttgccgaaagtgccagatgatgttcacagatgaggatgctgccgttaaccaccagaagtcattctgttactttgggcaaccccttatcgacccacaagaaaccgtgctgagagttcccgtatccaagtatcagtgcctggcctgcgatgtggctatttccggaaacgaagccctgagtcaacacctgcagtcttctctgcacaaagagaagaccatcaagcaggcgatgcggaacgcaaaagagcatgtgagactgttgccccacagcgtatgttctcctaaccccaacaccactagcacctctcaaagcgctgcaagttcgaacaacacctatccacacttgtcttgtttttctatgaagagctggcctaatattctgtttcaagcgagcgctcgtagggctgccagccctccaagctccccacctagcctgtcccttccctctaccgtgaccagctccctgtgttccaccagcggagtgcaaacatcgcttcccacagagagctgtagcgatgaaagcgactccgagctgtcacaaaagttggaagacctcgacaatagcctggaggtcaaagcgaaaccggcatctggcctggacggcaactttaatagtattcggatggatatgttctctgtttag

SEQ ID NO: 309054 - DNA, 10716 bp, Artificial Sequence
  derived and/or modified sequence
atggagacctgcgacagcccccccatcagccggcaggagaacggccagtcaaccagcaagctctgcggtaccactcaactcgacaatgaggtccccgaaaaggtcgctggaatggaacccgaccgcgagaattccagcacagacgacaacctgaagaccgatgagagaaaatccgaggccttgctgggcttttctgtggagaatgctgccgccacacaagtgacctccgcaaaggaaatcccatgcaatgagtgcgcaacgagtttccccagcctgcagaagtatatggagcaccactgtcccaatgcccgcctaccagtcctgaaggatgataatgaatccgagattagtgagttggaagacagcgacgtggaaaatctgaccggtgagattgtgtatcagcccgatggttctgcctacatcattgaggactcaaaggagagtgggcagaacgcgcagaccggcgccaactcaaagttatttagtaccgccatgtttctggatagcctggccagcgccggagaaaaaagcgaccagagtgctagcgctcccatgtccttttaccctcagattatcaatacatttcatattgcaagttcactcggtaagcccttcaccgcagatcaggcctttccgaataccagtgcgctcgcgggggtgggacctgttttgcacagctttcgggtgtacgatcttcggcacaaacgcgagaaggattacctaacgtcagatggatccgcaaagaattcctgcgtttctaaggacgttccaaacaacgtggatctgtcaaagttcgatggatgcgtgtccgatgggaaaagaaagcccgtactgatgtgctttctttgcaagctgagcttcggctatatcagatctttcgtaacccatgctgtccacgaccacagaatgaccctgaacgacgaggagcagaagctgcttagtaataaatgcgtgtcagcaataatccagggcatcggcaaggacaaagagcctctaatttcgtttcttgagcctaaaaagtccaccagtgtctacccgcatttctctaccactaacctgattggcccagatccgacatttagaggactctggtctgcctttcatgtcgaaaatggcgactccctacccgcaggctttgcatttctgaaggggtccgccagcacctcatcttccgcggagcaaccccttgggatcacgcagatgcctaaggcagaggtgaatttgggcggactaagcagtctcgtggttaacacgcctatcacttcagttagcttgagccattcaagttcggagtcgagtaagatgtccgagtctaaagatcaggaaaataattgcgaacgccctaaggagagcaacgtcttgcacccaaacggcgagtgtccagttaaaagcgagcccacagagccaggcgacgaggacgaggaggacgcctactctaatgaactagacgatgaagaagtactaggggagctgacggatagtattggaaacaaagatttccccctgctgaaccaaagtatcagcccactttcaagttcagtcctcaagtttatcgagaagggtacctcttcctcctcagcaactgttagcgacgacacagaaaagaaaaaacagactgctgccgtgcgggcatctggttctgtcgcaagcaactatggaatttcagggaaagatttcgcagatgcctcagcctcaaaagacagcgccacggctgcacacccgtccgaaatcgcccggggggatgaggactcctccgcaacccctcatcagcatggatttactcctagcacacccggaacacccgggccaggcggggacggcagtcccggatccggaatcgagtgtcccaaatgtgatactgttctgggttcttctaggtcactgggcggccacatgaccatgatgcactcacgcaacagctgtaagactttaaaatgccccaagtgcaactggcactataaataccagcagacactagaggcccatatgaaggagaaacaccctgaacctggaggctcttgcgtctattgcaagacaggccaaccgcatcctcgactcgcccgcggcgagtcttatacctgtggatacaaaccattccggtgtgaagtatgtaactactctactacaacaaaggggaatttgagtattcacatgcagtcagataaacacctcaacaatgtgcaaaacctgcaaaacggcaacggtgaacaggtgttcgggcactcagcgccggcccccaatacttccctgagcggatgcggcactcctagccctagcaagcccaaacagaagcccacgtggcggtgcgaggtctgcgactatgagactaacgtcgctagaaatctgagaatacacatgacatctgaaaagcatatgcacaatatgatgctcctgcagcagaacatgaaacagattcagcataacctccatttggggctggctccagctgaagccgaactataccaatactacctggcccaaaacattgggttgaccgggatgaaattggaaaatcctgccgacccacaattaatgattaatccatttcagctggaccctgccacggccgcggccctagcccccggtctgggggagctaagcccctacatctctgaccccgctctcaagctgttccaatgtgctgtgtgcaataaattcactagtgactccctcgaggccctctctgtgcatgtctcatccgaacgatccctgcccgaagaagagtggagagcggttattggagacatctatcaatgcaagctttgtaactataatacacagctcaaggcaaatttccaattgcactgtaagacagataagcacatgcagaagtaccaactggtggcacacattaaggagggcggaaaatcaaacgagtggcggctgaaatgtatcgccattgggaaccctgtgcatttgaagtgtaatgcttgtgactattatactaatagcgtcgacaagctgcgcctccataccacaaaccacaggcacgaggccgcattgaaactatacaagcacctgcagaagcaagagggtgcagttaatcctgaatcctgttactactactgtgccgtgtgcgattatactacgaaagtcaaactgaacctggtccagcatgtgcgcagtgtgaaacatcagcaaacagagggcttacgaaagctacagcttcatcagcagggactggcccccgaggaagacaatctgagtgagatctttttcgtgaaagactgcccccctaatgagctcgagaccgcctcactcggagccagaacctgtgatgacgatttaacagagcagcatgaggaagcagagggcgccattaagccaaccgccgtcgcggaagatgacgaaaaggacacctcggagcgtgacaactctgagggcaaaaactctaacaaggacagcgtttcagtggcaggagggacccagccactgctcctggccaaagaggaggatgtggctaccaagcgcagcaaaccaacagaggataataaattttgtcatgagcagttctaccagtgtccatattgtaactacaacagccgtgatcagagccgtattcagatgcacgttctaagccagcactctgtgcagcccgtaatttgctgccccctctgtcaagatgtgctgagcaacaaaatgcatctgcaactgcacctaactcacctgcactcagtatcccctgattgcgtcgagaagctcctaatgaccgtaccagtcccagacgtaatgatgccaaatagcatgctgttgcccgccgctgcgtcagagaagtccgagcgggatacacctgccgctgtgacagctgagggtagcgggaagtattccggtgagagcccaatggacgacaagagcatggcaggtcttgaagactccaaggcaaacgttgaagtgaagaatgaagagcagaagccaacaaaggagcctttggaagtgtctgaatggaacaaaaattcatccaaggacgttaaaatcccagatactttgcaggaccagctgaacgaacaacaaaaaagacagccattgtccgtgtctgatcgtcacgtctacaagtataggtgcaatcattgctcgctcgcattcaagacaatgcagaaactgcagattcattcccagtaccacgcaattcgagctgcgaccatgtgcaacttgtgtcaacggtcttttagaaccttccaggcgttgaagaaacatctcgaagctggccatccggaactttctgaagctgagctccagcagctgtacgcatccctccccgtgaacggagagctgtgggctgaaagtgagactatgtctcaggacgatcatggtctcgaacaggaaatggaacgagagtacgaggtcgaccatgagggcaaagcttcccctgtgggatctgactcgtcctccattccggacgacatggggagcgagccgaaacggaccctccctttcagaaaaggacctaatttcacgatggaaaaatttctcgacccttctcggccatataaatgcactgtctgcaaagagagcttcacacagaagaatattctgctagtgcattacaattcggtgtctcacctgcataagcttaagaaggtattgcaagaagctagctcgcctgtgccacaggagaccaactctaatacggacaacaagccatacaagtgcagcatatgtaatgtggcgtatagccaaagttctacattggaaatccatatgagatcagtgctccatcaaactaaggcccgagcagccaagttggaaccaagcggacacgtggcaggagggcactcaatcgccgctaacgtgaactcccccggccagggcatgttggactcaatgtccctggccgcagtcaatagcaaagacacccacctggatgcaaaagagttaaacaaaaaacagacccccgacctcatttccgcacaacccgcccaccaccctccccagtcacccgcccagatccagatgcaactccagcacgagctgcagcagcaggctgcattcttccagcctcaatttctcaatccagctttcctgccgcatttccctatgacgccagaggcactgttacagttccaacagcctcaattcctcttccctttctatattccaggcacagagtttagccttgggcctgacttaggcctgcctgggagcgccactttcggaatgcctgggatgaccggtatggccggatccctgttagaggaccttaagcaacagatccaaacgcagcatcacgtggggcaaacacagttacaaattttgcagcagcaggcccagcaatatcaggcaacccagccccagctgcagcctcagaagcagcagcagcagccacctcccccccaacagcagcagcaacagcaggcaagtaaactgctgaagcaggaacagtcgaatattgtttctgccgactgtcagattatgaaagatgtgccctcatacaaagaggccgaagacatatctgagaaaccggagaagcccaagcaggagttcatatctgagggggagggtcttaaagaaggaaaagatactaagaagcagaagagcctggagccctctattccccctccacgcatcgcaagcggggccagaggcaacgccgctaaggctctgctcgaaaactttggctttgagctcgtgattcaatataatgagaataggcaaaaggtccaaaagaagggaaagagtggcgagggggagaacaccgacaaactggaatgtggcacctgcggaaagctgttctcaaacgttctgatcctcaaaagccatcaagagcacgtccacggtcagtttttcccatatgctgctctggaaaagtttgctcgacagtatagagaagcttacgataagttgtacccaatcagcccaagctccccagagacgccccctccccctccaccccctccacctttaccacccgcgcccccgcagccaagtagcatgggccctgtgaaaattcctaataccgtcagcacaccactgcaagccccacctcccactccccctcctccaccgccaccccccccgcccccacctccgccacccccgccaccgccaccaagcgccccccctcaggtccaactgcctgttagcctagaccttcctctttttcctagtattatgatgcagcctgtgcagcaccccgcgctccccccacaactagcattgcagttaccccagatggacgccctgagtgccgatctgacacagctgtgccagcagcagttaggtctcgaccccaatttcctccggcattcccaatttaagcgcccccgcacccggattactgacgaccagctgaaaattctccgggcttattttgacattaacaattccccatccgaggagcaaattcaggaaatggccgagaaatcaggcctctcccagaaagtgatcaagcactggttcaggaatacattgttcaaggagaggcagagaaataaagattcaccatataatttcagcaaccctcccatcactgtgctggaggacattagaatcgacccccagcccacttctctggagcattacaagtccgacgctagcttcagtaaacggtcctcccggacaaggttcaccgactaccagttacgggtcctacaggatttcttcgacactaatgcctaccccaaagacgatgagatagaacagttgtctacggtcctgaatctgcctacacgggtaattgtggtctggtttcaaaatgcccgccagaaagcccgcaaatcttatgagaatcaggccgaaaccaaagacaatgaaaaaagagagcttacaaatgagcgttacattcgcacgtccaacatgcagtaccagtgcaaaaagtgtaacgtcgtcttcccaaggatctttgacctcattacccaccagaaaaagcagtgctataaagacgaggacgacgacgcccaagatgaaagccagactgaggattccatggatgctaccgaccaggtggtgtataagcactgtacagtcagcgggcaaacagacgctgccaaaaacgcagccgcccccgctgcatcctctggatcgggcactagtactccactcatccccagcccaaagcctgagccagagaaaacatcccctaaacctgaatacccagccgaaaaacccaagcagtctgatccttctcctccatcccaagggacaaagcccgccttacctctggccagtaccagctctgatccccctcaagcgtcaacagctcaaccgcagccccagccacagccccctaagcaacctcagcttattgggaggcccccctctgcaagccagactcctgtcccaagctctcccctgcagatctctatgactagcttgcaaaacagtctgcctcctcagctccttcagtatcaatgcgaccagtgcactgtcgccttccccaccttagagctgtggcaagagcaccagcacatgcactttctggctgctcagaatcagttcctgcatagcccgttcctggagcgtccaatggacatgccttacatgattttcgaccccaataatcccctgatgactggacagttgctgggttcctcacttacccaaatgccaccacaggcctccagttcacatacaaccgctcctaccactgtcgctgccagcttgaaaaggaaactcgacgacaaagaagataacaattgtagcgagaaggaaggaggcaattcaggtgaggatcagcacagggataagagactgcgcacaaccatcactcctgagcagttggagatcctgtacgagaaatatttacttgattccaatcctactcgcaaaatgcttgaccacattgctagagaggtgggtttaaagaaacgggtcgtgcaagtgtggttccagaacacacgagcacgcgagcgaaaggggcagtttagagccgtggggccagcccagagccataagcgctgtcctttctgccgggctctgttcaaggccaaatccgcactagagtcacacattcggagcagacattggaacgaagggaagcaagccggctactcactgccccctagtcctctgatttctacagaggacggaggagagtcaccacagaaatatatttattttgactacccatcattacccctgactaaaatagacttgagttccgaaaatgagctcgcatcgaccgtctcgaccccagtctctaagactgctgagctctctcccaagaatctcctgtccccatcctctttcaaagccgagtgcagcgaagatgttgagaacttaaatgctccacccgcagaggccggctatgaccaaaataagaccgatttcgacgagacttcctctataaacaccgccatcagcgacgccacaacaggagacgaagggaacaccgagatggagagcactaccggatccagtggggacgttaagcccgccttgtctcccaaagaacctaagacactggacactctgcctaaaccagctacaacacccacaacagaagtgtgtgatgataagttcctgttttcactgacctctccctccattcattttaacgacaaggatggcgaccacgatcagagtttttatattacagacgaccccgatgacaatgctgataggtccgaaaccagttcaatcgccgacccgagttccccaaaccctttcgggagttctaatccctttaagtctaaatctaacgatcggcccgggcataagcggtttcgaactcagatgtcgaacctccaactgaaggtgttgaaagcatgtttttctgactatagaaccccgacgatgcaggaatgtgaaatgctgggtaatgagatcgggctgcctaagcgggtggttcaggtgtggtttcagaatgcacgagctaaagagaaaaagtttaaaatcaatattggcaagccattcatgattaaccagggcggcacagagggaactaaaccagaatgtaccctgtgcggcgtgaagtacagtgctaggttatccattcgagaccatatcttcagcaagcagcatatctctaaagtgagagaaactgtgggaagccagctggatcgagaaaaggattacctggcaccaacaacagtaaggcagcttatggctcaacaggagctggatagaattaaaaaagcatccgatgtgctcgggctgacagtgcaacagccgggaatgatggacagcagctcgctacatggaatctccctcccaacggcctaccccggcctccctggtctgccacccgtgctgctgccgggtatgaatggcccttcctccctgcccgggtttccccagaactcaaatacattgactcccccaggggccggcatgcttggttttcctactagcgcgacaagctcgcccgctctctctctctcctctgccccaactaagcccttgctccagacccccccacccccaccccccccccccccgcctccgccatcatcttccctctcaggacagcagacggagcaacagaataaagagagtgagaaaaagcagaccaaaccgaataaggtgaagaaaattaaagaggaggaattggaagccactaagcctgagaagcatccaaagaaagaagaaaaaatctcctccgcattatccgtgctgggaaaggtagtgggtgagacacacgtcgatcctatccagctgcaggcgttacaaaatgcaattgcaggcgatcctgcatctttcatcgggggccagttcttaccctacttcatcccgggcttcgcatcttattttactccccagctccctgggaccgtgcagggcgggtactttcctccagtgtgtgggatggagagcctgttcccctatgggcctacaatgccgcagactttggcaggcttgtcccccggtgccctcctacaacagtaccagcagtaccagcagaacttgcaggaatctctccaaaagcaacaaaagcagcaacaagagcagcagcagaagccagtccaggccaagacttccaaggtggagtctgatcagccacaaaattcaaacgatgcttcagagacaaaggaagacaagtccactgcgaccgagagtacaaaagaggagccccagcttgaaagtaagagcgccgacttttctgatacgtatgtggtgcctttcgttaagtacgaatttatttgcaggaagtgccagatgatgttcactgacgaggacgccgccgtcaaccaccaaaaatcattctgctacttcggacagccgttaatcgacccccaggagacagttttgcgagtgcccgtctccaagtatcagtgtctcgcttgcgatgtggctattagtggaaatgaagccctctcacaacatctgcagagctccctgcacaaagagaaaacaattaaacaggctatgaggaacgcaaaagagcatgtgaggctgttaccacacagtgtttgctctccgaatcctaacaccacttctacctcacaatctgcagcctcttcaaataacacgtatcctcacctgagttgcttctccatgaaatcctggccgaacatcctcttccaggcgtcagctcgtagggctgcctccccaccaagctctccacccagtctttctttgcccagtacggtgacttcctctctctgctccactagtggcgttcagacatcccttcctacagagagctgttcagatgaatctgattcagaacttagtcagaagctggaagacctcgataattcactggaagttaaagccaaaccagcctcaggtctcgatggaaacttcaacagcatccgtatggacatgttctccgtttag

SEQ ID NO: 309055 - DNA, 10773 bp, Artificial Sequence
  derived and/or modified sequence
atggagacctgcgacagcccccccatcagccggcaggagaacggccagtctacttcaaagctttgtggaactactcaattagataacgaggtgcccgagaaggtggccggaatggaacccgatcgtgagaactcatcaacagatgataatttgaaaactgatgaaaggaaaagtgaggctctcctggggttcagtgtggaaaacgctgctgcaacacaggtaacctcagccaaggagattccatgcaacgaatgcgccacaagttttccatccctgcagaagtatatggagcatcactgtccgaacgcacgacttccggtgcttaaggacgacaatgagtctgagattagcgagttggaagattccgacgtcgagaatctcacgggggaaatcgtctatcagcctgacggcagcgcctacataattgaggatagcaaggagtctggtcagaacgcccagacaggggccaattctaaactgttctctacagctatgttcctcgatagcttggcgtccgctggagagaaatccgaccagagtgcgagcgcccccatgtcattctatccacagatcatcaacacattccacatagccagttccttaggcaagccttttactgccgaccaggcctttcccaatacatctgccttagccggcgtgggaccagttcttcattcttttcgggtttacgatctcaggcataaaagggagaaagactatttgacaagcgacggcagcgcaaagaactcatgcgtttccaaagacgtgccaaacaacgtggatctgtctaagtttgacggctgtgtctctgatgggaagcggaagccggttctgatgtgcttcttgtgcaagctatcattcggctacatccgttccttcgtcactcatgctgtgcatgaccaccgcatgacactgaacgacgaggaacaaaaattgttgagtaataaatgcgtgtctgccataatccagggcattggcaaagacaaggagcctctaatttccttcctggagccgaagaagtccacctctgtgtacccccacttctccaccaccaatctgataggtcctgatcctacgtttagaggactatggtccgcattccacgtggagaacggcgacagcctcccagctggtttcgcgtttctgaaagggtctgcgtctaccagctcttccgccgagcagcctctgggaatcacccagatgcccaaagcggaggtgaacctgggcggacttagcagcctagtcgtaaatacaccaatcacctctgtgtccctctcacactcctcaagtgagtcctcaaagatgagcgaaagcaaggatcaagagaacaattgtgaacgaccaaaggagtcaaacgttctgcaccccaatggcgagtgtccagtcaaaagcgagcctacagaaccaggagatgaagatgaggaggatgcatactcaaatgaactagatgacgaggaggtgctgggcgaacttactgacagcatcggaaataaagacttccccctccttaatcaatctatctccccactgtctagctcggtgcttaaattcatcgaaaaaggcacgagctcttcctccgccacagtgagtgatgatacggaaaagaaaaagcagaccgccgctgtccgtgcatcgggtagtgtcgcctccaactatggcatcagcggaaaggattttgccgacgcatcagccagcaaggactctgctacagctgctcacccttccgaaatcgctcggggtgacgaggacagttcagctaccccccatcagcatggctttaccccctccacgccaggcacaccgggtcccggtggagatggctctcctggaagtggcattgagtgtccgaagtgcgacacagtgctaggatcatcacgcagcttgggaggccacatgacaatgatgcattccaggaactcgtgtaaaactctgaaatgcccgaagtgtaattggcattataaataccagcagacactcgaagctcacatgaaggagaaacatcccgagcccgggggttcttgtgtatattgtaaaaccggccagccccatccccggctcgcccgaggcgaatcatatacctgtggctacaaaccgtttaggtgtgaggtctgtaattacagcactactaccaaaggcaacctctcgatccatatgcagtctgataagcacctgaataatgtgcagaatttgcagaatggcaacggcgagcaggtgttcggccactccgcccccgctcccaacacgagcctgtctgggtgtggtacacctagcccaagcaagcccaagcagaaaccaacctggcgctgcgaggtgtgcgattatgagactaatgtcgcaagaaatttgaggatccatatgacctccgagaagcacatgcacaacatgatgctgctgcagcagaatatgaagcaaatccaacacaatctgcaccttggactggccccagccgaggccgagctgtaccagtattacctggcgcaaaacattggacttacgggaatgaagttagaaaaccccgccgacccccaattgatgatcaacccttttcagctcgacccagccaccgcagcagccctcgcccctggtttaggtgaactaagcccttacatttctgaccctgctttgaagctgttccagtgcgccgtttgcaataaatttaccagcgattctttagaggcgctctccgtccacgtatccagtgaacgatctctccccgaagaggagtggcgcgcggtgatcggtgatatttaccagtgtaaactttgtaactacaatactcagttgaaggccaattttcagctacattgtaaaactgacaaacatatgcagaagtaccaattggtggcccacataaaggaagggggcaaaagcaatgaatggaggcttaaatgcatcgccatcggcaaccccgtgcacctgaaatgtaatgcctgcgattactatacaaactccgttgacaagctgcgactacacaccaccaaccaccggcatgaggcagccctgaagctttataaacacttgcagaagcaggagggagctgtcaatcctgagagttgctactactactgcgcggtgtgtgattataccacaaaggttaagctcaatttagtccagcacgtgcgatctgtgaaacaccagcagactgaagggttacgcaagctgcagcttcatcagcaagggctagccccggaggaagataatctctctgagatcttcttcgtgaaagattgtcctccaaacgagctggagacagcctcgctgggcgctcgcacttgcgacgacgacctgacagagcagcaactgcgttccacctccgaagagcagtcagaagaggccgagggggccataaaaccgacagctgttgctgaggatgacgaaaaggacacatccgagagggataactcggagggaaaaaatagcaacaaggacagtggaatcattactcccgaaaaagagcttaaggtgtcagtcgcggggggaacacagcctctgctgctcgcgaaggaagaggatgtagccacaaagaggtctaaacctacagaggacaacaaattttgtcacgaacagttctaccagtgcccttactgcaactacaactcgagggaccagagcaggatccaaatgcacgtactgtcccaacattccgtgcaaccggtgatctgctgtccactatgccaggacgtgctgagcaataaaatgcacctgcagctccacctgacccacctgcatagcgtgagtccagactgcgttgagaaactgctgatgaccgtgcccgtccccgatgttatgatgccaaactctatgttgctgcccgcagccgccagtgagaaatcagaacgggatacccccgctgcagtcaccgctgagggttcgggaaaatactccggagagtccccaatggatgacaaaagcatggcgggactggaggacagtaaggctaatgtggaagtcaagaatgaagaacagaaacctacaaaagagccactagaggtatcagagtggaacaaaaattcctctaaagatgtgaagattcctgacacccttcaggaccagctgaatgagcaacaaaagaggcaacctctgtccgttagcgatcgtcacgtgtacaaatacagatgcaaccactgttcgctggcgtttaagaccatgcagaagctgcagattcactcccaataccacgctatccgagcggccaccatgtgcaacttatgtcaacgtagtttccgcacattccaggcccttaagaaacatttagaggccggccaccccgaactgtctgaggctgagctgcagcagctctacgcctccctacccgtcaacggggagctgtgggctgagtccgagactatgagccaagatgatcacggcttagagcaggaaatggagagagagtacgaggtggaccacgagggaaaggcctcaccagtgggatccgacagtagtagtattcccgatgacatgggctcagaacctaagcgaactctcccattcaggaaagggcccaattttacaatggagaaatttcttgacccatctaggccctacaaatgcacagtttgtaaagagtcatttactcagaagaatatcctgctggtacattataacagcgtctcgcacctgcacaagctgaagaaagttctacaggaggcttccagcccagtgcctcaagagaccaactctaacacggataacaagccctacaaatgctctatctgtaatgtggcctacagtcagtcctcgacactggagattcacatgagatcagtcctgcatcaaaccaaggcaagggcagccaagctggaaccgtccggacatgtagctggcggtcatagcatcgctgctaatgtgaattcccccggccagggtatgctggacagcatgagtttggctgctgtaaattccaaagacacacacctggacgcaaaagagctcaacaaaaaacagacgcctgacctgatcagtgcacagcccgcccaccacccacctcagtctcccgcccagatccagatgcagctgcagcacgagctccagcagcaagcagcttttttccagcctcagttcttaaacccagcgttcttgcctcattttcccatgacgcccgaggccctcctgcagtttcagcagccacagtttctgttcccattctacatcccaggtaccgagttttccttggggccagatcttggccttcccgggtctgctacttttgggatgcccggcatgacaggcatggccgggtctttgctcgaggatctgaagcaacagatccagacccaacaccacgtgggacagactcagcttcagatcttacaacagcaagcgcagcagtaccaggcaacacagccacaactgcagcctcagaaacaacagcagcagccaccccctccacagcagcagcagcaacaacaggcctcaaaattacttaagcaggaacagtccaatatagttagtgctgactgtcagatcatgaaggatgttcccagttataaagaggcggaagacattagcgagaagcccgagaagcccaaacaggagttcataagcgagggtgagggcctcaaggagggaaaggacaccaaaaaacaaaagtccctggagccctccattcctccgcctaggattgcatcaggggcccggggaaacgccgccaaggcactccttgagaatttcggcttcgagttagtcatacaatacaacgagaatcggcagaaagtgcagaaaaagggaaagagcggtgagggcgagaacacagataagctcgagtgtggtacctgcggcaagttattctccaacgtgttaattctgaaatctcaccaggaacacgtgcacgggcaattttttccatacgcagcattggaaaagttcgcacgtcagtatcgggaggcatacgataagttgtatcccatcagccctagttctcccgagacaccaccacccccgccccctcctccccccctgcctccggctccgcctcagccttcaagcatgggcccagtgaaaatacctaacacggtcagtacacccctgcaagcgcctccaccgacgccacctccccctccaccaccaccaccacccccccctcctccgcctccacccccgcctccatccgctcccccacaagtccagttgcccgtaagcctggaccttccactatttccctccatcatgatgcagccggtccaacatccagcactaccacctcagcttgcactgcagttgccccagatggatgccctcagcgcagatctgacccagctctgtcagcaacagttaggtttggaccccaattttttgcgccactcacagttcaagagaccaaggactcggatcacagacgaccagctgaaaatcttaagagcctattttgatattaacaactcacccagcgaagaacagatacaggagatggctgagaagtccggcttatcccagaaagtaattaagcactggttcagaaataccctatttaaggagcggcaaagaaataaagatagcccttacaatttctctaacccccctatcacggtccttgaggacatccgcatcgatcctcagcccacatctctcgaacactacaagagcgatgcatcattttccaagcgatcttcccggaccagatttactgactaccagctgcgggtcctgcaggactttttcgacacgaacgcctaccccaaggatgacgagatcgagcaactctctaccgtgttgaacctgcccaccagagtgatagtggtgtggttccaaaatgcacgccagaaagcgcggaagagttatgagaaccaggccgagacaaaggacaacgagaagagagagcttaccaacgagcgctacatcaggacatccaacatgcagtaccaatgcaagaagtgcaacgtggtgttccctagaattttcgatttgattactcatcagaagaagcaatgctacaaagacgaggatgacgatgcgcaagacgagagtcaaacagaggactctatggacgccactgaccaggttgtgtataaacattgtacagtgagcgggcagacagacgcggcaaagaatgccgctgccccggctgcatctagcggaagcggaacaagcacaccattgatccctagtcccaagcccgagccggaaaaaacttcccccaagcctgagtatccagccgaaaagcctaagcagtccgacccgtcacctccttcccaaggcactaagcctgcgctgccattggccagcacgagcagcgatccccctcaggcctccaccgctcagcctcaacctcagcctcagcctcctaagcagccccagctgattgggcgaccgccgtccgcctcacagactccagtgccgtcctctcctctgcagattagcatgacttccctccagaattctctgccaccacagctactccagtaccagtgcgaccagtgtacggtcgcctttccaactctggagctgtggcaggaacaccaacatatgcattttctggcagcccagaatcagttcctgcactcccccttcctggagcgtcccatggatatgccatacatgattttcgatccgaataatccactgatgaccggccagctccttggatctagtctcacacaaatgcccccacaagccagctcatcacataccacagctcccacaaccgtggctgcttccctcaagagaaagctggacgacaaagaggacaacaactgtagcgagaaagaagggggtaattcgggagaagatcagcaccgagataaaagactcagaaccaccataactcctgagcagctggagatactatacgagaagtacctcctagatagcaatccgacccgcaagatgctggatcacattgctcgagaagtaggcctgaagaaaagggtcgtgcaagtatggtttcagaatacccgggcacgggagcgtaagggccagtttagagcagtggggcccgctcaaagtcacaaacgctgcccattttgtagagccctttttaaagcaaagagtgcactcgaatctcatatacggagtcgtcactggaacgaggggaaacaggcgggttacagcctccccccgtctcctttaatatcaaccgaagatgggggtgaatccccccaaaagtatatctactttgattacccctctctcccccttacaaagattgaccttagttcagagaacgaactggcctcaaccgtctcaacaccagtaagcaaaaccgccgagttatcccctaagaacctcctgtcaccgagcagttttaaggccgagtgtagcgaagacgtggaaaacctgaacgctccaccggccgaagcagggtatgaccaaaataaaactgatttcgatgagacctcatcaattaatacagcaatcagtgacgccacgactggcgacgagggcaacactgagatggagagtacaacaggttctagcggagacgtgaagcctgcgctttcgcctaaagagcctaagacacttgacacgttaccaaaacccgccacaactccaacaacggaggtgtgtgatgataagttcctgtttagcctgacttctcctagtatccacttcaacgacaaggatggtgaccacgaccaatccttttatattaccgatgaccccgacgataatgctgatcggtctgagacctcgtccattgccgatccttctagccccaatccattcggcagtagcaatcccttcaagagcaaaagcaatgatcggcccgggcacaagaggttccgtactcagatgagtaatcttcaactaaaggtgttgaaggcctgcttttctgattatcgcactcccactatgcaggagtgcgagatgctcggtaatgagatcggccttcctaagcgagttgtgcaggtctggttccagaatgcacgagcgaaggaaaagaagtttaagattaacatcggtaaaccattcatgattaatcagggtggaacggagggtacaaagcctgagtgtaccttgtgcggggtgaagtacagcgcgagactgtccatcagggaccacatctttagcaagcagcatattagtaaagtcagggagactgtgggcagtcagctggacagggaaaaagattacctagcccccaccactgtgagacaattgatggcccaacaggaattggaccggataaaaaaggcgtctgacgtcctggggctgaccgttcagcagccgggaatgatggattctagcagccttcacggaattagcctccctacagcttacccaggactccctggcctgccccctgtgctccttcccggaatgaacggcccgagcagcctgccagggtttccccaaaatagcaatacactgacacctccaggtgccggcatgctcggcttcccaaccagcgccacgagttcccccgctctcagcttgagctctgctccgaccaaaccactgctacagactccccctcctcctcctccaccacccccccctcccccgtcaagctccctatctggccagcagacagagcagcagaacaaagagtctgagaaaaagcagacaaaaccaaacaaagttaagaagataaaggaggaagaactggaggcgaccaagccagagaaacaccctaaaaaggaggagaagatttccagcgccctgtcagttctggggaaggtagtgggggagactcatgttgatccaattcaactgcaggccctccagaacgcgattgcaggcgaccccgcatcctttattggtggacagtttttaccctatttcatcccggggttcgctagttattttaccccccaactccctggaactgttcagggaggttattttcctcctgtgtgtggcatggagagtttgttcccctacggacccactatgccccaaactctcgcggggctgagcccaggggccctcctacagcagtaccagcagtatcagcagaatctccaggagtcacttcagaaacagcaaaagcaacagcaggaacagcagcagaagcctgtgcaggcgaagacttccaaggtcgagtcagatcagccccagaactccaacgatgcctcagaaactaaagaagacaagtctactgccacggagagcacaaaagaggaaccccaactagagagtaaaagcgcagatttttctgacacatacgtggtaccctttgttaagtatgaatttatttgtagaaagtgccagatgatgttcacagatgaagacgctgccgtaaaccaccagaagagcttctgttacttcggacagcccctaatcgatccccaggagaccgtcctcagggtgcctgtgtcaaagtatcagtgtctggcttgtgatgtagcaattagcgggaacgaagccttgtcacagcacttgcagagcagccttcacaaggaaaagaccatcaagcaggccatgcgcaatgctaaggagcatgttaggctgcttccacactctgtctgctcccctaaccccaatactacatctacaagtcaatcggccgccagttcaaacaatacataccctcatctgagctgcttctcaatgaagtcatggcccaatatactttttcaggcctctgccaggagggcagcctctccaccttccagtcctccgagcttgtcactgcctagtaccgttacctcttcattgtgctcaacttccggagttcagaccagccttccaaccgagtcttgtagtgatgagtcggactcagagctgagtcagaagctcgaggatctcgataactccctggaagtgaaggccaaaccggcaagcggacttgatggcaattttaatagcattagaatggatatgttttcagtctag

SEQ ID NO: 309056 - DNA, 10704 bp, Artificial Sequence
  derived and/or modified sequence
atggaaacctgcgatagcccccctatctctcgacaggaaaacggccagtcgacttcaaagctgtgcgggaccacacagcttgataacgaggtgccggagaaggttgcaggcatggagcctgatagggagaactcttctaccgacgataacttgaagacagatgaacgaaagtcagaagcactgctgggcttttcagtcgaaaatgccgcagcaacccaggttaccagcgccaaggagatcccttgtaatgagtgcgccacatctttcccaagcctgcagaaatacatggagcaccactgccccaacgcacgcctccccgtgttgaaggacgacaatgagtctgaaatcagcgagctggaagattccgacgttgagaatcttactggggagattgtctaccagcctgatgggagtgcttatatcatagaagacagtaaggagagcggacagaatgctcagaccggtgccaactccaaactgttctccacagctatgtttctggactctctagcatccgccggtgaaaaatcagatcagtccgcctctgcccctatgtccttttatccacagattatcaatactttccacatcgccagctcactgggtaagcctttcacagccgatcaagcctttcctaacacttctgctctcgcaggggtggggcctgtgctacacagcttcagagtgtacgatctgagacacaagcgggaaaaggattatctcaccagtgatgggtccgccaaaaactcatgcgtcagcaaggatgtgcccaataatgtagacctttcaaaattcgatggctgcgtgagcgacggtaagcgcaaacctgtgctgatgtgtttcctttgcaagctgtcatttgggtatatccgatcatttgtgactcacgctgtgcacgatcacagaatgactctgaatgatgaagagcagaaattactgagcaataaatgtgttagcgctatcatacagggcatagggaaagacaaagagcctcttatctcattccttgagcctaagaagagcacctctgtgtatccacatttcagcacaaccaacttaataggaccagatcccacattccggggtctttggtcagctttccacgtcgagaacggtgattccctccccgctggattcgcgtttctgaagggctctgcttctactagcagctcagccgagcagcctctcgggattacacaaatgcccaaagctgaagtgaacttggggggactgagtagtttagtggtaaatacaccaattacctctgtctccctaagtcacagctctagcgagtcatccaagatgtccgagtcaaaagaccaggaaaataattgtgagagacctaaggaatccaatgttcttcaccccaacggtgaatgcccagtcaagagcgagcctacagagcctggcgacgaagacgaggaggacgcgtattctaacgaacttgatgacgaagaggtgcttggagaattgactgattctattggcaataaagacttccccctgttgaaccagtcgatctctccactgtccagctccgtgcttaagttcattgaaaagggaacaagcagcagtagtgcaactgtgagtgacgacaccgaaaaaaagaagcaaactgctgcagtgagggcatctggttctgtggccagcaattacgggatatcagggaaagatttcgccgatgcttccgcttccaaggactctgctaccgcggctcacccatccgagatcgccagaggggacgaggactcttccgccacccctcaccagcacggttttacccctagcacccccggaacgccagggccaggaggtgacgggtccccagggagcggcatcgagtgccccaaatgtgatacggtgcttggcagcagtagatctctgggcggtcacatgacgatgatgcacagtagaaatagctgcaaaaccctgaagtgccccaagtgtaactggcactacaaataccagcagactctggaggctcacatgaaggaaaagcatcccgaacctgggggtagctgcgtctactgcaaaaccggacagccccaccctaggctcgccaggggggaaagttacacctgcgggtataagcctttcaggtgcgaggtttgtaactacagtactactacgaagggcaacctcagtatacatatgcagtctgacaaacatctcaataatgtgcagaatctccagaacgggaatggagaacaggtgttcggccatagtgcacctgctccaaacacttctctctcgggttgtgggaccccctcccccagtaagccaaaacagaagcccacctggaggtgcgaagtgtgtgactacgagaccaatgtcgcaagaaacctcagaatccacatgacatccgagaagcacatgcacaacatgatgctcctccaacagaatatgaagcagattcagcataacctgcaccttggccttgccccagcggaggcagaactttaccaatactatctggcccagaatatcggacttactgggatgaagctagagaatccagctgacccccaattgatgatcaacccattccagctcgacccagccactgctgccgcacttgcccctggattgggtgagctgagcccctatatatccgacccagcgctgaagctcttccaatgtgccgtgtgtaataaatttacctccgattcactggaggcattgtctgtgcacgtctccagcgagcgaagcttaccagaggaggaatggcgagcggtgatcggggacatctatcagtgcaagttgtgcaactataacacacagctcaaggcaaactttcagttgcattgcaagaccgataaacacatgcagaagtatcaactggtggcacatattaaagagggcggtaaatcaaacgagtggcgactgaaatgcatcgctatcggaaacccagtacatctgaaatgtaacgcttgtgactactacacaaattccgtagataaactcagactgcacaccactaaccacagacacgaggctgccctgaaactgtacaagcacttgcagaaacaggagggcgctgtgaacccggaatcctgttattattattgcgcggtgtgtgactatacaaccaaggtaaaactgaacctggttcagcatgtgagaagtgtcaagcatcagcagaccgaggggctgagaaagctccagctgcaccagcagggactagcccctgaagaagataacctgtccgagattttcttcgtcaaagactgcccaccgaacgagctcgagactgccagtttgggtgcgcgtacctgtgatgatgatctgactgaacagcatgaggaggctgagggtgcgattaagcccaccgcggtcgcagaggacgatgaaaaagacacgtctgaaagagacaattcagagggtaagaacagcaacaaggacagcgtgtccgtggctgggggtacccagcctctccttttggccaaagaggaagacgtcgcgactaagcggtctaaacctaccgaggataacaaattttgccatgaacaattctaccagtgtccctattgtaactacaactcacgcgaccagtcccgaatccagatgcatgtgctgtcccagcatagtgtgcagccggtgatctgctgccctctctgccaggatgtgcttagtaataagatgcatctgcaattgcatctcacacatctgcattccgtgtcccctgactgcgtggagaaacttcttatgacggtccccgtccctgatgtcatgatgccaaactccatgctgttgcctgcggctgcttcggagaagtctgaacgcgacaccccagccgctgtaactgctgagggatctggcaaatacagcggtgagagtcccatggacgacaaatccatggcgggacttgaagactcaaaagcaaatgtggaggtaaagaatgaggagcagaaacccacaaaagagcctctggaagtaagcgagtggaataagaactccagtaaggatgttaaaatccctgatacattgcaggaccaactaaacgagcagcaaaagcgacaacccctttcggtcagcgatcgacatgtgtataaatacagatgcaatcactgcagtttggccttcaagacaatgcagaagttgcagatccactcccagtatcacgccatccgcgcagctaccatgtgcaacctttgtcagaggtccttccggactttccaggctcttaaaaaacatttagaagccggtcatccagaactgagtgaagcagagctgcaacagctgtacgcctcgttgcctgtgaatggcgagctttgggcagagagcgagacaatgtcccaggatgaccatgggcttgaacaggagatggaaagggagtatgaggtagatcacgaggggaaggcctcccccgttggatctgacagctcctccatccctgacgatatgggatctgaaccgaagcgtacactgccttttagaaaaggcccaaattttaccatggaaaaattcctggatccctctcggccatacaaatgcactgtgtgcaaggagagctttacccagaaaaatattctactcgtgcattataactcggtatcacatctgcacaagttaaagaaggtgctgcaagaggcaagctcacctgtgcctcaagaaacaaatagtaacacagataacaaaccatacaagtgcagcatttgtaacgtcgcttactctcagagctccactctagagatacatatgcgatccgtcttgcaccagaccaaggccagagccgcaaagcttgagccttcgggacacgtggccggtggccattctattgccgctaacgtaaactctcctgggcagggcatgctagatagcatgtcactcgccgcagtgaatagtaaggacacccatctcgatgctaaagaactaaacaaaaaacagacgccagacttaattagtgcacagccagcacatcatcctccacagagtccagcccagattcagatgcagctacagcacgagctgcaacaacaggctgcattctttcagcctcagttcctaaatccagcctttctcccgcacttcccgatgaccccagaagccttgctgcagtttcaacagccccaattcctgttcccattctatatcccaggtacagagttttctctaggacctgacctcggactgccaggatccgcgacattcggaatgcccggaatgacgggcatggctggatcacttctggaggaccttaagcagcagattcagacacagcaccatgttggtcaaacacagctgcagatactgcagcagcaagctcagcagtaccaggctacacagccgcagctgcagcctcagaagcagcagcagcagccaccccctccccagcaacagcagcagcagcaggcctctaagctgctgaagcaggaacagtccaacattgtttcagccgactgccaaattatgaaggacgtaccttcctataaagaagcagaggacatctcagagaagccagagaaacccaaacaggagtttatcagtgagggcgaaggacttaaggaaggcaaagacacaaagaaacagaagagcctggaacctagtatccctcctcctcgtattgcctccggcgctagagggaatgccgctaaagccttactggagaattttgggtttgagctcgtgatacagtacaatgagaatagacagaaggtgcagaaaaagggcaagtccggcgaaggtgaaaatacagacaaactcgaatgtggaacctgtgggaaacttttctctaatgtgctgatcctgaaatcccatcaggaacatgtccatggtcagttcttcccatacgccgcacttgagaaatttgccaggcaatacagagaggcgtacgacaagctgtacccaatctctccctccagtccggagacccctccacccccaccaccacctccccctctaccacctgcacctccacagccatcttctatgggccctgtgaagatccccaacaccgtgagtaccccactacaagcccctcctcctacacccccacctcctcctccgcctcctccccctccgccaccgccacccccaccacctcctccttccgccccaccacaagtgcagttgcctgtgtcactggacctgccactttttcctagtattatgatgcagcctgtgcaacatcccgcactgccgcctcagttagctcttcagctgccacagatggacgccttgagtgccgacctgacgcagttatgccagcagcagctgggacttgaccccaatttcctacgccactcccaattcaagcggcctaggactcggatcaccgacgatcagttaaagattctgcgtgcatatttcgacattaacaactctccctcggaggagcagatccaggaaatggccgaaaaatccgggctttcccaaaaagttatcaagcactggttccgaaataccctgtttaaagaacgccagagaaacaaggacagtccttataacttcagcaacccacccataaccgtgctggaggatataagaatcgacccacaacctacgtccctcgagcattacaaatcagatgcaagcttctctaagcgttcttcgcgcactcgttttacagactaccagctcagggtacttcaagactttttcgacaccaacgcctaccctaaggatgatgagatcgaacagctgagtaccgttctcaacttacccacacgagtgatcgtcgtttggtttcagaatgcccgtcagaaagcacgaaagagctatgagaatcaggcagagacgaaagacaatgagaagcgagaattgacaaacgagcgctatattagaacatctaacatgcagtaccagtgtaaaaaatgtaacgtcgtattcccaaggattttcgacctgattacacaccagaagaagcagtgctataaggacgaagacgacgacgctcaggacgaaagccaaacagaagattcaatggacgccacagaccaggttgtgtataaacactgtacagtcagtggtcagacggatgctgccaaaaacgccgcagctcccgcagctagcagcggctctggaacatctactcccttgatcccctctccaaaacccgaacctgagaagacaagcccaaaaccagagtatccggctgaaaagccaaaacagagtgaccctagccccccttcccagggcaccaagcctgcccttccactggcctctacaagctcagatccccctcaagccagtaccgcccagcctcagcctcagcctcaacctccaaaacagccccaacttatcggcaggcctccttccgctagtcaaacgccagtcccctcctcaccattgcaaatatctatgacatctttgcagaacagcctgccccctcagctcctgcagtaccagtgcgaccagtgtaccgtggcctttcccactctggagctatggcaggaacatcaacacatgcactttctggccgctcagaaccagtttcttcactctcccttcctagagcgacctatggatatgccttacatgattttcgacccgaacaatccgctgatgaccggtcagctgctgggtagctccctgactcagatgccacctcaagcctccagcagtcacaccaccgctcccaccaccgtggccgcaagcctcaaaaggaagctggacgacaaggaagacaacaactgttctgagaaggaaggcggaaacagcggagaagaccagcacagggacaaacgcctgcgaacaactatcactcccgagcagctcgaaatcctttatgaaaaatacctcctggatagcaacccgacacgcaaaatgctggaccacatcgcccgagaagtggggctgaaaaagagagttgtgcaggtgtggttccagaataccagagctcgcgaacgaaaggggcagttccgggctgtgggacccgcacagtcacacaaacgttgtccgttttgcagagcattgtttaaggccaagagcgcactggaaagccacatcagatctagacactggaatgaaggtaagcaggccggatacagcctgccgccaagcccgcttattagcaccgaggacggtggggagtcgcctcagaagtatatctacttcgactatccgtcactccccctcacaaaaatcgacctgagctccgaaaatgagctggcgagcaccgtgagcacaccggtatctaagactgctgagctcagtccaaagaatctgctttcgccatcatccttcaaggccgagtgctccgaagatgttgagaacttgaacgctccgccagcagaggctggatacgatcagaataaaactgatttcgatgaaacctcctccataaacactgcaatttccgatgccaccactggtgacgagggaaacacagagatggagagcacgaccggctcgtccggggacgtcaagccagcgctttccccgaaagagcccaaaacactcgacaccctgcccaaacccgcaacaactccaacaactgaggtgtgcgatgacaagtttctgttttccttaacgtctcccagcattcacttcaacgacaaagacggtgatcacgaccagtcgttttacattacagatgatcccgacgacaacgctgataggtcagagacgtcctctattgccgacccgagctcgccaaatccttttggctcaagtaatccattcaagagtaagagcaatgataggcctggacataaacgcttccgtacccagatgagcaatttacagctgaaagttttaaaggcgtgcttcagcgactatcgaacacccacaatgcaagagtgcgaaatgctggggaacgagataggtcttcctaagagagtcgtgcaggtctggtttcaaaatgcacgtgcgaaggagaaaaaattcaaaattaatataggcaaacctttcatgataaaccagggtggcaccgaaggcaccaaacctgaatgcaccctgtgtggcgtgaagtactctgcacggctgagtatcagggaccacatcttctccaaacagcatatctcaaaggtcagagagactgtaggttcccagttggatagagagaaggactacctggctcctaccacagtcagacagctaatggcacagcaggagttggacaggattaaaaaagcatctgacgtattggggcttaccgtgcagcagccgggaatgatggacagctcatctctccacgggatttccttgccgacagcctacccgggattaccaggcctgccccctgtgctcttaccaggtatgaacgggccttctagcttgcccggttttccgcagaactcgaacatcgcatccgggatgctcggtttccctacctctgcaaccagctccccggctctgtctttgtccagcgccccaactaaaccactgttgcagacaccaccaccgccaccccctcccccacccccaccgccttcatcatccctctctggtcagcaaaccgagcagcagaataaagagtctgagaagaagcagaccaagcccaacaaagtcaagaagatcaaggaagaggaactggaggctaccaaacctgagaagcatccaaagaaggaggaaaagatctcttctgccctctcagttctgggtaaagtcgtgggcgagacccatgtggacccaatacagctgcaggctctccagaatgcaatcgcaggcgacccagcctcctttattggcggtcagttcctcccatatttcatccctggttttgccagttactttacacctcagcttccaggcacagtacaggggggttacttccccccagtatgcggaatggagagcctctttccctatggccctactatgcctcaaacactagcagggctaagcccgggagcgctcctgcagcagtaccagcaataccaacagaatctgcaagaaagcctgcagaagcaacagaaacagcagcaggagcagcaacagaaaccagtgcaagctaagacttcaaaagtagaaagtgaccagccacagaattcgaacgatgcgagtgagacaaaagaagataaatcaacagcaactgagtccactaaagaagaacctcagttggaaagcaagtccgctgacttctcggacacgtatgtagtgccttttgtcaaatacgagttcatttgccggaagtgtcagatgatgttcacagatgaggacgcggctgtcaaccaccaaaagagcttttgttacttcggacagcctctgatagatccccaggaaacagttcttcgtgtacccgtctcaaagtaccagtgcctggcatgcgacgtcgcaataagcggaaatgaggccctgtctcagcacctacagagctctcttcataaagaaaagactatcaagcaagcaatgagaaatgccaaagagcacgtgcgcctccttccgcattccgtgtgctcccccaatccgaacacgacgagtacttcccaatcagccgcttcttctaacaatacttaccctcacctaagttgtttctccatgaaatcatggcctaacattcttttccaagcatcagccaggagagccgcatcccccccttccagcccaccctcactaagcttgccatcaaccgtgacctcctcgctgtgctctacctcgggggtgcagacatcccttcctaccgagtcttgctccgacgaatccgatagtgagctttcacagaaactcgaggatctcgataattcgcttgaggtgaaggcgaaaccagcttcagggctggatggaaattttaattccatacgaatggatatgttctccgtgtag

SEQ ID NO: 309057 - DNA, 10716 bp, Artificial Sequence
  derived and/or modified sequence
atggagacatgcgactccccacctataagtagacaagaaaatggccagagtacatccaagttgtgcggcaccacccagctcgataacgaggtgcctgagaaggtggctggtatggaacctgaccgcgagaactccagtactgatgacaacctcaaaactgacgagcggaagtcagaggctctgttaggcttctctgtggaaaatgccgcagctacacaggtcacctccgctaaggagattccatgtaacgaatgtgccacgtcttttcctagccttcaaaaatacatggagcaccattgcccgaatgcaaggctgcccgtcctgaaagacgacaatgagtccgagatatccgagttagaagactcagacgtcgaaaaccttactggcgagattgtttatcagccggacgggtcggcgtatattatcgaggactccaaggaaagtggccagaatgcccagacgggcgctaattcaaagctgttctccaccgccatgtttttagacagtttggcgtcagccggagagaaatccgaccagagcgccagtgccccaatgagtttctacccccaaatcattaatacgtttcacattgccagtagtctcggtaagccatttacagctgatcaggcattcccgaatacctcagcactggccggtgtcggtcctgtgcttcactcctttagggtgtacgatctaaggcataaaagggaaaaagattacctgacatccgatggatcagccaagaatagctgtgtctctaaagatgtgcccaacaatgttgacctgagcaagttcgatggttgtgtctcagatggaaaaaggaagccagtcctgatgtgttttctgtgcaagctgagcttcggttacatccgctcattcgtgacacatgccgtgcacgatcatcggatgactcttaacgacgaagaacagaaactgctgagcaacaagtgtgtctcagcgataattcagggaatagggaaggacaaagaaccgctgatcagctttctggaacctaaaaagtcgacttctgtttaccctcactttagcaccaccaatctgattggcccagatcccacattcagggggctttggtccgcgtttcacgtggaaaatggagactcgctgcctgctggattcgcctttctgaagggatccgcaagtacgtcctccagcgctgagcagccgttgggtatcacccagatgcctaaggccgaagtgaacctgggtgggctaagtagcttggttgtgaacactcccatcacaagcgtcagcctgtcgcattccagcagcgaatccagcaagatgagtgagtctaaagatcaggaaaataactgcgaacgccctaaagaatcaaacgtgctgcatcccaatggcgaatgccctgtgaaatccgagcctacagaaccaggggacgaggatgaagaggatgcctatagcaatgaactcgacgatgaagaggtgctgggggaattgacagactccatcggaaataaggattttcccctgctgaaccagtctatcagcccactcagctcaagcgtccttaaattcatcgaaaaagggactagttcctctagtgccacagtttcagatgataccgagaagaagaagcagacagccgctgtgcgcgcaagtggtagcgtcgcatccaactatggcattagcggtaaagacttcgcagacgctagtgccagcaaagacagcgccaccgccgcacacccctcagaaatcgcaaggggtgatgaagacagttccgccaccccacatcagcacggcttcactcccagtaccccgggtacccccggtcccggaggagacggttcccccggatctggcatcgaatgtccaaaatgcgataccgtgctgggcagtagtcgcagtctggggggacacatgacaatgatgcacagccgaaacagttgcaaaacattgaagtgcccgaaatgcaattggcactacaaataccagcagaccctcgaggcccacatgaaggaaaaacaccctgagcccggtggaagttgtgtgtattgcaagaccgggcaaccgcaccccagactcgccagaggagagtcctacacctgcggatacaaaccttttcgttgtgaggtttgtaattacagtaccactacaaagggtaacctttctatccatatgcagagcgataagcaccttaacaacgttcagaatctgcagaatggcaatggcgaacaggtctttggccacagcgcaccggctccaaacacctcattgagtgggtgtggaacaccaagcccctctaagccgaagcagaagccaacatggagatgtgaagtctgcgattacgagacgaatgtggctcggaacctccgaatccacatgacctcagagaaacatatgcacaatatgatgctgctgcagcaaaatatgaagcagattcaacacaacttgcatctcgggctagcccctgctgaagcagagctttatcagtactacctggctcagaatatcgggctgacaggtatgaagctagaaaatccagcggatccccaactgatgatcaacccattccagcttgatccggcaacagccgctgcgttggccccaggattgggagaactctcgccatatatatcagatcccgctctgaaacttttccagtgcgctgtgtgtaacaaatttacgtcggactctctggaggccttgagcgtccacgtatcaagcgagaggagcctccctgaagaagagtggcgcgctgttatcggggatatctaccaatgtaaactgtgtaactataacacccagctgaaggctaacttccagctgcattgtaaaactgataagcacatgcagaaataccagctcgtggctcacattaaggagggaggtaagtccaatgaatggaggctaaaatgtatcgccattggaaacccagttcacctgaagtgcaacgcctgtgattactacacaaacagcgtcgataaactgcggttgcatactactaatcataggcacgaagccgcattaaagctttataagcacctgcaaaaacaggagggcgcagtgaatccggagtcttgttactattactgcgctgtgtgcgactacactaccaaagttaaactgaatcttgtgcagcacgtcagatcagtaaagcatcagcaaactgaaggcctgcgtaagttgcagcttcaccagcagggtctggccccagaagaagacaatttgtctgaaattttttttgttaaggactgccctcccaacgaactggagacggcatcccttggagcaagaacctgtgacgatgacttaacggagcaacacgaggaggctgaaggggctatcaagcctactgccgtagccgaagatgacgagaaggataccagtgaaagagataactcggagggaaagaactccaataaggatagcgtctccgtcgcagggggaactcagccgctgctcctggcaaaggaagaggacgtggctacaaaacggagtaagcctaccgaggacaataagttttgtcacgagcagttttaccagtgcccctactgcaattataactcccgggaccaaagccggattcagatgcacgtcctgtctcaacatagtgttcagcccgtaatctgttgcccactgtgtcaagacgttctgtctaacaagatgcaccttcaactgcatttgactcacctgcatagcgtgtctcccgactgtgtggagaaactcctgatgaccgtgcctgtcccggacgtgatgatgccaaacagtatgctgttacccgctgccgcttccgagaaaagcgagagagatacaccagccgctgtgacagccgagggctcaggcaaatactctggcgaatcccccatggacgataagtcaatggccggtcttgaagacagtaaggcaaatgtcgaagtcaaaaacgaagaacagaagccgaccaaagagccattggaggtttcagagtggaacaagaacagtagcaaggacgtgaagatcccggacactctgcaggatcagctgaatgaacagcagaagaggcaaccgctatctgtgagcgataggcatgtctataaatatagatgtaaccactgttcattggctttcaaaaccatgcagaaattacagattcactcacagtatcacgccattagagcagctaccatgtgcaacctatgccagcgatcatttaggacatttcaggctctgaagaagcacttggaggcagggcacccagaattaagcgaagccgaactgcagcagctgtatgcgagcctaccagtcaatggagagctctgggcggagagcgagactatgagccaagacgaccacgggttggagcaggagatggaacgggagtacgaggtggaccacgaagggaaagcatcccccgttgggtctgacagcagtagcatcccagatgacatgggcagtgagcccaaaagaacacttcccttcaggaaaggcccaaactttactatggagaaatttttggaccctagccgtccatataaatgtacagtgtgcaaggaatcatttacacagaagaacatccttttagtgcattataactccgtctcacatctgcataagctcaaaaaggtgttgcaggaagcaagctcacccgtgcctcaggagactaactcaaatacggacaacaaaccatacaagtgtagtatttgcaatgtggcatactctcagtcttcgacccttgagatccacatgaggtctgtcctgcatcaaactaaagccagggccgcaaaactcgaaccctccgggcacgttgccggtggccatagcatcgccgcaaacgtgaacagccctgggcagggaatgctggatagcatgtcgttagcagctgtaaattctaaagatactcaccttgacgctaaggagctcaacaagaaacaaacccccgatttgatatcggcccagcccgcacatcaccctccccagtctccggctcagattcagatgcagcttcaacacgagttgcaacagcaagcagcattctttcaacctcagttcctgaaccctgcgttcctgcctcactttcccatgactcccgaagctctcctgcagtttcaacagcctcagttcctgttccccttctatattcccggaactgagtttagcctgggtccagatctgggcctccccggatccgcgaccttcggcatgccaggaatgacagggatggccggaagcctcctggaggacctaaagcagcagattcagactcagcaccatgtgggacagacacaactgcagatactacaacagcaggcccagcagtaccaggctactcagccgcaactgcagccgcagaagcagcagcaacagcctcctcctccacagcagcagcagcaacagcaggcatctaagctgctgaaacaggaacagtctaatatcgtttccgcagactgccaaattatgaaggacgtgcctagctataaggaggcggaagacatcagcgagaagccagaaaaacctaagcaagaatttataagcgagggcgaaggtctgaaggagggcaaggatacaaagaaacagaaatccttggagccctcaatccctcctcctcggatcgcctcaggcgctagaggaaacgctgctaaggccctcctcgaaaacttcggctttgagctggttatacagtataacgagaacagacaaaaggtgcagaaaaagggtaaaagtggcgaaggtgagaacaccgacaaactggagtgtggcacatgtggtaagctgttttccaacgtgctcatcctcaaatcccatcaggaacatgttcatggtcaattcttcccctacgccgctctagaaaaatttgcaaggcagtacagggaagcgtacgacaaactatatccgatttcgccatcttcaccggagactccgcctccaccacccccacccccacccctgcccccagccccaccacaaccatccagcatgggccctgtcaagattccgaacactgtttccactccactgcaagcccctcctcctactcctcccccaccacctccaccacctcccccaccccctccaccccctcccccacccccaccatcagcgccaccccaagtgcagctgccagtgagcctggatctgccgctcttcccgtctatcatgatgcagcccgtccaacatcctgcactacctccgcagctggcgctgcagctccctcagatggacgcactcagtgctgacctgactcagctgtgtcaacagcagttgggtctggaccccaacttcctgcgccactcccaattcaaacgtcccaggacgagaatcaccgatgaccagctgaagatcctccgcgcatacttcgatatcaataatagtccctccgaggaacagattcaggagatggcagagaagtcaggactgtcgcagaaagtaataaaacactggttccggaatacgttgttcaaagagagacagaggaataaggactccccctataatttctcaaatccccctatcacagtactcgaggatatcagaattgatccacaaccaactagtctggaacattacaaatcagatgctagttttagcaaaaggtctagtcgcacccgctttactgattaccagctccgagtcttgcaggacttctttgacactaacgcctatcctaaggacgacgaaatcgagcagctgtctacagtgttgaacttgccgacccgggtcattgtggtgtggtttcagaacgcaagacaaaaggctagaaagagctacgaaaatcaggctgaaactaaagacaacgaaaagagggaactgacaaacgaaagatatatccgaaccagtaacatgcagtatcaatgcaagaagtgcaacgtcgtgtttccgagaattttcgatctgatcactcaccagaagaagcagtgctacaaggacgaggacgatgatgctcaggacgagtcccagactgaggattccatggatgccaccgaccaagtggtctacaaacactgtacagtttctggtcaaaccgatgcagcgaagaacgctgccgcaccggctgcgtccagcggatctgggacctccactcccctgattccgtcgcccaagcccgagcccgagaaaacatccccgaagcctgagtatccagcggagaagccaaaacagtccgacccatcacctccatcacagggtacgaaaccagcacttcccctcgcaagcacaagctcggaccctccccaggcttccactgcccagccgcagccgcagcctcagccccctaagcagccacagttgattggcaggccgccaagcgccagccagacaccagtgccttcatctcccctccagatttctatgacgagtcttcagaactctcttcccccacagttactgcagtatcaatgcgaccagtgcacagtggcttttcccaccctggagttgtggcaagagcaccagcacatgcacttccttgctgcacagaatcagtttctgcacagcccttttctggagaggcctatggacatgccatacatgatcttcgaccctaataacccattaatgactggacagctgttgggatctagcctgacgcagatgcctccacaggcctcttcatcccataccaccgcccctactactgttgcggcatccctcaagcggaaactcgacgataaggaagataacaattgctccgaaaaggagggcggtaactcaggcgaggatcagcaccgggacaaacgcttgcgcacaactataacaccggaacagcttgagatcctgtatgaaaagtatctgctggattccaatcccactcggaaaatgctcgatcacattgcacgggaggttggtttgaaaaagcgggtggtacaagtatggtttcagaacaccagggctcgtgaacggaaaggccagttccgggcagtgggaccagcacaatcccataagaggtgtcccttctgccgtgccttattcaaggcaaaaagtgccctggaaagccacatccgatcccgccactggaacgagggaaaacaggccggatatagtctgcccccaagccccttgattagtactgaggacgggggagaatctccacagaagtatatctacttcgattacccctcactccccctgactaagatagatctgtcatctgagaatgagcttgcgtctacagtgtcaacacccgtatcgaaaaccgccgagctgtcgcctaagaacctgctctctccgtcctccttcaaggccgaatgtagcgaggatgttgaaaatttgaatgctccccctgctgaggctgggtacgatcagaacaagactgacttcgacgaaaccagcagcatcaacaccgcaatatcagacgcgaccacaggagatgaggggaacacggagatggaaagcaccacaggcagctcaggggacgtgaagccagcgctctctcccaaagagcccaagaccctagatactctgcccaagccagctacgaccccaacaaccgaagtctgtgatgacaagttcttgttcagcctcacctcacccagcatacactttaatgacaaagacggagatcacgatcaaagcttctacattacggatgatccagatgacaatgccgaccggagcgaaacgtcgagcatcgctgaccctagcagtccaaacccgttcggctcatcaaacccctttaaaagtaaatctaacgatcgaccaggtcataaaagattccgcactcagatgagcaatctgcaattaaaagtccttaaagcttgcttcagtgactatagaacgccgaccatgcaggagtgcgagatgctcgggaatgaaatcggcttgcccaagcgggtggtgcaggtgtggtttcagaacgcgcgtgctaaggagaaaaagttcaagatcaacattgggaaaccttttatgatcaaccagggtggcaccgagggcaccaagcccgaatgtacactctgtggggtcaaatacagtgctagattatcgattcgcgaccatatcttttccaaacaacacatttcaaaggtccgggaaacggtcggctcacagctggacagggagaaggactatcttgcgcctactacagttcggcaactgatggcccaacaagaattggaccgcataaagaaggcatctgatgtgcttgggctcaccgtccagcagccgggaatgatggactccagcagtcttcatggcatttcactgccaacagcctatcccggtctgcccggactgccaccggtgctccttccaggaatgaatggcccatcatccctgcctggctttccccagaattctaacaccctcacgccaccaggcgcaggaatgctcggctttcctacttctgcgacctcatccccagccctttcactcagctctgcacctacaaagcctttgttacagacacccccacctcccccaccaccacccccaccccctcccagttcctccctgtcaggccagcaaactgagcagcagaacaaagaaagtgaaaagaagcagaccaaacctaacaaggtgaaaaagatcaaggaggaggagcttgaagctaccaagccagaaaagcaccccaaaaaagaggagaaaatctccagtgctctgagcgttcttgggaaagtggtaggagagactcacgtggatcccatacagctacaggctcttcaaaatgccatcgccggagaccctgcttcctttatcgggggacaatttttgccttatttcataccgggatttgccagttattttacgccgcagctgccgggtacagtgcaggggggttactttccacctgtgtgcggaatggagtccctcttcccctatggacccaccatgccacagacattggcaggcctctcccccggtgctttgcttcagcagtaccaacaataccagcagaatctgcaagagtcgctgcagaagcaacagaaacagcagcaggagcaacaacagaaacccgtgcaggcaaagactagcaaagttgaatcagaccagccgcagaattctaacgacgcctcggagaccaaggaggacaagtcaactgccacagagagtacaaaggaagagccacagctcgagagcaagtctgctgactttagcgacacatatgttgtcccctttgtgaagtatgaattcatatgccgtaaatgtcagatgatgtttaccgacgaggatgctgctgttaaccaccagaagagtttctgttactttgggcagcctttgatcgatcctcaggagacagtgctgcgtgttccggtctctaagtatcaatgtctagcatgcgacgttgctatcagcgggaacgaggccctcagccagcacttgcagtcttccttgcataaggaaaaaactattaagcaggcgatgcggaatgctaaggaacacgttcgcctcttaccccacagtgtatgttcccctaaccccaacaccacatcaacctcacagtcagctgccagctcaaataatacatatccacacctgagctgcttttctatgaaaagctggcccaacatcttgttccaggcttctgcgcgacgggcagcctcaccaccctcgtcaccccctagtctctcacttccatctactgtgacttcctctctttgctccacttcaggagtgcagacttctctccccacagagtcatgtagtgatgagtcagactctgagctttctcagaaactcgaggacttggataactctctggaagtcaaagccaagccagcatcgggcctggatggtaatttcaatagcattagaatggatatgttttctgtgtac

SEQ ID NO: 309058 - DNA, 10773 bp, Artificial Sequence
  derived and/or modified sequence
atggaaacctgtgactcaccccctatctcacgtcaagagaatgggcagtccacctccaagctgtgcggcaccacccagctcgataacgaagttcctgagaaggtcgccggaatggaaccagatagggaaaattcttccaccgatgataacttgaagaccgatgagcgtaaaagcgaggctctactgggattctccgtggagaatgccgcagccacacaggtgacctccgcaaaggagattccctgtaacgaatgcgcgacctctttcccttctctacagaaatacatggagcatcattgtccgaacgcacgcttaccagtgctgaaggatgataatgaatccgagattagcgaactggaggactctgacgttgaaaacctcacaggtgagattgtgtatcagcctgacggcagtgcctatatcatcgaagacagcaaagaatccggccagaacgcccagacaggagccaacagtaaattgttctccaccgcaatgttcctggacagcttggcctcagcaggggagaagtctgatcagtctgctagcgcccctatgtcattttacccacagattatcaacacatttcacattgcatcatccttggggaagccgtttaccgctgaccaggccttccccaatacctctgcccttgcgggtgttggcccagtactccacagtttccgggtgtatgacctccgccataagcgcgagaaggattatctgacgagtgacggttccgcaaaaaactcctgtgtttcgaaggacgtgccaaacaacgtggatctgtctaagttcgacggatgtgtttcggatggaaagcgcaagcctgtgctgatgtgtttcctgtgtaagctgtcatttggctatattaggtcattcgtaactcacgctgtgcacgatcaccgtatgacacttaacgacgaagaacagaagttgctctccaacaaatgtgtctcagccataatccagggaatcggcaaagacaaagaacccctgatttctttcctcgagccaaagaaatccaccagcgtgtaccctcatttttccacaacaaacctcatcggccctgaccctacctttcgcggattgtggagcgcgttccacgtcgagaatggagattctctacccgctggctttgccttcctgaagggctctgccagcaccagttcatctgccgagcagccactggggatcacccaaatgcccaaagctgaggtcaatctaggaggtctttctagtctcgtcgtcaacactccaattacctctgtgagtctatcacattccagttctgagagcagcaaaatgagcgaatccaaagaccaggagaataattgcgaaagacccaaagaatcaaatgtcctgcaccccaatggagagtgtcctgtcaagtccgagcctacagagccaggtgacgaagacgaggaggacgcatattctaacgagctcgatgatgaggaggtgctcggcgaactcaccgattccatcgggaataaagactttcctttactgaatcagtccatttcaccattgtccagctctgttctcaaatttattgaaaagggaacctcttcatcttcagccactgtgtcagacgacacagaaaagaagaagcaaacagcggcagtgagagctagtggttccgttgcaagcaactacggcatttcaggcaaggacttcgcggatgcaagcgcgtcaaaggactcagctacagccgctcaccctagcgagatagccaggggcgatgaggatagctcagcaacgccacatcagcatggttttacaccatcgacacctggaacccctggacctggcggtgacggaagccccggatccggtattgaatgtcccaaatgtgacacagtgttagggtctagccggtcgctgggaggtcacatgacaatgatgcactcgcgaaactcttgtaaaacactgaagtgtccaaaatgtaattggcattataaatatcagcagacgcttgaggcacacatgaaagagaagcaccccgagcccggaggcagctgtgtgtattgcaagacaggacagccacatccacgtcttgcccgaggagagtcatacacatgcggatacaagcctttcagatgcgaggtgtgtaactactcaacaaccaccaaggggaatctcagcattcatatgcagagtgataagcacctgaacaatgttcagaatttgcagaatggcaatggcgagcaggtgtttgggcatagcgcacccgcaccgaacacctccttatctgggtgcggtacccctagtcctagtaagcctaagcaaaaaccgacatggcggtgtgaggtatgcgattacgagacaaatgtcgccaggaatctgaggatccacatgaccagcgagaaacatatgcacaatatgatgcttttgcagcagaacatgaaacagatacagcataacctgcatttgggtttggctccggcagaagctgaactgtatcaatattacctagctcagaacataggattaaccggcatgaaattagaaaaccctgccgatccgcaattgatgattaacccttttcagctcgacccagcaaccgccgcagccctggctccagggctgggcgagttgagcccctacatttcggatccagcgctcaagttgttccagtgtgcagtctgcaacaaatttacgtctgacagcctagaagctctttcagtccacgtgagttctgagcggtctcttcctgaggaggaatggcgcgcagttatcggggacatctaccagtgcaagctctgtaactataatactcagctgaaagctaatttccagctccactgtaaaaccgataagcacatgcagaagtaccagcttgtagcacatattaaggaaggcggaaagagcaacgaatggcggctcaaatgcatcgctatcgggaatccagtgcacctgaagtgcaatgcatgcgattactatacgaactcggtggataaactgaggcttcacacgacaaatcaccgccatgaagctgctttgaagttgtataaacatctccaaaagcaggagggagccgtgaatccggagagttgctactactactgcgccgtgtgtgactacaccaccaaggtcaagcttaatctggtgcagcatgtccggagtgtgaagcatcaacagacagaaggcttgcggaaattacagctgcaccagcagggcctcgctcctgaagaagacaacctgtccgagatattctttgttaaggactgtccaccaaatgagctggagacggcctcccttggtgccagaacttgcgacgatgatctgaccgagcaacagctccgcagtacctccgaggagcagtctgaagaggctgaaggagcgataaagcctaccgctgttgccgaggacgacgagaaggatactagcgaacgcgataactccgagggtaaaaactcaaacaaagatagcgggataattactcctgagaaggagctgaaggtgagcgtggctgggggtacccaaccgttgttacttgcaaaagaggaggatgttgccactaaaagatcaaaacccaccgaggacaataagttctgccacgagcagttctatcagtgcccatattgcaattacaactcccgggaccaaagccgcatccagatgcacgtgctgtctcagcactctgtgcagcccgtgatatgctgccctttgtgtcaggacgttctcagcaataagatgcacctacagcttcacttgacccaccttcacagtgttagccccgactgtgtggagaaactactcatgaccgtgcctgtccctgacgttatgatgcccaattcgatgctgcttcccgcagccgcatctgagaaatccgaacgcgacactcctgccgctgttactgccgaagggtctggaaagtatagtggagagtcacctatggacgacaaatccatggcagggctggaggattctaaagccaacgtggaagtgaagaacgaggagcaaaagcctacgaaggagcccctagaggtttcggaatggaataagaactcttccaaagatgtaaagatccccgataccttgcaggatcagctgaatgaacagcagaaacgccagcctttaagtgtgtcagaccgacacgtgtataagtatcggtgtaatcattgttccttagccttcaaaaccatgcagaagcttcagattcattctcaataccatgcgatccgagccgcaactatgtgtaatctatgtcaacgttccttccggacttttcaggcgctaaagaaacatctggaagcgggacatcctgagctttctgaggctgagttgcagcaactttatgcctcccttccggtgaacggcgaactgtgggcagaatccgagaccatgtcccaggacgatcacggactcgaacaggaaatggagagggagtatgaagtagaccacgaggggaaggcttcacccgtgggatctgacagctctagtattcctgacgacatgggttctgagcctaaacgcacccttccatttcgcaaaggccctaactttaccatggaaaaattcttggacccttctagaccttataagtgtactgtgtgcaaggaatcatttacccagaagaacattttattagtgcactacaattctgtctctcatctccacaaattaaagaaagtcctccaggaagcctcctcccctgtgccccaggagacgaattctaacactgacaacaagccgtacaagtgttctatttgcaatgttgcctactcccagtcgtccactctggagatccacatgcgctctgtgctgcaccagactaaggctagggcggctaaactcgagccgtcgggacatgtagctggaggccactccatcgcggctaatgtgaattcacctggacaggggatgctggactcaatgtcccttgccgctgtgaactcgaaggacacccacctcgacgctaaggagctgaataagaagcagaccccagatctgatctcagcccagcccgctcaccatccccctcagagccccgctcagatccagatgcaattgcagcacgagctccagcagcaggccgcattctttcagccccagttcctcaatcccgcttttctgccacattttccaatgactcccgaggctcttctgcagttccagcagccacagtttctgttcccattctacatccctggcactgagttcagtctgggccctgacctcggactgccagggtccgcaacttttggtatgcccggaatgaccgggatggccggatctttgctcgaggatttaaagcagcagattcagactcagcatcacgtgggacagactcagctccaaatccttcagcagcaggcgcaacagtatcaggccacacagcctcagcttcaaccacagaaacagcagcagcagcctccaccaccacagcagcaacagcagcagcaggccagcaagctcctaaagcaggaacagtctaatatcgtttctgctgattgtcaaattatgaaagacgtgccctcttacaaggaggctgaggatatctccgagaagccagaaaaacctaaacaggagttcatctccgagggggaggggttgaaagaaggcaaggacaccaagaagcaaaagagcctggaaccatccatccctcctccacgcatcgccagcggcgctcgtggtaatgctgcgaaggccctgctcgagaattttggcttcgagttagtgatccagtacaatgagaatcggcaaaaggttcagaagaagggaaaaagtggtgagggagaaaacactgacaaactcgaatgtggcacctgtgggaagctattctcaaacgttctgatccttaagtcccaccaggaacatgtgcatgggcagtttttcccgtatgccgctctggaaaagttcgcaaggcagtatcgcgaggcttatgataagttgtatcccatttctcccagctcccctgaaactcccccacctccaccccctcctccccctttgccaccggcacccccacagccaagctccatgggtccggtgaagattccgaacaccgtctcaacaccactgcaggcaccaccgcctactcccccacccccaccccctcctcctccaccacccccaccaccccctcctccacctccacctagcgcccctccccaggttcagcttcccgtttcactagacttgccactgttcccaagcattatgatgcagcctgttcagcaccccgctctgcccccacagctggccttgcagctcccccagatggatgctttaagcgccgatctcactcagttatgccagcagcagctgggactggaccctaattttttgcgccactcacagttcaagcgtccgagaacccggattactgatgaccagctgaagatactgcgggcttatttcgatattaataattccccttctgaggagcagatccaagagatggctgagaagtccggcttgtcccagaaagtgattaagcattggtttcgcaacaccctctttaaagagcgccaaaggaacaaagattcaccttataacttttccaatcctccaatcaccgtcctggaagacatcaggattgacccacagcccacttctctggaacactacaagagcgatgcctccttctctaaacggtcgtcaaggacacgattcacagactaccaactgagggtcctgcaggacttttttgatactaatgcgtaccctaaagacgatgagatagagcagcttagcacagtgcttaaccttcccacccgcgtgattgttgtgtggttccagaacgctagacagaaggccaggaagtcatacgagaaccaggccgagacaaaggacaacgagaagcgcgagttgacaaatgaacgctacattcgtacctctaacatgcaatatcagtgcaaaaagtgtaacgtcgtgtttcctcgaatatttgacctgattacacatcagaagaaacagtgttataaggacgaagacgatgacgcacaagatgaatcccaaactgaagattcgatggacgcaaccgatcaggtagtttacaagcattgcactgttagtggccagaccgacgccgctaagaatgccgctgcccctgctgcctcatctggcagcggtacgtcaactcccttgataccctctcccaaacccgagcctgaaaaaacatctcccaagcccgagtacccagccgagaagcctaaacaaagcgacccaagcccaccgtcccaggggacgaagccagcactgcctctggcttccacaagcagcgaccctccgcaggcatccacagcgcagccacagcctcagccgcagccccctaagcagcctcagctcatcggcagaccaccgagtgccagtcagacccccgttccttcctctccactacaaatctccatgactagccttcagaattcattgccccctcagctgctgcagtaccagtgcgaccagtgtacggtcgcattccctactctggagctttggcaggaacaccagcacatgcacttcctggccgctcagaaccagtttctccacagccctttcctggaacggcctatggatatgccctacatgatcttcgacccaaacaatcctttgatgacgggtcaactgctggggtcttcattgacccagatgccaccacaggctagcagtagccacaccaccgctcccacaacagtcgcggcttccttaaaacggaagctggatgataaagaagataacaattgttccgaaaaagaggggggaaactccggcgaagaccagcatcgggataagcgtctgcgcacgactataacgcccgaacaactggagatcctgtacgagaagtatcttttggactcaaatcccacaagaaaaatgcttgatcacatcgcgagggaagttggactgaagaagagagttgtgcaggtgtggtttcagaataccagagcacgtgaacgcaagggccagtttcgagccgtcggaccggcacagtctcacaaacgatgtcctttttgtagagcgttattcaaggctaaatcagcgttggaaagccatatcaggtcacggcactggaacgagggcaaacaggccggatatagtctgccaccttcaccactgatcagcaccgaagacggtggcgaatcgcctcagaagtacatttactttgattacccatccctaccactgacgaaaatcgacctgagctccgagaacgagctcgcgtcgaccgttagtacaccggtgagcaagacagccgagctctctcctaagaatctgctttctccttcttctttcaaggctgagtgttctgaggatgtggaaaatctcaatgcaccacctgccgaagccggatacgatcagaacaaaacagacttcgacgagaccagcagtattaatactgcaatcagcgacgcaactacgggggacgaaggaaacaccgagatggaaagtacgacaggtagctcaggcgacgtgaagcccgcactgtctccaaaagaaccgaaaacactagatactctgccgaaaccagctaccactccaaccaccgaggtttgcgacgacaaatttctgttttcgctgacttcaccctctattcattttaatgataaggatggtgatcacgaccagagcttttatatcacagacgacccagacgacaatgccgatcgcagcgagacttctagcatcgccgacccttcttccccgaaccctttcggatccagcaatccatttaaaagcaagtcaaacgacagaccaggccacaagcgattccgcacacagatgagcaatttacagttgaaagtgctcaaagcatgcttctccgattataggacccccacgatgcaagagtgtgaaatgttgggaaacgaaatagggctgccaaaacgggtggtgcaggtctggttccagaatgcccgagcgaaggaaaagaagttcaagattaacatcggtaaacccttcatgatcaatcagggtggcactgaaggcaccaaaccagaatgtaccctgtgtggagtgaaatactctgccagactcagcatacgcgaccacatcttcagcaagcagcatatttctaaagtaagggaaaccgtcggttcccagcttgatcgcgagaaggattacctggcaccaaccactgtgcggcagcttatggcacagcaagagctggacaggattaagaaggccagtgatgtgctgggactgactgttcagcagcctggcatgatggacagctctagtttacatggcatctctctcccgactgcttatcctggacttcctgggctccctccagttcttctgcccggaatgaacggcccttcttccctgcctggctttccccagaatagtaacactttgacgccaccaggcgctggaatgctaggctttccaacaagtgccacatcatcacctgcgctctccctgtcctctgcgcctacgaaacctctgttgcagacccccccacccccacctcctccccctccgcctccgccttccagcagtttatccggccagcaaactgagcagcagaacaaggagtcggagaagaagcagactaaaccaaacaaagtgaagaagattaaggaggaggagttagaggcgacgaagcccgagaaacatccaaaaaaggaagagaagatttcttccgcactgagcgtgttgggcaaggtcgtgggggaaacgcacgtcgaccctatccaattacaggccttgcaaaacgccattgccggagaccctgccagctttataggcggacagtttctgccctacttcatacctggctttgcatcatatttcaccccccagctccctggcacagtccagggcggttacttccctccagtgtgtggaatggaatctttgtttccatatggccctactatgccgcagacgctagcaggcctgtccccgggagcactcctgcaacagtaccagcagtatcaacagaatctgcaggagtccctgcagaagcagcagaaacagcaacaggaacagcaacagaaacctgtccaggctaagacttctaaagtcgaaagcgatcagccccaaaattccaacgacgcctccgagactaaggaagacaagtctaccgcaacagagagcacgaaggaggagcctcagctcgagtccaaatctgctgacttcagcgacacatacgtcgttccgtttgtgaagtacgagtttatctgccgcaaatgccagatgatgttcaccgatgaggacgcggcagtgaaccaccagaagagcttctgttattttgggcagcccctaatcgatcctcaagaaacagtcctcagggtgccagtgagcaaataccagtgtttagcctgcgacgtagcgatctctggaaacgaagctttgtcccagcatcttcagagttccttacataaggaaaaaacaatcaaacaggccatgaggaatgcaaaggagcacgtgcgtctacttccccacagcgtttgctccccaaacccgaacactacgtcgacttcacagtctgctgcatccagcaataatacttacccacacctctcctgctttagtatgaagagttggcctaacattttattccaggcctcggccagaagggccgcttctcctccctcctctcccccatccctgtccttgccgtcaaccgtcacatctagcctctgctccacaagtggggtacagactagcctgcccaccgagtcatgtagtgacgaaagtgacagcgaattgtcacaaaagctggaagatctggacaattcactagaggtaaaggccaaaccagcatcgggacttgacggcaattttaatagcatcagaatggatatgtttagtgtgtag

SEQ ID NO: 309059 - DNA, 10704 bp, Artificial Sequence
  derived and/or modified sequence
atggaaacatgtgattcacctcctatcagccggcaagagaatggccagtctacaagcaagctatgtgggacgacccagcttgataatgaggtgcccgaaaaggttgcaggaatggaacccgatcgagagaattcttctaccgacgataacttaaagactgatgaaagaaaatcggaggccctgctcgggttcagtgtggaaaacgcagccgccactcaggtcactagtgctaaggaaatcccgtgtaatgaatgtgccactagctttccatcccttcaaaagtatatggaacaccactgccccaatgctaggctgccggttctcaaagatgataacgagagtgagatctcagagcttgaggattctgacgtagagaatctaaccggcgaaatcgtgtaccagcccgatggttctgcatacatcatcgaagactctaaggagagcggacaaaacgcccagactggcgctaattccaaacttttctctacagcaatgtttttagactctctggccagcgcgggggagaagagtgaccaatcggcttccgctcccatgtctttctatccccaaattattaacacgttccatatcgccagctctctcggaaagccctttactgcggaccaagcattcccaaatacctccgcccttgcgggagtgggcccagtactgcactccttcagggtgtatgacctgagacataagcgagagaaggactacctcaccagtgatgggagcgctaaaaacagttgtgtgagtaaggacgtgccaaataatgtagacctgagtaaattcgacgggtgcgtatcagacggtaagcgtaaacccgtacttatgtgtttcctgtgtaaactgtcttttggatatatacgcagcttcgtgacgcatgcagtccatgatcaccgtatgaccctaaatgacgaagaacagaagctactgagcaataagtgcgtgtcagctattattcaaggtataggtaaggataaggaacctctcatcagctttctggagcctaagaagtcaacaagcgtgtacccacatttttccaccactaacctgataggacctgacccgacttttcgcgggctctggagcgccttccatgtggagaatggggacagcttgccggcgggatttgccttcttaaaaggctccgcttctacgtcctcctctgccgagcagcctttaggcatcacgcagatgcccaaggcagaggtaaacctcgggggactaagctcactcgtcgtaaatacccccattacttcagtctccctgagtcactctagctctgagtcctccaaaatgtctgagtccaaggaccaggaaaataactgtgaacggcccaaagaatccaatgtcctacacccaaacggggaatgtccagtaaaaagcgagccaactgagcccggggatgaggacgaggaggatgcgtattcaaacgaactcgacgacgaggaggtgctgggcgaactgacggacagtatcggcaacaaagattttccgcttctaaatcagtccatcagtccccttagttcaagtgttctgaagttcatcgagaaaggcacaagctcatcatcagccacagtgagcgatgacaccgaaaagaaaaaacagacagctgctgtcagggcgagcggatccgtcgcctcgaattatggcattagcggaaaagatttcgccgatgcttctgcttccaaggacagtgcaactgccgctcacccgagcgaaatcgcacgaggagatgaagactcatccgccaccccccaccaacatggctttactccaagtacccctggaactcctgggccagggggcgacgggagccctggctcagggattgagtgccccaagtgtgataccgtgctgggatcctctcggagccttggagggcacatgacaatgatgcatagtaggaatagctgtaaaaccctcaagtgtcccaagtgcaattggcactacaaataccaacagacactggaagcccacatgaaggaaaagcatcccgaacccggagggtcttgcgtgtattgcaaaaccggacagccccaccccagactggcgcgtggagaatcttatacttgtggctacaaacctttccgctgcgaagtctgcaactactccacaacaacaaaaggcaatctgtccatacatatgcaatcagataagcacctgaataatgtccagaaccttcaaaatggaaatggagagcaggtgtttgggcactccgctccagcacccaacacctcactgtccggatgtggcaccccgagtccttcaaagccaaaacaaaagcccacatggcggtgtgaagtctgtgactacgaaacaaacgttgcgcgtaatctccgaatccatatgaccagtgaaaagcatatgcataatatgatgttgctgcagcaaaacatgaagcagatccagcacaacctgcacttgggcttagcccccgcagaggccgaactgtatcagtactatctcgcccagaacatagggctcacaggcatgaagctggagaacccggcagacccccagctgatgattaatccatttcaactcgatcccgccaccgccgcagctctggcccccggtttaggcgagctgtcaccgtatatcagcgacccagcattgaagctgtttcaatgtgcagtctgcaacaagttcacgtctgattcattagaggccctcagtgtgcacgtctcttccgagagatccttgccagaggaggagtggagagctgtcatcggggacatctatcaatgcaagctttgcaactataacacgcagctcaaggccaatttccaactgcactgcaagaccgataaacatatgcagaaatatcaactggttgcccacattaaagagggcgggaaatctaatgagtggaggctgaagtgtattgcaatcggcaatccagtccacttgaaatgcaacgcgtgcgattactacactaacagtgtggacaagctgcgtctacacacgacaaaccaccgacacgaggccgccctcaaactatacaaacacttgcaaaagcaggaaggcgctgtgaacccagagtcttgctactactactgcgcggtgtgcgactacaccaccaaggttaagcttaatttggtccagcatgtgcggtccgttaagcaccagcagactgaggggctccgaaagctgcaactacaccagcagggactcgccccagaggaagataacctgagcgagatattcttcgtgaaagattgcccccccaacgagctcgagaccgcctcactgggtgccaggacctgtgacgacgatttgaccgagcagcatgaggaggctgagggggcgatcaagcctacggccgtcgcggaggacgatgagaaagatacctctgagagagataattctgagggcaagaactctaacaaagattcagtcagtgttgccggcgggacacaacccctcttgttagcaaaagaggaagacgtcgccacaaaacgatccaagcctacagaggacaacaaattttgtcacgagcaattttaccagtgtccatactgcaattacaactctagagaccagtcacggatacagatgcatgttctcagccagcactcagtacagcctgtgatctgttgcccattgtgtcaagacgtgctgagcaacaagatgcaccttcaattacatctgacccacctacactccgtctcgccagactgtgtggaaaaattgctgatgaccgtgcctgtcccggacgtcatgatgcctaactccatgctgctccctgcagccgcctcagaaaagagtgagagagacacccccgctgctgtaacagccgaaggctccggtaagtacagcggcgagtcaccaatggatgataagagcatggctgggctcgaggacagcaaagctaacgtcgaagtgaagaatgaggagcagaagcccaccaaagagcccttggaggtatcagagtggaacaaaaacagtagcaaagacgtgaagatccccgatactctgcaagatcagctgaatgaacagcaaaagcggcagcctttatcagtcagcgacaggcatgtgtacaaatacagatgtaaccattgcagcctggctttcaaaaccatgcagaaactgcagatccattctcagtatcacgctattcgcgcagccaccatgtgcaacctgtgccagcgctcctttaggaccttccaagcattgaagaagcacttggaggcaggtcaccctgaactctctgaagctgagttacagcagttgtatgcctccctgcctgttaacggagaactctgggctgagtctgagactatgtcacaggatgatcatggcttagaacaggagatggagcgggagtatgaagtggaccacgagggcaaggcaagcccagtggggtccgattcctccagtatccccgacgacatgggttctgagcccaaaaggacccttccctttagaaagggccctaacttcaccatggaaaaattcctcgatccatcaaggccatacaagtgcacagtgtgcaaagagtcttttacccaaaagaacatactgctggtccattacaacagtgtctcacacttacataagctcaaaaaagtattacaggaagcctccagcccagtgccacaggagactaactcgaacactgataataagccctacaagtgtagtatttgcaacgtcgcctactctcaatccagcactctcgaaatccacatgaggagcgttctccaccagactaaagcaagagcagccaaacttgaaccaagtggacatgtggccggcggtcacagcatagctgcaaatgttaattctccgggtcaggggatgttggactctatgtccctcgccgctgtcaatagtaaggacactcatctggatgccaaagagttgaacaaaaaacagacaccggatctgatctcggctcagccagctcatcaccccccacagtcccctgcccaaatccagatgcagttacagcacgaactgcagcagcaggctgcctttttccagccccaatttttgaacccagccttcctgccacacttccccatgacccccgaggccctactacagtttcaacaacctcagtttctgttccccttttacattcctggaacagagttttccctggggcctgacctgggcctgcccggatcggcgaccttcggcatgcccggaatgactggtatggcaggctccctgttggaagacctgaaacagcagatccaaacccaacatcatgtcggacaaacccagctacagattttgcagcaacaagcccagcaataccaagctacacagcctcagctgcaacctcagaagcagcaacagcagccccctcctccacagcagcagcaacagcaacaggcatctaagctcctgaaacaagaacaatctaatattgttagtgcggactgccagattatgaaggacgtgcctagttacaaggaagccgaggatattagtgaaaagccagaaaagcccaagcaggaattcatctccgaaggagagggcttaaaggaaggtaaagacactaaaaaacagaagtccctggagcctagcatcccgccgccaaggattgcttcaggcgcacgaggcaatgctgccaaagctctgctggaaaacttcggattcgagctggtcatccagtacaatgaaaatcgacagaaagtacagaagaagggaaagtcaggcgagggcgagaacactgataagctggaatgtgggacctgcggtaagttgttctctaatgtattaattctcaaaagccatcaggaacacgtccatggacagttcttcccctatgcagccttggagaaattcgcccggcagtaccgcgaagcttatgacaaactgtaccctatcagtccatccagccctgaaacaccgccccctccgcctccaccacctcccctgccaccagcacccccccagccctcatctatgggaccagtcaagatcccaaacaccgtcagcaccccactccaagctccccccccaacccctcctccaccaccgccaccacccccacctcccccaccccctccccctcccccccccccttcggctccccctcaggtgcaactcccagtttctctagatctgcccctcttcccaagcatcatgatgcaaccagtgcaacacccggcattacctcctcagcttgccctccaattgcctcagatggatgctctgagtgcggacttaacacagttatgccagcagcagttaggtctggaccctaacttcctgcgccattcacagttcaaacgacctcgcacacgcattaccgatgatcaattgaagattctcagagcctatttcgatattaataattcaccttccgaagagcagatacaggaaatggctgagaagagtggcctgagtcaaaaggtcattaagcactggttcaggaataccctattcaaggaaagacaaaggaataaggactccccctacaacttctcaaatccccccatcacagtcctcgaggacattaggatagacccgcagcccacatcattggagcattacaagtccgacgctagcttctcaaagaggagctcacggacacgctttacagattaccagttgcgggtcttgcaggacttctttgacaccaatgcttatcccaaggacgatgagatcgagcagttgagtacagtcctgaacttgccaacccgtgttatcgttgtgtggttccaaaacgcccgtcagaaggcaaggaaatcatatgagaaccaggccgagaccaaagataacgagaagcgggaactcacaaacgaaaggtacattaggacatcaaacatgcaataccagtgcaaaaagtgcaatgtggtctttccacgaatatttgatctcatcacccaccagaagaagcagtgctataaagacgaggacgatgacgcgcaagatgagagtcagactgaagactctatggatgctacagaccaagtcgtgtacaagcactgcactgtcagcggccagaccgatgccgctaagaacgctgcagctccagctgcctcctccggctctggcacaagcacacctctgatccccagcccaaaacctgagccggaaaagacttctcccaaacccgagtaccccgccgagaagcctaagcaatccgacccaagtcctccctcccaaggaacaaaacccgcccttccacttgctagcacctccagcgaccccccccaggcatccaccgcccagccccagcctcagccacagccccctaagcagccccagttaataggccgccccccttcagcttcccaaactcctgtgccaagtagtcccctgcaaattagcatgacgtcgcttcaaaactcactgcctccacagttgctacagtatcagtgcgaccagtgtactgtagccttccctacgctggagctgtggcaggagcaccaacatatgcatttcctcgctgctcaaaaccagttcctccattctccttttcttgaaaggccgatggacatgccttacatgatcttcgatcccaacaaccctcttatgaccgggcagcttttgggctcctctctcactcagatgccccctcaggcctcttcaagtcatactactgcacccacaaccgttgcagcatcactcaagcgcaagctcgacgacaaagaagataataactgttctgaaaaggaggggggcaactcaggcgaagatcagcatagggacaagcgattgcggacaactattacccctgagcagctcgagatcctttatgagaagtacctgctggactctaaccctacgaggaaaatgctggaccacattgccagagaggtgggcctaaaaaaaagggtcgttcaggtctggtttcagaatacgcgcgcccgcgaacgaaagggccagtttagagcagtcggtccagcccagtcccacaaaagatgccctttctgtcgcgccctcttcaaagcaaaatctgcgctggagtcccacattaggagtcggcattggaacgaaggtaagcaggcaggatactctcttcctccatcaccacttatttccaccgaagatggcggcgagagtccccagaaatacatctacttcgattatccatccttgcccctcaccaaaatcgacctctccagtgagaatgagctggccagtaccgtaagcacccccgtatctaaaacagcggagctgtctccaaaaaacctgttgagtcctagctcttttaaagccgaatgcagcgaagacgtcgagaacctgaacgcccctcctgccgaggcagggtatgaccagaataagaccgacttcgacgagacctcatcaatcaatacagctatttcggacgcaaccacgggagacgagggtaacaccgagatggaatctacgacaggcagttccggagacgttaaaccagccctttccccaaaggagcctaagaccctagataccttacctaaacccgccaccactccaacaacggaagtttgcgacgacaagttcctcttttctttaacatctccttccatccatttcaatgacaaggacggagaccacgaccagtccttctacattacagatgacccagacgacaatgcagaccgatccgagacatcatcaatagccgaccccagttcaccaaatccctttggtagctctaatcccttcaagagcaaatcaaacgatcgtccagggcacaaaaggttcagaacacagatgagcaatctgcagctaaaagtcctcaaagcatgcttttcagattacaggacccccacaatgcaggagtgcgaaatgctcggcaacgaaatcggccttccaaagcgagtggtacaggtgtggttccaaaacgccagggcaaaggagaaaaaattcaaaatcaatatcggcaagccatttatgatcaaccaagggggaactgagggaacgaaacctgaatgcacgttgtgtggcgtgaaatatagtgcaagactgagtatcagagatcatatattctccaagcagcacatatcgaaggtgcgcgaaaccgtgggcagtcaattggaccgcgagaaagactacttggcgcccactacagtccgccagttgatggcccagcaagaattggataggattaagaaggcttctgacgttctcggacttacagtacaacagccaggtatgatggactcatccagcctccacgggatctcactcccgacagcatacccgggattaccaggccttccccctgtcttgctgcccggcatgaatggcccaagtagtctgcctggctttccccagaatagtaacatcgccagcggaatgctcggtttccctacttcagccacatcaagtccagccctgtccctcagcagtgcaccaacaaagcccctgcttcaaaccccgcccccacccccacccccccctccaccaccaccatcctcgagcctctcaggtcagcagacagagcaacaaaataaagagtccgagaagaagcagacaaaaccaaacaaggttaagaagatcaaagaggaggaactggaggccactaaaccagaaaaacatcctaaaaaggaagagaagattagctccgccctcagtgttcttggcaaggttgtgggtgagacccatgtagacccaatccaactccaggcattacagaacgcaatcgcaggcgacccagcaagtttcattggggggcagtttcttccgtactttattcccgggttcgcctcttattttactccacagttacccggcactgtgcaaggtggctattttccacccgtttgcgggatggaatctttgttcccctatgggccaacaatgcctcagaccttggcggggctttccccaggagcactgctgcaacagtaccagcagtaccagcagaaccttcaggaaagcctgcaaaaacagcagaaacagcaacaagagcagcagcagaagcccgtgcaagccaagactagtaaggttgagtctgaccagccgcagaattcaaacgacgcatccgagacaaaggaggacaagtccacagcgaccgagagcactaaggaagagccccagctggagtccaagagcgcagacttttcagacacatacgtggtcccatttgtgaagtacgaatttatttgcaggaagtgccaaatgatgttcacagacgaagatgctgcggttaatcaccagaagagcttctgttactttggacaacctctgatcgatccccaagaaacagtgttgagggtacctgtgagtaaataccaatgcctcgcctgcgatgttgccattagcggtaatgaggctctctcacagcatctacagagctcgctgcacaaggagaagacaattaagcaggccatgagaaacgccaaggaacacgtacggctcctgccacactcagtatgttctcctaaccctaacactaccagtacgtcacagagcgccgccagtagtaacaacacctaccctcacctgtcttgcttttccatgaagagttggcccaacattttgtttcaagcgtccgcccggcgcgccgcatcaccaccaagcagtccccctagcttgagccttccgtccactgtcacttccagtctctgctctacaagcggcgtgcagacaagcctacccaccgagtcgtgctccgatgaatccgattcagagctgtcccaaaagctcgaggacctggataacagtttggaagtgaaagccaagcccgcgtctggcctagacggcaacttcaattctatcagaatggacatgttttctgtctag

SEQ ID NO: 309060 - DNA, 10704 bp, Artificial Sequence
  derived and/or modified sequence
atggaaacatgtgattcacctcctatcagccggcaagagaatggccagtctacaagcaagctatgtgggacgacccagcttgataatgaggtgcccgaaaaggttgcaggaatggaacccgatcgagagaattcttctaccgacgataacttaaagactgatgaaagaaaatcggaggccctgctcgggttcagtgtggaaaacgcagccgccactcaggtcactagtgctaaggaaatcccgtgtaatgaatgtgccactagctttccatcccttcaaaagtatatggaacaccactgccccaacgcacgcctgcctgttcttaaagacgataacgaatccgaaatctcagagctagaggacagcgatgtggaaaacttaactggagaaattgtgtatcagccagatggctctgcatatattattgaagacagcaaagaaagcggccagaacgcccaaacaggcgccaacagcaaactcttctccaccgcaatgtttttggactcattagcctccgcaggggagaaatctgaccagtctgcctcggctcctatgagcttctaccctcagattatcaacacatttcatatcgcgagttccttgggaaaacccttcactgccgatcaggcttttccaaatacaagcgccttagcaggcgtgggacccgtgctgcatagctttagggtttatgaccttcgccacaagcgagaaaaggattacttaacatctgacggatctgccaaaaatagctgcgtgtcaaaggacgtgcctaataatgtggaccttagtaaattcgatggctgcgtgtctgatggtaagagaaaacccgtcttaatgtgtttcctgtgtaaattatcttttggatatatccgcagcttcgtaacacatgccgtccacgaccatagaatgacattgaatgacgaagaacaaaagctgcttagtaataagtgtgtgagcgccataatacagggaattgggaaagataaagagccactcatttcattcctggagcctaagaagtccacctccgtctacccccacttcagcacaaccaatcttatcggacccgatcccactttcagagggctgtggtccgcttttcacgtcgagaatggtgactcactgccagccggattcgcttttcttaagggctccgcatcaacctcgtcctccgcagagcagcccctgggcatcacccagatgcccaaagccgaagttaatctgggggggttgtccagcttggtagtgaataccccaatcacgagcgtgagtctgagtcactcttccagtgaatccagtaaaatgagtgaatctaaagatcaggaaaataactgtgagcgtcctaaagagagcaacgtgttgcacccaaatggtgaatgccctgttaagtccgaacctaccgagcccggcgacgaagatgaagaggatgcctattcgaatgagctcgacgatgaagaagtgcttggagagttgacagactccatcgggaataaagacttcccacttttaaaccagagcataagtcctttgtcatccagtgtattgaagttcattgagaagggaacctcttctagctcagctacagtctccgatgatacagaaaagaagaaacagacagccgcagtgagagcatccggcagtgttgcttccaattacggcatttctggtaaagatttcgcagacgcatcagcctccaaggacagtgccactgctgcgcacccctcagagatagcccgaggcgatgaagatagcagcgcgacaccacaccagcatggattcacaccatccacaccgggaactccgggccctggtggggatgggtcacccggcagcggaatcgaatgccccaaatgtgacacggtactgggaagctccaggtcgctgggcggccacatgacaatgatgcacagtcggaattcatgcaaaactttgaagtgcccaaaatgcaactggcattataagtaccaacagacactagaagcgcacatgaaagaaaagcatccagaaccaggaggctcttgtgtatattgcaaaacaggtcagcctcatccacgcttagcacgcggcgagtcttacacctgcggatacaagcctttccgctgcgaggtctgcaactattctactactaccaagggaaatctttcaatccatatgcaatccgacaaacacctgaacaatgtccaaaacttacaaaacggaaatggggaacaagttttcggccacagcgctccagcccccaacacttctctttcaggttgtggaacgccctctccatcaaagcctaagcaaaagcccacatggcggtgcgaggtgtgcgattacgaaaccaatgttgcacggaacctccgaattcacatgacttccgagaaacacatgcacaatatgatgcttctgcaacagaatatgaagcagattcagcataacctccatctaggactggcaccagcagaagcagaactgtaccagtactacctggcacaaaacatcggcctcactggaatgaagcttgaaaaccccgcggacccccaactcatgatcaacccctttcaactggatccggccaccgccgcagcactagccccaggtctcggagagttgtcaccctatatttctgacccagccttaaaactatttcagtgtgccgtgtgcaacaaattcactagtgacagtttagaagccctgtcagtgcacgtcagctctgaacgcagcctgccagaggaagaatggcgcgcagtcatcggagacatttaccagtgcaaactgtgcaactacaacacccaacttaaggctaactttcagttgcactgcaaaacagataagcacatgcagaagtatcagctcgtagctcacataaaagaaggaggcaagtcaaacgagtggcgcctgaaatgtatagcgatcggcaaccccgttcatttaaaatgtaacgcatgtgactattacacaaactccgtcgacaaattgaggttacacactacaaatcatagacatgaagccgctcttaaactatataagcatctacagaagcaggaaggcgctgttaaccccgaaagttgctactactactgtgcagtgtgtgactatactactaaagtgaagctgaatctggtgcaacacgtcagatcagtgaaacatcaacagaccgaagggcttagaaaactgcagctccaccaacagggtttggcccccgaggaagataatttgtcggaaatcttctttgttaaagactgccctccgaatgaactggagactgcttcattaggggcacgaacatgcgatgacgatttgaccgagcaacatgaggaagccgaaggagcaatcaagccaacagcagtcgcagaagacgacgagaaagacaccagtgagcgcgacaacagtgaaggaaagaactctaataaggactcagtgagtgtggccggcggcactcaacctttgctccttgcaaaagaggaggatgttgctactaagaggagtaagcctacggaggataataagttttgccatgagcaattttatcaatgcccatattgtaactataattccagagaccagagcaggattcaaatgcatgtgctgtcccagcactccgtacagcccgtgatctgttgccctctctgccaggacgtgttaagcaataaaatgcacttgcagctgcacctaactcatctccattcagtgtccccagattgtgtagaaaagttgctgatgacggttccagtcccagacgtaatgatgcctaactccatgctgctgcctgctgcagcctccgagaaatcagagcgggatactccagccgccgtgacagccgaaggatctggcaagtatagtggcgaaagtcccatggacgataaaagcatggccggtctagaagattccaaagccaacgtcgaggtgaaaaacgaggagcaaaaacccactaaagaaccgctggaggtctccgaatggaacaagaatagctccaaggacgtgaaaatccctgataccttacaagaccagttaaatgaacagcagaagcgccagcctctgagcgtgagcgacagacatgtctataagtaccgttgtaatcattgctcactagcgttcaagacgatgcagaaattgcaaatacactcgcagtaccacgcaattagagcagctaccatgtgtaatctgtgccaaagatcctttcgaacttttcaagcactcaaaaagcaccttgaggccggacatccagaactctcagaggcagagctccaacaactatatgcgtcattaccggtgaacggggaattatgggcagaaagcgagacaatgagtcaagatgaccacggcctggaacaggagatggagagagaatacgaagtagatcacgagggtaaagctagccctgtgggaagtgatagttccagcattccagacgatatgggaagcgaaccaaaaagaacactgccttttcgcaaggggcccaatttcacaatggagaaattcctggacccaagcaggccatataaatgtacggtgtgcaaagagtcttttacccaaaagaacatactgctggtccattacaacagtgtctcacacttacataagctcaaaaaagtattacaggaagcctccagcccagtgccacaggagactaactcgaacactgataataagccctacaagtgtagtatttgcaacgtcgcctactctcaatccagcactctcgaaatccacatgaggagcgttctccaccagactaaagcaagagcagccaaacttgaaccaagtggacatgtggccggcggtcacagcatagctgcaaatgttaattctccggggcagggaatgcttgattctatgtcactcgccgccgtcaatagtaaagacacacacctggatgccaaagaattaaataaaaagcagacccccgatctcatcagtgcccagcccgcccatcatccaccccaatctcccgctcagatccagatgcagttgcagcatgaactccagcaacaagccgcctttttccaacctcagtttctgaaccccgcattcctgccccacttcccaatgacccctgaggccctcttgcagttccagcaaccccagttcttgttccctttttacatccccgggacagagttttcattaggccctgatttaggactgccaggcagtgccacctttggtatgccaggaatgacaggaatggccggaagcctcctcgaggacttgaagcagcaaatccagactcagcatcacgtcggacaaactcaactgcagatcctccagcagcaagcccagcagtatcaagccactcagccacagctgcaaccccagaagcaacaacagcagcccccaccaccccaacagcaacagcagcaacaggcatctaaattattaaagcaggagcaatctaatatcgtcagcgctgactgtcagattatgaaggacgttccaagttacaaggaggcagaggacatttctgagaagcccgaaaaaccaaagcaagaattcatcagcgaaggagagggactaaaggagggcaaggacaccaaaaagcagaaaagtctcgaacccagcataccacccccccggatagccagtggagccagagggaatgcggcaaaagccctcctggagaattttgggtttgaactggtcatccaatataatgaaaacagacagaaggttcagaaaaaggggaagtctggtgaaggagaaaataccgataaactcgaatgcggtacatgtggcaaacttttctctaacgtcctcattctgaaatcccatcaagaacatgtccacggccagtttttcccatacgcggcactcgagaaatttgctaggcaataccgagaagcctatgacaaactttaccccattagtccatcttcacccgaaaccccccctccgcctccccctccacccccactaccacccgccccgccacagcctagctcaatgggccctgtgaaaattcctaacaccgtgtccacgcccttgcaggccccacctcctaccccaccacctcctcctccgccgcccccccctccacctccaccaccccctccaccgcctcctagcgcccccccccaggtacagctccctgtaagccttgatttgccactgtttccctccatcatgatgcagcctgtacagcacccagccctgcctccacagcttgcccttcaactaccacaaatggatgctctatcagctgatcttactcagctgtgccagcagcaattaggcctcgacccaaactttcttcgacacagccagtttaaacgccccaggactaggattaccgatgatcagctgaaaattctacgggcctacttcgatattaacaacagcccctcagaagaacagatccaagagatggccgagaagagcgggttgagccagaaagtgatcaagcattggttcaggaacacactcttcaaggaaaggcagagaaataaagactccccatataacttttctaacccccctattaccgtacttgaggacattaggatcgaccctcagccgacttctttagaacattataaatcagacgcttcatttagcaaaagatcttcgcggacccgattcaccgattatcaactccgagtgctacaagacttttttgataccaacgcctatcccaaggatgacgaaattgagcagctgagtacagtgctgaacctgccaacacgcgtgattgtggtctggttccagaacgcacgccagaaagcaagaaaatcgtatgaaaatcaggccgagaccaaagataatgaaaaaagagaactgaccaatgaacgttatattcgcacctccaatatgcagtaccaatgtaaaaaatgcaatgtggtttttccaagaattttcgatctcataacacatcagaagaaacagtgctacaaggatgaggatgatgatgcacaggacgagtctcaaacagaagattcaatggacgcaactgaccaggttgtgtacaagcactgcaccgtgtccggccagactgatgcagcaaaaaatgcggccgcgcctgccgccagcagcgggagcggaaccagtactccactcattccttcgccaaaacccgaacccgaaaagacatcccctaagcccgagtacccagcggaaaagccaaaacagtccgatccaagcccaccatcacagggaactaaacccgcccttcccttagccagtacatcctccgacccccctcaggccagcactgcacaacctcaaccccaaccacaacctccgaagcagccacagcttatcggtaggcccccctcagcttcacaaacccctgtcccttcatcccccctgcagatcagtatgacttctctccaaaatagcctcccaccgcagctcctccagtaccagtgtgaccaatgcaccgtggcttttcctacgttagaactgtggcaggaacaccagcacatgcactttctcgccgctcaaaatcaattcctgcactctccctttctagaacgcccaatggacatgccgtacatgatctttgatccaaataaccctctcatgaccggacagttacttggttcttctctcacacagatgccgccacaagctagcagtagccatacaaccgctcccacaacagttgccgcttccttgaagagaaagctggacgataaggaagataataattgcagtgagaaagaaggcggaaactcaggggaagaccaacacagggacaaacgcttgagaacaacaattactcctgaacaactagaaatcctgtacgagaagtatctgttggattccaaccccacaagaaaaatgttggatcacattgccagagaagtgggcctgaagaaaagggtcgttcaggtctggtttcagaatacgcgcgcccgcgaacgaaagggccagtttagagcagtcggtccagcccagtcccacaaaagatgccctttctgtcgcgccctcttcaaagcaaaatctgcgctggagtcccacattaggagtcggcattggaacgaaggtaagcaggcaggatactctcttcctccatcaccacttatttccaccgaagatggcggcgagagtccccagaaatacatctacttcgattatccatccttgcccctcaccaaaatcgacctctccagtgagaatgagttagcaagcactgtgagtaccccagtcagcaagacagccgaactatcccccaaaaacctcctgagtccctctagctttaaggccgagtgttcagaggacgtggagaacctgaacgccccacccgcagaggcaggttacgatcagaacaagacggactttgacgaaacatcctccataaacactgctatttccgacgcaactaccggagacgaaggtaacactgaaatggagtccaccaccgggagttcaggtgatgtgaaacctgccctttcaccaaaagagcccaaaaccttggatacacttcctaaacctgccactaccccgaccaccgaagtatgcgacgataagttcctgttctcgctcacctcacccagcatccatttcaatgacaaagacggcgatcatgaccagtcattctacatcaccgacgatcccgatgataatgcagatcgatccgagacatcttctattgctgatccctcatcaccgaacccatttggatccagcaacccttttaaaagtaagtcaaacgataggcctggccataagcgattcagaacccaaatgagcaatctccaattgaaagttctcaaggcgtgtttcagcgattacagaacccctacaatgcaggaatgtgaaatgcttgggaacgagattggtctgcctaaaagagtggtgcaggtgtggttccaaaatgctagagccaaggaaaaaaagtttaagattaatataggtaaaccatttatgattaaccagggagggaccgagggcaccaaacccgagtgcacattgtgcggcgttaagtactctgctcgtctgagcatcagagatcacatattcagcaagcagcatataagcaaagtgagagagacagtgggatcacagctcgacagggagaaagattatctggcccctactacagtccggcaacttatggcccagcaagaactcgacaggattaagaaggcctctgacgtgctcggtttgacggtgcaacagccaggcatgatggattcaagcagcttacacggaatcagcctccctacagcttacccaggcttgcccgggctcccaccggtcctactacccggcatgaacggccccagttccttgcccgggttcccccagaactccaatattgcatcaggcatgttaggatttcctacaagcgctacctcctctcccgccctgagcctctcttcagctcccaccaagcccctgctgcagaccccccctcctcccccacccccccccccaccacccccatcctccagcctttccggtcagcagacagagcagcagaacaaagagtcagaaaaaaaacagaccaaaccaaacaaagtgaaaaagataaaggaagaggagttagaagcgacaaaaccagagaaacacccgaagaaggaagaaaaaattagtagtgccttatccgtcctgggaaaggtggtcggcgagacccatgtggatccaattcaactacaggcactgcagaatgcaatagcaggagatccagcctcctttattgggggccagtttcttccctactttatccctggattcgcctcctactttaccccccagctccccggcacagtccaaggagggtattttccacccgtctgcgggatggaatcactgtttccatacggcccaacgatgcctcagacactggctggattatctccaggcgccctacttcagcagtatcagcagtatcagcagaacttgcaggaaagtcttcagaagcagcaaaagcagcagcaggagcagcagcaaaaaccagttcaagctaagacctccaaagtagagtcagatcagccccagaattcaaacgatgcctccgagacaaaagaagacaagagcaccgccaccgaaagtactaaagaagagccccaactggagtctaagtccgccgatttttctgacacttatgtggttccattcgttaagtatgagtttatttgtcgcaagtgccaaatgatgttcacagatgaggatgccgctgtgaaccaccaaaagtccttttgctacttcggacaacctctgatagacccccaggagaccgtgctgcgcgttcctgttagtaagtaccaatgcttggcatgtgacgtggccatatctgggaacgaggctctttcccaacacttacagtcttccctacacaaagaaaaaactatcaaacaggccatgcgaaatgctaaagaacatgtccgtcttctcccccacagcgtgtgttcccctaaccccaatacaacctctaccagccagtcagccgcatcttcaaataacacctacccacacctgagctgcttcagtatgaagtcctggcctaacatcctatttcaggcatccgcccgacgagccgcgagcccccccagttcccctccctccctgtccttgccgagtaccgtcacttcaagcctgtgttccacatccggagtgcaaactagcctgcccacagagtcatgcagcgatgagtccgactctgagctgagccaaaaactggaggatcttgataactcacttgaagtgaaagccaaaccagccagtggcctcgatggtaatttcaatagcattcgtatggatatgttctccgtctag

SEQ ID NO: 309061 - DNA, 11091 bp, Artificial Sequence
  derived and/or modified sequence
atttttttaaacagggctaaaacgataataattagcagaataaagacatatcggattttcatttcctttcctccttttcccaaccccttcacaaccaaacagcgagaccgcggtcggcacatgctttaactcctcccggacccccgaggaccgctccatgccccccactttctgctccagcgtttttattttcacccaataaagttcgaggattattttttattttttttgtttttttaatgaaccctctcgttttacttggatgtgatcagctgtaagtaaaataaaagcaaaacaaaaaagaggcgaagatcgagtaggaactgcaggggaaatggaaagtccctgacaggctggatgaaatgagatccccatgtagcaattgccatggaaacctgtgactcccctcctatctcaaggcaggaaaatgggcagagcacatcaaagctatgtggaacgacacaacttgataatgaggtgccagagaaagttgcagggatggagcctgacagggaaaacagctccacagatgacaacctgaaaacggatgagcgcaaaagtgaagccttgctgggtttcagcgttgagaatgcagctgccactcaggttacctcagcaaaggagataccctgcaacgaatgtgccacttcttttcccagtttacagaaatacatggaacaccactgccctaatgcccgccttcctgtcctgaaggatgacaacgagagcgagatcagcgagttagaggacagtgacgtggaaaatctaacaggggagatcgtttaccagcctgatgggtcagcatatataattgaggactccaaagaaagtgggcagaatgcacagactggggcaaatagcaaactcttttctacagcgatgttcctggactccctggcatctgctggagagaagagtgatcagtctgcttctgcacctatgtcgttctacccacagatcatcaacacttttcatatcgcttcatccctcgggaaaccatttacagccgatcaggctttcccaaatacctcagcattagcaggagttggtcctgtgttgcacagtttccgtgtctatgatctccgacacaagagagagaaagactatctaaccagtgatggctcagccaaaaactcctgtgtgtccaaagatgtccctaacaatgtggacttgtccaaattcgatggttgtgttagcgatgggaaaaggaaacctgttttaatgtgtttcttgtgcaagttgtcttttggttatatcaggtcatttgtaacccatgctgtgcatgatcatcggatgaccctcaatgacgaggagcagaagctcctcagtaataaatgcgtctccgccataatacaggggattggcaaagacaaagaacctcttataagctttctggaaccaaaaaaatccacttctgtttatccccatttttctactacaaacctcataggacccgatccaaccttccgcggtttatggagcgcttttcatgttgaaaatggtgactctttgccggctggctttgccttcttaaaaggaagcgcgagcacctcgagctcagcagagcagccgctggggattacccaaatgccaaaggctgaagtgaatctgggggggctgtctagtttagtagtgaacaccccaattacctctgtctccctcagccactcatcgtctgagtctagcaagatgtcagagagcaaagaccaagagaacaactgtgaaaggccaaaagaaagcaacgttttacacccaaacggggagtgccctgtcaaaagtgaacccactgaaccgggagatgaggatgaagaagatgcgtactccaatgaacttgatgacgaggaagtattaggtgaactcaccgatagtattggtaacaaagatttccctctcttaaaccaaagcatttctcctttatcatccagtgtgctaaaatttattgaaaagggtacctcgtcctcctcggcgactgtttctgatgacacagaaaagaaaaaacagactgctgctgttagggccagtggcagtgttgctagtaactatggcatcagtggcaaggactttgcagacgcaagtgccagtaaagacagtgccacagctgctcatccaagtgaaatagcccggggagacgaagacagttcagccactcctcaccagcatggctttaccccgagtactcctggcacaccagggcctggaggagacggctcaccgggcagtggcatcgagtgtccaaagtgcgacactgtgttggggtcttcgaggtctcttggtggtcatatgactatgatgcactcgaggaactcatgcaaaaccctcaaatgtcctaaatgtaactggcactacaaatatcagcagaccctggaggcccatatgaaggagaaacaccctgagccgggtggctcttgtgtttattgtaagactggacagcctcaccccaggcttgcccggggtgagagttacacgtgtggctataaacccttccgttgtgaggtttgtaactactctaccactaccaaaggcaacctcagtattcatatgcagtcggacaagcacctgaacaatgttcagaatctccaaaatggcaatggtgagcaggtgtttggccactctgccccagcccccaacaccagcctcagtggctgcggaacaccctctccgtccaaacccaaacagaaacccacctggcggtgtgaagtttgtgattatgaaaccaatgtcgccaggaacctccgaattcatatgaccagcgaaaagcacatgcataatatgatgcttttgcagcagaacatgaagcagatccagcataatctgcacttgggcctcgccccggcggaagcagagctttatcagtactacctagcccagaacataggcctgaccggaatgaagctggaaaaccctgccgaccctcagctgatgatcaatccattccagctggatccagcgacagcagcggctttggcaccagggctcggagagctgtcaccttatatcagtgacccagcgctgaagctattccagtgtgctgtttgcaacaaattcacctctgacagcctggaggccctaagtgtgcatgtgagcagtgagcgctctctccctgaagaggaatggagggcagtaattggagatatctaccagtgcaagctctgcaactacaacactcagctcaaagccaacttccagctacactgcaagactgataaacatatgcagaaatatcaactggtggctcacattaaagaagggggcaaaagcaatgagtggaggttgaagtgtattgccattggcaaccctgttcacctaaaatgtaacgcctgtgactattacaccaacagtgtggataaattacgcttgcataccaccaatcacaggcacgaggcggccctgaagctctacaagcacttgcagaagcaagagggtgcagtgaatcccgaatcctgctattactactgtgccgtgtgtgattacaccaccaaggtcaagttgaatctggtacaacatgtccgttcggtgaagcatcagcagactgagggcctacggaagctccagctccaccagcaaggcctggcaccagaggaggacaacctcagtgagatcttttttgttaaagattgcccaccaaatgagcttgaaactgcctcattgggagccaggacttgtgatgatgatcttacagagcagcatgaggaggcagaaggagctattaagcctacagcagtggccgaggacgatgaaaaagacacaagtgagagagacaatagtgaaggcaaaaactctaataaagactctgttagtgtggcagggggtacccagccactcctgctggcaaaagaagaggatgttgcaacaaaaaggtcaaaacctacagaggacaataaattctgtcatgaacagttctatcaatgtccttattgtaactacaatagtagggaccaaagtcgtatccagatgcacgtcctatcacagcactcggtgcagccggtcatctgctgtcctctctgtcaggacgtcctcagcaacaaaatgcatctccaactgcatctgacgcatttgcacagtgtgtctccagactgtgtggagaagctgcttatgacagtgcctgtccctgatgtgatgatgccaaacagtatgctactgccagcagctgcctctgagaaatcagagcgggacacacctgcagccgtgacagctgaggggtctgggaaatattcaggtgaaagtccaatggatgacaaaagcatggcaggtctcgaggattcaaaggctaatgtggaagtaaagaatgaggagcagaaaccgactaaagaacccttggaagtctcagaatggaataaaaatagcagtaaggatgtgaaaatccccgacacactgcaagatcaattaaatgaacagcaaaaaaggcaaccgctctctgtttctgaccgtcatgtctacaagtatcgctgtaaccattgtagcttggctttcaaaactatgcagaagcttcagatacattcccagtatcatgcaattcgggctgcgacaatgtgtaacctctgccagcgcagtttccgtacattccaggctttaaaaaaacacttggaagcaggccaccctgaactgagtgaagctgaacttcaacagctatatgcctccttgcccgtgaatggagaactgtgggcagagagcgaaactatgtcccaggatgaccatggcctagagcaggaaatggagagagagtatgaggtggaccacgaagggaaagcaagtcctgtaggaagtgatagtagctctattccagatgacatgggctctgaaccaaagcggaccttaccttttagaaaagggcccaattttacgatggaaaaattccttgatccatctcgtccatataaatgtacagtgtgtaaagagtcattcacccaaaagaacattctcttggtccactataattcagtttctcacttgcataagctgaaaaaagttttgcaggaagcctccagtcctgtcccacaagaaaccaacagcaacacagataacaaaccctacaagtgcagcatctgcaatgttgcatacagccaaagctcaacattggaaatccacatgaggtctgtgctccaccagacaaaggctagggctgcaaagctggagcccagtggtcatgtggctggtgggcacagcattgcagcaaatgtcaacagccctggccaggggatgttagattccatgagtttagcagctgtaaacagcaaagatacccatttagatgccaaagaattaaataaaaagcaaactcctgatttaatctctgctcaacctgcacatcacccaccacagtcaccagcacaaattcagatgcaactacagcacgaattacaacagcaagccgcattctttcagcctcagtttctaaacccagcctttttgcctcattttcctatgaccccagaagcactgctgcagtttcagcagcctcagtttctctttccattttatatacctgggacggagttcagcttggggccagatttgggcttgccaggctctgccacatttgggatgcctggcatgacaggaatggctggctccttgcttgaagacctaaagcagcagattcaaacccaacatcacgttggtcaaactcaactccagatactacagcaacaagcacaacaataccaagccacacagccccagctgcagcctcaaaaacaacagcagcagccaccacctccacagcagcagcagcaacagcaggcaagcaaattattgaaacaagagcaaagtaacatagtgagtgcagactgccaaatcatgaaggatgtgccatcttataaggaggcagaagatatttctgaaaagccagaaaaaccaaagcaggaatttataagtgaaggtgaaggactcaaagaaggcaaagacacaaagaagcaaaaatccttggaaccatccatcccaccaccccgaatagcttcaggggccagaggaaatgctgccaaagcgttattggaaaactttggttttgaactggtcattcagtataacgaaaacaggcagaaggtacagaagaagggcaaaagtggtgaaggcgaaaacactgacaaactagaatgtggaacatgtggtaaattgttttccaatgttcttattttaaagagtcaccaagaacatgtacatgggcaattttttccatatgcagcgctagaaaaatttgctcgtcaatacagggaggcctatgacaagctttatccaatttctccatcttctccagaaacgccgcccccgccacctcctcctcctcccttgcctccggctcctccacagccttcttctatgggtcctgtaaagatccccaacacggtttctactcctctgcaagctccaccacccactcctcccccaccaccaccacctcctcctcctcctcctcctccccccccacctcctccaccttctgctcctccacaggtccaactgccggtttctctggacctgccgctctttccttccattatgatgcaacctgtgcaacaccctgcgcttcctccccagcttgccctgcagctgccacagatggacgcactctctgcagacctcacccaactttgccagcagcagctcggattagatcccaacttcttaagacattctcagttcaaacgcccacggacaagaattacagatgatcagctaaaaatcctgagggcttattttgacattaataattctccaagtgaagaacagatccaggaaatggcagagaaatctggcctctcccaaaaagttatcaaacactggtttagaaatacgctttttaaggaacgacagagaaataaagattcaccatacaacttcagtaaccctcctataacggttttagaagatatcagaattgatccacagcccacctctttagaacattacaaatctgatgcatcattcagtaaaaggtcttctagaacgagatttactgactaccagcttagggttctgcaagacttttttgacacaaacgcttacccaaaagatgatgaaatagaacaactctccactgttctcaatctgcctacccgggttattgttgtatggttccagaatgctcgtcagaaagcacgaaagagttatgagaatcaagcagaaacaaaagataatgaaaaaagagaactcactaatgaacggtacattcgaacaagcaacatgcagtaccagtgtaaaaagtgcaatgtggttttccccaggatctttgacttgattacgcatcagaaaaagcagtgttacaaggatgaagatgatgatgcccaagatgaaagccaaacagaagactccatggatgccactgatcaagtggtatacaagcattgcacagtgtctggccaaacggatgcagctaaaaacgctgctgcccctgcagcaagttctggctctgggaccagcacccccctgattccatcacccaaaccagaacctgagaagacttctccaaaacctgaatatcccgcagaaaagccaaagcagagtgacccctctcccccttctcaaggcaccaaaccagccctgccattagcatcgacttcctcggacccaccacaggcatccacagcccagccacagccacagccacagccaccaaaacaaccccaacttatcggaagacctccctcggcctctcaaacaccggtcccttccagtccactgcaaatttccatgacgtctctccagaacagtctacctccacagttactacaataccaatgtgatcagtgtacagttgccttcccaactctggaactctggcaggaacaccagcacatgcacttccttgctgctcaaaaccaattccttcactctccgttcttggaaaggcccatggacatgccctacatgatatttgaccccaacaatccgctgatgactggacaactgctgggcagttccctcactcaaatgccccctcaggccagttcctcccacaccacagcccccacaacggttgctgcttccctaaaaaggaaactagacgataaagaagataataattgcagtgaaaaagaaggagggaatagcggtgaagaccaacaccgagataaacgcttgagaaccacgatcaccccggaacagctggaaatactctatgaaaaatacttgctggattccaatcctaccagaaaaatgcttgatcatattgcccgcgaagtcgggctgaaaaaaagggtcgtgcaagtctggttccagaatacacgagcgcgggagaggaaaggccagttccgggcggtgggtccagcacagtctcataaacggtgtccgttttgccgagccctgtttaaagcaaagtcggccttagaaagccacattcgctctcggcactggaatgaaggaaagcaggcaggttacagcttgccaccaagccctttaatatccaccgaagatgggggagaaagcccacagaaatacatctattttgattacccatctttgccattaactaaaattgatctatcaagtgagaatgaattggcttctacagtgtcaacacctgttagtaaaacagcagagctgtcaccgaagaatcttttaagcccttcttcttttaaagcagagtgttctgaggatgtagagaatttaaatgcccctcctgctgaggctgggtatgatcaaaataaaaccgattttgatgagacttcatcgattaatacggcaatcagtgacgccaccaccggagacgagggaaacactgaaatggaaagcaccacaggaagttccggagatgtgaaaccggctttgtctcccaaagagccaaaaactctggatactctgccaaaacctgcaaccacacctaccacggaggtctgcgatgacaaatttctcttttctctcacaagcccatccatccatttcaatgacaaagatggcgaccacgaccaaagcttttacatcacagatgacccggatgacaacgccgaccgcagcgaaacgtccagcatagcggacccgagctccccaaatccattcggatccagcaatccctttaaatccaaaagtaatgatcggccgggtcacaagcgttttcgaacgcaaatgagcaatcttcaactcaaggttctcaaggcttgctttagtgactaccgaactccaaccatgcaagaatgtgaaatgttagggaatgagattggtctgcccaaacgcgtagtccaggtgtggttccaaaatgcaagggcaaaggaaaagaaatttaaaattaacatagggaagcctttcatgatcaatcaaggcggaacggaaggcaccaaaccagagtgtaccctctgcggggtgaagtactctgcccgcttgtccatcagagatcacattttctccaaacagcacatttcaaaagtgagggagaccgttggcagtcagctcgatcgggagaaagattacttggctccgaccacggttcggcagctgatggcacagcaagaacttgatcgtataaagaaagcttcagacgtgctgggcttgacggtacagcagccaggcatgatggacagcagttctctccacggcatcagcctgccaacagcctaccccggactccccggccttcctccagtccttctccccggaatgaacggtccatcctccttgccgggatttccacaaaattcaaacatagcatcaggcatgcttgggtttcctacttcagctacttcgtctcctgccctgtctctcagcagtgcccccaccaaacctttgctgcagactccaccacctccaccacctcctcctcctcctcctccttcatcctctctgtcaggacagcagaccgagcaacagaacaaagaatctgagaaaaagcaaactaagccaaacaaggtgaaaaaaatcaaagaggaggaattagaggccaccaaacccgaaaaacaccccaaaaaagaggaaaaaatctcatctgctctttcagtgttgggcaaagttgtaggtgaaacacatgtcgatcctattcagttgcaggcattacagaatgcaattgctggtgacccagcttcctttataggcggacagttcttgccatactttatccctgggtttgcttcttattttacacctcagctccctggaacagtgcaggggggatacttcccacctgtctgtggcatggagagcctctttccttatggccctacaatgccccagacactggcaggtctgtccccaggtgcactgttgcagcagtaccaacagtatcagcagaacctgcaggagtccctgcaaaagcagcaaaagcaacagcaagaacagcagcagaaaccagttcaggcaaagacatccaaagtagaaagtgaccagccgcaaaactccaacgatgcttcagaaacaaaggaagacaaaagtactgctacagaaagcacaaaagaagaaccccagttagaatccaaaagtgcagacttttcagacacttacgttgttccattcgtcaagtatgagtttatatgcagaaagtgccagatgatgtttactgatgaagacgccgcagtaaatcatcaaaagtccttctgttatttcggtcagcctttgattgacccacaagagacagtgcttcgtgtcccagtcagcaaatatcagtgtcttgcctgtgatgtggctatcagtgggaatgaagcacttagccaacacctccagtcaagcttgcacaaagagaaaacaatcaaacaagcaatgagaaatgccaaagagcatgttagattattacctcactcagtctgctcccctaatcctaacaccacatctacctcgcagtctgcagcttcttctaataacacctatcctcatctttcttgcttctccatgaagtcctggcctaatatccttttccaagcgtctgccaggagagctgcttctcccccttcttctcctccttccctttccttgccttcaacggttacctcaagtttgtgcagcacctcaggggttcaaacctcactacccacagaaagttgttcagatgagtctgacagtgagctgagccagaagctagaagacttagataattctttggaagtgaaggctaagcctgcttctggcctagatggtaatttcaatagcatccgaatggatatgttcagtgtgtag

SEQ ID NO: 309062 - DNA, 13822 bp, Artificial Sequence
  derived and/or modified sequence
atttttttaaacagggctaaaacgataataattagcagaataaagacatatcggattttcatttcctttcctccttttcccaaccccttcacaaccaaacagcgagaccgcggtcggcacatgctttaactcctcccggacccccgaggaccgctccatgccccccactttctgctccagcgtttttattttcacccaataaagttcgaggattattttttattttttttgtttttttaatgaaccctctcgttttacttggatgtgatcagctgtaagtaaaataaaagcaaaacaaaaaagaggcgaagatcgagtaggaactgcaggggaaatggaaagtccctgacaggctggatgaaatgagatccccatgtagcaattgccatggaaacctgtgactcccctcctatctcaaggcaggaaaatgggcagagcacatcaaagctatgtggaacgacacaacttgataatgaggtgccagagaaagttgcagggatggagcctgacagggaaaacagctccacagatgacaacctgaaaacggatgagcgcaaaagtgaagccttgctgggtttcagcgttgagaatgcagctgccactcaggttacctcagcaaaggagataccctgcaacgaatgtgccacttcttttcccagtttacagaaatacatggaacaccactgccctaatgcccgccttcctgtcctgaaggatgacaacgagagcgagatcagcgagttagaggacagtgacgtggaaaatctaacaggggagatcgtttaccagcctgatgggtcagcatatataattgaggactccaaagaaagtgggcagaatgcacagactggggcaaatagcaaactcttttctacagcgatgttcctggactccctggcatctgctggagagaagagtgatcagtctgcttctgcacctatgtcgttctacccacagatcatcaacacttttcatatcgcttcatccctcgggaaaccatttacagccgatcaggctttcccaaatacctcagcattagcaggagttggtcctgtgttgcacagtttccgtgtctatgatctccgacacaagagagagaaagactatctaaccagtgatggctcagccaaaaactcctgtgtgtccaaagatgtccctaacaatgtggacttgtccaaattcgatggttgtgttagcgatgggaaaaggaaacctgttttaatgtgtttcttgtgcaagttgtcttttggttatatcaggtcatttgtaacccatgctgtgcatgatcatcggatgaccctcaatgacgaggagcagaagctcctcagtaataaatgcgtctccgccataatacaggggattggcaaagacaaagaacctcttataagctttctggaaccaaaaaaatccacttctgtttatccccatttttctactacaaacctcataggacccgatccaaccttccgcggtttatggagcgcttttcatgttgaaaatggtgactctttgccggctggctttgccttcttaaaaggaagcgcgagcacctcgagctcagcagagcagccgctggggattacccaaatgccaaaggctgaagtgaatctgggggggctgtctagtttagtagtgaacaccccaattacctctgtctccctcagccactcatcgtctgagtctagcaagatgtcagagagcaaagaccaagagaacaactgtgaaaggccaaaagaaagcaacgttttacacccaaacggggagtgccctgtcaaaagtgaacccactgaaccgggagatgaggatgaagaagatgcgtactccaatgaacttgatgacgaggaagtattaggtgaactcaccgatagtattggtaacaaagatttccctctcttaaaccaaagcatttctcctttatcatccagtgtgctaaaatttattgaaaagggtacctcgtcctcctcggcgactgtttctgatgacacagaaaagaaaaaacagactgctgctgttagggccagtggcagtgttgctagtaactatggcatcagtggcaaggactttgcagacgcaagtgccagtaaagacagtgccacagctgctcatccaagtgaaatagcccggggagacgaagacagttcagccactcctcaccagcatggctttaccccgagtactcctggcacaccagggcctggaggagacggctcaccgggcagtggcatcgagtgtccaaagtgcgacactgtgttggggtcttcgaggtctcttggtggtcatatgactatgatgcactcgaggaactcatgcaaaaccctcaaatgtcctaaatgtaactggcactacaaatatcagcagaccctggaggcccatatgaaggagaaacaccctgagccgggtggctcttgtgtttattgtaagactggacagcctcaccccaggcttgcccggggtgagagttacacgtgtggctataaacccttccgttgtgaggtttgtaactactctaccactaccaaaggcaacctcagtattcatatgcagtcggacaagcacctgaacaatgttcagaatctccaaaatggcaatggtgagcaggtgtttggccactctgccccagcccccaacaccagcctcagtggctgcggaacaccctctccgtccaaacccaaacagaaacccacctggcggtgtgaagtttgtgattatgaaaccaatgtcgccaggaacctccgaattcatatgaccagcgaaaagcacatgcataatatgatgcttttgcagcagaacatgaagcagatccagcataatctgcacttgggcctcgccccggcggaagcagagctttatcagtactacctagcccagaacataggcctgaccggaatgaagctggaaaaccctgccgaccctcagctgatgatcaatccattccagctggatccagcgacagcagcggctttggcaccagggctcggagagctgtcaccttatatcagtgacccagcgctgaagctattccagtgtgctgtttgcaacaaattcacctctgacagcctggaggccctaagtgtgcatgtgagcagtgagcgctctctccctgaagaggaatggagggcagtaattggagatatctaccagtgcaagctctgcaactacaacactcagctcaaagccaacttccagctacactgcaagactgataaacatatgcagaaatatcaactggtggctcacattaaagaagggggcaaaagcaatgagtggaggttgaagtgtattgccattggcaaccctgttcacctaaaatgtaacgcctgtgactattacaccaacagtgtggataaattacgcttgcataccaccaatcacaggcacgaggcggccctgaagctctacaagcacttgcagaagcaagagggtgcagtgaatcccgaatcctgctattactactgtgccgtgtgtgattacaccaccaaggtcaagttgaatctggtacaacatgtccgttcggtgaagcatcagcagactgagggcctacggaagctccagctccaccagcaaggcctggcaccagaggaggacaacctcagtgagatcttttttgttaaagattgcccaccaaatgagcttgaaactgcctcattgggagccaggacttgtgatgatgatcttacagagcagcatgaggaggcagaaggagctattaagcctacagcagtggccgaggacgatgaaaaagacacaagtgagagagacaatagtgaaggcaaaaactctaataaagactctgttagtgtggcagggggtacccagccactcctgctggcaaaagaagaggatgttgcaacaaaaaggtcaaaacctacagaggacaataaattctgtcatgaacagttctatcaatgtccttattgtaactacaatagtagggaccaaagtcgtatccagatgcacgtcctatcacagcactcggtgcagccggtcatctgctgtcctctctgtcaggacgtcctcagcaacaaaatgcatctccaactgcatctgacgcatttgcacagtgtgtctccagactgtgtggagaagctgcttatgacagtgcctgtccctgatgtgatgatgccaaacagtatgctactgccagcagctgcctctgagaaatcagagcgggacacacctgcagccgtgacagctgaggggtctgggaaatattcaggtgaaagtccaatggatgacaaaagcatggcaggtctcgaggattcaaaggctaatgtggaagtaaagaatgaggagcagaaaccgactaaagaacccttggaagtctcagaatggaataaaaatagcagtaaggatgtgaaaatccccgacacactgcaagatcaattaaatgaacagcaaaaaaggcaaccgctctctgtttctgaccgtcatgtctacaagtatcgctgtaaccattgtagcttggctttcaaaactatgcagaagcttcagatacattcccagtatcatgcaattcgggctgcgacaatgtgtaacctctgccagcgcagtttccgtacattccaggctttaaaaaaacacttggaagcaggccaccctgaactgagtgaagctgaacttcaacagctatatgcctccttgcccgtgaatggagaactgtgggcagagagcgaaactatgtcccaggatgaccatggcctagagcaggaaatggagagagagtatgaggtggaccacgaagggaaagcaagtcctgtaggaagtgatagtagctctattccagatgacatgggctctgaaccaaagcggaccttaccttttagaaaagggcccaattttacgatggaaaaattccttgatccatctcgtccatataaatgtacagtgtgtaaagagtcattcacccaaaagaacattctcttggtccactataattcagtttctcacttgcataagctgaaaaaagttttgcaggaagcctccagtcctgtcccacaagaaaccaacagcaacacagataacaaaccctacaagtgcagcatctgcaatgttgcatacagccaaagctcaacattggaaatccacatgaggtctgtgctccaccagacaaaggctagggctgcaaagctggagcccagtggtcatgtggctggtgggcacagcattgcagcaaatgtcaacagccctggccaggggatgttagattccatgagtttagcagctgtaaacagcaaagatacccatttagatgccaaagaattaaataaaaagcaaactcctgatttaatctctgctcaacctgcacatcacccaccacagtcaccagcacaaattcagatgcaactacagcacgaattacaacagcaagccgcattctttcagcctcagtttctaaacccagcctttttgcctcattttcctatgaccccagaagcactgctgcagtttcagcagcctcagtttctctttccattttatatacctgggacggagttcagcttggggccagatttgggcttgccaggctctgccacatttgggatgcctggcatgacaggaatggctggctccttgcttgaagacctaaagcagcagattcaaacccaacatcacgttggtcaaactcaactccagatactacagcaacaagcacaacaataccaagccacacagccccagctgcagcctcaaaaacaacagcagcagccaccacctccacagcagcagcagcaacagcaggcaagcaaattattgaaacaagagcaaagtaacatagtgagtgcagactgccaaatcatgaaggatgtgccatcttataaggaggcagaagatatttctgaaaagccagaaaaaccaaagcaggaatttataagtgaaggtgaaggactcaaagaaggcaaagacacaaagaagcaaaaatccttggaaccatccatcccaccaccccgaatagcttcaggggccagaggaaatgctgccaaagcgttattggaaaactttggttttgaactggtcattcagtataacgaaaacaggcagaaggtacagaagaagggcaaaagtggtgaaggcgaaaacactgacaaactagaatgtggaacatgtggtaaattgttttccaatgttcttattttaaagagtcaccaagaacatgtacatgggcaattttttccatatgcagcgctagaaaaatttgctcgtcaatacagggaggcctatgacaagctttatccaatttctccatcttctccagaaacgccgcccccgccacctcctcctcctcccttgcctccggctcctccacagccttcttctatgggtcctgtaaagatccccaacacggtttctactcctctgcaagctccaccacccactcctcccccaccaccaccacctcctcctcctcctcctcctccccccccacctcctccaccttctgctcctccacaggtccaactgccggtttctctggacctgccgctctttccttccattatgatgcaacctgtgcaacaccctgcgcttcctccccagcttgccctgcagctgccacagatggacgcactctctgcagacctcacccaactttgccagcagcagctcggattagatcccaacttcttaagacattctcagttcaaacgcccacggacaagaattacagatgatcagctaaaaatcctgagggcttattttgacattaataattctccaagtgaagaacagatccaggaaatggcagagaaatctggcctctcccaaaaagttatcaaacactggtttagaaatacgctttttaaggaacgacagagaaataaagattcaccatacaacttcagtaaccctcctataacggttttagaagatatcagaattgatccacagcccacctctttagaacattacaaatctgatgcatcattcagtaaaaggtcttctagaacgagatttactgactaccagcttagggttctgcaagacttttttgacacaaacgcttacccaaaagatgatgaaatagaacaactctccactgttctcaatctgcctacccgggttattgttgtatggttccagaatgctcgtcagaaagcacgaaagagttatgagaatcaagcagaaacaaaagataatgaaaaaagagaactcactaatgaacggtacattcgaacaagcaacatgcagtaccagtgtaaaaagtgcaatgtggttttccccaggatctttgacttgattacgcatcagaaaaagcagtgttacaaggatgaagatgatgatgcccaagatgaaagccaaacagaagactccatggatgccactgatcaagtggtatacaagcattgcacagtgtctggccaaacggatgcagctaaaaacgctgctgcccctgcagcaagttctggctctgggaccagcacccccctgattccatcacccaaaccagaacctgagaagacttctccaaaacctgaatatcccgcagaaaagccaaagcagagtgacccctctcccccttctcaaggcaccaaaccagccctgccattagcatcgacttcctcggacccaccacaggcatccacagcccagccacagccacagccacagccaccaaaacaaccccaacttatcggaagacctccctcggcctctcaaacaccggtcccttccagtccactgcaaatttccatgacgtctctccagaacagtctacctccacagttactacaataccaatgtgatcagtgtacagttgccttcccaactctggaactctggcaggaacaccagcacatgcacttccttgctgctcaaaaccaattccttcactctccgttcttggaaaggcccatggacatgccctacatgatatttgaccccaacaatccgctgatgactggacaactgctgggcagttccctcactcaaatgccccctcaggccagttcctcccacaccacagcccccacaacggttgctgcttccctaaaaaggaaactagacgataaagaagataataattgcagtgaaaaagaaggagggaatagcggtgaagaccaacaccgagataaacgcttgagaaccacgatcaccccggaacagctggaaatactctatgaaaaatacttgctggattccaatcctaccagaaaaatgcttgatcatattgcccgcgaagtcgggctgaaaaaaagggtcgtgcaagtctggttccagaatacacgagcgcgggagaggaaaggccagttccgggcggtgggtccagcacagtctcataaacggtgtccgttttgccgagccctgtttaaagcaaagtcggccttagaaagccacattcgctctcggcactggaatgaaggaaagcaggcaggttacagcttgccaccaagccctttaatatccaccgaagatgggggagaaagcccacagaaatacatctattttgattacccatctttgccattaactaaaattgatctatcaagtgagaatgaattggcttctacagtgtcaacacctgttagtaaaacagcagagctgtcaccgaagaatcttttaagcccttcttcttttaaagcagagtgttctgaggatgtagagaatttaaatgcccctcctgctgaggctgggtatgatcaaaataaaaccgattttgatgagacttcatcgattaatacggcaatcagtgacgccaccaccggagacgagggaaacactgaaatggaaagcaccacaggaagttccggagatgtgaaaccggctttgtctcccaaagagccaaaaactctggatactctgccaaaacctgcaaccacacctaccacggaggtctgcgatgacaaatttctcttttctctcacaagcccatccatccatttcaatgacaaagatggcgaccacgaccaaagcttttacatcacagatgacccggatgacaacgccgaccgcagcgaaacgtccagcatagcggacccgagctccccaaatccattcggatccagcaatccctttaaatccaaaagtaatgatcggccgggtcacaagcgttttcgaacgcaaatgagcaatcttcaactcaaggttctcaaggcttgctttagtgactaccgaactccaaccatgcaagaatgtgaaatgttagggaatgagattggtctgcccaaacgcgtagtccaggtgtggttccaaaatgcaagggcaaaggaaaagaaatttaaaattaacatagggaagcctttcatgatcaatcaaggcggaacggaaggcaccaaaccagagtgtaccctctgcggggtgaagtactctgcccgcttgtccatcagagatcacattttctccaaacagcacatttcaaaagtgagggagaccgttggcagtcagctcgatcgggagaaagattacttggctccgaccacggttcggcagctgatggcacagcaagaacttgatcgtataaagaaagcttcagacgtgctgggcttgacggtacagcagccaggcatgatggacagcagttctctccacggcatcagcctgccaacagcctaccccggactccccggccttcctccagtccttctccccggaatgaacggtccatcctccttgccgggatttccacaaaattcaaacactttaacacctcccggtgcaggcatgcttgggtttcctacttcagctacttcgtctcctgccctgtctctcagcagtgcccccaccaaacctttgctgcagactccaccacctccaccacctcctcctcctcctcctccttcatcctctctgtcaggacagcagaccgagcaacagaacaaagaatctgagaaaaagcaaactaagccaaacaaggtgaaaaaaatcaaagaggaggaattagaggccaccaaacccgaaaaacaccccaaaaaagaggaaaaaatctcatctgctctttcagtgttgggcaaagttgtaggtgaaacacatgtcgatcctattcagttgcaggcattacagaatgcaattgctggtgacccagcttcctttataggcggacagttcttgccatactttatccctgggtttgcttcttattttacacctcagctccctggaacagtgcaggggggatacttcccacctgtctgtggcatggagagcctctttccttatggccctacaatgccccagacactggcaggtctgtccccaggtgcactgttgcagcagtaccaacagtatcagcagaacctgcaggagtccctgcaaaagcagcaaaagcaacagcaagaacagcagcagaaaccagttcaggcaaagacatccaaagtagaaagtgaccagccgcaaaactccaacgatgcttcagaaacaaaggaagacaaaagtactgctacagaaagcacaaaagaagaaccccagttagaatccaaaagtgcagacttttcagacacttacgttgttccattcgtcaagtatgagtttatatgcagaaagtgccagatgatgtttactgatgaagacgccgcagtaaatcatcaaaagtccttctgttatttcggtcagcctttgattgacccacaagagacagtgcttcgtgtcccagtcagcaaatatcagtgtcttgcctgtgatgtggctatcagtgggaatgaagcacttagccaacacctccagtcaagcttgcacaaagagaaaacaatcaaacaagcaatgagaaatgccaaagagcatgttagattattacctcactcagtctgctcccctaatcctaacaccacatctacctcgcagtctgcagcttcttctaataacacctatcctcatctttcttgcttctccatgaagtcctggcctaatatccttttccaagcgtctgccaggagagctgcttctcccccttcttctcctccttccctttccttgccttcaacggttacctcaagtttgtgcagcacctcaggggttcaaacctcactacccacagaaagttgttcagatgagtctgacagtgagctgagccagaagctagaagacttagataattctttggaagtgaaggctaagcctgcttctggcctagatggtaatttcaatagcatccgaatggatatgttcagtgtgtaggagtgaagacaggatcccgtgcttaaaaaaataaaaaataaaaaaataaaaaaaaaataagactttaactgcagttccaaagcttctctaacccaaaaattacagtaccaaatgattgactcaggattgtttttcccatattgatatgctggcaatataggatggtatgtaatggacagaactgatgcagatggttgaatgcgcttgtactatatgctaaaatatggaaaaggaaaaaaaaatctcacaagttcttttggaacttgtttcaagccaaaaactctcaagaaagcaaattgcacctcagctggattgatttccaaatgctagcatgtactgtatgggaggatgatccagatgtttcaaagagaatttctcttagtttagttaggtgtaattcagtagctttaaattctcaggtcagaacataacatttctcatttgttaaaagcagcaagaagcctggtaaaactgtgacttttccccaaacgtcaatctttattagaaagcattttctaggtgtgtttagtgtacaaagagactttataacccttactggacaacacacagatccttgagctcacgctgcaggatagtacagttttaccgcagagggaatctggaacagtggaatcatgtgtctgccctgtgtattgcagtttgtattgccacaagctatatttataccagtgtcacccttttcttgtagaatatactaataatctgtgccaactctaccttctcacttttacctctgacgtcattctttttttctgaaagaggtaataattctagttttgatagactctgaggattatgtgaacaggacatttttcatttgtgaatttaatgctatactgtcaaggtacttgcttgtgtctgaactctagtgcacttatgattttgtagaccatgtgaaatttaataagataccttttttttcctttctttgtgtgtagtgcagcaacagtttggtctgcatttgttagaagtttaactcctaacaacccaaagacctatttaacaattggtgcataaatgaaagtagtactgtatacttgaaactgtttaagtacaagttgaacaaaaattatgaaaaggtatatttgcttctcgggaaagcaaagaagctgctttaaaaaataaaaaggggactaaaaatttgttttgtataaagaggttagccctgcgcacgtaggactgaattcagtgatatccctatacactgccatttagtggataggttattgtacttccattcatactctgggcacttgtgttgtattgttctgttacatactttttttaacctgttttgttttatcatatatgcattaaaagtattatctttatcaacatttgctgctactgtgttaacatttttgttttgcttgccatgaatttcaacttccaccacccagtgaattgatttataaattgctatgctttgctgtttttctgttgctgtggaacttaaagaatgtgaaagctgtcaaagggtattttacgaatcacttttgtgtttgatatagtaaaacaatgtgattcattccaaagtaacagaaggttatttgtaagaaagttaaaggcttgtgaacaaagaaagctaagctgttgtacatatttgtagttggctgtgcatggtacaaatttattaatatgaagaaatgcaaaatgtattgcttttgatatttctcttccgagatgaacaagtagcatgtaatgcaactgtttgacagtttaactcaagtcatgcttcaaactgttttaatgatcaaatcaagacacatttcattttacattttattattgtacagtttttgtttcggatgatgatcacagcaatctttattctatacattttatgtgaacttttttaatgtctttaatttggattttttttttttttagtattttaacatttattttaatcctgaagacacttttttgattgtgtttcgtaagagacaacatggcctcctaaggtgcaatcctgccgctatagtgagctaatgtcctgaatccaaaggcttcagaaaattgcttttgcctttttcatgaatgttaagcagcagcattgtgagatcgatctgtcctggcagttaacacgatgtgcaacagtgtgttagcatggaacagaacgcttttcacaaaacaaaggactgttttacaaatgattattccgacagtgtgtcgacataaacttttacaactgcacagcagccaaaaaaagaaaaaaaaaagaaaaaaaactttaactggatggacgttgttagggtgagaaataaaaggacagcctccaaaggttgagaatgagaattgttttttcctggatatcaaagggattatcacagcgcaatcattgtctacacaacatgtactctcaacgcctgggttacataggaaatgcaccctgaggttttaataaaagcccctatggctataactttaaataaactaaaccaaaaatgttattgatgttttatatatagagagtagtctcattagtttttgttactgtaatgtttgaagtctcaaatgcaccgtattacggtaaataacatggttttgaaaacttttttttattttgtcacagacctgttgtcatagttgaaatgatgtttattgtagatggtatttgaacttattcttctggaaatagttcatcaagtatgtttgttgctcattgtgatacattaaaaactgtatctacatattt

SEQ ID NO: 309063 - DNA, 12175 bp, Artificial Sequence
  derived and/or modified sequence
ccctgacaggctggatgaaatgagatccccatgtagcaattgccatggaaacctgtgactcccctcctatctcaaggcaggaaaatgggcagagcacatcaaagctatgtggaacgacacaacttgataatgaggtgccagagaaagttgcagggatggagcctgacagggaaaacagctccacagatgacaacctgaaaacggatgagcgcaaaagtgaagccttgctgggtttcagcgttgagaatgcagctgccactcaggttacctcagcaaaggagataccctgcaacgaatgtgccacttcttttcccagtttacagaaatacatggaacaccactgccctaatgcccgccttcctgtcctgaaggatgacaacgagagcgagatcagcgagttagaggacagtgacgtggaaaatctaacaggggagatcgtttaccagcctgatgggtcagcatatataattgaggactccaaagaaagtgggcagaatgcacagactggggcaaatagcaaactcttttctacagcgatgttcctggactccctggcatctgctggagagaagagtgatcagtctgcttctgcacctatgtcgttctacccacagatcatcaacacttttcatatcgcttcatccctcgggaaaccatttacagccgatcaggctttcccaaatacctcagcattagcaggagttggtcctgtgttgcacagtttccgtgtctatgatctccgacacaagagagagaaagactatctaaccagtgatggctcagccaaaaactcctgtgtgtccaaagatgtccctaacaatgtggacttgtccaaattcgatggttgtgttagcgatgggaaaaggaaacctgttttaatgtgtttcttgtgcaagttgtcttttggttatatcaggtcatttgtaacccatgctgtgcatgatcatcggatgaccctcaatgacgaggagcagaagctcctcagtaataaatgcgtctccgccataatacaggggattggcaaagacaaagaacctcttataagctttctggaaccaaaaaaatccacttctgtttatccccatttttctactacaaacctcataggacccgatccaaccttccgcggtttatggagcgcttttcatgttgaaaatggtgactctttgccggctggctttgccttcttaaaaggaagcgcgagcacctcgagctcagcagagcagccgctggggattacccaaatgccaaaggctgaagtgaatctgggggggctgtctagtttagtagtgaacaccccaattacctctgtctccctcagccactcatcgtctgagtctagcaagatgtcagagagcaaagaccaagagaacaactgtgaaaggccaaaagaaagcaacgttttacacccaaacggggagtgccctgtcaaaagtgaacccactgaaccgggagatgaggatgaagaagatgcgtactccaatgaacttgatgacgaggaagtattaggtgaactcaccgatagtattggtaacaaagatttccctctcttaaaccaaagcatttctcctttatcatccagtgtgctaaaatttattgaaaagggtacctcgtcctcctcggcgactgtttctgatgacacagaaaagaaaaaacagactgctgctgttagggccagtggcagtgttgctagtaactatggcatcagtggcaaggactttgcagacgcaagtgccagtaaagacagtgccacagctgctcatccaagtgaaatagcccggggagacgaagacagttcagccactcctcaccagcatggctttaccccgagtactcctggcacaccagggcctggaggagacggctcaccgggcagtggcatcgagtgtccaaagtgcgacactgtgttggggtcttcgaggtctcttggtggtcatatgactatgatgcactcgaggaactcatgcaaaaccctcaaatgtcctaaatgtaactggcactacaaatatcagcagaccctggaggcccatatgaaggagaaacaccctgagccgggtggctcttgtgtttattgtaagactggacagcctcaccccaggcttgcccggggtgagagttacacgtgtggctataaacccttccgttgtgaggtttgtaactactctaccactaccaaaggcaacctcagtattcatatgcagtcggacaagcacctgaacaatgttcagaatctccaaaatggcaatggtgagcaggtgtttggccactctgccccagcccccaacaccagcctcagtggctgcggaacaccctctccgtccaaacccaaacagaaacccacctggcggtgtgaagtttgtgattatgaaaccaatgtcgccaggaacctccgaattcatatgaccagcgaaaagcacatgcataatatgatgcttttgcagcagaacatgaagcagatccagcataatctgcacttgggcctcgccccggcggaagcagagctttatcagtactacctagcccagaacataggcctgaccggaatgaagctggaaaaccctgccgaccctcagctgatgatcaatccattccagctggatccagcgacagcagcggctttggcaccagggctcggagagctgtcaccttatatcagtgacccagcgctgaagctattccagtgtgctgtttgcaacaaattcacctctgacagcctggaggccctaagtgtgcatgtgagcagtgagcgctctctccctgaagaggaatggagggcagtaattggagatatctaccagtgcaagctctgcaactacaacactcagctcaaagccaacttccagctacactgcaagactgataaacatatgcagaaatatcaactggtggctcacattaaagaagggggcaaaagcaatgagtggaggttgaagtgtattgccattggcaaccctgttcacctaaaatgtaacgcctgtgactattacaccaacagtgtggataaattacgcttgcataccaccaatcacaggcacgaggcggccctgaagctctacaagcacttgcagaagcaagagggtgcagtgaatcccgaatcctgctattactactgtgccgtgtgtgattacaccaccaaggtcaagttgaatctggtacaacatgtccgttcggtgaagcatcagcagactgagggcctacggaagctccagctccaccagcaaggcctggcaccagaggaggacaacctcagtgagatcttttttgttaaagattgcccaccaaatgagcttgaaactgcctcattgggagccaggacttgtgatgatgatcttacagagcagcagttgagatcgacctcagaagaacaaagtgaggaggcagaaggagctattaagcctacagcagtggccgaggacgatgaaaaagacacaagtgagagagacaatagtgaaggcaaaaactctaataaagactctgggataatcacaccagagaaggaactaaaagttagtgtggcagggggtacccagccactcctgctggcaaaagaagaggatgttgcaacaaaaaggtcaaaacctacagaggacaataaattctgtcatgaacagttctatcaatgtccttattgtaactacaatagtagggaccaaagtcgtatccagatgcacgtcctatcacagcactcggtgcagccggtcatctgctgtcctctctgtcaggacgtcctcagcaacaaaatgcatctccaactgcatctgacgcatttgcacagtgtgtctccagactgtgtggagaagctgcttatgacagtgcctgtccctgatgtgatgatgccaaacagtatgctactgccagcagctgcctctgagaaatcagagcgggacacacctgcagccgtgacagctgaggggtctgggaaatattcaggtgaaagtccaatggatgacaaaagcatggcaggtctcgaggattcaaaggctaatgtggaagtaaagaatgaggagcagaaaccgactaaagaacccttggaagtctcagaatggaataaaaatagcagtaaggatgtgaaaatccccgacacactgcaagatcaattaaatgaacagcaaaaaaggcaaccgctctctgtttctgaccgtcatgtctacaagtatcgctgtaaccattgtagcttggctttcaaaactatgcagaagcttcagatacattcccagtatcatgcaattcgggctgcgacaatgtgtaacctctgccagcgcagtttccgtacattccaggctttaaaaaaacacttggaagcaggccaccctgaactgagtgaagctgaacttcaacagctatatgcctccttgcccgtgaatggagaactgtgggcagagagcgaaactatgtcccaggatgaccatggcctagagcaggaaatggagagagagtatgaggtggaccacgaagggaaagcaagtcctgtaggaagtgatagtagctctattccagatgacatgggctctgaaccaaagcggaccttaccttttagaaaagggcccaattttacgatggaaaaattccttgatccatctcgtccatataaatgtacagtgtgtaaagagtcattcacccaaaagaacattctcttggtccactataattcagtttctcacttgcataagctgaaaaaagttttgcaggaagcctccagtcctgtcccacaagaaaccaacagcaacacagataacaaaccctacaagtgcagcatctgcaatgttgcatacagccaaagctcaacattggaaatccacatgaggtctgtgctccaccagacaaaggctagggctgcaaagctggagcccagtggtcatgtggctggtgggcacagcattgcagcaaatgtcaacagccctggccaggggatgttagattccatgagtttagcagctgtaaacagcaaagatacccatttagatgccaaagaattaaataaaaagcaaactcctgatttaatctctgctcaacctgcacatcacccaccacagtcaccagcacaaattcagatgcaactacagcacgaattacaacagcaagccgcattctttcagcctcagtttctaaacccagcctttttgcctcattttcctatgaccccagaagcactgctgcagtttcagcagcctcagtttctctttccattttatatacctgggacggagttcagcttggggccagatttgggcttgccaggctctgccacatttgggatgcctggcatgacaggaatggctggctccttgcttgaagacctaaagcagcagattcaaacccaacatcacgttggtcaaactcaactccagatactacagcaacaagcacaacaataccaagccacacagccccagctgcagcctcaaaaacaacagcagcagccaccacctccacagcagcagcagcaacagcaggcaagcaaattattgaaacaagagcaaagtaacatagtgagtgcagactgccaaatcatgaaggatgtgccatcttataaggaggcagaagatatttctgaaaagccagaaaaaccaaagcaggaatttataagtgaaggtgaaggactcaaagaaggcaaagacacaaagaagcaaaaatccttggaaccatccatcccaccaccccgaatagcttcaggggccagaggaaatgctgccaaagcgttattggaaaactttggttttgaactggtcattcagtataacgaaaacaggcagaaggtacagaagaagggcaaaagtggtgaaggcgaaaacactgacaaactagaatgtggaacatgtggtaaattgttttccaatgttcttattttaaagagtcaccaagaacatgtacatgggcaattttttccatatgcagcgctagaaaaatttgctcgtcaatacagggaggcctatgacaagctttatccaatttctccatcttctccagaaacgccgcccccgccacctcctcctcctcccttgcctccggctcctccacagccttcttctatgggtcctgtaaagatccccaacacggtttctactcctctgcaagctccaccacccactcctcccccaccaccaccacctcctcctcctcctcctcctccccccccacctcctccaccttctgctcctccacaggtccaactgccggtttctctggacctgccgctctttccttccattatgatgcaacctgtgcaacaccctgcgcttcctccccagcttgccctgcagctgccacagatggacgcactctctgcagacctcacccaactttgccagcagcagctcggattagatcccaacttcttaagacattctcagttcaaacgcccacggacaagaattacagatgatcagctaaaaatcctgagggcttattttgacattaataattctccaagtgaagaacagatccaggaaatggcagagaaatctggcctctcccaaaaagttatcaaacactggtttagaaatacgctttttaaggaacgacagagaaataaagattcaccatacaacttcagtaaccctcctataacggttttagaagatatcagaattgatccacagcccacctctttagaacattacaaatctgatgcatcattcagtaaaaggtcttctagaacgagatttactgactaccagcttagggttctgcaagacttttttgacacaaacgcttacccaaaagatgatgaaatagaacaactctccactgttctcaatctgcctacccgggttattgttgtatggttccagaatgctcgtcagaaagcacgaaagagttatgagaatcaagcagaaacaaaagataatgaaaaaagagaactcactaatgaacggtacattcgaacaagcaacatgcagtaccagtgtaaaaagtgcaatgtggttttccccaggatctttgacttgattacgcatcagaaaaagcagtgttacaaggatgaagatgatgatgcccaagatgaaagccaaacagaagactccatggatgccactgatcaagtggtatacaagcattgcacagtgtctggccaaacggatgcagctaaaaacgctgctgcccctgcagcaagttctggctctgggaccagcacccccctgattccatcacccaaaccagaacctgagaagacttctccaaaacctgaatatcccgcagaaaagccaaagcagagtgacccctctcccccttctcaaggcaccaaaccagccctgccattagcatcgacttcctcggacccaccacaggcatccacagcccagccacagccacagccacagccaccaaaacaaccccaacttatcggaagacctccctcggcctctcaaacaccggtcccttccagtccactgcaaatttccatgacgtctctccagaacagtctacctccacagttactacaataccaatgtgatcagtgtacagttgccttcccaactctggaactctggcaggaacaccagcacatgcacttccttgctgctcaaaaccaattccttcactctccgttcttggaaaggcccatggacatgccctacatgatatttgaccccaacaatccgctgatgactggacaactgctgggcagttccctcactcaaatgccccctcaggccagttcctcccacaccacagcccccacaacggttgctgcttccctaaaaaggaaactagacgataaagaagataataattgcagtgaaaaagaaggagggaatagcggtgaagaccaacaccgagataaacgcttgagaaccacgatcaccccggaacagctggaaatactctatgaaaaatacttgctggattccaatcctaccagaaaaatgcttgatcatattgcccgcgaagtcgggctgaaaaaaagggtcgtgcaagtctggttccagaatacacgagcgcgggagaggaaaggccagttccgggcggtgggtccagcacagtctcataaacggtgtccgttttgccgagccctgtttaaagcaaagtcggccttagaaagccacattcgctctcggcactggaatgaaggaaagcaggcaggttacagcttgccaccaagccctttaatatccaccgaagatgggggagaaagcccacagaaatacatctattttgattacccatctttgccattaactaaaattgatctatcaagtgagaatgaattggcttctacagtgtcaacacctgttagtaaaacagcagagctgtcaccgaagaatcttttaagcccttcttcttttaaagcagagtgttctgaggatgtagagaatttaaatgcccctcctgctgaggctgggtatgatcaaaataaaaccgattttgatgagacttcatcgattaatacggcaatcagtgacgccaccaccggagacgagggaaacactgaaatggaaagcaccacaggaagttccggagatgtgaaaccggctttgtctcccaaagagccaaaaactctggatactctgccaaaacctgcaaccacacctaccacggaggtctgcgatgacaaatttctcttttctctcacaagcccatccatccatttcaatgacaaagatggcgaccacgaccaaagcttttacatcacagatgacccggatgacaacgccgaccgcagcgaaacgtccagcatagcggacccgagctccccaaatccattcggatccagcaatccctttaaatccaaaagtaatgatcggccgggtcacaagcgttttcgaacgcaaatgagcaatcttcaactcaaggttctcaaggcttgctttagtgactaccgaactccaaccatgcaagaatgtgaaatgttagggaatgagattggtctgcccaaacgcgtagtccaggtgtggttccaaaatgcaagggcaaaggaaaagaaatttaaaattaacatagggaagcctttcatgatcaatcaaggcggaacggaaggcaccaaaccagagtgtaccctctgcggggtgaagtactctgcccgcttgtccatcagagatcacattttctccaaacagcacatttcaaaagtgagggagaccgttggcagtcagctcgatcgggagaaagattacttggctccgaccacggttcggcagctgatggcacagcaagaacttgatcgtataaagaaagcttcagacgtgctgggcttgacggtacagcagccaggcatgatggacagcagttctctccacggcatcagcctgccaacagcctaccccggactccccggccttcctccagtccttctccccggaatgaacggtccatcctccttgccgggatttccacaaaattcaaacactttaacacctcccggtgcaggcatgcttgggtttcctacttcagctacttcgtctcctgccctgtctctcagcagtgcccccaccaaacctttgctgcagactccaccacctccaccacctcctcctcctcctcctccttcatcctctctgtcaggacagcagaccgagcaacagaacaaagaatctgagaaaaagcaaactaagccaaacaaggtgaaaaaaatcaaagaggaggaattagaggccaccaaacccgaaaaacaccccaaaaaagaggaaaaaatctcatctgctctttcagtgttgggcaaagttgtaggtgaaacacatgtcgatcctattcagttgcaggcattacagaatgcaattgctggtgacccagcttcctttataggcggacagttcttgccatactttatccctgggtttgcttcttattttacacctcagctccctggaacagtgcaggggggatacttcccacctgtctgtggcatggagagcctctttccttatggccctacaatgccccagacactggcaggtctgtccccaggtgcactgttgcagcagtaccaacagtatcagcagaacctgcaggagtccctgcaaaagcagcaaaagcaacagcaagaacagcagcagaaaccagttcaggcaaagacatccaaagtagaaagtgaccagccgcaaaactccaacgatgcttcagaaacaaaggaagacaaaagtactgctacagaaagcacaaaagaagaaccccagttagaatccaaaagtgcagacttttcagacacttacgttgttccattcgtcaagtatgagtttatatgcagaaagtgccagatgatgtttactgatgaagacgccgcagtaaatcatcaaaagtccttctgttatttcggtcagcctttgattgacccacaagagacagtgcttcgtgtcccagtcagcaaatatcagtgtcttgcctgtgatgtggctatcagtgggaatgaagcacttagccaacacctccagtcaagcttgcacaaagagaaaacaatcaaacaagcaatgagaaatgccaaagagcatgttagattattacctcactcagtctgctcccctaatcctaacaccacatctacctcgcagtctgcagcttcttctaataacacctatcctcatctttcttgcttctccatgaagtcctggcctaatatccttttccaagcgtctgccaggagagctgcttctcccccttcttctcctccttccctttccttgccttcaacggttacctcaagtttgtgcagcacctcaggggttcaaacctcactacccacagaaagttgttcagatgagtctgacagtgagctgagccagaagctagaagacttagataattctttggaagtgaaggctaagcctgcttctggcctagatggtaatttcaatagcatccgaatggatatgttcagtgtgtaggagtgaagacaggatcccgtgcttaaaaaaataaaaaataaaaaaataaaaaaaaaataagactttaactgcagttccaaagcttctctaacccaaaaattacagtaccaaatgattgactcaggattgtttttcccatattgatatgctggcaatataggatggtatgtaatggacagaactgatgcagatggttgaatgcgcttgtactatatgctaaaatatggaaaaggaaaaaaaaatctcacaagttcttttggaacttgtttcaagccaaaaactctcaagaaagcaaattgcacctcagctggattgatttccaaatgctagcatgtactgtatgggaggatgatccagatgtttcaaagagaatttctcttagtttagttaggtgtaattcagtagctttaaattctcaggtcagaacataacatttctcatttgttaaaagcagcaagaagcctggtaaaactgtgacttttccccaaacgtcaatctttattagaaagcattttctaggtgtgtttagtgtacaaagagactttataacccttactggacaacacacagatccttgagctcacgctgcaggatagtacagttttaccgcagagggaatctggaacagtggaatcatgtgtctgccctgtgtattgcagtttgtattgccacaagctatatttataccagtgtcacccttttcttgtagaatatactaataatctgtgccaactctaccttctcacttttacctctgacgtcattctttttttctgaaagaggtaataattctagttttgatagactctgaggattatgtgaacaggacatttttcatttgtgaatttaatgctatactgtcaaggtacttgcttgtgtctgaactctagtgcacttatgattttgtagaccatgtgaaatttaataagataccttttttttcctttctttgtgtgtagtgcagcaacagtttggtctgcatttgttagaagtttaactcctaacaacccaaagacctatttaacaattggtgcataaatgaaagtagtactgtatacttgaaactgtttaagtacaagttgaacaaaaattatgaaaaggtatatttgcttctcgggaaagcaaagaagctgctttaaaaaataaaaaggggactaaaaatttgttttgtataaagaggttagccctgcgcacgtaggactgaattcagtgatatccctatacactgccatttagtggataggttattgtacttccattcatactctgggcacttgtgttgtattgttctgttacatactttttttaacctgttttgttttatcatatatgcattaaaagtattatctttatcaaca

SEQ ID NO: 309064 - protein, 155 aa, Artificial Sequence
  derived and/or modified sequence
METCDSPPISRQENGQSTSKLCGTTQLDNEVPEKVAGMEPDRENSSTDDNLKTDERKSEALLGFSVENAAATQVTSAKEIPCNECATSFPSLQKYMEHHCPNARLPVLKDDNESEISELEDSDVENLTGEIVYQPDGSAYIIEDSKESGQNAQTG

SEQ ID NO: 309065 - DNA, 381 bp, Artificial Sequence
  derived and/or modified sequence
atgggactacccgctcctagcctgcacgctacgagcacccttcgtcctgatcagttctctccacacaccaatcctagcctttctctgccctgtctcaagagctttcccgtgtccctgtggccctggggcagagcttctctgctttgccacttgtcccgtctgtttgtgtgtcatcgccctctcacacccaccagtcaagcccctaatatgttttcctgcgtctcatcctccctaacactggcggcaagcagtgcttggccggcttcacacttgcccattagtcacagcccctttctgcccccacatctcctacgctcccagctatcagttacctctagtcgggaacctcggctgtctttgcctctgcaactcggtcagtag

SEQ ID NO: 309066 - DNA, 4367 bp, Artificial Sequence
  derived and/or modified sequence
gaggggcggagccccggcccggaggtctgtcatgctgttcccgctccaggtggccgctgtaacctcttcggtccgcgacgatcctctagagcactgtgtgtctccccggacgcgagcccgctcccctgaaatctgcaaaatggctgataatttggatgaatttattgaagagcaaaaagccagattggccgaagacaaagcagagttggaaagtgatccaccttacatggaaatgaagggaaagttgtcagcgaagctttctgaaaacagtaagatactgatctctatggctaaggaaaacataccaccaaatagtcaacagaccaggggttccttaggaattgattatggattaagtttaccacttggagaagactatgaacggaagaaacataaattaaaagaagaattgcggcaagattacagacgttatcttactcaggaaaggttgaaacttgaacgtaacaaagaatacaatcagtttctcaggggtaaggaagaatccagtgaaaagttcaggcaggtggaaaagagtactgagcccaagagtcagagaaataaaaaacctattggtcaagttaagcctgatctaacttcacaaatacagacatcttgtgaaaattcagagggtcctagaaaagatgtcttaactccttcagaggcatatgaagaacttctgaaccaaagacgactagaggaggacagataccgacaactagatgatgaaatcgaattaaggaatagaagaattattaaaaaagcaaatgaagaagtgggcatttccaacctaaaacatcaaaggtttgcaagcaaggctggcattccagatagaagatttcacagatttaatgaggatcgtgtttttgatagacggtatcatagaccagaccaagatcctgaagtaagtgaagaaatggatgagaggtttagatatgaaagtgattttgatagaagactttcgagagtgtatacaaatgacaggatgcacaggaacaaacgagggaatatgcctcctatggaacatgatggggatgttatagaacagtcaaacataagaatttcatctgctgaaaataaaagtgctccagacaatgaaacatccaaatctgctaatcaagatacctgtagtccttttgcagggatgctctttggaggtgaagatcgagaacttattcagagaaggaaagagaaatacagactagaactgttggaacaaatggctgagcaacagaggaacaagagacgagaaaaagatttagaactcagggttgcagcgtctggagcacaagaccctgagaaatcgcctgatagactaaagcagtttagtgtggcaccaagacactttgaagagatgataccacctgaaagacccagaatagctttccagacacctctccctcctttatctgccccatctgtcccacccatcccatcagttcatcctgttccttctcaaaatgaagatttgcgcagtggactcagcagcgcccttggtgaaatggtgtctcccaggattgcacctctgcctccacctcccctactaccacctttggctactaactatcgaactccttatgatgatgcatactatttttatgggtccaggaatactttcgatcccagtcttgcttattatggttcaggaatgatgggcgtacagcctgcagcttatgttagtgctcctgtcacccaccaactagcacaacctgttgtgaatacggttggacagaatgaactgaagattacaagtgatcaagtgataaattcaggattgatttttgaagataaaccgaaaccttccaaacagtcacttcagtcttaccaagaggctttgcagcagcagattcgggaaagagaagaaagaaggaagaaagaacgtgaagaaaaagaagaatatgaagctaaattagaagctgaaatgagaacatataatccctggggaaaaggtggaggtggtgctcctctcagggatgcaaaaggaaatctgataactgatttgaataggatgcacagacaaaatatagatgcctaccataacccagatgcaagaacatatgaagataaaagggctgttgtatctctagacccaaatttagccacttcaaatgctgagaacctagaagatgctgcaaataaaagctcaggtcatatgcaaacacagagctctccttttgctcggggaaatgtatttggtgagcctccaactgaacttcagattaaacagcaagaattatacaagaattttcttcgtttccagattgaggaaaagaaacaaagagaggaagcagagcgagagagactgagaattgcagaagaaaaagaagaaagacggcttgcagaacagagggcacgaattcagcaggagtatgaagaggaacaggaaaagaaaagagagaaagaggaggagcaaaggctaaaaaatgaagagcatattcggttagctgaagaaagacaaaaagaagcagaaagaaagaagaaagaagaagaagaaaaatataacctgcaacttcagcactactgtgaaagagacaatttgattggggaagaaacaaagcacatgagacagccttctcctatagttcctgctcttcagaacaaaattgcaagcaaactccaaagacctccttcagttgacagcatcatacgttcctttattcatgaaagttccatgtccagggcacagtcacccccggtacctgccaggaaaaatcagctccgtgcagaagaggagaaaaaaaatgtaattatggaattatcagaaatgagaaaacagcttcgtagtgaagagaggcgtctacaagagcgattgctacacatggacagtgatgatgaaattcctatcaggaaaaaggaaaggaatcccatggatatatttgatatggctagacatcggttgcaagctcctgtcagaagacagtcccctaagggcttagacgctgccacttttcagaatgttcatgattttaatgagctgaaagatagagattcagaaacacgagttgatctgaaatttatgtacctggatcctccaagagatcatcacaccttagagattcagcagcaagccctgctaagagagcagcagaagaggctgaacagaataaaaatgcaggaaggtgccaaagttgacttagatgccatcccaagtgctaaagtacgagagcaaagaatgcccagagatgacactagtgatttcttgaaaaactcattattggaatctgatagtgcttttattggggcttacggtgagacatatcctgccattgaagatgacgtcctccctccaccatcacagttgccctctgcacgggagcgcaggaggaacaaatggaaaggactagacattgatagcagtcgtcctaatgtagcaccagatggtctctctctaaaatctatatccagtgtaaatgttgatgagcttagagtgagaaatgaggaacgaatgcgaagactgaatgaatttcacaataaacctattaatacagatgatgagagttcactggttgaccctgatgacatcatgaaacacataggggatgacggatcaaactctgtagcaactgagccctggctccgccctggcacttcagaaacgctgaaacgtttcatggcagagcagctgaaccaggagcagcagcagattcctggaaaaccaggcactttcacttggcagggcctgtcgactgcacatggttaaaataaacctgtactggacccagtagtgccttttaaggtgaaaggaatggtaaatctgtacctttaatatgtcctacttttggcccctacctgaaagttactttttttccatcatctgtatataaaattatttttatcatgatgtatattatgtacataaataaaaggccatgattattgatttatataatagaattgtatagattatttttgcacagttttgtcataaattagggtggtaatgaactggattgaactactatatgtgcattatattgaattctgcttgtcattaagataaggtgaataagtgtcttaaacgtcctgtaaaaccggactcccctttgttacatgcacattttccattgttacctcgatgcaaaagaattcatttagtaggtacatctattgtagctgtgattattccagtttctgtgtgatgcaatcaaatgtcctattaattaattattatttcatgtcatttgtagctactgatacagcagaaatgaagggaactgtaattacttgtatttttgtaagccatacgttaaatgtttgttacatcatctttctgcttctatttttatgccaatgaaggcatttgtcttgttactaattacatgatgtaactacttcttgatataaataaatttttattttaattactaaaa

SEQ ID NO: 309067 - DNA, 435 bp, Artificial Sequence
  derived and/or modified sequence
atgcccagcagcgcccacgcccacgccatcctgaaggacgcccaggacagccccggcgtggtgctgggccagggcgtgatcagagccggcaagggctgggagaacggccccgagagccacagagtgagatacagaggcaagaagaacaccgactggcacaccagaagccccgccctgaccttcaccgtgctgtggcccagctgccccctggtgcccatcgtgctgggcctgaaccccggcttctgcccctgcgccagaagcagcggcgagtgcaaccacagcggccacatcatcgagggcaccagatgggaccagggccagctgtgcctgctgttcaccctgagcagagccgacatcagagcctgctggagagtgggcgagcagcagtacgtgagcctgttcacccacgtgcagatgcagcaccccagcctgtag

SEQ ID NO: 309068 - DNA, 3525 bp, Artificial Sequence
  derived and/or modified sequence
atgtcagaggatagtcggggtgatagtagggcagagagcgctaaggacttggagaaacaattgcgactgagagtctgcgtactgagtgagctgcagaaaaccgagcgagactacgtgggaacattagagtttcttgtcagcgcattccttcacagaatgaatcagtgcgccgcatccaaagtagacaaaaatgtgactgaagaaaccgtgaaaatgctgtttagtaacattgaggacatactggcagtccataaggagtttctgaaggtggtcgaggagtgtctgcaccccgagcctaacgcccagcaggaagtcggcacatgctttctgcattttaaagacaagttccgcatctacgatgaatactgtagcaatcatgagaaggcgcaaaaattgctgctggagctgaataaaatcagaactatcaggacattcctgctcaattgcatgctgctcggaggccgaaaaaacacggatgtgccactcgaagggtacttggtgacgcccatccaacggatctgtaaatacccgctgattctcaaggaattgctgaaacgtaccccaagaaaacacagtgattacgctgccgttatggaagccctgcaggctatgaaggcagtatgttccaatattaacgaggccaagaggcagatggagaagttagaagttctggaggaatggcagtctcacatcgaaggctgggagggctccaatatcaccgatacctgtacagagatgctcatgtgtggcgtgctgttgaaaatcagcagtggaaacattcaagagcgggtcttcttcctgtttgacaacctacttgtgtattgtaagagaaaacacaggcggctgaagaattccaaggcatcaacagatgggcatcgatacctctttcgcggccggataaataccgaagtgatggaggtcgagaacgtggacgatggcacggcagactttcacagcagtgggcacatcgtcgtgaatggctggaagattcacaacaccgctaagaacaaatggtttgtgtgtatggccaaaacccctgaggaaaagcatgaatggtttgaagctattctcaaagagcgggagagacgcaaaggcctgaagctcggcatggagcaggatacctgggtaatgatttcagaacaaggcgaaaaactctacaaaatgatgtgtcgccaagggaacctcattaaggacaggaaacggaagctgaccaccttcccaaaatgtttcctcggctccgaattcgtaagttggttgctcgagataggggagattcaccgacccgaagaaggggtacacctaggacaggcccttttagagaatggaatcatccaccatgtgaccgataagcatcaatttaagccggagcaaatgctgtaccgattccgctatgacgacggaaccttctatcctcggaatgagatgcaggacgtcatttctaagggagtccgcctgtattgcagattgcattctttgttcacccccgttatccgggacaaagactaccacctgaggacatataagagtgtggtcatggcgaataagctaatcgattggctgattgctcagggagattgccggacacgggaagaagctatgatatttggagtgggactttgcgataacgggtttatgcatcacgtgctcgagaagagcgagtttaaggacgagcccctcctgttcagattctttagtgacgaagagatggagggctctaacatgaaacaccgtctcatgaagcatgatctcaaggtggtagaaaacgtgatcgcaaaatctctactcatcaaaagtaatgagggaagctacggatttggcctggaagacaaaaataaggtgccaatcattaaactcgtagagaagggcagcaacgcagaaatggctggaatggaagtggggaagaagatattcgctattaatggcgatctggtgttcatgcgaccttttaatgaggtcgattgctttcttaagagttgcctcaactcacggaagcctcttcgcgtactcgtgagcacaaagccccgggagactgtgaagatacctgactcggccgacggcttgggatttcagatccgcgggttcggcccctcagttgtacacgccgttggccgcggcactgtcgccgctgccgctgggctccaccctggccaatgcattattaaagtcaacgggattaatgtctcaaaggagacccatgcatcagtgatcgcccacgtaaccgcttgccggaagtaccgtcggcctactaagcaagattcaatccaatgggtgtacaacagcatagagagtgcccaggaggacctgcaaaagtcacactctaagcctccaggagatgaagctggcgatgcctttgactgtaaggtggaggaagtcatagataagtttaacaccatggcaataatcgatgggaaaaaggaacacgtttcactgaccgtggataatgttcacttggagtacggggttgtctatgaatacgattctacggcgggcattaagtgcaacgtagtggaaaagatgatcgaaccgaaggggtttttcagtctaaccgccaaaattctagaagcattagctaagtcagacgaacatttcgtacagaactgtacatcactcaattcattgaacgaagtgataccaacagacctgcaatctaagttttcagccctttgttccgagaggatagaacacctctgtcagagaatcagttcgtacaagaaggtaagtgtgctgcttatcctctataccattattgtcgaaatgtatcattttaccgaaatgattactctgtacaatattttggaacttgttcggccacccaactccgagttttttttttcatttttgccgacaaaaaggatgaagacacttaatcagaagaaagtgactcacatgaaaaagaccaacattcagttgcagttctctcgcgtgcttaagaaccgagcttggccgaccttcaaacaggctaaatccaaaatttctccacttcattcttccgacttctgtccaaccaactgccacgtgaacgtgatggaagtgtcctacccgaaaacatcgaccagcctgggcagcgcttttggggtccaatggaaactgtcaccgatggtgtacatccagcatacaataacgacaatggctgccccctccggcctctcacttggccaacaagatggtcacggattgcgctatctcctggaaagaaaaactagcgagggcattatccccaccgactccgataatgaaaaaggagaacggaattcgaagagggtttgctttaatgtggcaggagacgaacaggaggactccggacacgatacaatcagtaaccgcgattcttactcattcagcgactgcaactctaaccggaacagcatcgccagctttacttcaatctgctctagccagtgtagtagttacttccactcggacgagatggacagcggctccgacgaattgccactgtccgtgaggatcagccacgataagcaggataagatccactcttgtttggagcatttattctcccagtag

SEQ ID NO: 309069 - DNA, 3525 bp, Artificial Sequence
  derived and/or modified sequence
atgtctgaggacagcagaggagacagcagagctgagagcgccaaggacctggagaagcagctgcggctgcgggtgtgtgtgctgtctgagctgcagaagacagagcgggactatgtgggcaccctggagttcctggtgtctgccttcctgcacaggatgaaccagtgtgccgccagcaaggtggacaagaatgtgacagaggagaccgtgaagatgctgttcagcaacatcgaggacatcctggccgtgcacaaggagttcctgaaggtggtggaggagtgcctgcaccctgagcccaatgcccagcaggaggtgggcacctgcttcctgcacttcaaggacaagttccgcatctatgatgagtactgcagcaaccacgagaaggcccagaagctgctgctggagctgaacaagatccgcaccatccgcaccttcctgctgaactgcatgctgctgggcggcaggaagaacacagatgtgcccctggagggctacctggtgacccccatccagaggatctgcaagtaccccctcatcctgaaggagctgctgaagaggacccccaggaagcacagcgactatgctgctgtgatggaggccctgcaggccatgaaggctgtgtgcagcaacatcaatgaggccaagaggcagatggagaagctggaggtgctggaggagtggcagagccacatcgagggctgggagggcagcaacatcacagacacctgcacagagatgctgatgtgtggggtgctgctgaagatcagcagcggcaacatccaggagagggtcttcttcctgtttgacaacctgctggtgtactgcaagaggaagcaccggcggctgaagaacagcaaggccagcacagatggccaccgctacctgttccggggccgcatcaacacagaggtgatggaggtggagaatgtggatgatggaacagctgacttccacagcagcggccacatcgtggtgaatggctggaagatccacaacacagccaagaacaagtggtttgtgtgcatggccaagaccccagaggagaagcatgagtggtttgaggccatcctgaaggagcgggagaggaggaagggcctgaagctgggcatggagcaggacacctgggtgatgatcagcgagcagggcgagaagctgtacaagatgatgtgccggcagggcaacctgatcaaggacaggaagaggaagctgaccaccttccccaagtgcttcctgggcagcgagtttgtgtcctggctgctggagatcggggagatccacaggcctgaggagggcgtgcacctgggccaggccctgctggagaatggcatcatccaccacgtgacagacaagcaccagttcaagccagagcagatgctgtaccgcttccgctatgatgatggcaccttctaccccagaaatgagatgcaggatgtgatcagcaaaggagtgcggctgtactgccgcctgcacagcctcttcacccctgtgatccgggacaaggactaccacctgcggacctacaagtctgtggtgatggccaacaagctgattgactggctgattgcccagggcgactgcaggacccgggaggaggccatgatctttggagtgggcctgtgtgacaatggcttcatgcaccacgtgctggagaagtctgagttcaaggatgagcccctgctcttccgcttcttcagtgatgaggagatggagggcagcaacatgaagcaccggctgatgaagcatgacctgaaggtggtggagaatgtcatcgccaagagcctgctgatcaagagcaatgaaggcagctatggcttcggcctggaggacaagaacaaggtgcccatcatcaagctggtggagaagggcagcaatgctgagatggccggcatggaggtgggcaagaagatctttgccatcaacggggacctggtgttcatgaggcccttcaatgaggtggactgcttcctgaagagctgcctgaacagcaggaagcccctgcgggtgctggtgtccaccaagccccgggagaccgtgaagatcccagattctgcagatggcctgggcttccagatccggggcttcggccccagcgtggtgcatgctgtgggccggggcaccgtggccgctgctgctggcctgcaccctggccagtgcatcatcaaggtgaatggcatcaacgtgtccaaggagacccacgccagcgtcatcgcccacgtgacagcctgcaggaagtaccgccggcccaccaagcaggacagcatccagtgggtgtacaacagcattgaaagtgcccaggaggacctgcagaagagccacagcaagcccccaggagatgaggccggagatgcctttgactgcaaggtggaggaggtgattgacaagttcaacaccatggccatcattgatggcaagaaggagcacgtgtccctgactgtggacaacgtgcacctggagtatggagtggtgtatgaatatgacagcacagctggcatcaagtgcaatgtggtggagaagatgattgagcccaagggcttcttcagcctgacagccaagatcctggaggccctggccaagagtgatgagcactttgtgcagaactgcaccagcctgaacagcctgaatgaggtgatccccacagacctgcagagcaagttcagcgccctgtgcagcgagagaattgagcacctgtgccagaggatcagcagctacaagaaggtgtctgtgctgctgatcctgtacaccatcatcgtggagatgtaccacttcacagagatgatcaccctgtacaacatcctggagctggtgcggccccccaacagcgagttcttcttctccttcctgcccaccaagaggatgaagaccctgaaccagaagaaggtgacccacatgaagaagaccaacatccagctgcagttcagccgggtgctgaagaacagagcctggcccaccttcaagcaggccaagagcaagatcagccccctgcacagcagtgacttctgccccaccaactgccacgtgaatgtgatggaggtgtcctaccccaagaccagcaccagcctgggcagcgccttcggcgtgcagtggaagctgagccccatggtgtacatccagcacaccatcaccaccatggccgcccccagcggcctgagcctgggccagcaggacggccacggcctgcgctacctgctggagaggaagaccagcgagggcatcatccccacagacagcgacaatgagaagggggagaggaacagcaagagggtgtgcttcaacgtggccggagatgagcaggaggacagcggccatgacaccatcagcaacagagacagctacagcttcagtgactgcaacagcaacagaaacagcatcgccagcttcaccagcatctgcagcagccagtgcagcagctacttccacagtgatgagatggattctggcagtgatgagctgcccctgtctgtgcgcatcagccatgacaagcaggacaagatccacagctgcctggagcacctgttcagccagtag

SEQ ID NO: 309070 - DNA, 3525 bp, Artificial Sequence
  derived and/or modified sequence
atgagcgaggacagccggggcgacagccgggccgagagcgccaaggacctggaaaaacagcttaggcttcgggtctgtgtgcttagtgaactacagaagacagaacgcgactatgtgggtactctggagtttttggtgtcagcgttcctgcaccggatgaaccaatgcgcggcaagcaaggtcgacaagaacgtcaccgaggaaacggtcaaaatgttattcagcaacatcgaagacatactagctgtgcataaagaattcttgaaagtcgtagaggaatgcctgcacccagaacccaacgcccagcaagaggttggaacatgcttccttcacttcaaagacaaattccgaatatatgatgaatactgctccaatcatgagaaggctcagaagctgctgctggaactgaacaagattcgcacaatacgaacctttctgttaaattgtatgttgctgggtgggaggaagaacacagacgttccactagaggggtatctggtcactccaatccaacggatctgtaaatatccactcatcctcaaggagctgctgaaacgaacccctaggaaacatagcgattacgccgctgtcatggaagcccttcaagccatgaaagctgtatgttccaacatcaacgaggctaaacggcagatggaaaaattggaagtattagaagagtggcaatcacatatcgaggggtgggagggcagcaatatcaccgatacttgcactgagatgcttatgtgcggtgtgctgctcaaaatatcatcaggtaacattcaggagcgcgtctttttcttgtttgataacctgctggtgtattgtaaacgcaagcaccggagacttaagaatagtaaagcttcaactgacggccatcggtatttatttcgcggccgaattaacaccgaggtaatggaggtggaaaatgtcgatgacggcactgcggacttccattcctccggccatatcgtagtgaatggttggaagattcacaataccgccaagaacaagtggtttgtctgcatggctaagacaccagaagaaaagcatgagtggtttgaggcaatccttaaggagcgggagcggaggaaaggacttaaactcgggatggagcaggacacttgggtgatgataagcgaacagggagaaaagctgtacaagatgatgtgccggcaggggaacctcatcaaggacaggaaacgaaagctgactacgttcccaaagtgctttttgggcagtgagtttgtttcctggctcctggagattggagagatccatcgcccagaggagggcgtgcacctggggcaggctcttttggagaacggcatcatacaccacgttactgataaacaccagttcaagccggagcaaatgctgtaccgctttcggtatgacgacggaaccttttatccccggaatgagatgcaggacgtcataagcaaaggcgtgaggttatactgccgccttcattcccttttcactcctgttatcagagacaaggactaccaccttcgcacctacaagtcagtcgtaatggcaaataaactgattgattggctgattgctcaaggcgattgcaggacaagagaggaggctatgatattcggtgttggactgtgtgacaacggcttcatgcatcacgtgttggaaaagtctgaatttaaagatgaacccctgttgtttaggttttttagcgatgaagagatggaaggcagtaatatgaaacatcggctgatgaaacacgatttaaaggttgttgaaaatgtcattgccaaatcccttctgatcaagtcaaacgagggctcatacgggtttggtcttgaagataaaaacaaagtgccaataatcaagctggtcgagaagggatccaacgccgagatggcgggcatggaggtgggtaagaaaatcttcgccattaacggcgatcttgtattcatgaggccttttaatgaagtggattgcttcctgaagagttgcctgaattcgaggaaacccttgagagttcttgtatctactaagccaagggagaccgtgaaaatccccgatagtgccgacggacttggcttccagattcgtgggttcggtcccagcgtcgtacatgctgtgggccgaggtactgtcgctgcggcagctggactccacccaggccaatgtataatcaaagtgaacggcattaatgtgtccaaggaaacgcacgcctctgtcattgcacacgtgaccgcatgtaggaagtacagacgaccaactaagcaggactcaatccagtgggtgtataactccatcgaatctgctcaggaggacctccagaagtcccatagcaagccccctggagatgaggctggggatgctttcgactgtaaggtggaggaagtcatagacaagttcaacaccatggccataattgatggaaagaaagagcacgtgagcctgacagttgataatgttcaccttgaatatggggtggtgtatgagtacgactccactgcaggcatcaagtgcaacgttgtcgagaagatgatcgaacctaaggggtttttctctctcactgctaaaatcctggaggccctcgcaaagtccgatgagcacttcgttcagaattgcacctctctcaattcactcaatgaggtgatcccaacagatctgcaatccaaattttcagcactgtgtagcgagcggatcgagcacctttgtcagcgcatcagctcatacaagaaggtgtctgtgttgctgattttgtacactatcatcgtggagatgtatcactttaccgagatgatcaccctgtacaatatcttagaactcgtcaggcctcccaacagcgagtttttttttagtttcctgcctactaaacgaatgaagaccctgaaccagaaaaaggtgacccacatgaaaaaaaccaacatccagctgcagttctccagggtgctcaaaaatcgagcctggccaacctttaaacaggctaaaagcaaaatatccccactccacagcagcgatttttgccctaccaattgccatgtcaacgtcatggaagtgagctatcccaagacctctacatctctgggttctgcctttggtgtccaatggaagctatctcctatggtgtacatccagcacactatcaccactatggccgcacctagtgggctatctctgggtcagcaggatggccacggtcttcgttacctgcttgagagaaagacgagcgagggaataattccgacggattccgacaatgaaaagggggaaaggaacagcaagcgggtctgcttcaacgtggctggcgatgagcaagaagacagtggtcacgacactatcagtaatagggactcctactcatttagtgactgtaacagcaaccgcaattctatcgcatctttcacctcaatatgcagtagccagtgcagctcttatttccactcagatgagatggattctggctcagacgagctaccgctgtccgttagaatttctcacgacaagcaggacaaaatccattcctgtctggagcatctcttttcccaatag

SEQ ID NO: 309071 - DNA, 5400 bp, Artificial Sequence
  derived and/or modified sequence
gccagagcagcggggccgggcgcgcagggcctggccggagcccccactcccaggagtttcctctgcagagccccgcgccccccgcgccgggatttcagcccgatcccctcctctccctgcgcccagcctctccccagcatgtaaagtcttctgtctctcctcggagttggcggaggcggcaactttccattctcgccgccgggggccgggcagcagcgggcgcgcgggtcagcgctcagcacggcgggcagcgccgcgctgcgcaccgccgccgaccatgagcgaggacagccgcggagacagccgcgccgagagcgccaaggacctggagaagcagcttcgcctgcgcgtgtgcgtgctcagcgagctccagaagaccgagcgggactatgtgggcacgctggagttcctggtgtcggcattcttacacagaatgaaccagtgtgcagcatcaaaagttgacaaaaatgtgacagaagaaacagtgaagatgttgttctcaaacattgaagacatccttgcagtacataaagaattcttaaaagtcgtggaagaatgcttacaccccgaacctaatgctcaacaagaagtgggaacctgctttcttcactttaaagacaagtttcgtatctatgatgaatattgtagtaaccatgagaaggcacaaaaattacttcttgaactcaacaaaataagaacaatccggacatttcttttgaactgcatgctgcttggaggacggaagaacacagatgttcccttggaaggatatttagtaacaccaatacaaagaatatgcaagtaccctcttattttgaaggagttgctgaagcggactccacggaaacacagtgactatgcagcagtgatggaagccctccaagccatgaaagctgtctgttccaacataaacgaggccaagagacagatggagaagttagaagttttagaggaatggcagtctcacattgaaggctgggaggggtccaacatcactgacacctgcactgaaatgctaatgtgtggagtcttactgaaaatttcttctggaaatattcaagaacgggtgttttttcttttcgataatcttttggtgtactgcaaaagaaaacacagacggttgaagaacagcaaggcatctacagatggacatcggtacctttttcgtggccggatcaacacggaggtgatggaagtggagaatgtggatgatggcaccgctgatttccatagcagtggacacattgttgttaatggatggaagatacataacacagcaaaaaataaatggtttgtttgtatggcaaaaacacctgaagagaagcatgaatggtttgaagctattttgaaagaaagagaacggcggaaaggtttaaaattaggaatggagcaagatacctgggtcatgatctctgaacagggtgagaaactttataaaatgatgtgcagacaaggaaatctgatcaaagaccgaaagagaaaactgactacgttccctaaatgctttcttggaagcgaatttgtgtcatggctgttggaaattggagagattcacaggcctgaggaaggcgtgcacttgggacaagcattattagaaaatggaatcattcaccatgttactgataaacatcaattcaaaccagaacagatgttatatagatttcgctatgatgatggaacattttatccaagaaatgagatgcaggacgtgatttcaaagggtgtaagattatattgtcgtcttcatagcctttttactccagtgataagagataaagattaccatttaaggacctacaaatctgtggtcatggccaacaaactgatagactggttaattgcacagggagattgccgcaccagagaagaggcaatgatatttggcgttggactctgtgacaatggatttatgcaccatgtccttgaaaaaagcgaattcaaagatgaacccctacttttccgttttttttcggatgaggaaatggagggatcaaatatgaaacatcgacttatgaaacatgacttaaaagttgtggaaaatgttatagctaagtcattattgattaaatccaatgaaggcagctatggctttggattagaagacaaaaataaagttccaataataaagttggtagaaaagggatctaatgctgagatggctggcatggaagtcgggaaaaagatttttgctattaatggtgacctagtttttatgagacctttcaatgaagtggattgcttcctgaaatcgtgtttaaacagcagaaaacctctaagagttcttgtgagcacaaagccaagagagacagtgaaaattccagattcagctgatggacttggcttccagatccggggatttggcccttctgttgtgcatgctgtaggaagaggaactgtggctgcagcagctggtcttcaccctggacagtgcattatcaaggtgaatggaatcaatgtcagcaaagagacacatgccagtgtcattgcacacgttacagcctgcaggaagtacaggcggccaacgaagcaagattccatacaatgggtttataatagcattgagagtgctcaagaagaccttcaaaaatctcactccaagccccctggagatgaagcaggggatgcttttgactgtaaagtagaagaggttattgacaaattcaacactatggccatcattgatgggaagaaggagcatgtgagtctgacagtggacaatgtccacctggaatatggtgtcgtgtatgagtacgacagcacagctggcatcaagtgcaatgtggtggaaaagatgattgagcccaaaggtttcttcagcttaactgccaagattcttgaagccctggctaaaagtgatgagcattttgtacaaaactgtaccagcctaaattctctaaatgaagtgattcctactgaccttcagagtaaattcagtgccctttgcagtgaaagaattgaacacctatgtcagagaatatccagttataaaaaggtaagtgttctattgattttatacacaattattgttgaaatgtaccattttactgagatgataacattatataacattttagaacttgtaagaccacctaattctgaattcttcttttcttttctcccaactaagagaatgaaaactctcaatcagaaaaaagttactcacatgaagaaaactaatattcagttgcagttttctcgtgtactgaagaatagggcctggcctacttttaaacaggccaaatctaaaatctccccactgcacagcagtgatttctgccctaccaactgccatgtcaatgtgatggaagtttcttatcccaaaacatcaacctctttgggaagtgcatttggtgttcagtggaaactgagccctatggtgtacattcagcacaccatcacaaccatggcggccccttcaggtctgtctctgggacagcaggatggccatggtctcaggtatctgttagaacgtaagacatcagagggcataataccaacagacagtgacaatgagaagggagaaagaaacagcaaacgggtatgttttaatgtagcaggagatgaacaggaagattctggtcatgacaccatcagcaacagagactcttacagtttcagtgactgcaacagcaataggaattccatcgcctccttcaccagcatctgcagcagccagtgcagctcgtatttccacagtgatgaaatggactcagggagtgatgaacttcccttaagtgttcgcatatctcatgataaacaggacaagatacatagttgccttgagcatcttttcagccaggtggattcaattaccaatctcctaaaagggcaggctgttgtgagggcctttgaccaaaccaagtatctcactccaggccgaggattgcaagaatttcaacaggaaatggaaccaaagctgagttgtccaaaaaggctacggcttcatatcaagcaagatccttggaatcttcccagcagcgtccggactcttgctcagaacatcaggaaatttgttgaagaggtaaagtgtaggctactcctggctcttcttgaatattcagatagtgagacacagctccgtagagacatggttttctgccagactcttgtggccactgtctgtgccttctctgagcagctcatggcggccttgaaccagatgtttgacaacagcaaggaaaatgagatggaaacttgggaagccagcaggaggtggctggaccagatagcgaatgcaggtgttctttttcactttcagtcacttctgtcaccaaacttgacagatgaacaagccatgttagaagatacactggttgcactatttgatttggaaaaggtttccttttactttaaaccatcagaagaggaacctctggttgcaaatgttcctcttacatatcaagcagaaggaagtcggcaagctctgaaagtttacttctacattgatagttatcattttgaacaacttcctcaacggctgaaaaatggaggagggtttaaaattcatcctgttctttttgcacaagcactagagagcatggaaggatattattacagagacaatgtttctgtggaagaatttcaagctcagataaatgcagcctcactggaaaaggtcaaacagtacaaccagaagctcagggcattctacttggacaagtcaaattcaccaccaaactccacatccaaagctgcctatgtagataagctaatgaggcctctcaacgctttggatgaactttaccgactggtagcctcgtttatcagatccaagcgcacagctgcctgtgcaaacacagcttgcagtgcttctggggttggactgctgtcagtttcctcggagctgtgcaacaggctgggcgcctgccacatcatcatgtgcagcagcggtgtgcatcggtgcaccctgagcgtgacgctggagcaagccatcattctggccagaagccacggactgccacctcgttacatcatgcaggctacagatgtgatgcggaagcagggagcaagagttcagaacacagcgaagaatttgggagtcagagaccggactccacagtctgcaccaaggctgtacaagctgtgcgagccacctcccccagctggagaagaatgaaaagaactcccaagaaaccaggcaggcagaagctcctgaatgctggactagacaaactacatgctggctaaacattctccactgaagatacatcaatgcttttttttttttttttttctgtaaatctttcttcccattgcaaacaagtagtgatcagtttatactttgatatttatgctggaaatggatagaagttcaatcagacagttcagcttcacgaactgatgtctctctgtattgacattaagtattcacttttagagtaaaatccatccctgggacat

SEQ ID NO: 309072 - DNA, 3525 bp, Artificial Sequence
  derived and/or modified sequence
atgtcagaagatagcaggggcgactccagagcagagagcgcaaaagatctagagaaacagctccgactgcgcgtgtgcgttttgtccgaacttcagaagacggagcgggattatgttggaacactcgagtttctggtgagtgcttttctccacagaatgaaccagtgtgctgctagcaaggttgataaaaatgtaacagaggagaccgtcaagatgctcttttcaaatatcgaagatatccttgccgtgcacaaggaatttctgaaagtcgtggaggagtgcctgcatcccgagccaaacgcccagcaggaagtggggacatgctttctccacttcaaggacaaattcaggatctacgacgaatattgtagcaatcatgagaaggcccagaaacttctgctagaactcaataaaatccgcactatcagaacctttctactgaactgcatgttactgggtggtcgtaagaacacagatgtgcccttggaggggtacctcgtgacgcctatccagcggatatgcaagtacccattgatacttaaggaacttttgaaacgaacgccgagaaagcactccgactacgccgctgttatggaagctctacaggccatgaaggctgtgtgcagcaatatcaatgaagctaagcgacagatggagaagctggaggtgctcgaagagtggcagagccacatcgaagggtgggaaggtagcaacattactgatacgtgcacagaaatgttaatgtgtggtgttctgttgaaaatcagcagcgggaatattcaggaacgagtgttctttttatttgacaacctccttgtgtattgtaaaaggaaacatcggcgactgaagaacagtaaggcgtctacagatggacacagatacttgttccggggaagaattaacactgaggtgatggaagtggaaaacgtggatgacggaaccgccgacttccactcttcgggtcacatcgtagtgaatgggtggaagattcataacactgctaagaataaatggttcgtctgcatggcgaagaccccagaagagaagcatgagtggtttgaggcaattttgaaggaaagagaacgaaggaagggacttaaactgggtatggaacaagatacatgggtaatgatttccgagcagggcgagaagctctacaaaatgatgtgtagacagggcaatctgatcaaggaccgcaagcggaaactgaccaccttccctaagtgtttcctgggatcagagtttgtcagttggctcctggaaatcggagaaatacaccgcccagaagagggagtgcaccttggacaagccctgctcgagaacggtataattcaccacgttacagacaaacaccagttcaagccagagcagatgctgtatagatttagatatgacgacggcacgttctacccccgaaacgaaatgcaggatgtaatcagtaagggagttcgcttgtattgtagactccactcactctttactcctgtcatccgggacaaggactatcacctgaggacctacaagtcggtagtgatggccaacaagctgattgattggctgatcgcgcagggcgactgcagaacaagggaagaagccatgatttttggcgtgggcctgtgcgataatggctttatgcaccacgtgctggaaaagtctgagtttaaagatgaaccgctgctgttcagattcttttctgatgaggagatggaaggctcaaacatgaaacatagactgatgaaacatgacctgaaggtggtagaaaatgtcatcgccaaatcgttactgatcaagtctaacgagggttcctatggcttcggcctggaggacaagaataaagtgccaatcattaagctggtggagaaaggctctaatgctgagatggcaggcatggaggtgggcaagaaaatttttgcgatcaacggggatcttgttttcatgaggccatttaacgaagtcgattgtttcctcaaatcctgtctcaactcacgcaaacctctccgggtgttggtgtccaccaagcctcgagaaaccgtcaaaattccagattcagcggatgggctgggcttccagattcgaggattcggccctagtgttgttcatgctgtagggcgtggaaccgtggccgctgctgcgggactccaccccggacagtgcatcattaaagtcaacgggattaatgtcagcaaagagacccacgcaagtgtgatcgcacatgtgacagcctgtagaaagtaccgcagacctaccaagcaggatagcattcaatgggtctacaattcaattgagtccgcccaggaggatctgcagaagtcacactcaaaaccacccggagatgaagctggcgacgctttcgattgcaaagtcgaagaagtgattgacaaatttaacaccatggctatcatcgatggtaagaaggaacacgtgtctctgacggtcgataacgtgcaccttgagtatggggtcgtgtacgagtacgattccacggcaggcattaagtgcaacgtggtggagaagatgatagaaccaaaagggttcttctcgctcaccgccaagattcttgaggcactggctaagtcggacgagcactttgtgcaaaattgtacatccttgaattccctgaacgaagtgataccaactgatttgcagtctaagttctcggcactgtgcagcgagcgaatcgagcacctgtgtcagaggatctcctcttacaaaaaagtgagcgtactactcattttgtacaccataatcgtggagatgtaccatttcaccgaaatgattactctatataatattctggagttagtcagaccaccgaattccgagttctttttctcgtttttgcccaccaaaagaatgaagacgctgaaccaaaagaaagtgacgcatatgaagaagacaaatatccagttgcagttcagtcgtgtccttaaaaaccgcgcatggccaacgtttaagcaggcgaagtctaaaatttcaccgctacactccagcgacttctgccctacaaactgccatgtgaatgtcatggaagtgagctaccccaagacgtctacttccttaggctccgcatttggagttcagtggaaattgagtccaatggtctacattcagcacactattaccacgatggctgctccaagtgggctgtctttggggcagcaggacggccacggtctccggtatctcttggagaggaagacaagcgagggaataattcctaccgatagcgacaatgaaaagggagaacggaattcaaagcgcgtttgttttaacgtcgcgggtgatgagcaagaggattctggtcacgacacaattagcaatagagacagttattcctttagtgattgcaactcgaaccgaaattccatcgcatccttcacctctatttgttctagtcagtgtagttcctactttcattcagatgagatggatagcggatccgacgaactcccactttcggtccggatctcccatgataaacaggataagattcattcatgtctggaacacttgttttctcagtag

SEQ ID NO: 309073 - DNA, 3525 bp, Artificial Sequence
  derived and/or modified sequence
atgagcgaggacagcagaggcgacagcagagccgagagcgccaaggacctggagaagcagctgagactgagagtgtgcgtgctgagcgagctgcagaagaccgagagagactacgtgggcaccctggagttcctggtgagcgccttcctgcacagaatgaaccagtgcgccgccagcaaggtggacaagaacgtgaccgaggagaccgtgaagatgctgttcagcaacatcgaggacatcctggccgtgcacaaggagttcctgaaggtggtggaggagtgcctgcaccccgagcccaacgcccagcaggaggtgggcacctgcttcctgcacttcaaggacaagttcagaatctacgacgagtactgcagcaaccacgagaaggcccagaagctgctgctggagctgaacaagatcagaaccatcagaaccttcctgctgaactgcatgctgctgggcggcagaaagaacaccgacgtgcccctggagggctacctggtgacccccatccagagaatctgcaagtaccccctgatcctgaaggagctgctgaagagaacccccagaaagcacagcgactacgccgccgtgatggaggccctgcaggccatgaaggccgtgtgcagcaacatcaacgaggccaagagacagatggagaagctggaggtgctggaggagtggcagagccacatcgagggctgggagggcagcaacatcaccgacacctgcaccgagatgctgatgtgcggcgtgctgctgaagatcagcagcggcaacatccaggagagagtgttcttcctgttcgacaacctgctggtgtactgcaagagaaagcacagaagactgaagaacagcaaggccagcaccgacggccacagatacctgttcagaggcagaatcaacaccgaggtgatggaggtggagaacgtggacgacggcaccgccgacttccacagcagcggccacatcgtggtgaacggctggaagatccacaacaccgccaagaacaagtggttcgtgtgcatggccaagacccccgaggagaagcacgagtggttcgaggccatcctgaaggagagagagagaagaaagggcctgaagctgggcatggagcaggacacctgggtgatgatcagcgagcagggcgagaagctgtacaagatgatgtgcagacagggcaacctgatcaaggacagaaagagaaagctgaccaccttccccaagtgcttcctgggcagcgagttcgtgagctggctgctggagatcggcgagatccacagacccgaggagggcgtgcacctgggccaggccctgctggagaacggcatcatccaccacgtgaccgacaagcaccagttcaagcccgagcagatgctgtacagattcagatacgacgacggcaccttctaccccagaaacgagatgcaggacgtgatcagcaagggcgtgagactgtactgcagactgcacagcctgttcacccccgtgatcagagacaaggactaccacctgagaacctacaagagcgtggtgatggccaacaagctgatcgactggctgatcgcccagggcgactgcagaaccagagaggaggccatgatcttcggcgtgggcctgtgcgacaacggcttcatgcaccacgtgctggagaagagcgagttcaaggacgagcccctgctgttcagattcttcagcgacgaggagatggagggcagcaacatgaagcacagactgatgaagcacgacctgaaggtggtggagaacgtgatcgccaagagcctgctgatcaagagcaacgagggcagctacggcttcggcctggaggacaagaacaaggtgcccatcatcaagctggtggagaagggcagcaacgccgagatggccggcatggaggtgggcaagaagatcttcgccatcaacggcgacctggtgttcatgagacccttcaacgaggtggactgcttcctgaagagctgcctgaacagcagaaagcccctgagagtgctggtgagcaccaagcccagagagaccgtgaagatccccgacagcgccgacggcctgggcttccagatcagaggcttcggccccagcgtggtgcacgccgtgggcagaggcaccgtggccgccgccgccggcctgcaccccggccagtgcatcatcaaggtgaacggcatcaacgtgagcaaggagacccacgccagcgtgatcgcccacgtgaccgcctgcagaaagtacagaagacccaccaagcaggacagcatccagtgggtgtacaacagcatcgagagcgcccaggaggacctgcagaagagccacagcaagccccccggcgacgaggccggcgacgccttcgactgcaaggtggaggaggtgatcgacaagttcaacaccatggccatcatcgacggcaagaaggagcacgtgagcctgaccgtggacaacgtgcacctggagtacggcgtggtgtacgagtacgacagcaccgccggcatcaagtgcaacgtggtggagaagatgatcgagcccaagggcttcttcagcctgaccgccaagatcctggaggccctggccaagagcgacgagcacttcgtgcagaactgcaccagcctgaacagcctgaacgaggtgatccccaccgacctgcagagcaagttcagcgccctgtgcagcgagagaatcgagcacctgtgccagagaatcagcagctacaagaaggtgagcgtgctgctgatcctgtacaccatcatcgtggagatgtaccacttcaccgagatgatcaccctgtacaacatcctggagctggtgagaccccccaacagcgagttcttcttcagcttcctgcccaccaagagaatgaagaccctgaaccagaagaaggtgacccacatgaagaagaccaacatccagctgcagttcagcagagtgctgaagaacagagcctggcccaccttcaagcaggccaagagcaagatcagccccctgcacagcagcgacttctgccccaccaactgccacgtgaacgtgatggaggtgagctaccccaagaccagcaccagcctgggcagcgccttcggcgtgcagtggaagctgagccccatggtgtacatccagcacaccatcaccaccatggccgcccccagcggcctgagcctgggccagcaggacggccacggcctgagatacctgctggagagaaagaccagcgagggcatcatccccaccgacagcgacaacgagaagggcgagagaaacagcaagagagtgtgcttcaacgtggccggcgacgagcaggaggacagcggccacgacaccatcagcaacagagacagctacagcttcagcgactgcaacagcaacagaaacagcatcgccagcttcaccagcatctgcagcagccagtgcagcagctacttccacagcgacgagatggacagcggcagcgacgagctgcccctgagcgtgagaatcagccacgacaagcaggacaagatccacagctgcctggagcacctgttcagccagtag

SEQ ID NO: 309074 - DNA, 522 bp, Artificial Sequence
  derived and/or modified sequence
atgatggcccagctgttcctgctgcaggccaacgccgtgctgcccctgagtcatgagatcaaagtgaaaagacagatcagactccctgccccactgtaccctcctgagcgaaatgattcgcgttcattccagatcccccaggatctgagggaaaaggggtgggaagagggccagcagcattttgctgggaaagctgcggatgcttttcctgctcctgtccagttagagggcctcgaggccggtcagactactctcgcgagcccagaggtgggtccttggaggccaaaacgcctgtctggcgtgtgcctgctgagcgcactgctaccagatccttgtaagaccaacggtacatttctcctgcagaagcatcatctccctagtttgctcgccgtgattctcttccccgtgatcattttgactggcgctagtttcgctcacctgtttgttgccctattcgtcagccacctgctgttaaaacttcccctaggggcaggaatgagaatgcagcgcgacgccagatag

SEQ ID NO: 309075 - protein, 1119 aa, Artificial Sequence
  derived and/or modified sequence
MKRSLRKMWRPGEKKEPQGVVYEDVPDDTEDFKESLKVVFEGSAYGLQNFNKQKKLKRCDDMDTFFLHYAAAEGQIELMEKITRDSSLEVLHEMDDYGNTPLHCAVEKNQIESVKFLLSRGANPNLRNFNMMAPLHIAVQGMNNEVMKVLLEHRTIDVNLEGENGNTAVIIACTTNNSEALQILLKKGAKPCKSNKWGCFPIHQAAFSGSKECMEIILRFGEEHGYSRQLHINFMNNGKATPLHLAVQNGDLEMIKMCLDNGAQIDPVEKGRCTAIHFAATQGATEIVKLMISSYSGSVDIVNTTDGCHETMLHRASLFDHHELADYLISVGADINKIDSEGRSPLILATASASWNIVNLLLSKGAQVDIKDNFGRNFLHLTVQQPYGLKNLRPEFMQMQQIKELVMDEDNDGCTPLHYACRQGGPGSVNNLLGFNVSIHSKSKDKKSPLHFAASYGRINTCQRLLQDISDTRLLNEGDLHGMTPLHLAAKNGHDKVVQLLLKKGALFLSDHNGWTALHHASMGGYTQTMKVILDTNLKCTDRLDEDGNTALHFAAREGHAKAVALLLSHNADIVLNKQQASFLHLALHNKRKEVVLTIIRSKRWDECLKIFSHNSPGNKCPITEMIEYLPECMKVLLDFCMLHSTEDKSCRDYYIEYNFKYLQCPLEFTKKTPTQDVIYEPLTALNAMVQNNRIELLNHPVCKEYLLMKWLAYGFRAHMMNLGSYCLGLIPMTILVVNIKPGMAFNSTGIINETSDHSEILDTTNSYLIKTCMILVFLSSIFGYCKEAGQIFQQKRNYFMDISNVLEWIIYTTGIIFVLPLFVEIPAHLQWQCGAIAVYFYWMNFLLYLQRFENCGIFIVMLEVILKTLLRSTVVFIFLLLAFGLSFYILLNLQDPFSSPLLSIIQTFSMMLGDINYRESFLEPYLRNELAHPVLSFAQLVSFTIFVPIVLMNLLIGLAVGDIAEVQKHASLKRIAMQVELHTSLEKKLPLWFLRKVDQKSTIVYPNKPRSGGMLFHIFCFLFCTGEIRQEIPNADKSLEMEILKQKYRLKDLTFLLEKQHELIKLIIQKMEIISETEDDDSHCSFQDRFKKEQMEQRNSRWNTVLRAVKAKTHHLEP

SEQ ID NO: 309076 - DNA, 72 bp, Artificial Sequence
  derived and/or modified sequence
gaatggaatcaacatcaaacggaaaaaaaacggaattatcgaatggaatcgaatagaatcatcgaatggacc

SEQ ID NO: 309077 - DNA, 65 bp, Artificial Sequence
  derived and/or modified sequence
atcaacatcaaacggaaaaaaaacggaattatcgaatggaatcgaagagaatcatcgaatggacc

SEQ ID NO: 309078 - DNA, 68 bp, Artificial Sequence
  derived and/or modified sequence
ggaatcaacatcaaacggaaaaaaaacggaattatcgaatggaatcgaagagaatcatcgaatggacc

SEQ ID NO: 309079 - DNA, 62 bp, Artificial Sequence
  derived and/or modified sequence
aacatcaaacggaaaaaaaacggaattatcgaatggaatcgaagagaatcatcgaatggacc

SEQ ID NO: 309080 - DNA, 84 bp, Artificial Sequence
  derived and/or modified sequence
gtatcaacatcaaacggaaaaaaacggaattatcgaatggaatcatctaatggaatggaatggaataatccatggactcgaatg

SEQ ID NO: 309081 - DNA, 5223 bp, Artificial Sequence
  derived and/or modified sequence
actacaaaagtagcgcgggcctgagaactccttccagaagttctccagggcttccgcagagcgactttttcgctgcctgtgagctgcagcgcgggagagctcgggctcgcgcggaccccagcgcctggcaggctgacagcgctctctcgccccaggtgcccgcgcgcgtggtgagcagctgcaccaggtggcgtccggggtggggtcaatgaagcgcagcctgaggaagatgtggcgccctggagaaaagaaggagccccagggcgttgtctatgaggatgtgccggacgacacggaggatttcaaggaatcgcttaaggtggtttttgaaggaagtgcatatggattacaaaactttaataagcaaaagaaattaaaaagatgtgacgatatggacaccttcttcttgcattatgctgcagcagaaggccaaattgagctaatggagaagatcaccagagattcctctttggaagtgctgcatgaaatggatgattatggaaatacccctctgcattgtgctgtagaaaaaaaccaaattgaaagcgttaagtttcttctcagcagaggagcaaacccaaatctccgaaacttcaacatgatggctcctctccacatagctgtgcagggcatgaataatgaggtgatgaaggtcttgcttgagcatagaactattgatgttaatttggaaggagaaaatggaaacacagctgtgatcattgcgtgcaccacaaataatagcgaagcattgcagattttgcttaaaaaaggagctaagccatgtaaatcaaataaatggggatgtttccctattcaccaagctgcattttcaggttccaaagaatgcatggaaataatactaaggtttggtgaagagcatgggtacagtagacagttgcacattaactttatgaataatgggaaagccacccctctccacctggctgtgcaaaatggtgacttggaaatgatcaaaatgtgcctggacaatggtgcacaaatagacccagtggagaagggaaggtgcacagccattcattttgctgccacccagggagccactgagattgttaaactgatgatatcgtcctattctggtagcgtggatattgttaacacaaccgatggatgtcatgagaccatgcttcacagagcttcattgtttgatcaccatgagctagcagactatttaatttcagtgggagcagatattaataagatcgattctgaaggacgctctccacttatattagcaactgcttctgcatcttggaatattgtaaatttgctactctctaaaggtgcccaagtagacataaaagataattttggacgtaattttctgcatttaactgtacagcaaccttatggattaaaaaatctgcgacctgaatttatgcagatgcaacagatcaaagagctggtaatggatgaagacaacgatgggtgtactcctctacattatgcatgtagacaggggggccctggttctgtaaataacctacttggctttaatgtgtccattcattccaaaagcaaagataagaaatcacctctgcattttgcagccagttatgggcgtatcaatacctgtcagaggctcctacaagacataagtgatacgaggcttctgaatgaaggtgaccttcatggaatgactcctctccatctggcagcaaagaatggacatgataaagtagttcagcttcttctgaaaaaaggtgcattgtttctcagtgaccacaatggctggacagctttgcatcatgcgtccatgggcgggtacactcagaccatgaaggtcattcttgatactaatttgaagtgcacagatcgcctggatgaagacgggaacactgcacttcactttgctgcaagggaaggccacgccaaagccgttgcgcttcttctgagccacaatgctgacatagtcctgaacaagcagcaggcctcctttttgcaccttgcacttcacaataagaggaaggaggttgttcttacgatcatcaggagcaaaagatgggatgaatgtcttaagattttcagtcataattctccaggcaataaatgtccaattacagaaatgatagaatacctccctgaatgcatgaaggtacttttagatttctgcatgttgcattccacagaagacaagtcctgccgagactattatatcgagtataatttcaaatatcttcaatgtccattagaattcaccaaaaaaacacctacacaggatgttatatatgaaccgcttacagccctcaacgcaatggtacaaaataaccgcatagagcttctcaatcatcctgtgtgtaaagaatatttactcatgaaatggttggcttatggatttagagctcatatgatgaatttaggatcttactgtcttggtctcatacctatgaccattctcgttgtcaatataaaaccaggaatggctttcaactcaactggcatcatcaatgaaactagtgatcattcagaaatactagataccacgaattcatatctaataaaaacttgtatgattttagtgtttttatcaagtatatttgggtattgcaaagaagcggggcaaattttccaacagaaaaggaattattttatggatataagcaatgttcttgaatggattatctacacgacgggcatcatttttgtgctgcccttgtttgttgaaataccagctcatctgcagtggcaatgtggagcaattgctgtttacttctattggatgaatttcttattgtatcttcaaagatttgaaaattgtggaatttttattgttatgttggaggtaattttgaaaactttgttgaggtctacagttgtatttatcttccttcttctggcttttggactcagcttttacatcctcctgaatttacaggatcccttcagctctccattgctttctataatccagaccttcagcatgatgctaggagatatcaattatcgagagtccttcctagaaccatatctgagaaatgaattggcacatccagttctgtcctttgcacaacttgtttccttcacaatatttgtcccaattgtcctcatgaatttacttattggtttggcagttggcgacattgctgaggtccagaaacatgcatcattgaagaggatagctatgcaggtggaacttcataccagcttagagaagaagctgccactttggtttctacgcaaagtggatcagaaatccaccatcgtgtatcccaacaaacccagatctggtgggatgttattccatatattctgttttttattttgcactggggaaataagacaagaaataccaaatgctgataaatctttagaaatggaaatattaaagcagaaataccggctgaaggatcttacttttctcctggaaaaacagcatgagctcattaaactgatcattcagaagatggagatcatctctgagacagaggatgatgatagccattgttcttttcaagacaggtttaagaaagagcagatggaacaaaggaatagcagatggaatactgtgttgagagcagtcaaggcaaaaacacaccatcttgagccttagctcctcagaccttcagtgaggcttctaatggggggtgcatgacttgctggttctaactttcaatttaaaaagagtgaggaagaagcagaatgattcattttgctgcgtgtgaaatcatggttcctgcatgctgtataaaagtaaaccatcttttatcctctattcatattttctaccaatcactatgtattggggatatctttgcagatatgttcaaattggactggactttgatgagatataatctcattatttgaatgggtagaaaatgaatttgctagaacacacatttttaatgaaaagaagtaataaatgtaactattaagctaaaatgcaaatgtcagtactgaattcctgcttgttaattacataatatgtgatgctctagaaaatagtcacaagtattaataatgccttagatgatagtcttaaatattaggttgaggtctacctaacctaagctgcttcctggaaagcttcatgttgaaagaacctatgggtggcaccatgtggacttttctgtccctactgtgatgaatagccccacccttcttgctgtccccaacacacctgatgtcactttgagccatatagttgaagtacaaattaataggccttatgatatgcacgaattttactatagataatatatgttgtttctggttttgtttgccaatgagcataataaatgtaaaacctatatagtatccctgtgattattgtatgagcctttgtttgagatttgaaaacaacatggctccatcacatattcccttttttcttttgatgtctactcaaatcatgaattaatcacatacctcatcattaatcttttcaaggtccttctattgttttgtctgattttctccatcatcctgattagcatgtttattccctcactacccccaggagatattcactgtaatgaatatgtctttggctatgtatgtgtccttgtgttatgttgtacagtgttgttttgagtctgttattatttacacagatgttattatgctatagcttctatttctgtttttgcttcttatttctcttataattctcacttatttcctattttttctactcatttctatttgttactcctttttactggacatgatgtttacaagatacaactgtgttactgtattccatctagtacggggcctttggtgtggcttactatttcattgtgtgcacccacccacccaccacactggacttttctagagatggacagcttggttacctccaccttcctgcactcattctcaaacatactgatgttcatacaaaccagcagagtgctgagggacgatatgtactattacaaaaccagacacttttacattcatggtccaacagatcacatggcctagaggcaatgttgcatataccttaatctttgatatgaataatatctttgttctttatatttcttaaaacagaaagggtggaaaatcactatacagaagcaatatccaaagatctcctgatcataaagacaaggggtcttttcagtcttccctctcctcaaaccttgtgtagcattgcacaatatagatctcagtcaacattcactgagtgccaagaatgtgagaaacactgtaccatgcctgtcatgcgaaatatttaaataaacagattgtcttaca

SEQ ID NO: 309082 - DNA, 1528 bp, Artificial Sequence
  derived and/or modified sequence
cccaagccgggagagctggcagatcagagagggactttccagataaatcccatctggggaaacgttactatcttccacaagcaatttttctaaaaatgcaaatgctcttttatagagctcggccttccctcctttaagaaagggcttgccgattcaaacctgcccgactcagctggattaagttgggcaagggagatttgccgtcagtctgcaacctggtggcagatggagatggaaccaagatttaccctggaagtaggatattagtcaatggctgtcactggggtacaatgttcagaacgatgcaaacagacacggagggttgattcttcttcagggaaatggctggccactcccttgatttgggagaaactaaactggccttctcgttcccagtcccagaacctccacccctttcgaattcttcccaacgggctgaccctgcccggcgcccaggagcgccctgggtatctcctggctgctctcccgaatccttgcgcgccgcgcccctaccaggttcactgggtgcacgtagccgttctcatagcggtcctcctgcaacagctgccgcagtctcgctgtctccgccttccgctccctggcggaggcggaggccagagagcgctccaaggaagactaaaaacccaggccgggaagcgcggggtgagaaagcgaggtgggtggcgagagcgtgagcgcccctctgctgaccccggggagcgtggactacgagttggcgcccaagtccagaatccgcgcgcaccgcggaaaatatttgcaatacctgccacgtccaaggttcagctgaggccaatgtaaagccagtattataggacacttctcagactgagagcccaatgtcgttggaaaccactgggccacaggaaaggcaggctctctcagtcctgctcctgccatggaagaagcctgctcccaccatgccttctgccacgagtaaaagttccctgaggcctccccagaagcagatgctgtcgtgcttcctgtatagctgcagaactacttcaaatcatcccaacaccagagaacactaaatgacagtggacaggaagacagtgtaccttttgctcctgatgatcgtaagaacaacctccttcctcttattgtgaagtgcaaggtgcaaaaaggaggcctgctgcttgttcaggactatgtcagcattgtggctcagaagaagcgcaacggctttggcgtggccttcccttgcagcaaagtgaagtgcagtgttcttttgaagaaaaacagacacagaaaacgtggtgacagtgtctaatctgtcttatttcactgcttaactgcttaaaagacattagcgacactatttaataccaaaatacatagcacttaaaactggtgttcagaatcaagcttcaaaataatgagtttatagttctagcatggtgtgtgtgcatgtgtgggaagtggatctgtgtgtgtgtgtgtgtgtgtgtgtgtgtgagagatagagaaagagagagagagagagagagagagagagagagagagaatg

SEQ ID NO: 309083 - DNA, 3360 bp, Artificial Sequence
  derived and/or modified sequence
atgaagagaagcctgagaaagatgtggagacccggcgagaagaaggagccccagggcgtggtgtacgaggacgtgcccgacgacaccgaggacttcaaggagagcctgaaggtggtgttcgagggcagcgcctacggcctgcagaacttcaacaagcagaagaagctgaagagatgcgacgacatggacaccttcttcctgcactacgccgccgccgagggccagatcgagctgatggagaagatcaccagagacagcagcctggaggtgctgcacgagatggacgactacggcaacacccccctgcactgcgccgtggagaagaaccagatcgagagcgtgaagttcctgctgagcagaggcgccaaccccaacctgagaaacttcaacatgatggcccccctgcacatcgccgtgcagggcatgaacaacgaggtgatgaaggtgctgctggagcacagaaccatcgacgtgaacctggagggcgagaacggcaacaccgccgtgatcatcgcctgcaccaccaacaacagcgaggccctgcagatcctgctgaagaagggcgccaagccctgcaagagcaacaagtggggctgcttccccatccaccaggccgccttcagcggcagcaaggagtgcatggagatcatcctgagattcggcgaggagcacggctacagcagacagctgcacatcaacttcatgaacaacggcaaggccacccccctgcacctggccgtgcagaacggcgacctggagatgatcaagatgtgcctggacaacggcgcccagatcgaccccgtggagaagggcagatgcaccgccatccacttcgccgccacccagggcgccaccgagatcgtgaagctgatgatcagcagctacagcggcagcgtggacatcgtgaacaccaccgacggctgccacgagaccatgctgcacagagccagcctgttcgaccaccacgagctggccgactacctgatcagcgtgggcgccgacatcaacaagatcgacagcgagggcagaagccccctgatcctggccaccgccagcgccagctggaacatcgtgaacctgctgctgagcaagggcgcccaggtggacatcaaggacaacttcggcagaaacttcctgcacctgaccgtgcagcagccctacggcctgaagaacctgagacccgagttcatgcagatgcagcagatcaaggagctggtgatggacgaggacaacgacggctgcacccccctgcactacgcctgcagacagggcggccccggcagcgtgaacaacctgctgggcttcaacgtgagcatccacagcaagagcaaggacaagaagagccccctgcacttcgccgccagctacggcagaatcaacacctgccagagactgctgcaggacatcagcgacaccagactgctgaacgagggcgacctgcacggcatgacccccctgcacctggccgccaagaacggccacgacaaggtggtgcagctgctgctgaagaagggcgccctgttcctgagcgaccacaacggctggaccgccctgcaccacgccagcatgggcggctacacccagaccatgaaggtgatcctggacaccaacctgaagtgcaccgacagactggacgaggacggcaacaccgccctgcacttcgccgccagagagggccacgccaaggccgtggccctgctgctgagccacaacgccgacatcgtgctgaacaagcagcaggccagcttcctgcacctggccctgcacaacaagagaaaggaggtggtgctgaccatcatcagaagcaagagatgggacgagtgcctgaagatcttcagccacaacagccccggcaacaagtgccccatcaccgagatgatcgagtacctgcccgagtgcatgaaggtgctgctggacttctgcatgctgcacagcaccgaggacaagagctgcagagactactacatcgagtacaacttcaagtacctgcagtgccccctggagttcaccaagaagacccccacccaggacgtgatctacgagcccctgaccgccctgaacgccatggtgcagaacaacagaatcgagctgctgaaccaccccgtgtgcaaggagtacctgctgatgaagtggctggcctacggcttcagagcccacatgatgaacctgggcagctactgcctgggcctgatccccatgaccatcctggtggtgaacatcaagcccggcatggccttcaacagcaccggcatcatcaacgagaccagcgaccacagcgagatcctggacaccaccaacagctacctgatcaagacctgcatgatcctggtgttcctgagcagcatcttcggctactgcaaggaggccggccagatcttccagcagaagagaaactacttcatggacatcagcaacgtgctggagtggatcatctacaccaccggcatcatcttcgtgctgcccctgttcgtggagatccccgcccacctgcagtggcagtgcggcgccatcgccgtgtacttctactggatgaacttcctgctgtacctgcagagattcgagaactgcggcatcttcatcgtgatgctggaggtgatcctgaagaccctgctgagaagcaccgtggtgttcatcttcctgctgctggccttcggcctgagcttctacatcctgctgaacctgcaggaccccttcagcagccccctgctgagcatcatccagaccttcagcatgatgctgggcgacatcaactacagagagagcttcctggagccctacctgagaaacgagctggcccaccccgtgctgagcttcgcccagctggtgagcttcaccatcttcgtgcccatcgtgctgatgaacctgctgatcggcctggccgtgggcgacatcgccgaggtgcagaagcacgccagcctgaagagaatcgccatgcaggtggagctgcacaccagcctggagaagaagctgcccctgtggttcctgagaaaggtggaccagaagagcaccatcgtgtaccccaacaagcccagaagcggcggcatgctgttccacatcttctgcttcctgttctgcaccggcgagatcagacaggagatccccaacgccgacaagagcctggagatggagatcctgaagcagaagtacagactgaaggacctgaccttcctgctggagaagcagcacgagctgatcaagctgatcatccagaagatggagatcatcagcgagaccgaggacgacgacagccactgcagcttccaggacagattcaagaaggagcagatggagcagagaaacagcagatggaacaccgtgctgagagccgtgaaggccaagacccaccacctggagccctag

SEQ ID NO: 309084 - DNA, 3360 bp, Artificial Sequence
  derived and/or modified sequence
atgaagcgctcactacgaaagatgtggaggcctggtgagaagaaagagccacagggagtggtatacgaggacgtgccagatgacactgaggatttcaaggagtcgctcaaggtggtgtttgagggtagcgcctacgggttacagaattttaacaagcagaaaaagctgaaacggtgcgacgatatggataccttcttcctgcactatgcagcagccgagggtcaaattgagctgatggagaagatcactagagattcttctttagaagtcctgcacgaaatggacgactacgggaataccccactgcactgcgcagtggagaagaaccagattgagtcagtaaagtttctgctgtcgagaggcgccaaccctaatttgaggaattttaatatgatggcgcctctgcacatagctgtgcagggcatgaataacgaagttatgaaggtcctgctggaacaccggaccattgatgtgaatcttgagggggaaaacggaaataccgccgtcattatcgcctgtacgaccaataattccgaggccctgcagatcctcctgaagaagggcgctaaaccctgcaagtctaacaaatgggggtgcttccccatccaccaagctgctttctcagggtctaaagaatgcatggagatcatcctgcgattcggcgaagaacatggctacagccgtcagctacacattaacttcatgaataatggtaaggcaactccgctgcacctcgcagttcaaaacggtgaccttgagatgattaaaatgtgtctggacaatggtgctcagattgatcccgtggagaaaggtcgttgtacagcgatccacttcgctgctactcagggagcgaccgagatcgtgaagctgatgattagtagttactccggctctgtcgacatcgtcaacacaacagatggttgccacgagaccatgctgcatagagccagtctatttgaccaccacgagctggcagattatcttattagtgttggcgctgatatcaataagatagattcagaaggaaggtcacctttgattctcgccactgcatccgccagctggaatatcgtaaacctcctgctgagcaaaggagcacaggtcgacataaaggacaatttcgggaggaattttctacacctgacagtgcagcagccctatggactgaagaacctgcggccagagttcatgcaaatgcagcagatcaaggagttggtcatggatgaagacaatgacgggtgcacaccgctgcactacgcatgcaggcagggaggtcctggcagcgttaacaacctcctgggttttaatgtgtctatccacagtaagagtaaagacaaaaaaagccccctacatttcgccgcctcctacggaagaatcaacacgtgtcagcggctcctgcaggacatcagtgacacccgcttgctgaacgagggggacttgcacggaatgacccccctacacctggccgcaaagaatggacacgacaaagttgtccagttgctgctcaagaaaggggccttgtttctgtcggaccacaatggctggactgccctgcaccacgccagtatggggggatatacccagaccatgaaagtcatccttgatacgaatttaaagtgtaccgaccgactagatgaggacggtaatacagcccttcatttcgccgcccgggagggccacgccaaggctgtggccctgctgcttagtcacaatgccgacattgtgctgaataaacagcaggccagttttctgcaccttgcgctccataacaaacggaaagaagtggtattgacaataatcaggagcaagagatgggatgaatgcctcaagattttcagtcataatagccccggcaacaagtgccccataaccgaaatgatcgaataccttccggagtgtatgaaagttctcctcgatttttgcatgttacattctaccgaggacaaaagctgcagggactactacatagaatataatttcaagtacttgcagtgcccgctggagtttactaagaaaacccctacccaggacgtgatctacgaacctctgaccgctctgaacgcgatggttcagaataacaggatagagcttttgaaccacccggtctgtaaagaatacctgttaatgaaatggttagcgtatggatttcgcgcgcacatgatgaacttgggtagctactgtctcggactcatccctatgaccatactagtggttaatattaaacccggtatggcctttaactccactggcataatcaatgagacaagcgatcacagcgagatcctggacaccacaaactcttatctcatcaagacatgcatgattctcgtttttctgtcatctattttcggatattgcaaagaggccgggcagatctttcagcagaagcggaattacttcatggatatcagcaatgtactcgaatggataatatacacaacagggatcatcttcgtccttccattattcgtggagattcccgcccacttacaatggcagtgcggcgccatcgcagtgtatttctattggatgaacttcctgctttatctgcagaggttcgaaaactgcggaatctttatcgtaatgctcgaagtcatcctaaaaacgctgctgcgcagcacagtagttttcatttttttgctactggcctttgggctaagcttttatattctgttgaatttgcaggatcccttctccagccctctgctgtcaattatacagactttttccatgatgctgggggacattaactacagggaatcgttcttggaaccatacctcaggaacgaacttgcccatcctgtgctgagtttcgcccaactggtgagcttcacaatcttcgtacctatagtcctgatgaacttgttaattggactggcagtaggagacatcgctgaggtgcagaagcatgcgagcttgaagagaatcgcaatgcaagtggaactccatacaagcttggagaaaaaactgcctctgtggttcctgcgaaaggtggaccaaaagtccaccatagtctacccaaacaaacccagatctggaggcatgcttttccacattttttgttttctgttctgcacaggagagattcgccaggagattcccaacgccgacaagagtcttgagatggaaatcttaaagcagaagtatcgtctgaaagatcttacgttcctattggaaaagcagcatgaacttattaagctcatcattcagaaaatggagattatttcggagactgaggacgacgactcccactgttcatttcaggatcgctttaagaaggaacagatggaacagcggaacagcagatggaacactgtcttgagagctgtgaaggccaagacacatcacttggaaccttag

SEQ ID NO: 309085 - DNA, 3360 bp, Artificial Sequence
  derived and/or modified sequence
atgaagaggagcctgaggaagatgtggaggcctggagagaagaaggagccccagggcgtggtgtatgaagatgtgcctgatgacacagaggacttcaaggagagcctgaaggtggtgtttgagggcagcgcctacggcctgcagaacttcaacaagcagaagaagctgaagagatgtgatgacatggacaccttcttcctgcactacgccgctgctgagggccagatcgagctgatggagaagatcacccgggacagcagcctggaggtgctgcacgagatggatgattatggcaacacccccctgcactgtgctgtggagaagaaccagattgaatctgtgaagttcctgctgagcagaggagccaaccccaacctgaggaacttcaacatgatggcccccctgcacatcgctgtgcagggcatgaacaatgaggtgatgaaggtgctgctggagcacaggaccattgatgtgaacctggagggagaaaatggaaacacagctgtgatcatcgcctgcaccaccaacaacagcgaggccctgcagatcctgctgaagaagggggccaagccctgcaagagcaacaagtggggctgcttccccatccaccaggccgccttcagcggcagcaaggagtgcatggagatcatcctgcgctttggagaggagcacggctacagccggcagctgcacatcaacttcatgaacaacgggaaggccacccccctgcacctggccgtgcagaatggagacctggagatgatcaagatgtgcctggacaatggagcccagattgatcctgtggagaagggccgctgcacagccatccactttgctgccacccagggcgccacagaaattgtgaagctgatgatcagcagctacagcggctctgtggacatcgtgaacaccacagatggctgccacgagaccatgctgcaccgggccagcctgtttgaccaccacgagctggccgactacctgatctctgtgggcgctgacatcaacaagattgacagcgagggccgcagccccctcatcctggccacagccagcgcctcctggaacatcgtgaacctgctgctgagcaagggggcccaggtggacatcaaggacaactttggaagaaacttcctgcacctgactgtgcagcagccctacggcctgaagaacctgcggcctgagttcatgcagatgcagcagatcaaggagctggtgatggatgaagataatgatggctgcacccccctgcactacgcctgccggcagggcggccctggctctgtgaacaacctgctgggcttcaacgtgtccatccacagcaagagcaaggacaagaagagccccctgcactttgctgccagctatggccgcatcaacacctgccagaggctgctgcaggacatcagtgacacccggctgctgaatgaaggagacctgcacggcatgacccccctgcacctggccgccaagaatggacatgacaaggtggtgcagctgctgctgaagaagggggccctcttcctgagtgaccacaacggctggacagccctgcaccacgcctccatgggcggctacacccagaccatgaaggtgatcctggacaccaacctgaagtgcacagaccggctggatgaagatggcaacacagccctgcactttgctgcccgggagggccacgccaaggctgtggccctgctgctgagccacaatgctgacatcgtgctgaacaagcagcaggccagcttcctgcacctggccctgcacaacaagaggaaggaggtggtgctgaccatcatccgcagcaagcgctgggatgaatgtctgaagatcttcagccacaacagccctggcaacaagtgccccatcacagagatgattgagtacctgcctgagtgcatgaaggtgctgctggacttctgcatgctgcacagcacagaggacaagagctgccgggactactacatcgagtacaacttcaagtacctgcagtgccccctggagttcaccaagaagacccccacccaggatgtgatctatgagcccctgacagccctgaatgccatggtgcagaacaacagaattgagctgctgaaccaccctgtgtgcaaggagtacctgctgatgaagtggctggcctacggcttccgggcccacatgatgaacctgggcagctactgcctgggcctcatccccatgaccatcctggtggtgaacatcaagccaggcatggccttcaacagcacaggcatcatcaatgagaccagtgaccacagcgagatcctggacaccaccaacagctacctgatcaagacctgcatgatcctggtgttcctgagcagcatcttcggctactgcaaggaggccggccagatcttccagcagaagaggaactacttcatggacatcagcaatgtgctggagtggatcatctacaccaccggcatcatctttgtgctgcccctgtttgtggagatcccagcccacctgcagtggcagtgtggggccatcgctgtgtacttctactggatgaacttcctgctgtacctgcagagatttgagaactgtggcatcttcatcgtgatgctggaggtgatcctgaagaccctgctgcggagcacagtggtgttcatcttcctgctgctggccttcggcctgtccttctacatcctgctgaacctgcaggaccccttcagcagccccctgctgagcatcatccagaccttctccatgatgctgggggacatcaactaccgggagagcttcctggagccctacctgagaaatgagctggcccaccctgtgctgagctttgcccagctggtgtccttcaccatctttgtgcccatcgtgctgatgaacctgctgattggcctggccgtgggggacattgctgaggtgcagaagcacgccagcctgaagagaattgccatgcaggtggagctgcacaccagcctggagaagaagctgcccctgtggttcctgaggaaggtggaccagaagagcaccatcgtgtaccccaacaagcccaggtctgggggcatgctgttccacatcttctgcttcctgttctgcaccggggagatccggcaggagatccccaatgctgacaagagcctggagatggagatcctgaagcagaagtaccgcctgaaggacctgaccttcctgctggagaagcagcacgagctgatcaagctgatcatccagaagatggagatcatcagcgagacagaagatgatgacagccactgcagcttccaggaccgcttcaagaaggagcagatggagcagaggaacagccgctggaacacagtgctgcgggctgtgaaggccaagacccaccacctggagccctag

SEQ ID NO: 309086 - DNA, 3360 bp, Artificial Sequence
  derived and/or modified sequence
atgaagcggagcctgcggaagatgtggcggcccggcgagaagaaggagccacagggggtggtgtatgaagatgtcccggatgacacggaggactttaaggaatctctcaaggtggtatttgaaggaagtgcttacggcctgcagaattttaacaagcagaagaaactgaagcgttgtgatgacatggataccttcttcctgcattatgcggccgccgaggggcaaattgagctgatggaaaaaatcacccgcgactcttcactggaagtcctccatgaaatggatgactatggtaatacccctcttcactgtgctgtggagaaaaaccagattgagtctgtgaaatttttgctctctagaggtgcgaatcccaacctgaggaattttaatatgatggcacctcttcacatcgctgttcagggaatgaacaacgaggtgatgaaagttctgcttgaacaccggacaatagatgtcaatctggagggagagaacgggaataccgccgtgattatcgcttgcaccaccaacaattccgaagctctgcagattctcctaaaaaaaggagcaaaaccgtgtaagtcaaataaatgggggtgttttccaatacatcaagccgcatttagtgggtctaaggaatgtatggaaattatccttcggttcggcgaagagcatggatactcccgccagctccatataaactttatgaacaacggaaaggcaacccctttacatttagccgtccaaaacggcgaccttgagatgatcaaaatgtgcctggacaacggggctcagatcgacccagtcgaaaaggggcggtgtaccgctatccattttgcagccactcaaggcgctacagagattgtgaagctgatgatcagcagttacagtggtagcgtggacattgtcaacacaacagacggctgtcatgaaaccatgctacatcgtgcctctctattcgaccatcacgaactggccgactatctgattagtgttggagctgatattaataaaatagactctgaggggcgctccccactgattctggccacagcttctgcctcttggaatatcgtgaacctgctgctgagtaaaggggctcaagtggatatcaaagacaacttcgggagaaactttctacatttgactgtgcagcagccgtacggcttgaagaatttgcgtccagaattcatgcagatgcaacaaatcaaggaattggtgatggacgaagataatgacgggtgcaccccgttgcactacgcttgcagacagggaggacccggctccgttaacaaccttctcggcttcaatgttagcatccattcaaagagcaaagataaaaagagcccccttcactttgcggctagctatggccgcatcaacacgtgccagagactcttacaagatatttcggatacccgtctactcaacgagggagatttacatggcatgactccactgcatctggcagctaaaaatggtcatgataaagtggtccagctgctactaaagaagggggctctcttcctgagtgatcacaatgggtggactgctctccatcacgcctcgatgggcggctatactcagaccatgaaggtgatcctggatacaaacctgaaatgcaccgataggctggatgaggatggaaacacggccctgcatttcgcagcgcgcgagggccacgcaaaagccgtcgccttgcttctgagtcacaacgccgacatcgtgctaaataaacaacaagcctcctttcttcatcttgccctgcataacaaaaggaaagaggtggttctgaccatcatacggtctaagcgttgggatgagtgcttgaagattttcagccacaacagcccgggaaacaaatgtcccattaccgagatgattgagtatcttcccgagtgcatgaaggtcctcctcgatttctgtatgttacacagtacagaggacaaatcgtgtagggactactacatagaatacaactttaaatatctccaatgcccgctagaattcaccaagaagaccccaacccaggacgtgatctatgaaccgctgacggccctgaacgcaatggtgcagaacaatcgcatcgaactgctgaaccatccggtatgtaaggaatatctgctaatgaaatggctcgcctatggatttagagcccacatgatgaaccttggatcttactgcctggggctcatccctatgacaatcctagtcgtgaacatcaaaccagggatggccttcaattctacagggataattaacgagaccagcgaccattctgaaatcctcgataccacaaatagctacctgatcaagacatgcatgattctggtttttctctccagcattttcggctattgcaaagaagccgggcagatctttcaacagaaacgcaattacttcatggacatttccaacgtgctggagtggatcatctatactactggcatcattttcgtgcttccgttgttcgtggaaattcctgcacacctccagtggcagtgcggtgcaatcgccgtgtacttctattggatgaactttttactttacctgcagaggtttgagaactgtggcatattcatcgtgatgctggaggtgattctgaagaccctgcttcggagcaccgtagtattcatttttctgctgctggcctttggacttagcttctacattttgctgaacctgcaggacccatttagctcccctctcttgagcatcattcaaactttctctatgatgctgggcgacatcaactatagggagtcattcttggaaccctatcttcgcaatgaactggcacaccccgtgctgtctttcgcccagctagtgtcctttaccatctttgtgccaattgtcctgatgaatttactaataggcttggccgtgggcgacatagctgaggtgcagaaacacgcctccctcaagcgtatcgccatgcaagtggaactgcacacaagtctggaaaagaagctgcctctgtggtttcttcggaaggtggaccagaagagcactattgtctatcctaacaagcctagaagtggtgggatgctattccacatcttttgtttcctcttctgcactggggagatcaggcaggagatacccaatgctgacaaaagtctggagatggagatcctgaagcagaaataccgactgaaagatctgactttcctgttggaaaagcagcatgaattaataaagctgatcatccagaaaatggaaattatctccgaaaccgaggacgacgactcgcactgttcctttcaggataggtttaagaaagaacagatggagcagaggaatagtcggtggaacaccgttcttcgcgctgtcaaggccaagacccaccatcttgagccatag

SEQ ID NO: 309087 - DNA, 3360 bp, Artificial Sequence
  derived and/or modified sequence
atgaaaaggagtctgagaaagatgtggcggccaggcgaaaaaaaggaaccacagggagtcgtttatgaggatgttccagacgacacagaggacttcaaagagtccttaaaggttgtgtttgaaggctccgcctacgggcttcagaactttaataagcagaagaagctgaaacggtgtgatgacatggatacattctttctgcattacgccgctgcggagggccagattgaacttatggagaaaattactagagactctagtttagaagttctacacgaaatggacgactacggtaataccccactgcactgcgcagtcgaaaaaaaccaaattgagagtgttaaatttttgttatcaaggggcgctaacccaaatttgcgtaactttaatatgatggccccactacatatcgcagtgcagggaatgaataacgaagtaatgaaagttctactggaacatagaaccatcgacgtcaacctcgaaggtgagaacgggaacaccgccgttataattgcctgtaccaccaacaattctgaagccctgcaaattctgctgaagaaaggcgcaaaaccttgtaaatcaaacaaatgggggtgcttccccatccatcaagccgctttttcaggctccaaggaatgcatggaaattattctgagattcggcgaggaacacggctatagcaggcagttacatatcaactttatgaacaatgggaaagctactcctctccacctagcagttcagaacggcgaccttgaaatgataaagatgtgtcttgacaacggagcccagatcgatcccgttgaaaaaggacgatgtaccgcaattcatttcgccgctacccagggtgcaaccgaaatagtgaagctcatgattagctcctattccggctcagtggatatagtcaacaccaccgacggttgccacgaaactatgcttcacagagcaagcctgtttgatcatcacgagctggccgactaccttatctcggttggcgcagacatcaacaaaatcgatagcgaagggcgttctccgctcattcttgcaactgccagcgcgtcttggaacatagtcaatctcttactgtctaaaggagcgcaggtggatattaaggataacttcgggcgaaatttcctgcacctgaccgtgcagcagccttatggattaaaaaaccttcgacctgagttcatgcagatgcagcagataaaggagctcgtaatggacgaggacaacgacggatgtacgccactgcattatgcatgcagacagggaggcccagggagcgtcaacaatttgcttggctttaatgtttcgatacatagcaaaagcaaagacaaaaagtctcctctgcacttcgcagccagctacggacggatcaacacttgtcagagactgctgcaggacatttcagacactaggctcctgaacgagggtgaccttcatggtatgaccccacttcatctcgcggcaaaaaacgggcacgacaaagtggttcagcttctgctgaagaaaggagcactttttctgtctgatcacaacggctggactgctttacatcatgccagcatgggtggctatacccaaacgatgaaagtaatccttgacacaaacctgaaatgcactgaccggctcgatgaagatggcaacaccgcactccacttcgcggctcgcgaaggacacgctaaggccgtcgccctcttgcttagccacaacgccgatattgtcctaaataagcaacaggcaagtttcctgcacttggccctgcataacaagcgaaaagaggtggtgctaacaatcatccggagtaagcggtgggatgagtgtctgaaaattttctctcacaatagcccaggcaataaatgtcctattaccgagatgattgagtatctcccagagtgtatgaaagttttactggacttttgtatgctccattcaacggaagacaagagctgtcgggactattacatagaatataattttaagtacttgcaatgcccccttgagttcacaaagaagacgcctacgcaggacgttatctacgagcccctgaccgccctgaatgccatggtacaaaacaaccgcatcgagctcttgaaccaccctgtctgtaaggagtatctcctgatgaaatggcttgcctacggctttcgagcccacatgatgaatctcgggtcgtattgcctgggtttgattcctatgacaatcctggtggttaacattaaacccggaatggccttcaattctaccgggatcatcaatgaaacctccgaccactctgaaatcttggacaccaccaattcttatctcattaagacttgcatgatcctcgtatttctttcttcaatcttcggttactgcaaggaggcgggacaaatctttcaacagaaacggaattacttcatggatatctccaacgtactggagtggataatttatacaacgggcattatttttgtattgccactgttcgtcgagataccagctcacctgcagtggcagtgcggagctatagcagtgtacttctactggatgaactttcttctatatttacaacggtttgaaaattgcggaatattcatcgtcatgctcgaagtaattcttaagactctcctcagaagcaccgtggtctttatctttctgctcttggcattcggactctcgttctatatcctgctaaatctacaggacccctttagcagtccccttctttctatcattcagacgttcagtatgatgctgggggacattaactaccgcgaaagttttctggagccctatctaaggaatgaactagcccacccagtcctgagcttcgctcagctagtgagctttaccatttttgtgccgatcgtgcttatgaatctgctgatcgggctggctgtaggcgacatagctgaagtgcagaaacacgcaagtctgaagaggatagctatgcaggtggaactccatacatctctggaaaaaaagctgccactgtggttcttacgtaaggtggaccagaaatctaccattgtgtatccgaacaagccaaggtcaggcggaatgctgttccacatattctgctttctgttctgcacgggcgagatccgtcaggagatccccaacgcggacaagtccctcgagatggagatcctgaagcagaaatatcgtctgaaagacctaacgttcctgttggaaaagcagcacgagctgatcaaactgattatccagaaaatggagattatcagcgagaccgaagacgatgactctcactgctcctttcaggacagattcaaaaaagagcaaatggagcagaggaactcacggtggaacactgtccttcgggctgtaaaggcaaagacgcaccacctggaaccctag

SEQ ID NO: 309088 - protein, 127 aa, Artificial Sequence
  derived and/or modified sequence
  misc_feature (1)..(1): Xaa can be any naturally occurring amino acid
XIMLLERTLQLKEEENKRLNQRLMSQSMSSVSSRHSEKIAIRDFQVGDLVLIILDERHDNYVLFTVSPTLYFLHSESLPALDLKPASGASRRPWVLGKVMEKEYCQAKKCSFITPKTAGHLFMQKSA

SEQ ID NO: 309089 - DNA, 470 bp, Artificial Sequence
  derived and/or modified sequence
ggataatgctgttagaacgaacattgcaattgaaagaagaagaaaataaacggttaaatcaaagactgatgtctcagagcatgtcttcagtatcttcaaggcattctgaaaagatagctattagagattttcaggtgggagatttggtactcatcatcctagacgaacgccatgacaattatgtgttatttactgttagtcctactttatattttctacattcagagtctctacctgccctggatctcaaaccagcttcaggtgcatctagaagaccctgggtacttggaaaagtaatggaaaaagaatactgtcaagccaaaaagtgctcattcatcactccaaaaacagcaggccatctttttatgcaaaagtcagcgtgacaatatacttcactggtgtacatcgtttactttttaactggcttcattttaggaataataaattcatcagaatccttggctgaatta

SEQ ID NO: 309090 - protein, 53 aa, Artificial Sequence
  derived and/or modified sequence
MAADRRVCTYSAGTDTNPIFLFNKEMILCDRPPAIPKTTFSTENDMEIKVEES

SEQ ID NO: 309091 - DNA, 551 bp, Artificial Sequence
  derived and/or modified sequence
gtttcccggcatgcgccgcggaggaagagacggagtcgacaataacaaaccaagccgcggcggtgtccgcggccctgccgagccctcggcgttgcctcagaatcccccagtcgcctgggcccctcggctctgacaggccgcggccttctgtcccccggccccagacccagagccgaggggcctgctcgcgtccttgtccgcccggacccctccctgcctcctagagttcggggccgcggcgggcgggcgcccgggacgccggcggttgtgtcggcttagcggtgccgaatgggcggttggtaaccgctgccgaggactaggcggcggcggaagatggtgccgggggtcgctggctctgctgctgccgccggcgaaggaggaggcgttgccggtgtggcagaccttaagcatgccattcaaagcaaatacaagattgctattcaacaccaggtgctggtggtcaatggaggagaatgcatggctgcagatcgaagagtgtgtacctacagtgctgggacggatacaaatccaatttttctttttaacaaaga

SEQ ID NO: 309092 - DNA, 711 bp, Artificial Sequence
  derived and/or modified sequence
caataacaaaccaagccgcggcggtgtccgcggccctgccgagccctcggcgttgcctcagaatcccccagtcgcctgggcccctcggctctgacaggccgcggccttctgtcccccggccccagacccagagccgaggggcctgctcgcgtccttgtccgcccggacccctccctgcctcctagagttcggggccgcggcgggcgggcgcccgggacgccggcggttgtgtcggcttagcggtgccgaatgggcggttggtaaccgctgccgaggactaggcggcggcggaagatggtgccgggggtcgctggctctgctgctgccgccggcgaaggaggaggcgttgccggttttctgagtttaaccagtaatgccattcagttgccaatctcaagcaaagcaaacataagccagttttaatctactttttaagaaaagtggtagtccttttcacagtgcctgacgtgtggcagaccttaagcatgccattcaaagcaaatacaagattgctattcaacaccaggtgctggtggtcaatggaggagaatgcatggctgcagatcgaagagtgtgtacctacagtgctgggacggatacaaatccaatttttctttttaacaaagaaatgatcttatgtgatcgtccacctgctattcctaaaactaccttttcgacagaaaatgacatggaaataaaagttgaagaatc

SEQ ID NO: 309093 - DNA, 622 bp, Artificial Sequence
  derived and/or modified sequence
ggaagcggcggcgggagcttccgggagggcggctcgcaggcaccatgactcctgtgaggatgcagcactccctggcaggtcagacctatgccgtgcccttcatccagccagacctgcggcgagaggaggccgtccagcagatggcggatgccctgcagtacctgcagaaggtctctggagacatcttcagcaggtgggtgctgccactcacccccacctgatgagagggccatccctgtcctgggcaatcccagcaacacaccctctgggagcagcccccttggggaatcccggtcctggggaacccatctggcttccctgtgtgggaggggctgaagtgagagcccaacttggaagcttttactcctgggagtccaagagctcactcccttccaccccacttagcctcctggtttcctgtggtggctctgctctcacaactcatgcttttcctcccattggagggcctattccttcacgttttcctgcagccaacaaatatttacccagcagtgctcgtgtgcaaggcagtgtgggaatctctatatatccagccacggataaggcaacatacctctccacctggagcgcacattctggcaggagagaaagacctaaataa

SEQ ID NO: 309094 - protein, 199 aa, Artificial Sequence
  derived and/or modified sequence
GRAARRHHDSCEDAALPGRSDLCRALHPARPAARGGRPADGGCPAVPAEGLWRHLQQVGAATHPHLMRGPSLSWAIPATHPLGAAPLGNPGPGEPIWLPCVGGAEVRAQLGSFYSWESKSSLPSTPLSLLVSCGGSALTTHAFPPIGGPIPSRFPAANKYLPSSARVQGSVGISIYPATDKATYLSTWSAHSGRRERPK

SEQ ID NO: 309095 - protein, 169 aa, Artificial Sequence
  derived and/or modified sequence
MSGEMAFHEMQAHKNALGTSGEQQAADITGPTPHQGGWKQVEQSRSQVQAIGEKVSLAQAKIEKIKGSKKAIKVFSSAKYPAPERLQEYGSIFTDAQDPGLQRRPRHRIQSKQRPLDERALQEKLKDFPVCVSTKPEPEDDAEEGLGGLPSNISSVSSLLLFNTTENLY

SEQ ID NO: 309096 - protein, 447 aa, Artificial Sequence
  derived and/or modified sequence
MAFHEMQAHKNALGTSGEQQAADITGPTPHQGGWKQVEQSRSQVQAIGEKVSLAQAKIEKIKGSKKAIKVFSSAKYPAPERLQEYGSIFTGAQDPGLQRRPRHRIQSKHRPLDERALQEKLKDFPVCVSTKPEPEDDAEEGLGGLPSNISSVSSLLLFNTTENLYKKYVFLDPLAGAVTKTHVMLGAETEEKLFDAPLSISKREQLEQQVPENYFYVPDLGQVPEIDVPSYLPDLPSIANDLMYSADLGPGIAPSAPGTIPELPTFHTEVAEPLKADLQDGVLTPPPPPPPPPPAPEVLASAPPLPPSTAAPVGQGARQDDGSSSASPSVQGAPREVVDPSGGWATLLESIRQAGGIGKAKLRSMKERKLEKKKQKEQEQVRATSQGGHLMSDLFNKLVMRRKGISGKGPGAGEGPGGAFARVSDSIPPVPPPQQPQAEEDEDDWES

SEQ ID NO: 309097 - DNA, 510 bp, Artificial Sequence
  derived and/or modified sequence
atgagcggcgagatggccttccacgagatgcaggcccacaagaacgccctgggcaccagcggcgagcagcaggccgccgacatcaccggccccaccccccaccagggcggctggaagcaggtggagcagagcagaagccaggtgcaggccatcggcgagaaggtgagcctggcccaggccaagatcgagaagatcaagggcagcaagaaggccatcaaggtgttcagcagcgccaagtaccccgcccccgagagactgcaggagtacggcagcatcttcaccgacgcccaggaccccggcctgcagagaagacccagacacagaatccagagcaagcagagacccctggacgagagagccctgcaggagaagctgaaggacttccccgtgtgcgtgagcaccaagcccgagcccgaggacgacgccgaggagggcctgggcggcctgcccagcaacatcagcagcgtgagcagcctgctgctgttcaacaccaccgagaacctgtactag

SEQ ID NO: 309098 - DNA, 1344 bp, Artificial Sequence
  derived and/or modified sequence
atggccttccacgagatgcaggcccacaagaacgccctgggcaccagcggcgagcagcaggccgccgacatcaccggccccaccccccaccagggcggctggaagcaggtggagcagagcagaagccaggtgcaggccatcggcgagaaggtgagcctggcccaggccaagatcgagaagatcaagggcagcaagaaggccatcaaggtgttcagcagcgccaagtaccccgcccccgagagactgcaggagtacggcagcatcttcaccggcgcccaggaccccggcctgcagagaagacccagacacagaatccagagcaagcacagacccctggacgagagagccctgcaggagaagctgaaggacttccccgtgtgcgtgagcaccaagcccgagcccgaggacgacgccgaggagggcctgggcggcctgcccagcaacatcagcagcgtgagcagcctgctgctgttcaacaccaccgagaacctgtacaagaagtacgtgttcctggaccccctggccggcgccgtgaccaagacccacgtgatgctgggcgccgagaccgaggagaagctgttcgacgcccccctgagcatcagcaagagagagcagctggagcagcaggtgcccgagaactacttctacgtgcccgacctgggccaggtgcccgagatcgacgtgcccagctacctgcccgacctgcccagcatcgccaacgacctgatgtacagcgccgacctgggccccggcatcgcccccagcgcccccggcaccatccccgagctgcccaccttccacaccgaggtggccgagcccctgaaggccgacctgcaggacggcgtgctgaccccccccccccccccccccccccccccccccgcccccgaggtgctggccagcgccccccccctgccccccagcaccgccgcccccgtgggccagggcgccagacaggacgacggcagcagcagcgccagccccagcgtgcagggcgcccccagagaggtggtggaccccagcggcggctgggccaccctgctggagagcatcagacaggccggcggcatcggcaaggccaagctgagaagcatgaaggagagaaagctggagaagaagaagcagaaggagcaggagcaggtgagagccaccagccagggcggccacctgatgagcgacctgttcaacaagctggtgatgagaagaaagggcatcagcggcaagggccccggcgccggcgagggccccggcggcgccttcgccagagtgagcgacagcatcccccccgtgccccccccccagcagccccaggccgaggaggacgaggacgactgggagagctag

SEQ ID NO: 309099 - DNA, 510 bp, Artificial Sequence
  derived and/or modified sequence
atgtcaggagaaatggccttccatgaaatgcaggctcacaagaatgcgttgggaactagcggtgagcagcaggctgcagatatcactggaccaacgcctcaccagggcggttggaaacaagtggagcagagtcgcagtcaggttcaggccatcggcgagaaggtgtcactcgcgcaggctaagatagagaagatcaaaggatcaaaaaaggctatcaaggtgttcagctccgccaaatatccagcccccgagaggctgcaagaatatggcagtatttttactgatgctcaggatccaggactgcagcggagaccccgtcaccgtattcaaagcaagcagaggcccctggacgaacgggccctccaggaaaagctgaaggatttccctgtatgtgtttccacgaaaccagagcccgaagatgacgctgaggagggtctggggggcttgccttcaaacattagtagcgtttcctcacttctgctcttcaacactactgaaaacttatattag

SEQ ID NO: 309100 - DNA, 1344 bp, Artificial Sequence
  derived and/or modified sequence
atggcttttcatgagatgcaggcccataagaatgcgctgggcactagcggagaacagcaggccgcagacatcacaggacctacgccgcaccagggtggctggaagcaagtggagcagtcccgcagccaggttcaagctattggtgagaaagttagccttgcacaggcaaaaatcgagaaaattaagggcagtaaaaaggcaattaaagtgttttcatcggctaagtatccggcccccgagaggctgcaagaatatggatctatcttcaccggcgctcaggaccctggcctccagcgaaggccgcggcatcggatacagtcgaagcaccgccccctggacgaacgagcccttcaggagaaactgaaagactttcctgtgtgtgtctccaccaaacccgaacctgaggacgacgccgaagaagggcttggggggcttccaagcaatatttcttccgtctcttcactcctacttttcaacaccaccgagaacctgtacaagaagtatgtgtttttagatccactggccggggccgtgacaaaaacccacgtgatgcttggagccgagacggaagaaaagcttttcgatgcccctctgagcatcagtaagagggagcagctggagcagcaggttcctgaaaactacttttacgtaccggatctgggtcaggtcccggagatcgacgtcccctcatacctgcccgatctcccttcaattgctaacgacctaatgtatagtgccgaccttggcccaggcatcgcaccaagtgctcctgggacaatacctgagctgccaacattccacaccgaggtcgccgaaccactcaaggctgacctgcaggatggcgtgttgactccccctccccccccaccaccccccccacccgcccccgaggttcttgcttcagcacccccactgcctccttctacggcagcccccgtggggcagggtgctagacaggacgacggatccagctccgcctctccatcagttcagggggcccccagggaggtggttgacccgagtggcggctgggcaaccctgctcgagagtatcaggcaggcaggtgggatcggaaaggcaaagctgcggtctatgaaggaaaggaaactggagaagaagaagcagaaagaacaagagcaggttcgcgctacttcacaaggggggcatttgatgtcagacctcttcaacaaactggtcatgcggaggaagggcatcagtggaaaagggcctggcgccggcgagggccctggtggagctttcgcacgggttagcgactccatcccacctgtgcctccccctcagcagccacaggcagaggaagacgaagacgattgggagtcatag

SEQ ID NO: 309101 - DNA, 510 bp, Artificial Sequence
  derived and/or modified sequence
atgtctggagagatggccttccacgagatgcaggcccacaagaatgccctgggcaccagcggggagcagcaggccgctgacatcaccggccccaccccccaccagggcggctggaagcaggtggagcagagccgcagccaggtgcaggccatcggggagaaggtgtccctggcccaggccaagattgagaagatcaagggcagcaagaaggccatcaaggtgttcagcagcgccaagtacccagcccctgagcggctgcaggagtatggcagcatcttcacagatgcccaggaccccggcctgcagaggcggcccaggcaccgcatccagagcaagcagaggcccctggatgagcgggccctgcaggagaagctgaaggacttccctgtgtgtgtgtccaccaagccagagccagaagatgatgctgaggagggcctgggcggcctgcccagcaacatcagctctgtgagcagcctgctgctcttcaacaccacagagaacctgtactag

SEQ ID NO: 309102 - DNA, 1344 bp, Artificial Sequence
  derived and/or modified sequence
atggccttccacgagatgcaggcccacaagaatgccctgggcaccagcggggagcagcaggccgctgacatcaccggccccaccccccaccagggcggctggaagcaggtggagcagagccgcagccaggtgcaggccatcggggagaaggtgtccctggcccaggccaagattgagaagatcaagggcagcaagaaggccatcaaggtgttcagcagcgccaagtacccagcccctgagcggctgcaggagtatggcagcatcttcaccggggcccaggaccccggcctgcagaggcggcccaggcaccgcatccagagcaagcaccggcccctggatgagcgggccctgcaggagaagctgaaggacttccctgtgtgtgtgtccaccaagccagagccagaagatgatgctgaggagggcctgggcggcctgcccagcaacatcagctctgtgagcagcctgctgctcttcaacaccacagagaacctgtacaagaagtatgtgttcctggaccccctggccggggctgtgaccaagacccacgtgatgctgggcgctgagacagaggagaagctgtttgatgcccccctgagcatcagcaagcgggagcagctggagcagcaggtgcctgagaactacttctacgtgcctgacctgggccaggtgcctgagattgatgtgcccagctacctgcctgacctgcccagcatcgccaatgacctgatgtacagcgctgacctgggccctggcatcgcccccagcgcccctggcaccatccctgagctgcccaccttccacacagaggtggccgagcccctgaaggctgacctgcaggatggagtgctgaccccacctcctcctcctcctcctcctcctccagcccctgaggtgctggccagcgccccacccctgccccccagcacagctgcccctgtgggccagggcgcccggcaggatgatggcagcagcagcgccagccccagcgtgcagggcgccccccgggaggtggtggaccccagcggcggctgggccaccctgctggagagcatccggcaggccggcggcatcggcaaggccaagctgcgctccatgaaggagaggaagctggagaagaagaagcagaaggagcaggagcaggtgcgggccaccagccagggcggccacctgatgtctgacctcttcaacaagctggtgatgaggaggaagggcatcagcggcaagggccctggggccggggagggccctgggggcgcctttgcccgggtgtctgacagcatcccccctgtgcccccaccccagcagccccaggccgaggaggatgaagatgactgggagagctag

SEQ ID NO: 309103 - DNA, 510 bp, Artificial Sequence
  derived and/or modified sequence
atgagcggcgagatggccttccacgagatgcaggcccacaagaacgcattaggcacgtcaggggagcagcaggctgcggatatcacgggcccaacaccacatcagggtggatggaagcaggtggagcaatctaggtcccaggtgcaggctattggtgagaaggtctctctggcccaggcgaagattgaaaagattaaggggagcaagaaggccatcaaagtcttctctagcgctaagtaccctgcccctgaacgtctacaggaatatgggtccatttttacagacgcccaggacccgggattacagcgccggcctcgtcatagaatccagtctaaacagcggccactggacgaaagggccctccaggaaaagctgaaggattttcccgtttgcgtcagcactaaaccagaacccgaagacgacgccgaggaaggcctaggggggctcccctcaaacatctcttcagtcagttctctgctgcttttcaacaccaccgagaacctttactag

SEQ ID NO: 309104 - DNA, 1344 bp, Artificial Sequence
  derived and/or modified sequence
atggccttccacgagatgcaggcccacaagaacgccctgggcaccagtggggaacagcaggcagcagacatcacagggcccactcctcatcaggggggttggaagcaggtggaacaatctcggtcacaggtccaggcgatcggcgaaaaagtgtcccttgcccaggccaaaatcgagaaaattaaggggtccaaaaaggcgattaaagtgttcagttctgcgaagtatcccgcccctgagcgcctacaagagtatgggagcattttcaccggcgctcaggatccagggcttcagcgccggccacgacacaggatccagagcaagcacaggccactggacgaacgcgccctccaggaaaagcttaaagacttccccgtctgtgtctctacaaagcccgagcctgaggacgatgcggaagaaggacttggcgggctgcctagcaatataagcagtgtgtcttctttgttgctgtttaacacgacagagaatctttataagaaatacgtgtttctagatcccctcgcaggggccgtcactaaaacacacgtgatgcttggtgccgagaccgaagagaagctcttcgatgcccctttgtctatttctaagcgggaacagcttgaacagcaagttcccgaaaattatttctacgtgcccgatctgggtcaggtgcccgagatcgatgttcctagttaccttccggatcttccatctattgcgaacgacctgatgtattccgctgacttaggtccaggcatagcaccatccgcgcccgggaccattccagagctcccaacatttcacaccgaagtggcagaaccattgaaagcagatctgcaagacggggttcttaccccccctcctccacccccccccccccctccggcaccagaagttctagcaagcgctccaccattgcccccgtctacagcagcccccgttggacaaggcgcccggcaggacgatggtagctccagtgccagtccttctgtgcagggcgcccctcgggaggtcgtggacccctctgggggatgggcaacccttctggagtccatccgccaggccggcggtatcggcaaagcaaagttacgatctatgaaggagcggaagctggagaagaaaaagcagaaggagcaagagcaagtgcgcgcaacctcccaaggggggcacctcatgtctgatctgttcaacaaacttgttatgcggagaaaggggatctcagggaaggggcccggtgctggggaggggccaggaggcgctttcgcgagggtgtctgacagcattccacccgtccccccaccccagcaaccacaggcagaagaggacgaagacgattgggagtcctag

SEQ ID NO: 309105 - DNA, 510 bp, Artificial Sequence
  derived and/or modified sequence
atgagtggagaaatggctttccatgagatgcaagcacacaagaacgccctgggaacctccggcgaacagcaggccgctgatataactggacctaccccccaccagggcggatggaaacaggtagagcagagcaggtcccaggtccaagccatcggtgaaaaggtgagtctggcccaagccaaaattgaaaagatcaagggttcaaagaaagctatcaaggtgttttctagcgctaaatatcccgctcctgagaggctgcaggaatacggcagcatcttcactgatgcccaggatcccggactgcaacggcgaccgagacatagaattcaaagcaagcaaagaccactggacgagcgggcactgcaggaaaagctcaaggactttcccgtttgcgtgtccactaaaccagaacccgaggatgacgcagaggagggcctcggtggacttcccagcaacattagctcagttagttcccttctacttttcaatacaacggaaaatctgtattag

SEQ ID NO: 309106 - DNA, 1344 bp, Artificial Sequence
  derived and/or modified sequence
atggctttccacgaaatgcaggcccacaaaaatgctctgggcacctcgggcgagcagcaggccgctgacatcaccgggccaaccccccaccaaggagggtggaaacaagttgagcagtctagatcacaggtgcaggccatcggagagaaggtgtcactggctcaagcgaaaatagagaagatcaaaggaagcaagaaggccatcaaggtgttctcaagcgctaaatatccagcgcctgaaagacttcaagaatatggctccatttttactggagcacaggatccaggattacaaaggcggccacggcataggatacagtctaagcacagacccttagatgagagggccttgcaagaaaagcttaaagatttccccgtctgtgtgtccaccaagccggagcctgaggatgatgccgaggaagggctggggggactgccttctaatataagctccgtgagcagcctgctgctttttaatacaaccgagaatctctacaagaagtacgtgttcctcgaccctctggctggggctgtcactaagacacatgtcatgctgggggcagaaaccgaagaaaagctttttgacgctcccctctctattagtaagagggagcaactggagcagcaagtgcctgagaactacttttacgtccctgacctcgggcaagtccccgaaatcgacgttccttcctatctacctgacctccccagtattgctaacgacctaatgtactcagccgacctcggccctggaatcgcgccttccgcccctgggactattcccgaactgccaacatttcacaccgaagtggcagagcccttgaaggcggatctccaggacggagtgctgactcctccccctcctccgccaccgccaccacctgcacccgaggttttggcctcagctcctccactgccccctagcaccgccgcacccgttgggcaaggagcacggcaagatgacggcagcagcagcgcttcaccaagtgttcagggagcgccaagagaagtggttgatcctagcggagggtgggcaactcttcttgagtctataagacaagccggagggatcggcaaggcaaagctgagaagtatgaaggaacggaagctggagaagaagaaacagaaggagcaggagcaggtccgggcaactagccagggaggccatctcatgtctgatttgtttaacaagctagtgatgcgcaggaaagggatttccggaaagggcccaggcgctggagaggggccagggggagcattcgctcgcgtctcggattccattcctccggttccccctccccagcaaccgcaagctgaggaggatgaagacgactgggaatcgtag

SEQ ID NO: 309107 - DNA, 1213 bp, Artificial Sequence
  derived and/or modified sequence
tccctgcgcaccacacaggctcgctcgtgcccggtgaatgctgaggctgctctgcacgtggagtgtggccctgtgggcaagggctgggctcttggaggtaggggagctacaggggcgactgggaggaggatgttgtgttacacacgcatcagagttaactttgcagtgagagcggccttgctgcggccaaagaacatggaaaagcatgagtggggtgatgtgccttaaagcatcagacacttgggcctcgggcatcaggagccagccacagggatgtctggggaaatggcgttccatgagatgcaagcacacaagaatgcacttggcacatctggggaacagcaggcagctgatatcactgggcccaccccgcaccagggaggatggaagcaggtagagcagagccggagccaggtgcaggccattggagagaaggtctccttggcccaggccaagattgagaagatcaagggcagcaagaaggccatcaaggtgttctccagtgccaagtaccctgctccagagcgcctgcaggaatatggctccatcttcaccgacgcccaggaccctggcctgcagagacgcccccgccacaggatccagagcaagcagcgccccctggacgagcgggccctgcaagagaagctgaaggactttcctgtgtgcgtgagcaccaagccagagcccgaggacgatgcagaagagggacttgggggtcttcccagcaacatcagctctgtcagctccttgctgctcttcaacaccaccgagaacctgtacaagaagtatgtcttcctggaccccctggctggtgctgtaacaaagacccatgtgatgctgggggcagagacagaggagaagctgtttgatgcccccttgtccatcagcaagagagagcagctggaacagcaggtcccagagaactacttctatgtgccagacctgggccaggtgcctgagattgatgttccatcctacctgcctgacctgcccggcattgccaacgacctcatgtacattgccgacctgggccccggcattgccccctctgcccctggcaccattccagaactgcccaccttccacactgaggtagccgagcctctcaagacctacaagatggggtactaacaccacccccaccgcccccaccaccacccccagctcctgaggtgctggccagtgcacccccactcccaccctcaaccgcggc

SEQ ID NO: 309108 - DNA, 1604 bp, Artificial Sequence
  derived and/or modified sequence
atggcgttccatgagatgcaagcacacaagaatgcacttggcacatctggggaacagcaggcagctgatatcactgggcccaccccgcaccagggaggatggaagcaggtagagcagagccggagccaggtgcaggccattggagagaaggtctccttggcccaggccaagattgagaagatcaagggcagcaagaaggccatcaaggtgttctccagtgccaagtaccctgctccagagcgcctgcaggaatatggctccatcttcacgggcgcccaggaccctggcctgcagagacgcccccgccacaggatccagagcaagcaccgccccctggacgagcgggccctgcaggagaagctgaaggactttcctgtgtgcgtgagcaccaagccggagcccgaggacgatgcagaagagggacttgggggtcttcccagcaacatcagctctgtcagctccttgctgcttttcaacaccaccgagaacctgtacaagaagtatgtcttcctggaccccctggctggtgctgtaacaaagacccatgtgatgctgggggcagagacagaggagaagctgtttgatgcccccttgtccatcagcaagagagagcagctggaacagcaggtcccagagaactacttctatgtgccagacctgggccaggtgcctgagattgatgttccatcctacctgcctgacctgcccagcattgccaacgacctcatgtacagtgccgacctgggccccggcattgccccctctgcccctggcaccattccggaactgcccaccttccacactgaggtagccgagcctctcaaggcagacctacaagatggggtactaacaccacccccaccgcccccaccaccacccccagctcctgaggtgctggccagtgcacccccactcccaccctcaaccgcggcccctgtaggccaaggcgccaggcaggacgacggcagcagcagcgcgtctccttcagtccagggagctcccagggaagtggtcgacccctccggtggctgggccactctgctagagtccatccgccaagctgggggcatcggcaaggccaagctgcgcagcatgaaggagcgaaagctggagaagaagaagcagaaggagcaggagcaagtgagagccacgagccaaggtgggcacttgatgtcggatctcttcaacaagctggtcatgaggcgcaagggcatctctgggaaaggacctggggctggtgaggggcccggaggagcctttgcccgcgtgtcagactccatccctcctgtgcccccaccgcaacagccacaggcagaggaggacgaggacgactgggaatcctagggggctccatgacaccttcccccccagacccagacttgggctgttgctctgacatggacacagccaggacaagctgctcagacctgcttccctgggagggggtgacggaaccagcactgtgtggagaccagcttcaaggagcggaaggctggcttgaggccacacagctggggcggggacttctgtctgcctgtgctccatggggggacggctccacccagcctgcgccactgtgttcttaagaggcttccagagaaaac

SEQ ID NO: 309109 - protein, 477 aa, Artificial Sequence
  derived and/or modified sequence
MSGVMCLKASDTWASGIRSQPQGCLGKWRSMRCKHTRMHLAHLGNSRQLISLGPPRTREDGSRISQQVEQSRSQVQAIGEKVSLAQAKIEKIKGSKKAIKVFSSAKYPAPERLQEYGSIFTDAQDPGLQRRPRHRIQSKQRPLDERALQEKLKDFPVCVSTKPEPEDDAEEGLGGLPSNISSVSSLLLFNTTENLYKKYVFLDPLAGAVTKTHVMLGAETEEKLFDAPLSISKREQLEQQVPENYFYVPDLGQVPEIDVPSYLPDLPGIANDLMYIADLGPGIAPSAPGTIPELPTFHTEVAEPLKVDLQDGVLTPPPPPPPPPPAPEVLASAPPLPPSTAAPVGQGARQDDSSSSASPSVQGAPREVVDPSGGWATLLESIRQAGGIGKAKLRSMKERKLEKQQQKEQEQVRATSQGGHLMSDLFNKLVMRRKGISGKGPGAGDGPGGAFARVSDSIPPLPPPQQPQAEDEDDWES

SEQ ID NO: 309110 - protein, 478 aa, Artificial Sequence
  derived and/or modified sequence
MSGVMCLKASDTWASGIRSQPQGCLGKWRSMRCKHTRMHLAHLGNSRQLISLGPPRTREDGSRISQQVEQSRSQVQAIGEKVSLAQAKIEKIKGSKKAIKVFSSAKYPAPERLQEYGSIFTGAQDPGLQRRPRHRIQSKHRPLDERALQEKLKDFPVCVSTKPEPEDDAEEGLGGLPSNISSVSSLLLFNTTENLYKKYVFLDPLAGAVTKTHVMLGAETEEKLFDAPLSISKREQLEQQVPENYFYVPDLGQVPEIDVPSYLPDLPSIANDLMYSADLGPGIAPSAPGTIPELPTFHTEVAEPLKADLQDGVLTPPPPPPPPPPAPEVLASAPPLPPSTAAPVGQGARQDDGSSSASPSVQGAPREVVDPSGGWATLLESIRQAGGIGKAKLRSMKERKLEKKKQKEQEQVRATSQGGHLMSDLFNKLVMRRKGISGKGPGAGEGPGGAFARVSDSIPPVPPPQQPQAEEDEDDWES

SEQ ID NO: 309111 - DNA, 1434 bp, Artificial Sequence
  derived and/or modified sequence
atgagcggcgtgatgtgcctgaaggccagcgacacctgggccagcggcatcagaagccagccccagggctgcctgggcaagtggagaagcatgagatgcaagcacaccagaatgcacctggcccacctgggcaacagcagacagctgatcagcctgggcccccccagaaccagagaggacggcagcagaatcagccagcaggtggagcagagcagaagccaggtgcaggccatcggcgagaaggtgagcctggcccaggccaagatcgagaagatcaagggcagcaagaaggccatcaaggtgttcagcagcgccaagtaccccgcccccgagagactgcaggagtacggcagcatcttcaccgacgcccaggaccccggcctgcagagaagacccagacacagaatccagagcaagcagagacccctggacgagagagccctgcaggagaagctgaaggacttccccgtgtgcgtgagcaccaagcccgagcccgaggacgacgccgaggagggcctgggcggcctgcccagcaacatcagcagcgtgagcagcctgctgctgttcaacaccaccgagaacctgtacaagaagtacgtgttcctggaccccctggccggcgccgtgaccaagacccacgtgatgctgggcgccgagaccgaggagaagctgttcgacgcccccctgagcatcagcaagagagagcagctggagcagcaggtgcccgagaactacttctacgtgcccgacctgggccaggtgcccgagatcgacgtgcccagctacctgcccgacctgcccggcatcgccaacgacctgatgtacatcgccgacctgggccccggcatcgcccccagcgcccccggcaccatccccgagctgcccaccttccacaccgaggtggccgagcccctgaaggtggacctgcaggacggcgtgctgaccccccccccccccccccccccccccccccccgcccccgaggtgctggccagcgccccccccctgccccccagcaccgccgcccccgtgggccagggcgccagacaggacgacagcagcagcagcgccagccccagcgtgcagggcgcccccagagaggtggtggaccccagcggcggctgggccaccctgctggagagcatcagacaggccggcggcatcggcaaggccaagctgagaagcatgaaggagagaaagctggagaagcagcagcagaaggagcaggagcaggtgagagccaccagccagggcggccacctgatgagcgacctgttcaacaagctggtgatgagaagaaagggcatcagcggcaagggccccggcgccggcgacggccccggcggcgccttcgccagagtgagcgacagcatcccccccctgccccccccccagcagccccaggccgaggacgaggacgactgggagagctag

SEQ ID NO: 309112 - DNA, 1437 bp, Artificial Sequence
  derived and/or modified sequence
atgagcggcgtgatgtgcctgaaggccagcgacacctgggccagcggcatcagaagccagccccagggctgcctgggcaagtggagaagcatgagatgcaagcacaccagaatgcacctggcccacctgggcaacagcagacagctgatcagcctgggcccccccagaaccagagaggacggcagcagaatcagccagcaggtggagcagagcagaagccaggtgcaggccatcggcgagaaggtgagcctggcccaggccaagatcgagaagatcaagggcagcaagaaggccatcaaggtgttcagcagcgccaagtaccccgcccccgagagactgcaggagtacggcagcatcttcaccggcgcccaggaccccggcctgcagagaagacccagacacagaatccagagcaagcacagacccctggacgagagagccctgcaggagaagctgaaggacttccccgtgtgcgtgagcaccaagcccgagcccgaggacgacgccgaggagggcctgggcggcctgcccagcaacatcagcagcgtgagcagcctgctgctgttcaacaccaccgagaacctgtacaagaagtacgtgttcctggaccccctggccggcgccgtgaccaagacccacgtgatgctgggcgccgagaccgaggagaagctgttcgacgcccccctgagcatcagcaagagagagcagctggagcagcaggtgcccgagaactacttctacgtgcccgacctgggccaggtgcccgagatcgacgtgcccagctacctgcccgacctgcccagcatcgccaacgacctgatgtacagcgccgacctgggccccggcatcgcccccagcgcccccggcaccatccccgagctgcccaccttccacaccgaggtggccgagcccctgaaggccgacctgcaggacggcgtgctgaccccccccccccccccccccccccccccccccgcccccgaggtgctggccagcgccccccccctgccccccagcaccgccgcccccgtgggccagggcgccagacaggacgacggcagcagcagcgccagccccagcgtgcagggcgcccccagagaggtggtggaccccagcggcggctgggccaccctgctggagagcatcagacaggccggcggcatcggcaaggccaagctgagaagcatgaaggagagaaagctggagaagaagaagcagaaggagcaggagcaggtgagagccaccagccagggcggccacctgatgagcgacctgttcaacaagctggtgatgagaagaaagggcatcagcggcaagggccccggcgccggcgagggccccggcggcgccttcgccagagtgagcgacagcatcccccccgtgccccccccccagcagccccaggccgaggaggacgaggacgactgggagagctag

SEQ ID NO: 309113 - DNA, 1434 bp, Artificial Sequence
  derived and/or modified sequence
atgtcaggcgttatgtgtctgaaggcctctgacacctgggcaagcggcatccgatcacagccacagggctgtctggggaagtggcgtagtatgaggtgtaagcacacccggatgcacctcgcccacctgggaaactccaggcaattgatttctctgggacccccacggactagggaagacggatcaaggattagccagcaagtggagcaatcccgtagccaggtgcaagcgattggtgaaaaggtttccctcgctcaggctaagattgagaagatcaaaggctctaaaaaagcaatcaaagttttttctagcgcaaagtacccagcccccgaaagactccaggagtatggctctatcttcactgacgcacaggacccagggctgcagcgtcggccccggcatcgcatccagagtaagcagcggccattggacgaaagagccttgcaagaaaagctgaaggactttcctgtctgtgttagtactaaacccgaaccagaagacgatgctgaagaggggctcggaggactgccctcaaacatcagttccgtcagctctctgttgcttttcaacaccaccgaaaatctgtataagaaatacgtgtttctggacccactggcaggcgccgtgactaagacccacgtcatgctaggtgctgagacagaggagaagctattcgatgccccgctgtctatctccaaaagggagcagctggaacagcaagtcccagagaattatttttacgtgcccgacctggggcaggtacccgagatcgatgttccctcctaccttcccgatctgccaggaattgccaacgacctaatgtacatagccgatctgggacctggtatcgcaccatctgctccaggtacaattcctgagctgcccacattccataccgaggtcgcagaacctctcaaggtcgacttgcaggacggagtcctcacccctccccctccaccacctcccccgccccctgcaccggaagtgctggcctcagcaccaccactccctccttcgacagcagctcccgtcgggcagggggcccggcaggatgactcaagctctagtgcctccccatctgtccagggagcaccacgggaggtggtggaccctagtggaggttgggcgactctgctggagtccattcggcaggcaggtggaatcggtaaagctaagttacgctcaatgaaagaaaggaagctcgagaaacagcagcaaaaggagcaagaacaggtgcgagccacatctcagggtggccacctaatgtctgacctgttcaataaactcgtaatgagaagaaaaggcatttccggaaagggccccggagcgggcgatgggcccggcggggcctttgcccgggtttccgatagtatccccccactccctccgccacagcagccccaagccgaggacgaagacgactgggagtcttag

SEQ ID NO: 309114 - DNA, 1437 bp, Artificial Sequence
  derived and/or modified sequence
atgagtggggtgatgtgcctcaaagcctctgacacctgggcctcaggtattcggagccagccccaagggtgtctgggcaaatggcgaagtatgagatgcaaacacaccagaatgcatctagcacatctcggcaacagtcggcagctcatctcccttggcccccccagaacacgggaggacggctcacgcataagccaacaggtggaacagagcaggagtcaggtacaggccatcggcgagaaagtctctctggctcaggcgaaaatcgaaaagattaagggtagtaaaaaggctattaaggttttttcatctgctaaatatcctgccccagagcggctgcaggagtatggatcaatttttaccggagcccaagaccccggattgcagaggagaccccgccatagaatccagtctaaacacagacctctggacgagcgcgcattacaggaaaagctgaaagatttccctgtctgtgtgtccactaaaccagagccagaagacgacgccgaagagggactcggcggtctaccaagcaatatctcatccgtgtcatccttgttactgtttaatactacagagaacttgtacaagaagtacgtatttctggaccccctagccggtgcggtgactaagacgcacgtgatgttgggagctgagactgaagagaaactttttgatgcaccactttccatcagcaagagggagcagttggaacagcaagttcctgagaactatttctacgtgccggatctggggcaagtccctgaaatcgacgtccctagctatctgcctgacctgccttcaatcgctaacgacctcatgtatagcgccgacctcggccccggcattgcgccctccgcaccaggtactattcccgagctgcccacctttcacacagaggttgcggaaccactgaaagccgacctccaggacggtgttctgaccccccccccgcccccaccaccccccccccctgcacctgaggtccttgccagcgcacccccattgcctccttcaacagccgcccctgtgggccaaggggcgcgccaagacgatggcagttcatcggccagtcccagcgtgcagggcgcccctcgcgaagttgtggaccctagcggaggttgggcgactctgttggaatcaatacggcaggccgggggaattggcaaagcgaagctgagatcaatgaaggaaagaaagctggagaagaagaagcagaaagaacaggagcaggtgagggctaccagccaaggcggccatctcatgagcgacctgttcaacaagctggttatgcggcgcaaggggatttcgggaaaggggcccggtgcaggcgagggtcccggcggcgcattcgccagggtctctgactcaatcccccccgtgccaccaccgcagcagccccaagccgaagaggacgaagacgattgggaaagctag

SEQ ID NO: 309115 - DNA, 1434 bp, Artificial Sequence
  derived and/or modified sequence
atgtctggagtgatgtgcctgaaggccagtgacacctgggccagcggcatccgcagccagccccagggctgcctgggcaagtggaggtccatgcgctgcaagcacaccaggatgcacctggcccacctgggcaacagccggcagctgatcagcctgggcccccccaggaccagagaagatggcagccgcatcagccagcaggtggagcagagccgcagccaggtgcaggccatcggggagaaggtgtccctggcccaggccaagattgagaagatcaagggcagcaagaaggccatcaaggtgttcagcagcgccaagtacccagcccctgagcggctgcaggagtatggcagcatcttcacagatgcccaggaccccggcctgcagaggcggcccaggcaccgcatccagagcaagcagaggcccctggatgagcgggccctgcaggagaagctgaaggacttccctgtgtgtgtgtccaccaagccagagccagaagatgatgctgaggagggcctgggcggcctgcccagcaacatcagctctgtgagcagcctgctgctcttcaacaccacagaaaatctctacaagaagtatgtgttcctggaccccctggccggggctgtgaccaagacccacgtgatgctgggcgctgagacagaggagaagctgtttgatgcccccctgagcatcagcaagcgggagcagctggagcagcaggtgcctgagaactacttctacgtgcctgacctgggccaggtgcctgagattgatgtgcccagctacctgcctgacctgcccggcatcgccaatgacctgatgtacatcgctgacctgggccctggcatcgcccccagcgcccctggcaccatccctgagctgcccaccttccacacagaggtggccgagcccctgaaggtggacctgcaggatggagtgctgaccccacctcctcctcctcctcctcctcctccagcccctgaggtgctggccagcgccccacccctgccccccagcacagctgcccctgtgggccagggcgcccggcaggatgacagcagcagcagcgccagccccagcgtgcagggcgccccccgggaggtggtggaccccagcggcggctgggccaccctgctggagagcatccggcaggccggcggcatcggcaaggccaagctgcgctccatgaaggagaggaagctggagaagcagcagcagaaggagcaggagcaggtgcgggccaccagccagggcggccacctgatgtctgacctcttcaacaagctggtgatgaggaggaagggcatctctggaaaaggacctggagctggagatggccctggaggagcctttgcccgggtgtctgacagcatcccccccctgcccccaccccagcagccccaggccgaggatgaagatgactgggagagctag

SEQ ID NO: 309116 - DNA, 1437 bp, Artificial Sequence
  derived and/or modified sequence
atgtctggagtgatgtgcctgaaggccagtgacacctgggccagcggcatccgcagccagccccagggctgcctgggcaagtggaggtccatgcgctgcaagcacaccaggatgcacctggcccacctgggcaacagccggcagctgatcagcctgggcccccccaggaccagagaagatggcagccgcatcagccagcaggtggagcagagccgcagccaggtgcaggccatcggggagaaggtgtccctggcccaggccaagattgagaagatcaagggcagcaagaaggccatcaaggtgttcagcagcgccaagtacccagcccctgagcggctgcaggagtatggcagcatcttcaccggggcccaggaccccggcctgcagaggcggcccaggcaccgcatccagagcaagcaccggcccctggatgagcgggccctgcaggagaagctgaaggacttccctgtgtgtgtgtccaccaagccagagccagaagatgatgctgaggagggcctgggcggcctgcccagcaacatcagctctgtgagcagcctgctgctcttcaacaccacagaaaatctctacaagaagtatgtgttcctggaccccctggccggggctgtgaccaagacccacgtgatgctgggcgctgagacagaggagaagctgtttgatgcccccctgagcatcagcaagcgggagcagctggagcagcaggtgcctgagaactacttctacgtgcctgacctgggccaggtgcctgagattgatgtgcccagctacctgcctgacctgcccagcatcgccaatgacctgatgtacagcgctgacctgggccctggcatcgcccccagcgcccctggcaccatccctgagctgcccaccttccacacagaggtggccgagcccctgaaggctgacctgcaggatggagtgctgaccccacctcctcctcctcctcctcctcctccagcccctgaggtgctggccagcgccccacccctgccccccagcacagctgcccctgtgggccagggcgcccggcaggatgatggcagcagcagcgccagccccagcgtgcagggcgccccccgggaggtggtggaccccagcggcggctgggccaccctgctggagagcatccggcaggccggcggcatcggcaaggccaagctgcgctccatgaaggagaggaagctggagaagaagaagcagaaggagcaggagcaggtgcgggccaccagccagggcggccacctgatgtctgacctcttcaacaagctggtgatgaggaggaagggcatctctggaaaaggacctggagctggggagggccctggaggagcctttgcccgggtgtctgacagcatcccccctgtgcccccaccccagcagccccaggccgaggaggatgaagatgactgggagagctag

SEQ ID NO: 309117 - DNA, 1434 bp, Artificial Sequence
  derived and/or modified sequence
atgagcggcgtgatgtgcctgaaggccagcgacacctgggccagcggcatccggtcccaaccccagggttgtctaggcaagtggaggagcatgcggtgtaagcacacgagaatgcacctggctcacctaggaaacagccggcagctgattagtctgggtccccctaggacccgggaggacggatcaaggatttctcagcaagtggagcagtctcgatctcaggtgcaggcgattggagagaaagtatccctggcacaggccaagatcgaaaagatcaaaggctcaaaaaaagccatcaaggttttctccagcgccaaatacccagctcccgagcggctgcaggagtatggctccatattcactgatgcccaggaccctggtcttcagcggcgcccaaggcacagaattcagagcaagcagaggcccctggacgaacgggcattgcaggaaaagttgaaggatttcccagtttgtgtgagtacaaaacctgagcccgaagatgatgccgaggaaggcctcggcggcttacccagtaatatttccagcgtgtccagtctgctgctctttaataccaccgagaacctttacaaaaaatacgtcttcctggacccactggctggcgcagttacaaagacgcacgttatgctgggcgccgaaaccgaagaaaaattgtttgacgccccactgtctatctctaaacgcgaacagctcgagcagcaagtcccagagaactatttttatgtgcccgacttgggccaggttcccgagattgatgttccaagctatttaccagacctccctggaatcgccaatgacttaatgtatatcgcagaccttgggcctggaattgcgccctccgccccgggtaccatcccagagctaccaacctttcacacagaggtagcagaacctctgaaggttgatctgcaggatggcgtcctgaccccccctccacctccccccccacccccacccgctcccgaggttcttgcctccgcacctcccctccccccatctacggcggcaccggttggtcagggtgcacgccaggatgactccagttcgtcagcttctccttctgtgcagggagccccaagggaggtcgttgatccttcaggaggctgggcgactttactcgagagtatccggcaggctggagggattgggaaagccaaactgagatcgatgaaggagcgtaagctggaaaagcaacagcaaaaggaacaggagcaggttcgagctacctcccaaggaggccacctcatgtctgacctctttaataagctggttatgcgacgtaagggcattagcggaaaaggcccgggcgccggcgatgggccgggtggcgccttcgctcgggtatcagattctatcccacccctcccacccccccagcagccgcaggccgaagatgaagacgactgggagtcttag

SEQ ID NO: 309118 - DNA, 1437 bp, Artificial Sequence
  derived and/or modified sequence
atgagcggcgtgatgtgcctgaaggccagcgacacctgggccagcggcattcgctcgcaaccgcagggatgtttgggtaaatggagatctatgcgctgtaagcatactcgcatgcatctggcgcaccttggcaactcaaggcagctgatttctctgggcccacccagaactcgcgaggacggctcgcggatatcccagcaggtggagcagtctcgaagccaagtccaggcaatcggagagaaggtcagtctagcgcaggccaagatagagaaaatcaaaggctctaaaaaggcaattaaagtttttagcagcgcgaagtatccagctcctgaaagactgcaggaatatggctccatcttcacaggagcccaggaccccggtttgcagcggcggcctaggcatagaatacagtcaaaacaccgccccctggatgaaagagccctgcaagagaagctgaaggatttcccagtgtgtgtcagcactaaaccagaaccagaggatgatgcagaagagggactcgggggacttccatctaacatctcttcagtaagttcgctgctcctgttcaataccactgagaacttgtacaaaaagtacgtcttcctggacccactcgccggggctgtaaccaagacgcacgtaatgttgggcgctgagactgaggaaaagctctttgacgcccctctgtccataagcaaaagagagcagctagagcagcaggttcctgagaattatttttacgtccctgatttaggacaggtaccagagattgacgtgccaagctatctccccgatctgccatccattgccaacgatttgatgtattcggccgaccttggacctggcatcgctcctagcgctccaggtacaatccctgaactgccaactttccacacagaggtagctgaacctcttaaagcggatctacaggacggagtacttacacctcccccacctccccccccacctccacccgctcctgaagtgctggccagcgctcctccgttacctccctctaccgccgccccagtaggacagggagcccggcaagatgacggctcctcgagcgccagccctagcgtgcaaggggcgccgcgagaggtagtggatcctagtggcgggtgggccacgctattagagtcaattagacaagccggcgggatcggtaaggccaaacttcgcagcatgaaggaaaggaaattggagaaaaagaagcagaaagagcaagaacaggtgcgagctaccagccagggaggacacttaatgtcagatctattcaacaagctggtgatgaggagaaagggcatttcagggaagggtccaggggccggagaaggcccaggtggagcatttgctcgggtgagcgattccatcccgccagtaccccctcctcagcagccccaggctgaggaggacgaggatgactgggagagctag

SEQ ID NO: 309119 - DNA, 1434 bp, Artificial Sequence
  derived and/or modified sequence
atgtccggtgtgatgtgtttgaaggcaagtgatacctgggcctccggaattagatcacagccacagggatgcctgggaaagtggcgctctatgaggtgtaagcatacccggatgcacctcgcccacctcggtaattctagacagctgattagccttgggcctcctcgtacgagagaagacggctccaggatcagtcaacaagtcgagcagtcacggtcgcaggtccaggctattggcgaaaaagtgtccctggcccaggctaagatagagaaaataaagggcagcaagaaggccattaaagtcttctcttccgctaaatatccagccccagaaagacttcaggaatacggctccattttcaccgacgcacaagaccccggtctccagagacgcccacggcaccggatccagagcaagcagaggcccctcgatgaacgcgctcttcaggagaaactgaaagattttcctgtctgtgttagtacaaagcccgaacccgaagatgatgctgaagaaggcctgggtggactcccttctaatataagctccgtgtcaagcttgctgctgtttaacaccacagaaaacctttacaaaaaatacgttttcctggatccccttgctggggctgtaacaaaaacacatgtgatgctgggtgcggaaaccgaggagaagctcttcgatgcccctcttagcatctctaagcgtgagcagctcgagcagcaggtccctgagaactacttctatgtgcccgacctgggacaggttcctgaaatcgacgtgccctcctatctgcccgacctccctggcatcgcgaatgatctgatgtacatcgctgatctcgggccaggcatcgccccaagtgctcctgggaccatccctgagctacccacttttcatactgaggtggctgagccactcaaagtggatctgcaggacggcgtgttgacccctcccccaccacctccgccacccccacccgctccagaggtactcgctagcgccccaccgctgccaccatctaccgcggctccagttgggcagggagcacgccaggacgacagcagctcatcagccagtccttcagtgcaaggggctcccagagaggtcgtagacccctccggcggatgggcgaccctcctggagagcattcggcaggcaggcggaatcggcaaagcgaaattgagatcaatgaaggagcgcaaacttgagaaacagcagcaaaaggagcaggaacaggtgagggcgacctcccaggggggacacctgatgtccgatctgttcaataaactcgtaatgcgtagaaaggggatctccggaaaaggaccgggagcaggcgacggcccagggggtgcttttgctcgtgtctcggattccatccctcccctcccaccgccacagcagccccaggccgaggacgaagatgattgggagtcatag

SEQ ID NO: 309120 - DNA, 1437 bp, Artificial Sequence
  derived and/or modified sequence
atgtcaggagtgatgtgcttgaaggcttccgacacatgggcaagtggtatcaggtcccagccacagggttgtctcggtaagtggagatccatgcgttgtaagcacacgaggatgcatctggcacatcttggaaatagcagacaactaatttccctggggccacctcgcacgagagaagacggcagccgtatctcacagcaggtcgagcaatctagatcccaagtacaagcaattggagaaaaagtctctctggctcaagccaaaatcgagaaaatcaaaggatcgaagaaagctataaaagtattttcatccgccaaatatccagcacctgagcgcctgcaagaatatggatccatatttacaggagcacaagaccccggtttgcagaggcgccctaggcatcgcatccagtccaaacacagacctcttgacgaacgcgctcttcaagaaaagctgaaagacttccctgtgtgcgtcagtactaaacctgaacccgaggatgacgccgaagagggactgggcggactaccgagtaacatttcttccgtctcctccctcctcttgtttaatactactgaaaatctctacaagaagtacgtctttctagacccgctggccggagcggtgacaaagacccacgtgatgttaggagctgagacggaggagaaactgtttgatgctccgctatcgatttctaagcgtgagcaattagagcaacaggtgccggagaactacttctacgtgcctgacttgggacaggtgccagagatagatgtgcccagctatctccccgatctaccctctatcgcgaacgatctcatgtacagtgccgacttaggtccgggtatcgccccttccgcccctggcactatccctgaactgcctaccttccataccgaggttgccgaacctctgaaagccgaccttcaagacggcgtgcttactcctccccctccgccacccccacctcccccagcccctgaagtgctcgcctccgcaccccctctgccccctagcacggccgctcccgtgggccaaggagctcgccaggacgatggctcgtccagcgccagcccaagcgtgcagggcgcaccgagagaggtggttgaccccagcggtggttgggctactctgttggaatctatacgccaagcaggtggcatcggcaaggccaaacttaggtcaatgaaggagcgaaagctagagaagaagaagcaaaaggaacaggaacaggtacgggctacctcgcagggaggacacttaatgtcagacctgttcaacaaactcgttatgcgtagaaaagggatctccggaaaagggccaggtgcaggcgagggacctggtggtgctttcgccagggtttctgacagcatccctccagtaccccctccgcagcaaccacaggctgaagaagatgaagacgactgggagtcctag

SEQ ID NO: 309121 - DNA, 2431 bp, Artificial Sequence
  derived and/or modified sequence
aaggagatggtgctcttcttttttctttctgaattgtggccaccttcataccagtctgtcatggaacacttaagccgcttgagtgtctgctggtactcccagccctgccatgcctgagccccctgcacacaaggagccaggagtaatcagggcagacccattagggcacggggacttctggattgtgaaattggctctctgggggccaaggccttctaacgttggtggaagtggctttggcttattgggtcggattctaggccattcgttccaacctttagagacatcccagctttccctagcccagagtctgcagcccctccaccatcccacatcctccccctccctttcctcatgaaccccagtcgcgcctctgccttctcaaacccctccaccatcccacaccctcctcctgcccttcctcatgaaccccagtcgcgcctctgccttctcatccctgcgcaccacacaggctcgctcgtgcccggtgaatgctgaggctgctctgcacgtggagtgtggccctgtgggcaagggctgggctcttggaggtaggggagctacaggggcgactgggaggaggatgttgtgttacacacgcatcagagttaactttgcagtgagagcggccttgctgcggccaaagaacatggaaaagcatgagtggggtgatgtgccttaaagcatcagacacttgggcctcgggcatcaggagccagccacagggatgtctggggaaatggcgttccatgagatgcaagcacacaagaatgcacttggcacatctggggaacagcaggcagctgatatcactgggcccaccccgcaccagggaggatggaagcaggatctcccagcaggtagagcagagccggagccaggtgcaggccattggagagaaggtctccttggcccaggccaagattgagaagatcaagggcagcaagaaggccatcaaggtgttctccagtgccaagtaccctgctccagagcgcctgcaggaatatggctccatcttcaccgacgcccaggaccctggcctgcagagacgcccccgccacaggatccagagcaagcagcgccccctggacgagcgggccctgcaagagaagctgaaggactttcctgtgtgcgtgagcaccaagccagagcccgaggacgatgcagaagagggacttgggggtcttcccagcaacatcagctctgtcagctccttgctgctcttcaacaccaccgagaacctgtacaagaagtatgtcttcctggaccccctggctggtgctgtaacaaagacccatgtgatgctgggggcagagacagaggagaagctgtttgatgcccccttgtccatcagcaagagagagcagctggaacagcaggtcccagagaactacttctatgtgccagacctgggccaggtgcctgagattgatgttccatcctacctgcctgacctgcccggcattgccaacgacctcatgtacattgccgacctgggccccggcattgccccctctgcccctggcaccattccagaactgcccaccttccacactgaggtagccgagcctctcaaggtagacctacaagatggggtactaacaccacccccaccgcccccaccaccacccccagctcctgaggtgctggccagtgcacccccactcccaccctcaaccgcggcccctgtaggccaaggcgccaggcaggacgacagcagcagcagcgcatctccttcagtccagggagctcccagagaagtggtcgacccctccggtggctgggccactctgctagagtccatccgccaagctgggggcatcggcaaggccaagctgcgcagcatgaaggagcgaaagctggagaagcagcagcagaaggagcaggagcaagtgagagccacgagccaaggtgggcacttgatgtcggatctcttcaacaagctggtcatgaggcgcaagggcatctctgggaaaggacctggggctggtgacgggcccggaggagcctttgcccgcgtgtcagactccatccctcctctgccgccaccgcagcagccacaggcagaggacgaggacgactgggaatcgtagggggctccatgacaccttcccccccagacccagacttggccgttgctctgacatggacacagccaggacaagctgctcagacctgcttccctgggagggggtgacggaaccagcactgtgtggagaccagcttcaaggagcggaaggctggcttgaggccacacagctggggcggggacttctgtctgcctgtgctccatggggggacggctccacccagcctgcgccactgtgttcttctcttaagaggcttccagagaaaacggcacaccaatcaataaagaactgagcagaaaccaacagtgtgcttttaataaaggacctctagctgtgcagga

SEQ ID NO: 309122 - DNA, 2384 bp, Artificial Sequence
  derived and/or modified sequence
aaggagatggtgctcttcttttttctttctgaattgtggccaccttcataccagtctgtcatggaacacttaagccgcttgagtgcctgctggtactcccagccctgccatgcctgagccccctgcacacaaggagccaggagtaatcagggcagacccattagggcacggggacttctggattgtgaaattggctctctgggggccaaggccttctaacgttggtggaagtggctttggcttattgggtcggattctaggccattcgttccaacctttagagacatcccagctttccctagcccagagtctgcagcccctccaccatcccacatcctccccctccctttcctcatgaaccccagtcgcgcctctgccttctcaaacccctccaccatcccacaccctcctcctgcccttcctcatgaaccccagtcacgcctctgccttctcatccctgcgcgccacacaggctcgctcgtgcccggtgaatgctgaggctgctctgcacgtggagtgtggccctgtgggcaagggctgggctcttggaggtaggggagctacaggggcgactgggaggaggatgttgtgttacacacgcatcagagttaactttgcagtgagagcagccttgctgcggccaaagaacatggaaaagcatgagtggggtgatgtgccttaaagcatcagacacttgggcctcgggcatcaggagccagccacagggatgtctggggaaatggcgttccatgagatgcaagcacacaagaatgcacttggcacatctggggaacagcaggcagctgatatcactgggcccaccccgcaccagggaggatggaagcaggatctcccagcaggtagagcagagccggagccaggtgcaggccattggagagaaggtctccttggcccaggccaagattgagaagatcaagggcagcaagaaggccatcaaggtgttctccagtgccaagtaccctgctccagagcgcctgcaggaatatggctccatcttcacgggcgcccaggaccctggcctgcagagacgcccccgccacaggatccagagcaagcaccgccccctggacgagcgggccctgcaggagaagctgaaggactttcctgtgtgcgtgagcaccaagccggagcccgaggacgatgcagaagagggacttgggggtcttcccagcaacatcagctctgtcagctccttgctgcttttcaacaccaccgagaacctgtacaagaagtatgtcttcctggaccccctggctggtgctgtaacaaagacccatgtgatgctgggggcagagacagaggagaagctgtttgatgcccccttgtccatcagcaagagagagcagctggaacagcaggtcccagagaactacttctatgtgccagacctgggccaggtgcctgagattgatgttccatcctacctgcctgacctgcccagcattgccaacgacctcatgtacagtgccgacctgggccccggcattgccccctctgcccctggcaccattccggaactgcccaccttccacactgaggtagccgagcctctcaaggcagacctacaagatggggtactaacaccacccccaccgcccccaccaccacccccagctcctgaggtgctggccagtgcacccccactcccaccctcaaccgcggcccctgtaggccaaggcgccaggcaggacgacggcagcagcagcgcgtctccttcagtccagggagctcccagggaagtggtcgacccctccggtggctgggccactctgctagagtccatccgccaagctgggggcatcggcaaggccaagctgcgcagcatgaaggagcgaaagctggagaagaagaagcagaaggagcaggagcaagtgagagccacgagccaaggtgggcacttgatgtcggatctcttcaacaagctggtcatgaggcgcaagggcatctctgggaaaggacctggggctggtgaggggcccggaggagcctttgcccgcgtgtcagactccatccctcctgtgcccccaccgcaacagccacaggcagaggaggacgaggacgactgggaatcctagggggctccatgacaccttcccccccagacccagacttgggctgttgctctgacatggacacagccaggacaagctgctcagacctgcttccctgggagggggtgacggaaccagcactgtgtggagaccagcttcaaggagcggaaggctggcttgaggccacacagctggggcggggacttctgtctgcctgtgctccatggggggacggctccacccagcctgcgccactgtgttcttaagaggcttccagagaaaacggcacaccaatcaataaagaactgagca

SEQ ID NO: 309123 - DNA, 600 bp, Artificial Sequence
  derived and/or modified sequence
ggcagagccgccagaagacaccacgacagctgcgaggacgccgccctgcccggcagaagcgacctgtgcagagccctgcaccccgccagacccgccgccagaggcggcagacccgccgacggcggctgccccgccgtgcccgccgagggcctgtggagacacctgcagcaggtgggcgccgccacccacccccacctgatgagaggccccagcctgagctgggccatccccgccacccaccccctgggcgccgcccccctgggcaaccccggccccggcgagcccatctggctgccctgcgtgggcggcgccgaggtgagagcccagctgggcagcttctacagctgggagagcaagagcagcctgcccagcacccccctgagcctgctggtgagctgcggcggcagcgccctgaccacccacgccttcccccccatcggcggccccatccccagcagattccccgccgccaacaagtacctgcccagcagcgccagagtgcagggcagcgtgggcatcagcatctaccccgccaccgacaaggccacctacctgagcacctggagcgcccacagcggcagaagagagagacccaagtag

SEQ ID NO: 309124 - DNA, 600 bp, Artificial Sequence
  derived and/or modified sequence
ggccgggcggccagacgtcaccatgattcatgcgaagatgcagcactcccaggccggagcgatctgtgtcgtgccctgcacccagcgcggccagctgcccgcggcggaagacctgctgatggcggctgccccgcagtccctgcagagggcctgtggaggcacctgcagcaagtgggggccgcaacccatcctcatttgatgagaggcccaagcttgagttgggcaattccagccactcaccccctcggcgcagcccctctcggcaacccgggccctggggagccgatatggctcccctgtgtggggggcgccgaagtgagggcccagctgggctccttctacagctgggaaagtaaatctagccttccctcgaccccactatcactcctcgtgtcatgtggcggcagcgccctaactacgcatgcttttccaccaatcggagggcctattccgagtaggtttcccgccgctaataaataccttccatctagcgcaagggtacaagggtccgtggggatatccatctatcccgctactgataaagcaacatacctgagcacttggagcgctcactccggccgcagagaaaggccaaagtag

SEQ ID NO: 309125 - DNA, 600 bp, Artificial Sequence
  derived and/or modified sequence
ggccgggccgcccggcggcaccacgacagctgtgaagatgctgccctgcccggccgcagtgacctgtgccgggccctgcacccagcccggcctgctgcccggggcggccgcccagcagatggcggctgcccagctgtgcctgctgagggcctgtggaggcacctgcagcaggtgggcgccgccacccacccccacctgatgaggggccccagcctgtcctgggccatcccagccacccaccccctgggcgccgcccccctgggcaaccctggccctggagagcccatctggctgccctgtgtgggcggcgctgaggtgcgggcccagctgggcagcttctacagctgggagagcaagagcagcctgcccagcacccccctgagcctgctggtgtcctgtggcggcagcgccctgaccacccacgccttcccccccatcggcggccccatccccagccgcttccctgctgccaacaagtacctgcccagcagcgcccgggtgcagggctctgtgggcatcagcatctacccagccacagacaaggccacctacctgagcacctggagcgcccacagcggccggcgggagcggcccaagtag

SEQ ID NO: 309126 - DNA, 600 bp, Artificial Sequence
  derived and/or modified sequence
ggccgggccgcccggcggcaccacgacagctgcgaggacgccgccctgcccggcaggtctgacctctgccgcgccctgcatccggcccgacccgccgccagaggtgggagacctgccgacggaggttgtcccgccgtcccggctgaaggactctggcggcatctgcaacaagttggcgccgcaacacatccacatttgatgcgaggaccttcactcagctgggctatcccggctacccatcctttaggtgcagcaccgctcggaaacccaggaccgggcgagccaatttggctgccttgtgtgggcggcgctgaagtgcgcgcccaattgggatcattttacagttgggagagcaaatcaagtctcccctcaacccctctcagcttgctcgtttcctgtggcggctctgctcttaccacccacgcatttccacccatcggaggccccatccccagtagatttcccgccgcaaataagtacttgccctcctctgctagagtccagggttccgtgggcatatccatctacccagcgacggacaaagccacatacctgagtacttggtctgctcacagcggccggcgcgagcggcctaaatag

SEQ ID NO: 309127 - DNA, 600 bp, Artificial Sequence
  derived and/or modified sequence
ggccgtgcagccaggcggcatcatgattcatgcgaggacgccgcactccctggacgtagtgacctgtgcagggcgcttcatcccgcacgacccgcagccagaggcggtcgccctgcagatggagggtgccctgctgtccctgccgaaggattgtggagacacttgcagcaagtgggcgcagccactcacccacacctcatgcgaggcccaagcctgtcttgggctattcctgctactcatccactgggtgccgcacccttgggcaaccccggaccgggagagcctatctggctgccctgcgttggaggtgccgaagtccgcgcacaattggggtctttctacagctgggagagtaagtctagtctgccatcaactccactttcactgttagtcagctgtgggggatccgcgctaactacccacgcctttcctccaatcggcggtcctattccttcaaggtttccagccgcaaacaaatacctgccttcctctgccagagtacagggatctgtgggaatcagtatttaccctgcgacggataaggcgacctacctgtcgacatggtcagcccatagtggcagacgagagcggcctaaatag

SEQ ID NO: 309128 - protein, 187 aa, Artificial Sequence
  derived and/or modified sequence
MTSLTPGCRYSVRVSPQMANRIVDSARSILNKFIPDIYIYTDHMKGVNSGKSPGFGLSLVAETTSGTFLSAELASNPQGQGAAVLPEDLGRNCARLLLEEIYRGGCVDSTNQSLALLLMTLGQQDVSKVLLGPLSPYTIEFLRHLKSFFQIMFKIETKPCGEELKGGDKVLMTCVGIGFSNLSKTLK

SEQ ID NO: 309129 - protein, 138 aa, Artificial Sequence
  derived and/or modified sequence
MTSLTPGCRYSVRVSPQMANRIVDSARSILNKFIPDIYIYTDHMKGVNSGKSPGFGLSLVAETTSGTFLSAELASNPQGQGAAVLPEDLGRNCARLLLEEIYRGGCVDSTNQSLALLLMTLGQQDVSKVLLGPLSPYT

SEQ ID NO: 309130 - DNA, 564 bp, Artificial Sequence
  derived and/or modified sequence
atgacctcattaacacctggctgcaggtactctgttagagtttctccgcaaatggcaaacaggatagtggactccgcccgctcaattctgaacaaattcatcccggatatttacatctataccgaccacatgaagggggttaattccggtaagagccccggctttgggttgagcttggtggccgagaccactagcgggacctttctgtctgctgagctggcctctaatccccagggacagggcgccgccgtgttgcccgaagacctgggtaggaactgtgccagactgctgctcgaggagatctatcgtggcgggtgtgtggacagtaccaatcaaagcctagccctcctgctcatgactctggggcagcaagacgtcagtaaggtcctcctgggccccctctctccatatacgatcgagttcctgcggcatctcaaatcgttcttccaaatcatgttcaagatcgaaacaaagccgtgcggtgaagagctcaagggcggcgataaagtcttaatgacatgtgtcggaattggcttcagtaacctctctaaaaccctgaagtag

SEQ ID NO: 309131 - DNA, 564 bp, Artificial Sequence
  derived and/or modified sequence
atgaccagccttactcccgggtgtcgctacagcgtgcgcgtttctccgcagatggccaaccgcatagtggacagtgcgagatcaattctaaataagtttattcccgatatctacatttataccgaccacatgaagggagtgaattcaggaaaatcacctggatttggattatcccttgtggctgagaccacatctggaacattcctgtctgcggaactggcaagcaacccacaaggtcaaggggcagccgttctccccgaggacctggggcgaaattgtgcccgactgctgttggaggagatctatagggggggctgtgtagatagtaccaatcaatctctcgcccttttactcatgaccctgggacagcaggatgtctcgaaagtgttactcggtcccctgagtccatatactattgaatttctgcgccacttgaagagcttcttccagataatgttcaagatagagacgaaaccatgtggagaagagctgaagggaggggataaggtcctaatgacgtgcgttggaattggtttttcaaatctgagtaaaaccctgaaatag

SEQ ID NO: 309132 - DNA, 417 bp, Artificial Sequence
  derived and/or modified sequence
atgacatcgcttactccgggctgccgctattcagtacgggtcagcccccagatggctaaccgcatcgtcgattccgcccgcagtattctgaataaatttatcccggacatatatatttacaccgaccatatgaagggcgtaaatagcggaaaaagtccaggctttggcctgagcctcgtcgccgagacaacaagcggcacctttctttctgccgagcttgcctccaatcctcaggggcagggcgccgcagtactgccagaggacttagggcgtaattgcgcccggctacttctggaggaaatttataggggcggctgcgtggatagtacaaaccagagcctcgccctgctgcttatgaccctcggtcagcaggatgtctctaaagtcctcttgggtccgctaagtccctacacatag

SEQ ID NO: 309133 - DNA, 564 bp, Artificial Sequence
  derived and/or modified sequence
atgacttcattgaccccaggctgtcggtatagtgtccgcgttagccctcagatggccaatagaatcgtagactcggcaagatcaatcctgaataaatttatccccgacatatatatttacactgatcatatgaagggagtcaactctggcaaatctcctggcttcggcctcagtctggttgcagaaaccacatccgggacatttctgtccgctgaactcgcctccaacccacaagggcaaggggctgcggtgttgcccgaggacttaggcagaaactgtgctcgcctgctgttggaagagatatacagagggggctgcgtcgacagcacaaatcagagcttagcactgctgctgatgacacttgggcaacaggatgtgtctaaagtgctactggggcccctttctccctacactatcgaattcctccgacacttaaagtccttcttccaaataatgtttaaaatagagaccaagccctgcggcgaagaattaaaggggggtgacaaggttctaatgacctgcgtcggcatagggttctctaatctgtccaaaacccttaaatag

SEQ ID NO: 309134 - DNA, 564 bp, Artificial Sequence
  derived and/or modified sequence
atgaccagcctgaccccaggctgccgctacagcgtgcgggtgagcccccagatggccaaccgcatcgtggacagcgcccggagcatcctgaacaagttcatcccagacatctacatctacacagaccacatgaagggcgtgaacagcggcaagagccctggcttcggcctgagcctggtggccgagaccaccagcggcaccttcctgtctgctgagctggccagcaacccccagggccagggcgctgctgtgctgcctgaggacctgggcaggaactgtgcccggctgctgctggaggagatctaccggggcggctgtgtggacagcaccaaccagagcctggccctgctgctgatgaccctgggccagcaggatgtgtccaaggtgctgctgggccccctgagcccctacaccatcgagttcctgcggcacctgaagagcttcttccagatcatgttcaagattgagaccaagccctgtggggaggagctgaagggcggggacaaggtgctgatgacctgtgtgggcatcggcttcagcaacctgagcaagaccctgaagtag

SEQ ID NO: 309135 - DNA, 417 bp, Artificial Sequence
  derived and/or modified sequence
atgaccagcctgaccccaggctgccgctacagcgtgcgggtgagcccccagatggccaaccgcatcgtggacagcgcccggagcatcctgaacaagttcatcccagacatctacatctacacagaccacatgaagggcgtgaacagcggcaagagccctggcttcggcctgagcctggtggccgagaccaccagcggcaccttcctgtctgctgagctggccagcaacccccagggccagggcgctgctgtgctgcctgaggacctgggcaggaactgtgcccggctgctgctggaggagatctaccggggcggctgtgtggacagcaccaaccagagcctggccctgctgctgatgaccctgggccagcaggatgtgtccaaggtgctgctgggccccctgagcccctacacctag

SEQ ID NO: 309136 - DNA, 758 bp, Artificial Sequence
  derived and/or modified sequence
agtgggcagcctcagacctcagaaggacagcacctgcttggtccaaagggtatgagattcaggactgtttgtctaagctgtctgtggtcaaaagtacattctggactgaagagatggtgatgtaactgggctgtgtgtgtattgaaaaatccctctttgctctttcctcatttcagaatgacatccttaactccaggctgcaggtactctgtacgtgtgtcacctcagatggcgaaccggattgtggattctgcaaggagcatcctcaacaagttcatacctgatatctatatttacacagatcacatgaaaggagtcaactctgggaagtctccgggctttgggttgtcactggttgctgagaccaccagtggcaccttcctcagtgctgaactggcctccaacccccagggccagggagcagcagtacttccagaggaccttggcaggaactgtgcccggctgctgctggaggaaatctacaggggtggatgcgtagactcgaccaaccaaagcctggcgctactactcatgacccttggacagcaggatgtttccaaagtcctgctaggccctctctctccctacacgatagaatttttgcggcatttgaagagctttttccagattatgtttaaaattgaaaccaagccatgtggtgaagaactcaagggtggggataaagtgctgatgacctgtgttggcattggtttctccaaccttagcaagaccctcaagtgataaccatcacaagataa

SEQ ID NO: 309137 - DNA, 801 bp, Artificial Sequence
  derived and/or modified sequence
cgtggactgtcttttcagaggcctcgaatagcttgaacaaatgacatccttaactccaggctgcaggtactctgtacgtgtgtcacctcagatggcgaaccggattgtggattctgcaaggagcatcctcaacaagttcatacctgatatctatatttacacagatcacatgaaaggagtcaactctgggaagtctccgggctttgggttgtcactggttgctgagaccaccagtggcaccttcctcagtgctgaactggcctccaacccccagggccagggagcagcagtacttccagaggaccttggcaggaactgtgcccggctgctgctggaggaaatctacaggggtggatgcgtagactcgaccaaccaaagcctggcgctactactcatgacccttggacagcaggatgtttccaaagtcctgctaggccctctctctccctacacgatagaatttttgcggcatttgaagagctttttccagattatgtttaaaattgaaaccaagccatgtggtgaagaactcaagggtggggataaagtgctgatgacctgtgttggcattggtttctccaaccttagcaagaccctcaagtgataaccatcacaagataaggccccaatgcctacagacaaagcagaagctgccacggacaccaatgggaccaagtccaaatggattaatccaggacagaatagccacttgcttaattttctgtgaagaaatatcaatatacaaataaaagacatccctgtagcatatggtttccagctgtttctccagtggcattgcca

SEQ ID NO: 309138 - DNA, 497 bp, Artificial Sequence
  derived and/or modified sequence
gaggtaaagcccttgcccttatagagtgtgtggtctcattgaagagcaagaacaaaatgtgcatatgtgaagagagatgtatgaatgacatccttaactccaggctgcaggtactctgtacgtgtgtcacctcagatggcgaaccggattgtggattctgcaaggagcatcctcaacaagttcatacctgatatctatatttacacagatcacatgaaaggagtcaactctgggaagtctccgggctttgggttgtcactggttgctgagaccaccagtggcaccttcctcagtgctgaactggcctccaacccccagggccagggagcagcagtacttccagaggaccttggcaggaactgtgcccggctgctgctggaggaaatctacaggggtggatgcgtagactcgaccaaccaaagcctggcgctactactcatgacccttggacagcaggatgtttccaaagtcctgctaggccctctctctccctacac

SEQ ID NO: 309139 - DNA, 820 bp, Artificial Sequence
  derived and/or modified sequence
ggattacagaggtaaagcccttgcccttatagagtgtgtggtctcattgaagagcaagaacaaaatgtgcatatgtgaagagagatgtatgcagaatgacatccttaactccaggctgcaggtactctgtacgtgtgtcacctcagatggcgaaccggattgtggattctgcaaggagcatcctcaacaagttcatacctgatatctatatttacacagatcacatgaaaggagtcaactctgggaagtctccgggctttgggttgtcactggttgctgagaccaccagtggcaccttcctcagtgctgaactggcctccaacccccagggccagggagcagcagtacttccagaggaccttggcaggaactgtgcccggctgctgctggaggaaatctacaggggtggatgcgtagactcgaccaaccaaagcctggcgctactactcatgacccttggacagcaggatgtttccaaagtcctgctaggccctctctctccctacacgatagaatttttgcggcatttgaagagctttttccagattatgtttaaaattgaaaccaagccatgtggtgaagaactcaagggtggggataaagtgctgatgacctgtgttggcattggtttctccaaccttagcaagaccctcaagtgataaccatcacaagataaggccccaatgcctacagacaaagcagaagctgccacggacaccaatgggaccaagtccaaatggattaatccaggacagaatagccacttgcttaattttctgtgaagaaatatcaatatacaaataaaagacatccctgtagc

SEQ ID NO: 309140 - DNA, 564 bp, Artificial Sequence
  derived and/or modified sequence
atgaccagcctgacccccggctgccggtacagcgtgcgggtgagcccacagatggcaaatcggatcgtcgacagcgctcgatcaatcttgaataaatttatcccagatatttacatctataccgaccacatgaagggggttaacagcggcaagagcccaggcttcggcttaagcttagtagcggagacgacaagtggaaccttcttaagcgcggagctggccagcaacccacagggtcagggagccgctgtcctgccagaagacctggggcgaaactgtgcccgcttgttgctggaagagatttataggggcggttgcgtggattctacaaaccagtcactggcccttttactcatgactctggggcagcaagatgtcagcaaagtgctgctgggtcctctcagtccctacactatcgaatttttgcggcatctgaaatcctttttccagatcatgtttaaaatagaaaccaaaccatgtggtgaagagctgaaagggggggataaagtcctgatgacctgcgtcgggatcggcttctctaatctgtctaagactttgaagtag

SEQ ID NO: 309141 - DNA, 564 bp, Artificial Sequence
  derived and/or modified sequence
atgaccagcctgacccccggctgccggtacagcgtgcgggtgagccctcaaatggctaacaggatcgtggactcagccagaagtatcctgaataagttcatcccagatatctatatctatactgatcatatgaaaggcgtgaatagcggcaagagccctggattcggcctgagtctcgtggccgagaccacttctgggacatttttgtcagccgagctggcctcgaaccctcagggtcaaggcgctgcagttttgcctgaggatctgggacgcaattgcgccaggctactacttgaggagatctaccggggtggatgcgtggattctactaaccagtccctggcacttctgctgatgaccctcggccagcaagatgtgtcgaaagtcctactcggacctttatcgccatacaccatagagttcctgaggcacctaaaatcatttttccagataatgtttaaaatcgaaacgaaaccatgcggcgaggagttgaaaggaggggacaaagtgttaatgacttgtgtagggattggctttagcaatctttctaaaacactgaagtag

SEQ ID NO: 309142 - DNA, 417 bp, Artificial Sequence
  derived and/or modified sequence
atgaccagcctgacccccggctgccggtacagcgtgcgggtgagccctcagatggcgaatcgaatagttgacagcgcacgaagtattctgaacaagtttattccggacatctacatttacaccgatcacatgaaaggcgtcaattccgggaagagcccagggtttgggctgtctctcgtagcagagacaactagcggcactttcctgagcgcagagctcgcctctaaccctcagggccagggcgccgccgtgctgccggaggatttaggacggaactgcgcccgcctgctcctcgaggaaatttaccggggtggttgtgtcgactctacaaatcaatcacttgccctcctgctcatgacgttgggacagcaggatgtgtctaaagtgctgctcggccccctttcaccatacacctag

SEQ ID NO: 309143 - DNA, 564 bp, Artificial Sequence
  derived and/or modified sequence
atgaccagcctgacccccggctgccggtacagcgtgcgggtgagcccccagatggccaacagaatagtcgactccgcccggtccatcctgaacaaattcatacccgatatttacatatacacagaccacatgaagggggtcaatagcggtaagtctccgggatttgggctaagcctcgtagccgaaaccaccagtggcacattcctctcagcggaattggcatccaatccacaggggcagggggccgccgttctaccagaggacctagggcggaactgtgctcggctactcctagaagagatctatcgaggagggtgtgtggacagcaccaatcagagcctagcattactcctgatgacactgggtcagcaggacgtgtctaaagtcttactgggcccgctttcaccttacacaattgaattcctgcggcacctcaagagctttttccagattatgttcaagattgagaccaaaccatgtggggaggagctgaagggcggggataaagtactgatgacctgcgtaggaattggctttagcaatctttcaaagactctaaaatag

SEQ ID NO: 309144 - DNA, 564 bp, Artificial Sequence
  derived and/or modified sequence
atgaccagcctgactccagggtgtaggtactccgttagagtgtcacctcagatggccaatcgaattgtcgattccgccaggtctatcctgaataagtttatcccagatatttacatctacacagaccatatgaagggagtgaactctggcaaatcacccggattcggcctgagtctggtggcagaaactacttcaggcacttttctctcggctgaactggcttccaatccacagggccagggggcagctgttctccccgaagatctgggacggaattgtgcgaggctgctgctggaggagatttatagagggggatgtgtggacagtacaaaccagtctcttgcacttctactcatgacacttgggcagcaggacgtcagtaaggtgctactcggacccctatctccctataccatcgaatttctgagacacttgaaaagcttttttcagataatgttcaaaattgagacaaagccctgtggcgaggagctcaagggtggcgataaggtgctgatgacctgcgtcggcatcggattctccaatttgtccaagacccttaaatag

SEQ ID NO: 309145 - DNA, 564 bp, Artificial Sequence
  derived and/or modified sequence
atgacctccctgacacccggttgcaggtactccgtgcgggtcagcccccaaatggctaatcgcatcgtcgactcagcgaggtccatactcaacaaatttatccccgacatctatatctataccgatcacatgaagggcgttaacagcgggaaatcaccaggttttggactgagcctagtggcagagaccacatccggaacgtttctttccgccgagttggcctcgaacccccaggggcagggggcagctgtattgcccgaggatcttggcaggaattgcgctcgactacttctcgaagaaatatataggggcggatgcgtggacagcacgaaccagagcctagccctgttgctgatgactttggggcagcaagatgtcagtaaagtcctgctgggcccactgtccccctacactatcgagtttctaaggcacctgaaatctttctttcagatcatgttcaaaatagaaactaagccatgcggggaagagctaaagggtggagataaggtgttgatgacttgtgtgggaatcggctttagtaacttaagcaaaactctgaaatag

SEQ ID NO: 309146 - DNA, 417 bp, Artificial Sequence
  derived and/or modified sequence
atgacctcattgactcctgggtgccgatactctgtcagagtgagcccacaaatggcaaaccggatcgtggactcagcccgatccatacttaacaagttcataccagatatctacatttataccgaccacatgaagggtgttaactcagggaagtcgcccggtttcgggctcagcctggtggccgaaaccacaagcggaacattcttgtctgcagagcttgcttcaaatccccaggggcaaggggctgcggtgctgcccgaagatctgggtcgcaactgtgcaagactgcttttagaagagatttatagggggggatgtgtggattctacaaaccaaagccttgcactgcttctgatgaccctgggacagcaggacgtgtccaaagtgctactgggtcccctgtcaccttatacatag

SEQ ID NO: 309147 - DNA, 564 bp, Artificial Sequence
  derived and/or modified sequence
atgacaagcctcacccccggttgcaggtattccgtcagggtcagtccccaaatggcgaatagaatagtggacagtgccagatctattcttaataaattcattcctgatatctatatctatactgaccatatgaagggggtgaacagtggcaagagcccagggtttgggctgagtcttgtggccgagaccaccagcggtaccttcctcagcgccgagctggcatcgaaccctcagggccagggggctgcggtgctaccagaagacctggggaggaactgtgcgagactcctgcttgaagagatctacagagggggttgtgtggattctaccaaccaaagtcttgccctactgttgatgactcttgggcaacaagacgtgagtaaagtgctcctaggacctctatccccatacaccatcgaattcctgaggcacctgaagtccttttttcagatcatgttcaaaatcgagactaagccatgtggagaagaactcaagggcggagacaaggtgctgatgacttgcgtaggtatcgggttttctaacctgtccaagacactcaagtag

SEQ ID NO: 309148 - DNA, 564 bp, Artificial Sequence
  derived and/or modified sequence
atgaccagcctgacccccggctgcagatacagcgtgagagtgagcccccagatggccaacagaatcgtggacagcgccagaagcatcctgaacaagttcatccccgacatctacatctacaccgaccacatgaagggcgtgaacagcggcaagagccccggcttcggcctgagcctggtggccgagaccaccagcggcaccttcctgagcgccgagctggccagcaacccccagggccagggcgccgccgtgctgcccgaggacctgggcagaaactgcgccagactgctgctggaggagatctacagaggcggctgcgtggacagcaccaaccagagcctggccctgctgctgatgaccctgggccagcaggacgtgagcaaggtgctgctgggccccctgagcccctacaccatcgagttcctgagacacctgaagagcttcttccagatcatgttcaagatcgagaccaagccctgcggcgaggagctgaagggcggcgacaaggtgctgatgacctgcgtgggcatcggcttcagcaacctgagcaagaccctgaagtag

SEQ ID NO: 309149 - DNA, 417 bp, Artificial Sequence
  derived and/or modified sequence
atgaccagcctgacccccggctgcagatacagcgtgagagtgagcccccagatggccaacagaatcgtggacagcgccagaagcatcctgaacaagttcatccccgacatctacatctacaccgaccacatgaagggcgtgaacagcggcaagagccccggcttcggcctgagcctggtggccgagaccaccagcggcaccttcctgagcgccgagctggccagcaacccccagggccagggcgccgccgtgctgcccgaggacctgggcagaaactgcgccagactgctgctggaggagatctacagaggcggctgcgtggacagcaccaaccagagcctggccctgctgctgatgaccctgggccagcaggacgtgagcaaggtgctgctgggccccctgagcccctacacctag

SEQ ID NO: 309150 - DNA, 522 bp, Artificial Sequence
  derived and/or modified sequence
atgggcagaggcagatgcgtgggccccagcctgcagctgagaggccaggagtggagatgcagccccctggtgcccaagggcggcgccgccgccgccgagctgggccccggcggcggcgagaacatggtgagaagattcctggtgaccctgagaatcagaagagcctgcggcccccccagagtgagagtgttcgtggtgcacatccccagactgaccggcgagtgggccgcccccggcgcccccgccgccgtggccctggtgctgatgctgctgagaagccagagactgggccagcagcccctgcccagaagacccggccacgacgacggccagagacccagcggcggcgccgccgccgcccccagaagaggcgcccagctgagaagacccagacacagccaccccaccagagccagaagatgccccggcggcctgcccggccacgccggcggcgccgcccccggcagaggcgccgccggcagagccagatgcctgggccccagcgccagaggccccggctag

SEQ ID NO: 309151 - DNA, 522 bp, Artificial Sequence
  derived and/or modified sequence
atgggcaggggacgctgtgtgggcccttccctgcagttgcgcggacaggagtggaggtgtagcccgttggttcctaaaggaggtgctgctgccgcagagttgggtcctggtggaggcgaaaatatggttaggcggttcctcgttaccctcagaatacgtagggcatgcggcccaccccgagtgcgggtcttcgtcgttcatatcccaaggctcacgggggaatgggctgcccctggagctcccgcagccgtcgcacttgtgctcatgctgctccgatcccaacgattgggtcagcagcctcttccccggcgacccgggcacgatgatggacagaggccatcagggggcgcagccgccgcaccaagacgaggcgcccagctgcgccggcctcggcactctcaccctacgcgcgcacgacggtgcccgggcggcctgcccggccacgcaggtggggctgcaccaggccggggggccgcaggcagggctcgatgcctgggcccaagcgcacgtggtcctggttag

SEQ ID NO: 309152 - DNA, 522 bp, Artificial Sequence
  derived and/or modified sequence
atgggccggggccgctgtgtgggccccagcctgcagctgcggggccaggagtggcgctgcagccccctggtgcccaagggcggcgctgctgctgctgagctgggccctgggggcggggagaacatggtgcggcgcttcctggtgaccctgcgcatcagaagagcctgtggccccccccgggtgcgggtgtttgtggtgcacatcccccggctgaccggggagtgggccgcccctggggccccagctgctgtggccctggtgctgatgctgctgcggagccagaggctgggccagcagcccctgcccaggaggcctggccatgatgatggccagaggcccagcggcggcgctgctgctgccccccggcggggggcccagctgcggcggcccaggcacagccaccccacccgggcccggcgctgccctgggggcctgcccggccatgctggaggagctgcccctggccgcggggctgctggccgggcccgctgcctgggccccagcgcccggggccctggatag

SEQ ID NO: 309153 - DNA, 522 bp, Artificial Sequence
  derived and/or modified sequence
atgggccggggccggtgcgtgggccccagcctgcagctgcggggccaggaatggcggtgttcccccctggtccccaagggcggtgctgccgctgccgagctgggtcccggagggggcgagaatatggtgaggaggttcttggttaccttaagaatccgccgagcttgtggtccaccgcgagtcagggtgttcgtagtccacatccctcgcttgacgggggagtgggcagctccaggggctcccgccgcggtcgccctggtgcttatgcttctgcgatcgcagagactggggcagcagcctctcccacggcgacctggtcatgacgacgggcaaaggccttcaggaggggcggctgccgctccccgtcgaggagcacagctacggcgtcctcgacattcccaccctacccgcgcccgccgctgccccggcggccttcccgggcacgctggcggcgcagcccccggcagaggggccgctggtcgcgcacgctgccttggtcccagcgcacgcgggcccggctag

SEQ ID NO: 309154 - DNA, 522 bp, Artificial Sequence
  derived and/or modified sequence
atgggcagaggccgttgcgtgggcccatcgctacaactgagggggcaggagtggaggtgcagtccgctagtccccaaaggcggagccgcagccgctgaacttggcccaggagggggagagaacatggtcagaagattcctggtgaccctgaggatcagacgcgcttgcggccctcccagagtgagagtattcgttgtgcatattccacgcctgacaggcgagtgggcagcccctggcgctcccgcagccgtggcccttgtactgatgttacttcggtcacagcgcttaggccagcagcctctgccacggcgacccggacacgacgacgggcagcggcctagcggcggagccgctgcagccccacggcgaggcgcacaactgagaaggcctagacattcacaccctaccagggccagacggtgccctggtggcttacccggtcatgcaggcggtgctgctccaggaaggggagcagccggacgggctcgctgccttgggccatcagcgaggggtccaggatag

SEQ ID NO: 309155 - protein, 1197 aa, Artificial Sequence [sequence omitted]

SEQ ID NO: 309156 - DNA, 5063 bp, Artificial Sequence
  derived and/or modified sequence
cagacggtgagatttggggcgggtccgaggcagcggcgggacgctacctgcgaccgggaccatgaggagctgccagacccgtggggccggtaacgagagcagtcgcggcacctgctgagaggaaagagggagcggtccggcgcggctggggcgcggcagaggcttgcccgatcctcggccatgtcactgctctgcgtgcgcgttaaaagggccaaattccagggttcaccagataaatttaacacatatgtgaccctgaaagtacagaatgtgaagagcacaactgtagcagttcgtggtgatcagccttcctgggaacaggatttcatgtttgagattagtcgcctggacctgggtctaagtgtggaggtatggaacaaaggactgatctgggacaccatggtggggactgtgtggattgcgctgaagactattcgtcagtcggatgaggaagggcctggggaatggtccacattagaggcagagacgttaatgaaagacgatgagatctgtggaactagaaacccaactcctcataaaattttgcttgatacaagatttgagttgccttttgatatcccagaggaggaagccagatattggacctacaaatgggagcaaatcaatgccttgggagctgacaatgagtattctagtcaagaagaaagccagaggaagccattgcccactgctgccgcccagtgttcttttgaagaccctgatagtgccgtcgatgaccgagatagtgactatcgcagtgagaccagcaacagcttcccacctccttaccatacagcttcccagcccaacgcttctgtgcaccagttccctgtgccggtgcgatcgccacagcagctgctacttcaaggcagttcccgggactcttgtaatgactctatgcaaagttatgaccttgattatccagagcggcgggctatcagccccaccagcagcagtaggtatggctcctcctgtaatgtgagtcaaggaagctctcagctaagtgaactagaccagtatcacgaacaagatgacgaccatcgggagacggactcgattcattcttgccacagctctcacagcctgtccagagatggccaagcaggttttggagaacaagagaaacccttggaggtgacaggtcaagcagagaaggaggcagcatgtgaacccaaggagatgaaagaagatgccacaacccaccctcccccagatctggtgctgcaaaaagaccacttcctaggtccccaggagagttttcctgaggagaatgcatcttcaccatttacccaagccagagcacattggatccgagcagttaccaaggttcgactccagctgcaggagaagaaaagcgaggagcccttcagattccagatgatggtgacccctctctgcctcagtggctcccggaagggccagccggagggctctatggcattgacagcatgccagatttacgcagaaagaagccactgccacttgtcagtgatctggtgaagtcactggtccagtctcggaaggcaggaatcacttctgcaatggctacacgcacttctcttaaggacgaagagctgaaatcccacgtgtataagaaaaccctgcaggccttaatctaccccatttcgtgcaccactcctcataactttgaggtctggacggccactaccccaacctactgctatgagtgtgaaggcctgctctggggcattgcccggcagggcatgcgctgcagcgaatgtggagtcaagtgccatgagaagtgccaggatctgctcaatgctgactgcctgcagcgggctgcagaaaagagctgtaaacatggagctgaggaccggacccagaacattatcatggccatgaaggaccgcatgaagatccgagagcgaaataagccagagatctttgaagttatccgggacgtcttcacagtgaacaaagctgcccatgtgcagcagatgaaaacagtgaagcagagtgtactggatggcacctccaaatggtcagccaagatcaccattactgtggtgtgtgcccagggcctacaagccaaggacaaaacaggatccagtgacccttacgtgactgtgcaagtcagcaaaactaagaagcgtaccaagaccatttttggaaacttgaatcctgtttgggaggagaagttccattttgagtgccacaactcctctgaccgcattaaggtgcgtgtatgggatgaggatgatgacatcaagtcaagagtaaagcaacgcctaaagcgagagtctgatgatttccttggccaaaccatcattgaggttcggaccctaagtggcgagatggacgtctggtacaacttggagaagaggacagacaaatcagccgtctcaggggctatccgactacaaatcagtgtggagatcaagggggaggagaaagtagccccataccacgtgcagtatacatgtctccatgagaatcttttccattacctcacagacattcagggcagtggaggagtccgcatccctgaagctcgaggagacgatgcctggaaggtgtactttgatgagacagcccaagaaattgtggatgaatttgccatgcgttatggcattgagtccatatatcaggccatgacgcactttgcatgtttatcatccaagtacatgtgtcctggtgtgccagcagtgatgagcaccttactggccaacatcaacgcctactatgcccacacaactgcctctaccaatgtctctgcatctgatcgctttgcagcctccaactttgggaaagagagatttgtaaaactgctggaccagctacacaactcactgaggatcgacctctctacatacaggaataatttccctgctgggagtcctgaacggcttcaggacttaaaatccacagtggatttgctgaccagcattactttcttcagaatgaaggtacaagaactgcaaagccctccaagagccagccaggtggtaaaggattgtgtgaaggcctgtttgaactccacatatgaatatatcttcaacaactgccacgacttatacagccgccagtaccagctgaagcaggagctacctccagaggaacaagggcccagcattcggaacctggatttctggcccaagctcatcacactcatcgtgtcaatcatagaggaagataagaattcctacacacctgttctgaaccagtttcctcaggagttgaatgtgggaaaagtcagcgcagaagtgatgtggcatttgtttgcccaagacatgaaatatgcattggaggagcatgagaaagaccacctgtgtaaaagtgctgactacatgaacctgcacttcaaggtgaagtggctccacaatgaatacgtgcgggatctgcctgtcctccaggggcaggtgcctgagtacccagcgtggtttgagcagttcgtgctacaatggctggatgagaatgaggatgtatccctggaattcctgcgtggggccctggaacgagataagaaggatggattccagcagacatcagagcatgcactcttttcctgctctgtggtggatgtcttcacacaactcaatcagagctttgagatcatccggaagctggaatgcccagaccccagcatccttgcccactacatgaggaggtttgctaagaccatcgggaaggtgctgatgcagtatgcagacatcttgtcaaaggacttcccagcctattgcacaaaggagaaactgccctgcatcctgatgaacaacgtgcagcaactgagggtccagctggagaaaatgtttgaggccatgggaggcaaggagctggaccttgaagctgcagacagtctgaaggagctgcaggtgaaactgaatacggttctggatgagctcagcatggtgtttggaaacagtttccaggtacggattgatgagtgtgttcgacaaatggccgacatcctgggccaggttcggggcacagggaatgcatctccagacgccagggcctcagcggctcaggatgcagatagcgtactccggcctctcatggacttcctggatggcaacctcaccctctttgccactgtgtgtgagaagacggttctgaagcgtgtactgaaggagctctggcgcgtggtgatgaacacaatggagaggatgattgttctgcccccactcactgaccagacgggcacccagctgatcttcactgctgccaaggagctgagccatctttccaaactcaaggatcacatggtacgagaggaaacacggaatctcactccaaagcagtgtgcagtccttgacctcgccctggacaccatcaagcaatacttccatgcaggaggcaatgggctgaagaaaaccttcctggagaagagcccagatctgcagtctctacgctatgccctgtctctgtacacacagactactgacactctcatcaagacctttgtgcgctcgcagaccacccaagtgcatgatgggaaaggtattagatttactgctaatgaggacattcgtccggaaaaggggtctggtgtggacgatcctgtgggagaagtctctattcaggtggacttgtttacacaccctggtactggggagcacaaggtcacagtgaaagtggtggctgccaatgacctcaagtggcagacagcgggtatgttccggcctttcgtggaggtgactatggttggcccacaccaaagtgataagaagaggaagttcacaaccaaatccaaaagcaacaactgggcccccaagtacaatgagacattccacttcctcctgggaaatgaggaggggcccgagtcctatgagttgcagatatgcgtgaaggattactgctttgcccgggaagatcgcgtgctagggctggctgtgatgcctctgagggatgtcacagccaagggcagctgtgcctgctggtgccccttgggccggaagatccatatggatgagacaggcctgaccattctccggattttatctcagaggagcaatgacgaggtggcccgagaatttgtgaaactcaaatcagagtctcgttccacggaggaggggagctgaacaccttcgactcctgtgcca

SEQ ID NO: 309157 - protein, 1610 aa, Artificial Sequence
  derived and/or modified sequence
MSLLCVRVKRAKFQGSPDKFNTYVTLKVQNVKSTTVAVRGDQPSWEQDFMFEISRLDLGLSVEVWNKGLIWDTMVGTVWIALKTIRQSDEEGPGEWSTLEAETLMKDDEICGTRNPTPHKILLDTRFELPFDIPEEEARYWTYKWEQINALGADNEYSSQEESQRKPLPTAAAQCSFEDPDSAVDDRDSDYRSETSNSFPPPYHTASQPNASVHQFPVPVRSPQQLLLQGSSRDSCNDSMQSYDLDYPERRAISPTSSSRYGSSCNVSQGSSQLSELDQYHEQDDDHRETDSIHSCHSSHSLSRDGQAGFGEQEKPLEVTGQAEKEAACEPKEMKEDATTHPPPDLVLQKDHFLGPQESFPEENASSPFTQARAHWIRAVTKVRLQLQEIPDDGDPSLPQWLPEGPAGGLYGIDSMPDLRRKKPLPLVSDLSLVQSRKAGITSAMATRTSLKDEELKSHVYKKTLQALIYPISCTTPHNFEVWTATTPTYCYECEGLLWGIARQGMRCSECGVKCHEKCQDLLNADCLQRAAEKSCKHGAEDRTQNIIMAMKDRMKIRERNKPEIFEVIRDVFTVNKAAHVQQMKTVKQSVLDGTSKWSAKITITVVCAQGLQAKDKTGSSDPYVTVQVSKTKKRTKTIFGNLNPVWEEKFHFECHNSSDRIKVRVWDEDDDIKSRVKQRLKRESDDFLGQTIIEVRTLSGEMDVWYNLEKRTDKSAVSGAIRLQISVEIKGEEKVAPYHVQYTCLHENLFHYLTDIQGSGGVRIPEARGDDAWKVYFDETAQEIVDEFAMRYGIESIYQAMTHFACLSSKYMCPGVPAVMSTLLANINAYYAHTTASTNVSASDRFAASNFGKERFVKLLDQLHNSLRIDLSTYRNNFPAGSPERLQDLKSTVDLLTSITFFRMKVQELQSPPRASQVVKDCVKACLNSTYEYIFNNCHDLYSRQYQLKQELPPEEQGPSIRNLDFWPKLITLIVSIIEEDKNSYTPVLNQFPQELNVGKVSAEVMWHLFAQDMKYALEEHEKDHLCKSADYMNLHFKVKWLHNEYVRDLPVLQGQVPEYPAWFEQFVLQWLDENEDVSLEFLRGALERDKKDGFQQTSEHALFSCSVVDVFTQLNQSFEIIRKLECPDPSILAHYMRRFAKTIGKVLMQYADILSKDFPAYCTKEKLPCILMNNVQQLRVQLEKMFEAMGGKELDLEAADSLKELQVKLNTVLDELSMVFGNSFQVRIDECVRQMADILGQVRGTGNASPDARASAAQDADSVLRPLMDFLDGNLTLFATVCEKTVLKRVLKELWRVVMNTMERMIVLPPLTDQTGTQLIFTAAKELSHLSKLKDHMVREETRNLTPKQCAVLDLALDTIKQYFHAGGNGLKKTFLEKSPDLQSLRYALSLYTQTTDTLIKTFVRSQTTQVHDGKGIRFTANEDIRPEKGSGVDDPVGEVSIQVDLFTHPGTGEHKVTVKVVAANDLKWQTAGMFRPFVEVTMVGPHQSDKKRKFTTKSKSNNWAPKYNETFHFLLGNEEGPESYELQICVKDYCFAREDRVLGLAVMPLRDVTAKGSCACWCPLGRKIHMDETGLTILRILSQRSNDEVAREFVKLKSESRSTEEGS

SEQ ID NO: 309158 - protein, 1622 aa, Artificial Sequence
  derived and/or modified sequence
MSLLCVRVKRAKFQGSPDKFNTYVTLKVQNVKSTTVAVRGDQPSWEQDFMFEISRLDLGLSVEVWNKGLIWDTMVGTVWIALKTIRQSDEEGPGEWSTLEAETLMKDDEICGTRNPTPHKILLDTRFELPFDIPEEEARYWTYKWEQINALGADNEYSSQEESQRKPLPTAAAQCCHWTYLGWGEQQTFEDPDSAVDDRDSDYRSETSNSFPPPYHTASQPNASVHQFPVPVRSPQQLLLQGSSRDSCNDSMQSYDLDYPERRAISPTSSSRYGSSCNVSQGSSQLSELDQYHEQDDDHRETDSIHSCHSSHSLSRDGQAGFGEQEKPLEVTGQAEKEAACEPKEMKEDATTHPPPDLVLQKDHFLGPQESFPEENASSPFTQARAHWIRAVTKVRLQLQEIPDDGDPSLPQWLPEGPAGGLYGIDSMPDLRRKKPLPLVSDLSLVQSRKAGITSAMATRTSLKDEELKSHVYKKTLQALIYPISCTTPHNFEVWTATTPTYCYECEGLLWGIARQGMRCSECGVKCHEKCQDLLNADCLQRAAEKSCKHGAEDRTQNIIMAMKDRMKIRERNKPEIFEVIRDVFTVNKAAHVQQMKTVKQSVLDGTSKWSAKITITVVCAQGLQAKDKTGSSDPYVTVQVSKTKKRTKTIFGNLNPVWEEKFHFECHNSSDRIKVRVWDEDDDIKSRVKQRLKRESDDFLGQTIIEVRTLSGEMDVWYNLEKRTDKSAVSGAIRLQISVEIKGEEKVAPYHVQYTCLHENLFHYLTDIQGSGGVRIPEARGDDAWKVYFDETAQEIVDEFAMRYGIESIYQAMTHFACLSSKYMCPGVPAVMSTLLANINAYYAHTTASTNVSASDRFAASNFGKERFVKLLDQLHNSLRIDLSTYRNNFPAGSPERLQDLKSTVDLLTSITFFRMKVQELQSPPRASQVVKDCVKACLNSTYEYIFNNCHDLYSRQYQLKQELPPEEQGPSIRNLDFWPKLITLIVSIIEEDKNSYTPVLNQFPQELNVGKVSAEVMWHLFAQDMKYALEEHEKDHLCKSADYMNLHFKVKWLHNEYVRDLPVLQGQVPEYPAWFEQFVLQWLDENEDVSLEFLRGALERDKKDGFQQTSEHALFSCSVVDVFTQLNQSFEIIRKLECPDPSILAHYMRRFAKTIGKVLMQYADILSKDFPAYCTKEKLPCILMNNVQQLRVQLEKMFEAMGGKELDLEAADSLKELQVKLNTVLDELSMVFGNSFQVRIDECVRQMADILGQVRGTGNASPDARASAAQDADSVLRPLMDFLDGNLTLFATVCEKTVLKRVLKELWRVVMNTMERMIVLPPLTDQTGTQLIFTAAKELSHLSKLKDHMVREETRNLTPKQCAVLDLALDTIKQYFHAGGNGLKKTFLEKSPDLQSLRYALSLYTQTTDTLIKTFVRSQTTQVHDGKGIRFTANEDIRPEKGSGVDDPVGEVSIQVDLFTHPGTGEHKVTVKVVAANDLKWQTAGMFRPFVEVTMVGPHQSDKKRKFTTKSKSNNWAPKYNETFHFLLGNEEGPESYELQICVKDYCFAREDRVLGLAVMPLRDVTAKGSCACWCPLGRKIHMDETGLTILRILSQRSNDEVAREFVKLKSESRSTEEGS

SEQ ID NO: 309159 - DNA, 4833 bp, Artificial Sequence
  derived and/or modified sequence
atgagcctgctgtgcgtgagagtgaagagagccaagttccagggcagccccgacaagttcaacacctacgtgaccctgaaggtgcagaacgtgaagagcaccaccgtggccgtgagaggcgaccagcccagctgggagcaggacttcatgttcgagatcagcagactggacctgggcctgagcgtggaggtgtggaacaagggcctgatctgggacaccatggtgggcaccgtgtggatcgccctgaagaccatcagacagagcgacgaggagggccccggcgagtggagcaccctggaggccgagaccctgatgaaggacgacgagatctgcggcaccagaaaccccaccccccacaagatcctgctggacaccagattcgagctgcccttcgacatccccgaggaggaggccagatactggacctacaagtgggagcagatcaacgccctgggcgccgacaacgagtacagcagccaggaggagagccagagaaagcccctgcccaccgccgccgcccagtgcagcttcgaggaccccgacagcgccgtggacgacagagacagcgactacagaagcgagaccagcaacagcttcccccccccctaccacaccgccagccagcccaacgccagcgtgcaccagttccccgtgcccgtgagaagcccccagcagctgctgctgcagggcagcagcagagacagctgcaacgacagcatgcagagctacgacctggactaccccgagagaagagccatcagccccaccagcagcagcagatacggcagcagctgcaacgtgagccagggcagcagccagctgagcgagctggaccagtaccacgagcaggacgacgaccacagagagaccgacagcatccacagctgccacagcagccacagcctgagcagagacggccaggccggcttcggcgagcaggagaagcccctggaggtgaccggccaggccgagaaggaggccgcctgcgagcccaaggagatgaaggaggacgccaccacccaccccccccccgacctggtgctgcagaaggaccacttcctgggcccccaggagagcttccccgaggagaacgccagcagccccttcacccaggccagagcccactggatcagagccgtgaccaaggtgagactgcagctgcaggagatccccgacgacggcgaccccagcctgccccagtggctgcccgagggccccgccggcggcctgtacggcatcgacagcatgcccgacctgagaagaaagaagcccctgcccctggtgagcgacctgagcctggtgcagagcagaaaggccggcatcaccagcgccatggccaccagaaccagcctgaaggacgaggagctgaagagccacgtgtacaagaagaccctgcaggccctgatctaccccatcagctgcaccaccccccacaacttcgaggtgtggaccgccaccacccccacctactgctacgagtgcgagggcctgctgtggggcatcgccagacagggcatgagatgcagcgagtgcggcgtgaagtgccacgagaagtgccaggacctgctgaacgccgactgcctgcagagagccgccgagaagagctgcaagcacggcgccgaggacagaacccagaacatcatcatggccatgaaggacagaatgaagatcagagagagaaacaagcccgagatcttcgaggtgatcagagacgtgttcaccgtgaacaaggccgcccacgtgcagcagatgaagaccgtgaagcagagcgtgctggacggcaccagcaagtggagcgccaagatcaccatcaccgtggtgtgcgcccagggcctgcaggccaaggacaagaccggcagcagcgacccctacgtgaccgtgcaggtgagcaagaccaagaagagaaccaagaccatcttcggcaacctgaaccccgtgtgggaggagaagttccacttcgagtgccacaacagcagcgacagaatcaaggtgagagtgtgggacgaggacgacgacatcaagagcagagtgaagcagagactgaagagagagagcgacgacttcctgggccagaccatcatcgaggtgagaaccctgagcggcgagatggacgtgtggtacaacctggagaagagaaccgacaagagcgccgtgagcggcgccatcagactgcagatcagcgtggagatcaagggcgaggagaaggtggccccctaccacgtgcagtacacctgcctgcacgagaacctgttccactacctgaccgacatccagggcagcggcggcgtgagaatccccgaggccagaggcgacgacgcctggaaggtgtacttcgacgagaccgcccaggagatcgtggacgagttcgccatgagatacggcatcgagagcatctaccaggccatgacccacttcgcctgcctgagcagcaagtacatgtgccccggcgtgcccgccgtgatgagcaccctgctggccaacatcaacgcctactacgcccacaccaccgccagcaccaacgtgagcgccagcgacagattcgccgccagcaacttcggcaaggagagattcgtgaagctgctggaccagctgcacaacagcctgagaatcgacctgagcacctacagaaacaacttccccgccggcagccccgagagactgcaggacctgaagagcaccgtggacctgctgaccagcatcaccttcttcagaatgaaggtgcaggagctgcagagcccccccagagccagccaggtggtgaaggactgcgtgaaggcctgcctgaacagcacctacgagtacatcttcaacaactgccacgacctgtacagcagacagtaccagctgaagcaggagctgccccccgaggagcagggccccagcatcagaaacctggacttctggcccaagctgatcaccctgatcgtgagcatcatcgaggaggacaagaacagctacacccccgtgctgaaccagttcccccaggagctgaacgtgggcaaggtgagcgccgaggtgatgtggcacctgttcgcccaggacatgaagtacgccctggaggagcacgagaaggaccacctgtgcaagagcgccgactacatgaacctgcacttcaaggtgaagtggctgcacaacgagtacgtgagagacctgcccgtgctgcagggccaggtgcccgagtaccccgcctggttcgagcagttcgtgctgcagtggctggacgagaacgaggacgtgagcctggagttcctgagaggcgccctggagagagacaagaaggacggcttccagcagaccagcgagcacgccctgttcagctgcagcgtggtggacgtgttcacccagctgaaccagagcttcgagatcatcagaaagctggagtgccccgaccccagcatcctggcccactacatgagaagattcgccaagaccatcggcaaggtgctgatgcagtacgccgacatcctgagcaaggacttccccgcctactgcaccaaggagaagctgccctgcatcctgatgaacaacgtgcagcagctgagagtgcagctggagaagatgttcgaggccatgggcggcaaggagctggacctggaggccgccgacagcctgaaggagctgcaggtgaagctgaacaccgtgctggacgagctgagcatggtgttcggcaacagcttccaggtgagaatcgacgagtgcgtgagacagatggccgacatcctgggccaggtgagaggcaccggcaacgccagccccgacgccagagccagcgccgcccaggacgccgacagcgtgctgagacccctgatggacttcctggacggcaacctgaccctgttcgccaccgtgtgcgagaagaccgtgctgaagagagtgctgaaggagctgtggagagtggtgatgaacaccatggagagaatgatcgtgctgccccccctgaccgaccagaccggcacccagctgatcttcaccgccgccaaggagctgagccacctgagcaagctgaaggaccacatggtgagagaggagaccagaaacctgacccccaagcagtgcgccgtgctggacctggccctggacaccatcaagcagtacttccacgccggcggcaacggcctgaagaagaccttcctggagaagagccccgacctgcagagcctgagatacgccctgagcctgtacacccagaccaccgacaccctgatcaagaccttcgtgagaagccagaccacccaggtgcacgacggcaagggcatcagattcaccgccaacgaggacatcagacccgagaagggcagcggcgtggacgaccccgtgggcgaggtgagcatccaggtggacctgttcacccaccccggcaccggcgagcacaaggtgaccgtgaaggtggtggccgccaacgacctgaagtggcagaccgccggcatgttcagacccttcgtggaggtgaccatggtgggcccccaccagagcgacaagaagagaaagttcaccaccaagagcaagagcaacaactgggcccccaagtacaacgagaccttccacttcctgctgggcaacgaggagggccccgagagctacgagctgcagatctgcgtgaaggactactgcttcgccagagaggacagagtgctgggcctggccgtgatgcccctgagagacgtgaccgccaagggcagctgcgcctgctggtgccccctgggcagaaagatccacatggacgagaccggcctgaccatcctgagaatcctgagccagagaagcaacgacgaggtggccagagagttcgtgaagctgaagagcgagagcagaagcaccgaggagggcagctag

SEQ ID NO: 309160 - DNA, 4869 bp, Artificial Sequence
  derived and/or modified sequence
atgagcctgctgtgcgtgagagtgaagagagccaagttccagggcagccccgacaagttcaacacctacgtgaccctgaaggtgcagaacgtgaagagcaccaccgtggccgtgagaggcgaccagcccagctgggagcaggacttcatgttcgagatcagcagactggacctgggcctgagcgtggaggtgtggaacaagggcctgatctgggacaccatggtgggcaccgtgtggatcgccctgaagaccatcagacagagcgacgaggagggccccggcgagtggagcaccctggaggccgagaccctgatgaaggacgacgagatctgcggcaccagaaaccccaccccccacaagatcctgctggacaccagattcgagctgcccttcgacatccccgaggaggaggccagatactggacctacaagtgggagcagatcaacgccctgggcgccgacaacgagtacagcagccaggaggagagccagagaaagcccctgcccaccgccgccgcccagtgctgccactggacctacctgggctggggcgagcagcagaccttcgaggaccccgacagcgccgtggacgacagagacagcgactacagaagcgagaccagcaacagcttcccccccccctaccacaccgccagccagcccaacgccagcgtgcaccagttccccgtgcccgtgagaagcccccagcagctgctgctgcagggcagcagcagagacagctgcaacgacagcatgcagagctacgacctggactaccccgagagaagagccatcagccccaccagcagcagcagatacggcagcagctgcaacgtgagccagggcagcagccagctgagcgagctggaccagtaccacgagcaggacgacgaccacagagagaccgacagcatccacagctgccacagcagccacagcctgagcagagacggccaggccggcttcggcgagcaggagaagcccctggaggtgaccggccaggccgagaaggaggccgcctgcgagcccaaggagatgaaggaggacgccaccacccaccccccccccgacctggtgctgcagaaggaccacttcctgggcccccaggagagcttccccgaggagaacgccagcagccccttcacccaggccagagcccactggatcagagccgtgaccaaggtgagactgcagctgcaggagatccccgacgacggcgaccccagcctgccccagtggctgcccgagggccccgccggcggcctgtacggcatcgacagcatgcccgacctgagaagaaagaagcccctgcccctggtgagcgacctgagcctggtgcagagcagaaaggccggcatcaccagcgccatggccaccagaaccagcctgaaggacgaggagctgaagagccacgtgtacaagaagaccctgcaggccctgatctaccccatcagctgcaccaccccccacaacttcgaggtgtggaccgccaccacccccacctactgctacgagtgcgagggcctgctgtggggcatcgccagacagggcatgagatgcagcgagtgcggcgtgaagtgccacgagaagtgccaggacctgctgaacgccgactgcctgcagagagccgccgagaagagctgcaagcacggcgccgaggacagaacccagaacatcatcatggccatgaaggacagaatgaagatcagagagagaaacaagcccgagatcttcgaggtgatcagagacgtgttcaccgtgaacaaggccgcccacgtgcagcagatgaagaccgtgaagcagagcgtgctggacggcaccagcaagtggagcgccaagatcaccatcaccgtggtgtgcgcccagggcctgcaggccaaggacaagaccggcagcagcgacccctacgtgaccgtgcaggtgagcaagaccaagaagagaaccaagaccatcttcggcaacctgaaccccgtgtgggaggagaagttccacttcgagtgccacaacagcagcgacagaatcaaggtgagagtgtgggacgaggacgacgacatcaagagcagagtgaagcagagactgaagagagagagcgacgacttcctgggccagaccatcatcgaggtgagaaccctgagcggcgagatggacgtgtggtacaacctggagaagagaaccgacaagagcgccgtgagcggcgccatcagactgcagatcagcgtggagatcaagggcgaggagaaggtggccccctaccacgtgcagtacacctgcctgcacgagaacctgttccactacctgaccgacatccagggcagcggcggcgtgagaatccccgaggccagaggcgacgacgcctggaaggtgtacttcgacgagaccgcccaggagatcgtggacgagttcgccatgagatacggcatcgagagcatctaccaggccatgacccacttcgcctgcctgagcagcaagtacatgtgccccggcgtgcccgccgtgatgagcaccctgctggccaacatcaacgcctactacgcccacaccaccgccagcaccaacgtgagcgccagcgacagattcgccgccagcaacttcggcaaggagagattcgtgaagctgctggaccagctgcacaacagcctgagaatcgacctgagcacctacagaaacaacttccccgccggcagccccgagagactgcaggacctgaagagcaccgtggacctgctgaccagcatcaccttcttcagaatgaaggtgcaggagctgcagagcccccccagagccagccaggtggtgaaggactgcgtgaaggcctgcctgaacagcacctacgagtacatcttcaacaactgccacgacctgtacagcagacagtaccagctgaagcaggagctgccccccgaggagcagggccccagcatcagaaacctggacttctggcccaagctgatcaccctgatcgtgagcatcatcgaggaggacaagaacagctacacccccgtgctgaaccagttcccccaggagctgaacgtgggcaaggtgagcgccgaggtgatgtggcacctgttcgcccaggacatgaagtacgccctggaggagcacgagaaggaccacctgtgcaagagcgccgactacatgaacctgcacttcaaggtgaagtggctgcacaacgagtacgtgagagacctgcccgtgctgcagggccaggtgcccgagtaccccgcctggttcgagcagttcgtgctgcagtggctggacgagaacgaggacgtgagcctggagttcctgagaggcgccctggagagagacaagaaggacggcttccagcagaccagcgagcacgccctgttcagctgcagcgtggtggacgtgttcacccagctgaaccagagcttcgagatcatcagaaagctggagtgccccgaccccagcatcctggcccactacatgagaagattcgccaagaccatcggcaaggtgctgatgcagtacgccgacatcctgagcaaggacttccccgcctactgcaccaaggagaagctgccctgcatcctgatgaacaacgtgcagcagctgagagtgcagctggagaagatgttcgaggccatgggcggcaaggagctggacctggaggccgccgacagcctgaaggagctgcaggtgaagctgaacaccgtgctggacgagctgagcatggtgttcggcaacagcttccaggtgagaatcgacgagtgcgtgagacagatggccgacatcctgggccaggtgagaggcaccggcaacgccagccccgacgccagagccagcgccgcccaggacgccgacagcgtgctgagacccctgatggacttcctggacggcaacctgaccctgttcgccaccgtgtgcgagaagaccgtgctgaagagagtgctgaaggagctgtggagagtggtgatgaacaccatggagagaatgatcgtgctgccccccctgaccgaccagaccggcacccagctgatcttcaccgccgccaaggagctgagccacctgagcaagctgaaggaccacatggtgagagaggagaccagaaacctgacccccaagcagtgcgccgtgctggacctggccctggacaccatcaagcagtacttccacgccggcggcaacggcctgaagaagaccttcctggagaagagccccgacctgcagagcctgagatacgccctgagcctgtacacccagaccaccgacaccctgatcaagaccttcgtgagaagccagaccacccaggtgcacgacggcaagggcatcagattcaccgccaacgaggacatcagacccgagaagggcagcggcgtggacgaccccgtgggcgaggtgagcatccaggtggacctgttcacccaccccggcaccggcgagcacaaggtgaccgtgaaggtggtggccgccaacgacctgaagtggcagaccgccggcatgttcagacccttcgtggaggtgaccatggtgggcccccaccagagcgacaagaagagaaagttcaccaccaagagcaagagcaacaactgggcccccaagtacaacgagaccttccacttcctgctgggcaacgaggagggccccgagagctacgagctgcagatctgcgtgaaggactactgcttcgccagagaggacagagtgctgggcctggccgtgatgcccctgagagacgtgaccgccaagggcagctgcgcctgctggtgccccctgggcagaaagatccacatggacgagaccggcctgaccatcctgagaatcctgagccagagaagcaacgacgaggtggccagagagttcgtgaagctgaagagcgagagcagaagcaccgaggagggcagctag

SEQ ID NO: 309161 - DNA, 4833 bp, Artificial Sequence
  derived and/or modified sequence
atgtctcttttgtgtgtgcgggtgaagcgagctaagtttcaaggcagccccgataaatttaacacgtacgttacactgaaagtgcagaacgtgaaatcaacaacagtcgctgtccgcggcgaccagccctcatgggaacaggattttatgttcgaaatcagtcggcttgatctgggcctgtccgttgaagtgtggaacaagggtttaatatgggatacaatggtggggacagtttggattgcactgaaaacgatacgccagagcgacgaggagggcccaggcgagtggtccacactcgaggccgagactctgatgaaagatgacgaaatttgtggcacccgaaatcctaccccgcacaagattttgctagacactcgattcgaactcccattcgacatacccgaggaggaagcccggtattggacatataaatgggaacaaattaacgccctgggggctgacaatgaatacagtagccaggaggagtctcaacgcaagccacttccaacagccgcggcccagtgttcgtttgaggaccctgattccgctgttgacgaccgggacagcgattaccgaagcgaaaccagcaactcttttccacctccgtaccataccgcctcacaacccaatgcaagtgtccatcagttccctgtgcccgtacgctcaccacagcagcttctacttcaaggcagctcccgagactcttgcaatgactccatgcaatcctacgatctagactatccagagaggcgggcgatctcaccaacatcatcaagccgttacgggtccagctgcaacgtcagtcagggttcatctcagctgtccgaactggatcagtatcatgaacaagacgatgaccatcgggaaacggacagcattcattcctgccacagctcacacagcctctccagagatggtcaggctgggttcggcgagcaggagaagccccttgaggttaccggacaggctgagaaagaggctgcatgcgaaccaaaggagatgaaggaagatgccacgacgcacccaccccccgatttggtcctccagaaggatcattttctggggccccaggagtcctttcctgaggagaatgctagctcaccttttacccaggcgagggctcattggatcagagcagtgacgaaggtgcgtttacagctccaggaaattccggatgatggggatccgtctctgcctcagtggctccccgagggacctgcaggaggtctctatggaatagacagcatgcccgatttgaggaggaaaaaacccctccctttggttagcgacctgtccttagtgcagagccgcaaggcaggtataacctctgccatggctacaaggacctcacttaaggacgaagaactcaagtctcacgtctacaaaaagaccctgcaagctctgatttatccgatatcgtgcaccacccctcataattttgaggtatggacggcaactactcccacatattgttacgaatgcgagggcctcctttggggaattgccagacaaggcatgcgctgttcagagtgcggagtgaaatgccatgagaagtgtcaagacctgctaaatgcggactgcctgcaacgggctgcagagaagtcttgtaaacacggtgccgaggatcggacacagaacataataatggccatgaaggaccgtatgaagattcgtgaacgaaacaaaccagaaattttcgaagtgatacgtgacgttttcacggtgaacaaagcggcacatgttcagcaaatgaaaacagtgaagcagtctgttctggacgggacttctaagtggagtgcaaagatcaccatcaccgtggtttgcgcccaaggtttacaggcgaaagacaagaccggctcaagtgacccttacgttacggtacaggtcagcaaaacaaaaaaacggacgaaaacaatcttcggtaatcttaaccctgtctgggaagagaaattccactttgaatgtcacaactcatccgaccggatcaaagtgagagtctgggacgaagatgatgacatcaagagtcgagtaaagcagagattgaagcgagagtccgatgactttctcggacagacaatcatagaggtgagaacactgtccggagaaatggatgtatggtacaacttagagaagaggacagataaatccgccgtcagtggagccattagactgcagatttccgtggaaattaaaggtgaagaaaaggtcgctccgtaccacgtgcagtatacttgcctgcatgagaacctctttcattaccttaccgatatacagggctcaggaggagtgcgcattcccgaagccaggggagatgacgcttggaaggtttattttgacgagactgctcaggaaattgtggacgagttcgccatgcgctacggtatagagtccatctatcaagcgatgactcactttgcctgcctctccagtaagtatatgtgtcctggtgttcctgcggtgatgagcacactgttggccaacatcaacgcctactacgcccacacaaccgcgtcaactaatgtgtcggcatccgatagattcgccgcgtcaaatttcggtaaggagagatttgtcaagctgctggatcaactgcataattcgctccgtatagatctgtcaacctatcgcaacaattttccagccgggtctccagagaggctgcaagacctgaaatctactgtcgaccttttaacatcaatcacattctttaggatgaaggttcaggaactgcagtccccccccagggctagccaagtcgtgaaggactgtgtaaaggcttgtctcaattccacgtacgaatacatctttaacaattgccacgacctttattcgaggcagtaccagcttaagcaggagctccccccggaggagcagggaccatccattaggaacctggacttctggccgaaactaattaccctgattgttagcattatagaagaagataaaaattcttatacaccagtgctgaaccagtttccacaggagctgaacgtcggaaaggtttccgcagaggtcatgtggcacctgttcgcccaagacatgaaatacgccctggaggaacatgaaaaggaccacctgtgcaagtctgccgactacatgaacttgcacttcaaggtgaagtggctacacaatgagtacgtgagggatttgcccgtactgcagggtcaggtgccggaatatccagcctggtttgagcagtttgtgctccagtggctggatgagaacgaagatgtgagcctggaattcttacgcggcgcccttgaacgcgataagaaggacggattccaacagacttccgagcacgctctgtttagctgtagcgtggttgatgtgttcacccagctgaaccagagctttgagatcattcgcaagctcgaatgcccagacccaagcatcctggcccactacatgcggaggtttgccaaaacaattggtaaagtcttaatgcagtacgcggatatcctctccaaagactttcctgcctactgcacaaaggagaagctaccgtgcattctgatgaataacgtgcagcaactccgcgtgcaacttgagaaaatgtttgaagccatgggagggaaagaacttgatctggaggccgccgactccttaaaggaactccaggtcaagttgaacactgtactcgacgagctctctatggtgtttggaaactcattccaggtgcgcatcgacgaatgtgtgagacaaatggccgacattcttggccaagtaagaggaacaggcaacgcgagtcccgatgccagagcttccgcggcccaagacgcagactcagtgttgcggcccctgatggactttctcgacggaaatctgacactttttgccaccgtgtgcgagaagacagtcctgaagcgcgttttaaaggagctgtggcgcgtcgtgatgaatacaatggagcggatgatcgtgctccctcccctcacagaccaaactggcacacaactcatttttacagctgcaaaagaattgtcgcatctgtctaagctgaaagatcatatggtgcgggaagaaacaagaaatctgacccccaaacagtgcgctgtgctggatctggccctagacacgataaaacagtactttcacgcgggagggaatggattgaagaaaacctttctggagaaatcacctgacctgcagagcttacgatacgccctatccctctatacccagacaacagatactcttatcaaaacctttgtgcggtcacaaaccacacaggttcatgacggcaagggaattcggtttacggctaatgaagacataaggccagaaaaaggatctggggttgatgaccctgtgggcgaagtgtctatacaagtggacctatttacccaccccggaacaggagaacataaagtcaccgtgaaagtggtggccgcaaatgatctcaaatggcaaactgcaggtatgttccggccgtttgtcgaggtaaccatggtaggtcctcaccagagcgataagaagagaaaatttaccacaaaatccaaatctaacaattgggctcctaagtacaatgaaacatttcactttctgctcggcaatgaggagggccccgaatcgtacgaactgcaaatatgcgttaaggattactgctttgctagagaggacagagttctcggactggctgtgatgcctttacgggacgtgacagccaaggggtcctgcgcctgctggtgcccccttggccgcaaaatccatatggatgagaccggactgactattttaaggatactctctcagcggagcaacgatgaggtcgctagagaattcgtgaagttgaagagtgaatcccgctcaactgaagaaggcagttag

SEQ ID NO: 309162 - DNA, 4869 bp, Artificial Sequence
  derived and/or modified sequence
atgtccctgctgtgtgtcagagttaaacgagccaaattccaggggagccccgacaaattcaatacgtatgtcactcttaaggtgcagaatgtcaaaagcaccactgtggccgtgcgcggtgatcaaccaagctgggaacaagacttcatgtttgagatttctaggctggatcttggtctcagtgtggaggtgtggaacaagggactcatttgggatactatggtcggtactgtctggattgcactgaaaaccattaggcagtctgatgaggaaggccctggcgagtggtcgacacttgaagccgaaactctgatgaaggatgacgaaatttgcgggacacgaaaccccactccgcataaaattctcctcgacaccaggttcgagcttccctttgacatccctgaggaagaggcaaggtactggacatataaatgggaacagatcaacgcactgggagcggataacgagtatagttctcaggaggagtctcagaggaaacctctgcctactgctgcggctcagtgctgtcactggacatacctgggatggggcgaacaacagacgtttgaggacccggattccgcggtagacgatagagatagtgattatcgatctgagacctccaactccttccctccaccttatcacaccgcatctcagccaaacgcctctgttcatcagttccccgtgccggtgcgatcacctcagcagcttcttcttcagggatcatctcgagactcgtgtaatgatagcatgcagagttacgacttagactaccccgagagacgggccataagccctacgagcagtagccggtacggaagttcttgcaacgtctcccagggctcttctcaattgtctgagctagatcaataccacgaacaggacgacgaccacagagagacagactccatccactcttgtcattcaagccatagcctgtccagagatggccaggcaggctttggcgagcaggaaaagccattggaggttacaggccaggccgaaaaggaggccgcatgcgagccaaaagagatgaaagaagatgcaaccacacaccccccgccagaccttgttctccagaaagatcactttttgggtccacaagagtccttccccgaggagaatgcatcctcccccttcacccaggcgagggctcactggattcgcgctgttacaaaagtgcgactgcagctccaggaaatccctgacgatggcgacccttctttaccacagtggctcccagaaggtccggccggtggcctctacgggatcgactcaatgcctgatctcagaaggaaaaaacctcttccacttgtgtcagatttgtcactcgtgcagtcaagaaaggccggcattaccagtgccatggctacacgcacctctctaaaggatgaggagcttaagtcccacgtgtacaaaaagacactgcaggcgctgatttaccctatctcttgcaccacgccccacaatttcgaagtgtggactgcaacgacccctacgtactgctacgagtgcgaaggattactttgggggattgccagacagggcatgcgatgtagtgaatgtggagtcaaatgtcatgagaagtgccaagatctccttaacgccgactgtctccagagggctgcagaaaagtcctgcaagcacggcgctgaggacagaactcagaacattattatggctatgaaggacaggatgaaaattagggagcgcaacaagccagagatctttgaggtgatcagagatgtcttcaccgtgaacaaagcagcacatgttcaacagatgaagactgttaaacaatctgttctggacggaacgtcaaaatggagcgcaaaaattactattactgtggtctgtgcccaagggctacaagcgaaagacaagaccgggtcctctgatccctatgtaaccgtgcaagtttcaaaaacaaagaaacgtacaaagacaatttttggaaatcttaaccctgtctgggaggagaaatttcacttcgagtgccataattcgtcagatcgtattaaagtgcgcgtgtgggacgaagatgacgatatcaaatctagggtgaagcagaggcttaaacgcgagtccgatgacttcttgggacagactatcattgaagtccgaacactctccggcgaaatggacgtgtggtataacctggagaagaggacagataaatccgctgtgagtggggcaattcggttacagatcagtgtggagattaagggggaagagaaagtggctccttaccatgtgcagtatacctgcctgcacgaaaatttgttccactatcttacagatatacagggctctggtggggtgagaatacctgaggcccgaggcgatgacgcctggaaagtgtacttcgacgagacagcccaggaaattgtcgacgagtttgcaatgcggtacggaatagagtccatctatcaggccatgacccactttgcatgtcttagctccaaatatatgtgcccgggcgtgccagccgtcatgtcaactctattagctaacattaatgcctactatgcgcatactacggcttctacgaacgtgtcagcttctgaccgcttcgctgcttccaacttcggtaaagagcggttcgtcaagttattggatcaactgcataactccctgcgcatcgacctgagtacgtaccggaataattttccagccggctcacctgaaagactgcaggatctgaagagcactgtcgatctgctgacgtcaatcacattctttagaatgaaggttcaggagttacaatccccccctcgcgcttcgcaggttgtgaaggattgtgttaaggcttgcttgaactccacttacgagtacatctttaataattgccatgacctctactcccgccagtatcagctgaaacaggagttaccccccgaggagcagggaccctccattcggaatctggatttctggccaaagctcataacccttattgtaagcatcatcgaggaagacaagaactcgtacacacccgtgctgaatcaattcccccaggaactgaatgtagggaaggtgtccgccgaagttatgtggcacttgttcgcccaggacatgaaatatgcccttgaagagcatgaaaaagaccacctctgtaaatccgctgactacatgaacctccactttaaggttaagtggctgcataatgaatacgtaagggatcttcccgtcctgcagggacaggtacctgaatatcccgcatggttcgaacagtttgtgctgcagtggctggatgagaatgaggacgtttccctcgagttcctgaggggcgctctggagagagataagaaggatggatttcaacaaacctctgagcacgccctcttctcatgttctgtggttgacgtgtttacacagctgaaccagtccttcgagatcatccggaagctggaatgcccggacccctcgatcctagcccactacatgcgcagatttgctaaaaccatcgggaaggtcttgatgcagtacgccgatattctctcaaaagatttccccgcgtattgtaccaaggagaagctgccatgcatcttgatgaataacgtacaacaactgagggtacagttagagaagatgttcgaggccatgggaggaaaggagttggatctcgaggccgccgacagcctgaaggagctacaagtgaagcttaacacagtcttagacgagctaagtatggtgtttggcaattctttccaggtccgtattgatgaatgcgtgagacagatggccgatattcttggacaggtgcgggggactgggaacgccagccccgatgctagagcgtctgctgctcaggacgccgatagcgttctacgtccactgatggacttcttggatggaaatcttactcttttcgcgactgtgtgtgaaaagacggtgctgaagagggtcctaaaggagctttggcgagtcgtgatgaatactatggagcggatgatcgtgctgcccccccttacagaccagaccggcacacagttgatatttactgcggctaaggaattgtctcacctttctaagctgaaagatcacatggttagagaagaaacccgtaacctcacacctaaacaatgcgccgtgcttgacctggcactcgatactattaaacagtactttcacgccggaggtaacggactaaagaagactttcttggagaagtctccagacctacaaagtctccggtatgctctgtccctgtacactcagacgaccgacacattgatcaagacttttgtgcgctcccaaactacccaagttcacgacggtaaaggcattaggttcacagccaatgaggatatcaggccagaaaaaggatcaggcgtggatgaccccgtcggagaggtctccattcaggttgacctgtttacccatccaggcacgggggagcacaaagtaactgtaaaggttgtggcagccaacgaccttaagtggcagaccgccggaatgtttaggccctttgtggaagtgaccatggtgggcccccatcagtctgacaagaaaaggaagttcaccaccaagtccaagtccaataattgggctcctaaatacaacgaaactttccacttcctgctgggtaacgaggagggaccggaatcctacgagttacaaatctgtgtgaaagactattgctttgccagggaagatagagtgttgggtctggccgtgatgccactcagggatgtcacagcaaaggggtcatgcgcttgctggtgccctttgggaaggaagatccatatggacgaaaccggacttactatcctgcgaatcctctctcagcgcagcaatgacgaagtggctagagaattcgttaagctgaagtcagaatctaggtcaacagaggagggctcctag

SEQ ID NO: 309163 - DNA, 4833 bp, Artificial Sequence
  derived and/or modified sequence
atgagcctgctgtgtgtgcgggtgaagagggccaagttccagggcagcccagacaagttcaacacctacgtgaccctgaaggtgcagaatgtgaagagcaccaccgtggccgtgcggggggaccagcccagctgggagcaggacttcatgtttgagatcagccggctggacctgggcctgtctgtggaggtgtggaacaagggcctcatctgggacaccatggtgggcaccgtgtggatcgccctgaagaccatccggcagagtgatgaggagggccctggagagtggagcaccctggaggccgagaccctgatgaaggatgatgagatctgtggcaccaggaaccccaccccccacaagatcctgctggacaccaggtttgagctgccctttgacatccctgaggaggaggcccgctactggacctacaagtgggagcagatcaatgccctgggcgctgacaatgagtacagcagccaggaggagagccagaggaagcccctgcccacagctgctgcccagtgcagctttgaggaccctgacagcgctgtggatgaccgggacagcgactacagaagtgagaccagcaacagcttccccccaccctaccacacagccagccagcccaatgcctctgtgcaccagtttcctgtgcctgtgcgcagcccccagcagctgctgctgcagggcagcagccgggacagctgcaatgacagcatgcagagctatgacctggactacccagagcggcgggccatcagccccaccagcagcagccgctatggcagcagctgcaatgtgtcccagggcagcagccagctgtctgagctggaccagtaccacgagcaggatgatgaccaccgggagacagacagcatccacagctgccacagcagccacagcctgagcagagatggccaggccggctttggagagcaggagaagcccctggaggtgacaggccaggccgagaaggaggccgcctgtgagcccaaggagatgaaggaggatgccaccacccaccccccaccagacctggtgctgcagaaggaccacttcctgggcccccaggagagcttcccagaagaaaatgccagcagccccttcacccaggcccgggcccactggatccgggctgtgaccaaggtgcggctgcagctgcaggagatcccagatgatggagaccccagcctgccccagtggctgcctgagggccctgctgggggcctgtatggaattgacagcatgccagacctgcggaggaagaagcccctgcccctggtgtctgacctgagcctggtgcagagcaggaaggccggcatcaccagcgccatggccaccaggaccagcctgaaggatgaggagctgaagagccacgtgtacaagaagaccctgcaggccctgatctaccccatcagctgcaccaccccccacaactttgaggtgtggacagccaccacccccacctactgctatgaatgtgagggcctgctgtggggcatcgcccggcagggcatgcgctgcagtgaatgtggggtgaagtgccacgagaagtgccaggacctgctgaatgctgactgcctgcagagagctgctgagaagagctgcaagcacggggctgaggacaggacccagaacatcatcatggccatgaaggacaggatgaagatccgggagaggaacaagccagagatctttgaggtgatcagagatgtgttcaccgtgaacaaggccgcccacgtgcagcagatgaagacagtgaagcagagcgtgctggatggcaccagcaagtggagcgccaagatcaccatcaccgtggtgtgtgcccagggcctgcaggccaaggacaagacaggcagcagtgacccctacgtgacagtgcaggtgtccaagaccaagaagaggaccaagaccatcttcggcaacctgaaccctgtgtgggaggagaagttccactttgagtgccacaacagcagtgaccgcatcaaggtgcgggtgtgggatgaagatgatgacatcaagagccgggtgaagcagaggctgaagcgggagagtgatgacttcctgggccagaccatcatcgaggtgaggaccctgagcggggagatggatgtgtggtacaacctggagaagaggacagacaagtctgctgtgtctggggccatccggctgcagatctctgtggagatcaagggggaggagaaggtggccccctaccacgtgcagtacacctgcctgcacgagaacctcttccactacctgacagacatccagggcagcggcggcgtgcgcatccctgaggcccggggagatgatgcctggaaggtgtactttgatgaaacagcccaggagatcgtggatgaatttgccatgagatatggaattgagagcatctaccaggccatgacccactttgcctgcctgagcagcaagtacatgtgccctggggtgcctgctgtgatgagcaccctgctggccaacatcaatgcctactatgcccacaccacagccagcaccaacgtgtctgccagtgacagatttgctgccagcaactttgggaaggagagatttgtgaagctgctggaccagctgcacaacagcctgagaattgacctgagcacctacagaaacaacttccctgctggcagccctgagcggctgcaggacctgaagagcacagtggacctgctgaccagcatcaccttcttcaggatgaaggtgcaggagctgcagagccccccccgggccagccaggtggtgaaggactgtgtgaaggcctgcctgaacagcacctatgagtacatcttcaacaactgccacgacctgtacagccggcagtaccagctgaagcaggagctgcccccagaggagcagggccccagcatccggaacctggacttctggcccaagctgatcaccctgattgtgtccatcatcgaggaggacaagaacagctacacccctgtgctgaaccagttcccccaggagctgaatgtgggcaaggtgtctgctgaggtgatgtggcacctgtttgcccaggacatgaagtatgccctggaggagcacgagaaggaccacctgtgcaagtctgctgactacatgaacctgcacttcaaggtgaagtggctgcacaatgaatatgtgcgggacctgcctgtgctgcagggccaggtgcctgagtacccagcctggtttgagcagtttgtgctgcagtggctggatgaaaatgaagatgtgtccctggagttcctgcggggggccctggagcgggacaagaaggatggcttccagcagaccagcgagcacgccctcttcagctgcagcgtggtggatgtgttcacccagctgaaccagagctttgagatcatcaggaagctggagtgcccagaccccagcatcctggcccactacatgagaagatttgccaagaccatcggcaaggtgctgatgcagtatgctgacatcctgagcaaggacttccctgcctactgcaccaaggagaagctgccctgcatcctgatgaacaacgtgcagcagctgcgggtgcagctggagaagatgtttgaggccatgggcggcaaggagctggacctggaggccgctgacagcctgaaggagctgcaggtgaagctgaacacagtgctggatgagctgtccatggtgtttggaaacagcttccaggtgagaattgatgaatgtgtgcggcagatggctgacatcctgggccaggtgcggggcactggaaatgccagcccagatgcccgggccagcgctgcccaggatgctgacagcgtgctgcggcccctgatggacttcctggatggcaacctgaccctgtttgccaccgtgtgtgagaagacagtgctgaagagggtgctgaaggagctgtggagggtggtgatgaacaccatggagaggatgattgtgctgccccccctgacagaccagacaggcacccagctgatcttcaccgctgccaaggagctgagccacctgagcaagctgaaggaccacatggtgcgggaggagaccaggaacctgacccccaagcagtgtgctgtgctggacctggccctggacaccatcaagcagtacttccacgccggcggcaatggcctgaagaagaccttcctggagaagagcccagacctgcagagcctgcgctatgccctgagcctgtacacccagaccacagacaccctcatcaagacctttgtgcgcagccagaccacccaggtgcatgatggcaagggcatccgcttcaccgccaatgaagacatccggcctgagaagggcagcggcgtggatgatcctgtgggggaggtgtccatccaggtggacctcttcacccaccctggcaccggggagcacaaggtgacagtgaaggtggtggccgccaatgacctgaagtggcagacagctggcatgttccggccctttgtggaggtgaccatggtgggcccccaccagagcgacaagaagaggaagttcaccaccaagagcaagagcaacaactgggcccccaagtacaatgagaccttccacttcctgctgggcaatgaggagggccctgagagctatgagctgcagatctgtgtgaaggactactgctttgccagagaagatagagtgctgggcctggccgtgatgcccctgagagatgtgacagccaagggcagctgtgcctgctggtgccccctgggcaggaagatccacatggatgagaccggcctgaccatcctgcgcatcctgagccagaggagcaatgatgaggtggcccgggagtttgtgaagctgaagtctgagagccgcagcacagaggagggcagctag

SEQ ID NO: 309164 - DNA, 4869 bp, Artificial Sequence
  derived and/or modified sequence
atgagcctgctgtgtgtgcgggtgaagagggccaagttccagggcagcccagacaagttcaacacctacgtgaccctgaaggtgcagaatgtgaagagcaccaccgtggccgtgcggggggaccagcccagctgggagcaggacttcatgtttgagatcagccggctggacctgggcctgtctgtggaggtgtggaacaagggcctcatctgggacaccatggtgggcaccgtgtggatcgccctgaagaccatccggcagagtgatgaggagggccctggagagtggagcaccctggaggccgagaccctgatgaaggatgatgagatctgtggcaccaggaaccccaccccccacaagatcctgctggacaccaggtttgagctgccctttgacatccctgaggaggaggcccgctactggacctacaagtgggagcagatcaatgccctgggcgctgacaatgagtacagcagccaggaggagagccagaggaagcccctgcccacagctgctgcccagtgctgccactggacctacctgggctggggcgagcagcagacctttgaggaccctgacagcgctgtggatgaccgggacagcgactacagaagtgagaccagcaacagcttccccccaccctaccacacagccagccagcccaatgcctctgtgcaccagtttcctgtgcctgtgcgcagcccccagcagctgctgctgcagggcagcagccgggacagctgcaatgacagcatgcagagctatgacctggactacccagagcggcgggccatcagccccaccagcagcagccgctatggcagcagctgcaatgtgtcccagggcagcagccagctgtctgagctggaccagtaccacgagcaggatgatgaccaccgggagacagacagcatccacagctgccacagcagccacagcctgagcagagatggccaggccggctttggagagcaggagaagcccctggaggtgacaggccaggccgagaaggaggccgcctgtgagcccaaggagatgaaggaggatgccaccacccaccccccaccagacctggtgctgcagaaggaccacttcctgggcccccaggagagcttcccagaagaaaatgccagcagccccttcacccaggcccgggcccactggatccgggctgtgaccaaggtgcggctgcagctgcaggagatcccagatgatggagaccccagcctgccccagtggctgcctgagggccctgctgggggcctgtatggaattgacagcatgccagacctgcggaggaagaagcccctgcccctggtgtctgacctgagcctggtgcagagcaggaaggccggcatcaccagcgccatggccaccaggaccagcctgaaggatgaggagctgaagagccacgtgtacaagaagaccctgcaggccctgatctaccccatcagctgcaccaccccccacaactttgaggtgtggacagccaccacccccacctactgctatgaatgtgagggcctgctgtggggcatcgcccggcagggcatgcgctgcagtgaatgtggggtgaagtgccacgagaagtgccaggacctgctgaatgctgactgcctgcagagagctgctgagaagagctgcaagcacggggctgaggacaggacccagaacatcatcatggccatgaaggacaggatgaagatccgggagaggaacaagccagagatctttgaggtgatcagagatgtgttcaccgtgaacaaggccgcccacgtgcagcagatgaagacagtgaagcagagcgtgctggatggcaccagcaagtggagcgccaagatcaccatcaccgtggtgtgtgcccagggcctgcaggccaaggacaagacaggcagcagtgacccctacgtgacagtgcaggtgtccaagaccaagaagaggaccaagaccatcttcggcaacctgaaccctgtgtgggaggagaagttccactttgagtgccacaacagcagtgaccgcatcaaggtgcgggtgtgggatgaagatgatgacatcaagagccgggtgaagcagaggctgaagcgggagagtgatgacttcctgggccagaccatcatcgaggtgaggaccctgagcggggagatggatgtgtggtacaacctggagaagaggacagacaagtctgctgtgtctggggccatccggctgcagatctctgtggagatcaagggggaggagaaggtggccccctaccacgtgcagtacacctgcctgcacgagaacctcttccactacctgacagacatccagggcagcggcggcgtgcgcatccctgaggcccggggagatgatgcctggaaggtgtactttgatgaaacagcccaggagatcgtggatgaatttgccatgagatatggaattgagagcatctaccaggccatgacccactttgcctgcctgagcagcaagtacatgtgccctggggtgcctgctgtgatgagcaccctgctggccaacatcaatgcctactatgcccacaccacagccagcaccaacgtgtctgccagtgacagatttgctgccagcaactttgggaaggagagatttgtgaagctgctggaccagctgcacaacagcctgagaattgacctgagcacctacagaaacaacttccctgctggcagccctgagcggctgcaggacctgaagagcacagtggacctgctgaccagcatcaccttcttcaggatgaaggtgcaggagctgcagagccccccccgggccagccaggtggtgaaggactgtgtgaaggcctgcctgaacagcacctatgagtacatcttcaacaactgccacgacctgtacagccggcagtaccagctgaagcaggagctgcccccagaggagcagggccccagcatccggaacctggacttctggcccaagctgatcaccctgattgtgtccatcatcgaggaggacaagaacagctacacccctgtgctgaaccagttcccccaggagctgaatgtgggcaaggtgtctgctgaggtgatgtggcacctgtttgcccaggacatgaagtatgccctggaggagcacgagaaggaccacctgtgcaagtctgctgactacatgaacctgcacttcaaggtgaagtggctgcacaatgaatatgtgcgggacctgcctgtgctgcagggccaggtgcctgagtacccagcctggtttgagcagtttgtgctgcagtggctggatgaaaatgaagatgtgtccctggagttcctgcggggggccctggagcgggacaagaaggatggcttccagcagaccagcgagcacgccctcttcagctgcagcgtggtggatgtgttcacccagctgaaccagagctttgagatcatcaggaagctggagtgcccagaccccagcatcctggcccactacatgagaagatttgccaagaccatcggcaaggtgctgatgcagtatgctgacatcctgagcaaggacttccctgcctactgcaccaaggagaagctgccctgcatcctgatgaacaacgtgcagcagctgcgggtgcagctggagaagatgtttgaggccatgggcggcaaggagctggacctggaggccgctgacagcctgaaggagctgcaggtgaagctgaacacagtgctggatgagctgtccatggtgtttggaaacagcttccaggtgagaattgatgaatgtgtgcggcagatggctgacatcctgggccaggtgcggggcactggaaatgccagcccagatgcccgggccagcgctgcccaggatgctgacagcgtgctgcggcccctgatggacttcctggatggcaacctgaccctgtttgccaccgtgtgtgagaagacagtgctgaagagggtgctgaaggagctgtggagggtggtgatgaacaccatggagaggatgattgtgctgccccccctgacagaccagacaggcacccagctgatcttcaccgctgccaaggagctgagccacctgagcaagctgaaggaccacatggtgcgggaggagaccaggaacctgacccccaagcagtgtgctgtgctggacctggccctggacaccatcaagcagtacttccacgccggcggcaatggcctgaagaagaccttcctggagaagagcccagacctgcagagcctgcgctatgccctgagcctgtacacccagaccacagacaccctcatcaagacctttgtgcgcagccagaccacccaggtgcatgatggcaagggcatccgcttcaccgccaatgaagacatccggcctgagaagggcagcggcgtggatgatcctgtgggggaggtgtccatccaggtggacctcttcacccaccctggcaccggggagcacaaggtgacagtgaaggtggtggccgccaatgacctgaagtggcagacagctggcatgttccggccctttgtggaggtgaccatggtgggcccccaccagagcgacaagaagaggaagttcaccaccaagagcaagagcaacaactgggcccccaagtacaatgagaccttccacttcctgctgggcaatgaggagggccctgagagctatgagctgcagatctgtgtgaaggactactgctttgccagagaagatagagtgctgggcctggccgtgatgcccctgagagatgtgacagccaagggcagctgtgcctgctggtgccccctgggcaggaagatccacatggatgagaccggcctgaccatcctgcgcatcctgagccagaggagcaatgatgaggtggcccgggagtttgtgaagctgaagtctgagagccgcagcacagaggagggcagctag

SEQ ID NO: 309165 - DNA, 4833 bp, Artificial Sequence
  derived and/or modified sequence
atgagcctgctgtgcgtgcgggtgaagcgggccaagttccagggctctcccgacaagtttaatacttacgtgactcttaaggtccagaatgtgaaatccactactgtcgcagtgaggggagatcagccttcgtgggagcaggactttatgtttgagatatcaagactcgatcttgggctgagtgtggaagtgtggaataaggggctgatctgggacactatggttggaactgtttggatcgccctgaagaccatccggcaaagtgacgaagaagggccgggagagtggtccaccctggaggcggagactcttatgaaggatgatgagatttgcgggacgcgaaatccgacaccccacaagatcttgcttgacacacggttcgagctccccttcgacattccagaggaagaggcccgctactggacgtataaatgggaacagatcaatgctctaggagccgataacgagtactcttcacaggaggagtcacagcggaagccccttccaaccgccgctgctcagtgctctttcgaggacccggacagtgcagtcgatgacagagactctgattaccgaagcgagacaagcaattcatttccgcccccctaccatacagcgagccagccaaatgcaagtgtccatcaatttccagttccggtcagatccccacaacagctgcttctccagggctccagtagggacagctgtaatgactccatgcagagctacgatttggattaccccgaacgcagggccatctcccccacctcttcaagccgatatggatcgtcttgcaacgtgagccaggggtcaagccagttgagtgagctagaccagtatcacgaacaggacgacgaccatcgagaaaccgactcaatacacagttgtcacagctctcactcattgagcagggacggacaggccggattcggcgaacaggaaaagcctctcgaagtgaccggtcaggcagagaaggaagcagcctgcgagcctaaggagatgaaagaagatgccaccacacatcccccccccgatttagttttgcaaaaggaccattttcttggcccacaggaatccttccccgaggaaaacgccagttcaccttttacacaggccagagcccactggatcagagcggtcactaaagtccgcttgcagttacaagagatccctgacgatggcgacccttctcttcctcaatggctgcccgagggtcccgcaggcggattgtatgggatcgactccatgcccgacctgaggcgaaaaaaacccctgccgctcgtgtcagacttatcactggtccaatcaagaaaggcaggcattacatccgcgatggccacccgtacgagtctcaaggatgaagaattgaagtcccacgtctacaaaaaaacactccaggcccttatttaccccatatcctgcacgacgccccacaatttcgaagtgtggacagccactaccccgacatactgttatgagtgcgaaggtctcctctggggaatcgcccgacaaggtatgaggtgttccgagtgtggcgtgaagtgccatgagaaatgccaggacctcctcaatgctgattgtctccagagggccgccgaaaagtcctgtaagcatggcgcagaggacaggacgcagaacatcataatggcaatgaaggaccgtatgaagatccgagaaagaaacaagcccgaaatattcgaggtcattcgcgacgtgtttaccgtgaataaagccgcccacgtccagcagatgaaaacggttaaacagagtgtactggatggaacaagtaagtggagtgccaagattaccattacggtcgtctgtgcccagggacttcaagccaaggacaaaaccgggtcgtctgacccatacgtgacagtgcaggtttcgaagactaaaaaaaggaccaaaaccatcttcggcaaccttaaccccgtctgggaggaaaagtttcacttcgaatgtcacaactcaagtgatagaattaaggttcgggtgtgggacgaagatgacgacatcaagagcagggtaaaacagagactgaagcgggaatctgacgactttctcggacagaccatcatcgaagtgcgcaccttgtcgggtgagatggatgtgtggtataatttggaaaagagaaccgacaaaagtgcagtgtccggggctatccggctgcaaatcagcgtagagatcaaaggcgaggagaaggtggccccgtaccatgtacagtacacgtgcctgcacgaaaacctgtttcattacttaactgatatccagggcagtggaggggtgcggatccccgaagcccgtggagatgatgcttggaaggtttacttcgatgagacagcacaggaaatagtggacgagttcgcaatgcgttatggtatcgaaagcatatatcaggctatgacccactttgcttgtttgagcagcaagtatatgtgtccaggcgtcccagccgtgatgtctactttgctggctaacatcaacgcctactacgctcataccaccgcgtcaaccaacgtgagtgccagtgaccgatttgcagccagcaattttgggaaggaaagattcgtgaagctgttggaccaattacataattccctgcggatcgacctcagtacgtatagaaataattttcccgccggctcccctgaaagacttcaagacctgaagtccacggtagacctcttgacatctataacttttttcagaatgaaagtacaggagctgcaatctccacctcgcgctagccaggtggtaaaagactgtgttaaggcctgtttaaatagtacttacgagtacatcttcaacaattgccacgatttgtattctcgccagtatcaattgaagcaggagcttccgccagaggagcagggcccgagcatccggaacctggatttctggcccaagctgatcaccctaattgtatcaattatagaagaggataagaactcgtacacaccggttctgaatcagtttccccaagagctcaacgttgggaaggtttccgcagaggtgatgtggcatcttttcgcgcaagatatgaagtatgccttggaagagcatgagaaggaccacctgtgcaaatcagccgactatatgaacttacattttaaggtgaagtggctccacaacgagtatgtgagagacctgcctgttttacagggccaggttcctgagtacccggcttggttcgagcaattcgtgctgcagtggttggacgaaaacgaggatgtcagcctggaatttttgcgaggcgcccttgagcgagataagaaagatgggttccagcaaacaagtgagcatgctcttttcagttgctccgtggtagatgtgtttactcagttaaaccagtcctttgagatcataagaaagctggagtgccctgacccctcgatcctcgctcactacatgagacggttcgcaaagaccatcggcaaggtcctgatgcaatatgccgacattctcagtaaggatttccccgcttactgcaccaaagagaagctcccctgcatcctgatgaacaatgtccagcagcttcgagttcagttagagaagatgttcgaggcaatgggcgggaaggagcttgatcttgaggccgccgattccctgaaagagctgcaggtcaaactgaacacggtgctggacgaactctctatggtgttcgggaatagctttcaggtacgcatcgatgagtgcgtgcggcagatggcagacatcctggggcaggtcagaggcactgggaatgccagcccagacgctcgggcctctgccgcccaggacgcggactctgtgctccggcccctaatggattttctggacggaaatcttactctgtttgcaacagtgtgtgagaaaaccgtgctcaaaagagtgctgaaggaattgtggagggtggtgatgaacaccatggagaggatgattgtcctgccgccactcacagatcagaccggtacacagctcattttcactgcagctaaggaattatctcatctcagtaagcttaaagatcatatggtgcgggaagagacgcgaaacctgacacccaagcagtgcgccgtactagatctggctctagacaccatcaaacaatactttcacgctggtggcaatggactgaaaaaaacttttctagaaaagagcccggacttacagagtttgagatacgctttatccctttacacccagactaccgacaccctgatcaagacttttgtcaggagccagaccactcaggtccatgacggtaaggggatcaggttcaccgcaaatgaggacatcagacccgagaagggctcaggcgtcgatgatcccgtgggagaagtctctatacaggttgacctcttcacgcacccgggcaccggggagcataaggtaaccgtcaaggtcgttgccgctaacgacttaaagtggcaaacagccggtatgttcagaccattcgttgaggtaacaatggtcggaccccatcagtcagacaagaaacgcaaattcacaactaaaagcaagtccaataattgggcgcctaaatacaacgagacattccactttctacttggtaacgaagaagggcccgaatcctatgaactgcagatctgtgtgaaggactattgctttgctagagaggaccgagtgctgggtctggctgtgatgcccctgcgtgacgtgaccgcgaagggaagctgtgcctgttggtgtcctctcggcaggaagatccacatggatgaaaccggcctgaccatcctgaggatactgtctcagcgctccaacgatgaggttgcacgtgagtttgttaagttgaagagcgaatcgagaagcacggaggagggctcctag

SEQ ID NO: 309166 - DNA, 4869 bp, Artificial Sequence
  derived and/or modified sequence
atgagcctgctgtgcgtgcgggtgaagcgggccaagttccagggctcaccagataagttcaatacttacgtaacattaaaggttcagaatgtgaagtctaccaccgtggcggtcaggggtgatcaacctagctgggaacaggatttcatgttcgagatctcgcggctggacctgggcctttctgtagaggtgtggaacaagggcctcatctgggacaccatggtcggcacagtgtggattgccctcaagacaattaggcaatctgacgaggagggacctggggagtggagcaccttagaagcagaaacgctgatgaaagatgacgagatctgcgggaccaggaatcctaccccgcacaagatcctgctggacactcgcttcgaactgccgtttgatattccggaggaggaggccagatattggacgtacaaatgggagcaaattaatgctctgggagctgataacgagtattccagccaagaagagagtcaaaggaaacctctacccaccgccgctgcgcagtgttgccattggacttaccttggttggggcgaacaacagacttttgaggatcccgattccgccgtagacgacagggatagtgactacaggagtgaaactagtaatagttttccacccccatatcacaccgccagtcagccaaacgctagcgtccaccaattcccagtgccagtcaggtccccacagcagctgctgctgcaggggagctctagggattcgtgcaatgacagcatgcaaagttacgacctagattacccggagcgcagagccatatcccccaccagctcttcaagatatggcagcagttgtaacgtgtctcaaggcagctcacagttaagcgagctcgaccagtatcacgagcaggatgatgaccatcgcgagacagattctatccacagctgccattccagccacagcctctcccgcgacggtcaagcgggattcggcgagcaggagaaacctctggaagtgaccggccaggccgagaaggaggcagcctgcgagcccaaggagatgaaggaagacgcaacgacacatcccccccccgacctcgtattgcaaaaggatcacttcttgggaccgcaggaatccttcccagaagagaatgcatccagcccctttacccaggccagggcccattggatccgggctgtgactaaagttcggctgcagctacaagagattccagacgacggagatccctcactgccacagtggctgccagaggggcccgcggggggcctatacggtattgatagcatgccggacttgaggagaaagaaaccgctccctctagtcagcgacctgtccctggtgcagtcgaggaaggctggaatcacctccgccatggccacccggacttcactgaaagacgaggagctgaagtctcacgtgtataagaagactttgcaggcactgatttaccctatttcctgtaccactccacacaactttgaggtctggacagctactacacctacatattgttatgagtgtgaggggctcctgtgggggatcgcccggcaaggaatgcgatgtagcgagtgtggtgtgaagtgtcacgaaaagtgtcaggatttgctgaatgccgactgcctccaacgcgccgccgagaagagctgtaagcatggggccgaggacagaacccagaatatcatcatggccatgaaggatagaatgaagatcagagagagaaataagcccgagatttttgaggtaattagggacgttttcaccgtaaataaagccgcccatgtgcagcagatgaagacagtcaaacagagcgtgcttgatggaacttctaagtggagtgccaaaataacgattaccgtggtgtgtgcacagggccttcaagcaaaagacaaaactggaagctcagatccttatgtcaccgtgcaggtgtccaagaccaagaaacggactaaaacaatttttggaaatttaaaccctgtctgggaggagaagttccatttcgaatgtcacaatagttcagaccgcattaaggtccgcgtgtgggacgaagatgatgatataaagagcagagtcaagcagaggcttaagcgggaatccgacgattttctcgggcagacaattattgaggtgcgaactctaagtggggagatggacgtgtggtacaatctagagaagaggacggacaaatccgccgtctcgggcgcgatccgcttgcagatctctgtggagatcaagggggaggagaaagttgctccctaccatgtacagtacacttgcctccacgagaacctgtttcactacctcaccgacattcaagggagcgggggtgttaggatccccgaggccaggggtgatgacgcttggaaggtatacttcgacgagacggctcaggagatcgtggacgagtttgccatgcgctacggtatagaatccatctatcaggcaatgacccatttcgcctgccttagttccaagtatatgtgccccggtgtgcctgcagtcatgtcaactctgctcgctaatattaatgcgtattatgcccacactactgcttcaacgaacgtctccgcaagcgaccggttcgcagcgtccaactttggcaaagagcggtttgtgaagcttcttgatcagttgcacaattcgttgcgtatcgatctgtcaacgtatcgcaataatttccctgcagggtccccagagcgcctgcaggatcttaagagcactgtggaccttctaacatctatcaccttctttaggatgaaagtccaagagctgcaatcacccccacgggccagccaagtggtcaaggattgcgtgaaagcctgtctgaatagcacatacgagtacatcttcaacaactgccacgacttgtactcccgacagtaccaattaaaacaggagctccctcctgaggaacaggggccctccattagaaacctcgacttttggcccaaactgatcaccctgatcgtgtccataattgaggaggataagaatagttatacccccgtcttgaaccagtttcctcaggaactcaatgtaggcaaagtgagcgctgaggtaatgtggcatctgttcgcacaggacatgaagtatgccctcgaagaacatgaaaaagatcacctctgcaagtctgctgactacatgaaccttcactttaaggtcaaatggcttcataacgagtatgtaagagatctgcctgtgctgcagggtcaagttcctgagtaccctgcatggttcgaacaatttgtgctgcagtggctggacgagaacgaagacgtgagtctggagttccttcgtggggctcttgagagggacaagaaggacggattccagcagacctccgagcacgcactgttctcctgctcagtagtggacgtcttcacgcaattgaaccaaagctttgaaattattcggaagctggaatgcccagacccaagtattttggctcattatatgaggaggtttgccaagactataggcaaagtattgatgcagtacgccgacatcctgagcaaggactttcctgcctattgcaccaaggagaaacttccctgtatcctgatgaacaatgttcagcaactgcgagttcagttggagaagatgtttgaggcaatgggtggtaaggagcttgatttggaagccgctgacagcctgaaggagttacaggtcaaactcaacacggttctcgacgaactgtctatggtgttcgggaacagcttccaggtgcgcattgatgagtgcgtcaggcaaatggccgatattctaggccaggtacggggaactggtaatgcctcccctgatgctagagctagcgcggcccaagacgctgacagcgttctgcgacccctgatggatttcctcgacggcaatctaactctcttcgcaacagtttgtgagaagactgtgctcaagagggtcttaaaagaactatggcgagtggttatgaatacgatggagcgaatgatcgtcctgccgcctctcactgatcagactgggacccagcttatttttaccgctgctaaagagctcagtcatctatcgaagctcaaagaccacatggtacgggaggaaactcggaacttgacaccaaagcagtgtgcagttctcgatttagcgctcgacactatcaagcagtattttcacgctggaggcaacggactgaaaaaaactttcctggagaagtccccagatcttcagagcctgaggtacgctttgtctctgtacactcagaccactgatacgctgattaaaacctttgtacgctctcaaaccacccaagttcacgacggcaagggcattaggtttacagcaaacgaggacatccgaccggagaaggggtcaggcgtggacgacccagtcggtgaggtgtccatccaggttgatctcttcacacaccccgggacgggggagcacaaagtcaccgtaaaggtcgttgctgctaacgacctaaagtggcagaccgccggtatgtttagaccgttcgtagaggttacaatggtcggcccccaccagagtgataagaagcggaaattcactaccaagtcaaagtccaacaattgggcgcccaaatacaacgagacttttcactttctgctgggtaatgaagagggacccgagagttacgaactgcaaatctgcgtgaaagattattgcttcgcccgcgaggacagagtgctgggcctcgctgtgatgccccttcgggacgtcactgccaaggggtcctgcgcgtgctggtgccctcttggcagaaagattcatatggacgaaaccggcctaacgatactgagaatcctgtcacaacggtcaaacgacgaggtcgcacgagaattcgttaagctgaagtctgagagcagatcaactgaagagggctcttag

SEQ ID NO: 309167 - DNA, 4833 bp, Artificial Sequence
  derived and/or modified sequence
atgagtctgctctgtgtgcgggtgaagagggccaagtttcagggctcccccgacaaattcaacacctacgtcacattaaaggtgcagaacgtgaagtcaaccacagtcgccgttcgcggtgatcagccgtcctgggagcaggacttcatgtttgaaatttccagactagacctcggattgtccgtggaagtttggaacaaaggcttaatttgggacactatggtggggactgtctggattgcactgaaaacaataaggcagagcgacgaagagggaccgggtgagtggtctacactggaggcggaaacactgatgaaagatgacgaaatatgcggcactaggaatcctacaccacataagatcctgttagataccaggttcgagctgccattcgatattcctgaggaggaggcaaggtattggacatataagtgggagcagattaacgccctgggcgctgacaatgagtactcatctcaagaggaatcccagaggaagcccctgccaaccgccgcagcacagtgttctttcgaagatcctgatagtgccgtagacgaccgggattccgattatcggtctgaaaccagcaatagttttccgccaccctaccataccgcgagccaaccgaatgccagtgtgcaccagttcccagttcctgtgcgcagtccacaacagcttctcctgcaaggtagttctagagattcttgcaacgattccatgcaaagctatgatctagactaccccgagaggagggccattagccccacctctagctctcgctatggttcgagctgcaatgtcagccagggctcttcacagctgagcgagctggaccagtaccacgaacaggacgacgatcacagggagaccgacagtatccattcttgccacagttcccactcactgtccagggacgggcaagcaggttttggtgaacaggaaaagccactcgaggttaccgggcaagctgaaaaggaggcagcttgcgagcctaaggaaatgaaagaggatgcaaccacccaccctccgcctgacctggtgttgcaaaaggatcactttctgggacctcaggagtctttcccagaagagaatgcatcctctccatttactcaggccagagctcactggattcgagctgtcacaaaggtacggctccagctccaagaaattccagacgatggtgacccttccttacctcagtggttgccggagggaccagctggcggactgtatggaatcgattcaatgccagatctgcggcgaaaaaaaccgctgcctcttgtgtcggacctgagtctggtgcagagccggaaggcaggtattactagcgcgatggctactaggactagtttgaaggatgaagagttgaaaagccacgtgtacaaaaagaccctgcaagccctgatttaccctatcagttgtacgaccccacacaattttgaagtgtggactgccactacaccgacctactgttacgaatgtgagggattactgtgggggattgctcggcagggaatgcggtgctccgaatgcggtgtcaaatgtcacgagaagtgtcaggatcttttaaatgctgactgtttgcagcgcgctgccgaaaagtcttgcaagcatggagccgaggatcggactcagaacatcataatggcaatgaaggataggatgaagatcagagagcggaataagcccgaaatattcgaagtgatacgcgatgtcttcacggtgaataaagccgctcacgtgcagcaaatgaagaccgtgaaacagagcgtgctggacggtacatctaagtggagtgccaagatcactattactgtcgtgtgcgcccaggggctgcaggccaaggacaaaactggtagttcggatccatatgtcaccgttcaggtgtcaaagactaagaagagaaccaagactattttcgggaacttgaatcctgtgtgggaagaaaaattccacttcgagtgtcacaatagctcggatagaatcaaagtacgagtgtgggacgaagatgatgatatcaagtccagggtgaaacagcgcttgaaacgagaatcagatgatttcctgggccaaacgatcatagaagttaggaccctttctggcgagatggacgtatggtacaacttggagaaacgcaccgacaaatccgctgtcagcggcgctatccgactgcaaatctcagttgagatcaaaggcgaagagaaagtagcaccttaccacgtacagtacacttgccttcacgagaacctttttcactatctgacagatatccagggaagtgggggtgtacgtattccagaagctcggggagacgacgcttggaaagtttacttcgacgagaccgctcaggagatcgtcgatgagttcgccatgcggtacggaatagagtctatctatcaagctatgacgcatttcgcatgtctgtctagcaaatatatgtgccctggagtacctgccgtgatgagcacacttctcgctaatataaacgcctactacgctcacacaaccgcatccaccaatgtgagcgctagcgaccgctttgctgctagtaattttggaaaggagaggttcgttaagctgctcgaccaattacacaacagcttacgcatcgacctcagcacttacagaaacaacttccctgccggtagcccggagcggcttcaagatctcaagtccaccgtggaccttctgacgtcaatcaccttttttcgcatgaaagtgcaggagctgcaaagcccaccacgggctagccaggtagtgaaggactgtgtgaaggcatgtctgaatagtacttacgagtacatattcaacaactgccacgatttatacagccggcagtaccaactcaaacaggaactgccccctgaggagcagggaccctcaattcgcaatctggatttctggcccaagttgattacacttattgtgtccattatcgaggaggataagaactcatacactccagtactcaatcagttcccgcaggaactcaacgtgggcaaagtctccgcagaagttatgtggcacctgttcgctcaggacatgaagtatgcacttgaagagcacgaaaaggatcacctgtgtaagtcagccgactacatgaatctacattttaaggtcaagtggttgcacaacgagtacgtccgagacctacccgtgttgcaggggcaagtgcctgaataccctgcctggttcgagcagtttgtgctgcaatggttggacgagaacgaggatgtgagtctggaatttctgcgtggcgcactggagagagacaagaaagacggatttcagcagaccagtgaacacgctctgttctcctgttctgtggtcgacgttttcacacagttgaaccagtcgttcgagatcattcggaagctcgaatgcccggatccgtccatccttgcacactatatgcgcaggtttgccaagactattggcaaagtgctgatgcagtatgctgatatcttgtcaaaagacttcccagcatattgcaccaaagaaaagttaccatgcattctgatgaataatgtacagcagcttcgggtccagctcgagaaaatgttcgaagcgatgggcggaaaagagctcgacctggaggcagccgattctcttaaggagcttcaggtaaaattgaacacagtactggacgaactgtctatggtttttgggaattctttccaggtgcgcatcgacgagtgtgtccgccaaatggctgatatactgggacaggtacgcggaaccggtaatgcttcacctgacgccagggcctctgccgctcaggacgccgattctgtgctcagacctctcatggattttctcgacggtaacctgactctgtttgcgacagtttgtgaaaagaccgtactgaagcgagtcctaaaggagctgtggcgggtcgttatgaatacaatggagcgcatgattgtgttaccccctcttaccgaccagactggcacccagcttatcttcacagcagcgaaggagctaagccatctcagcaaattgaaggaccacatggtaagagaagagacgcgcaatctgaccccaaagcaatgcgccgtcctcgacctggcccttgataccataaaacagtactttcatgctgggggtaacggcctcaagaagacattccttgaaaagagccccgatcttcagtccctcagatacgccctgagcctgtacacccagactaccgacaccctgataaagacattcgtaaggtcgcagacaacccaagtgcacgatggaaaaggcattcgcttcacagcgaatgaggacataaggcctgagaaaggctccggagttgacgaccctgtgggcgaagttagcatccaggtggatctctttacccaccctggcactggcgagcacaaagtgaccgtgaaagtggttgctgcaaatgatttgaagtggcagaccgccggtatgttccgcccatttgtagaggtgacaatggtggggcctcatcagtcagacaagaagaggaaatttacaaccaagagcaagagcaataattgggctcccaaatataatgaaacttttcatttcttactgggcaacgaggaggggcctgaaagctacgaactgcagatctgcgtgaaggactactgcttcgcaagagaggaccgggtattgggtttggccgtaatgccactccgtgacgtgacagctaaaggatcctgtgcatgctggtgcccactggggagaaagatccacatggacgagaccggcctgactattctcaggattcttagccagcgaagcaacgatgaagtcgctagggagtttgtgaagctgaaaagcgagtcccgctccacggaagaggggtcctag

SEQ ID NO: 309168 - DNA, 4869 bp, Artificial Sequence
  derived and/or modified sequence
atgtccctgctgtgcgtccgcgtgaagagagctaaatttcagggtagccccgataagtttaacacttatgtcaccttgaaagtgcagaacgtaaagagtactaccgtggcggtgcggggagatcagccaagctgggagcaagactttatgtttgagatctctcgcttagacttgggcctgtccgtggaagtgtggaacaaaggcctgatctgggacaccatggttggcactgtttggatcgctctgaagaccatccgtcaatctgatgaagaggggccaggggagtggagcaccctcgaggcggaaactctcatgaaagatgatgaaatctgtggcacaagaaatcctactccacataaaattcttctggataccagattcgaactccccttcgatatcccggaggaagaggccagatattggacatacaagtgggaacagattaacgctctaggcgctgacaatgaatactcctcccaagaggagagccagcgtaagccattaccaaccgctgcggctcaatgctgccactggacatatttaggatggggcgaacagcagacttttgaagacccagactcagcagtggatgatcgggatagcgactatcgcagcgagacctccaatagctttccacccccttatcacaccgcaagccagcctaacgccagcgtgcatcaattcccggttccagtaaggtctccccagcagcttttattacaaggctcatctcgggactcatgtaatgactcgatgcagagttacgacctggactatcccgagaggagagctatctcaccaacttcctcctctcgttatggctcgtcatgtaacgtttctcaaggctcctcccagttgtctgagctcgaccaataccacgaacaggacgacgaccatcgagagaccgacagcattcatagctgccactcctcccatagcttgtcccgggatggccaggcaggattcggcgaacaggaaaagcctcttgaggtgaccggccaggcggagaaagaggcagcctgtgaacctaaggaaatgaaggaggatgctacaacccatccacccccagacttagtgcttcaaaaagaccacttcctcggccctcaggaaagctttcctgaggaaaacgcttcatcccctttcactcaagcacgggctcattggattagagcagtaacaaaagtcagactccagttgcaggaaataccagacgacggggacccttctctaccacaatggcttcctgaagggcctgccggaggcctgtacggaatcgatagtatgcctgacctccgcaggaaaaaacccctgcctctggttagcgatttgagcttagtccagtcgagaaaggccggaattactagtgccatggccacccggacttccctcaaggacgaggagctgaaaagccacgtatataaaaagacattgcaggctttgatttaccctattagctgcactactcctcacaacttcgaggtatggacagctacgacccctacatattgctatgagtgtgaagggttgctctggggaatcgccagacaggggatgcgctgctcagagtgcggtgtaaagtgccacgagaagtgtcaggatttgcttaacgccgactgtctgcagagggccgcagaaaaaagctgcaagcacggcgctgaagaccgaacccagaacattatcatggcaatgaaagaccggatgaagattcgggagcgaaacaagccagaaatcttcgaggtgattcgcgacgtatttaccgtgaacaaggctgctcatgttcaacaaatgaaaaccgtgaaacagagcgtgttggatggcacctctaagtggagtgccaaaattaccattacagtggtctgcgctcagggactccaagctaaggataagaccgggtcatctgacccctacgtaacagtgcaggtcagcaaaaccaaaaaacgaacaaagactatttttgggaacttgaatcctgtgtgggaggaaaaattccactttgaatgtcataactccagcgatcgaattaaagtaagggtctgggacgaagacgatgacatcaaatcacgcgtcaagcagcggctgaaaagggaatccgacgacttcctcggccaaacaatcattgaggtgcgaacactgtctggtgaaatggacgtttggtacaatctggaaaagagaaccgataagagtgcagttagcggggcaatccgtctgcagatatcagtagaaataaaaggagaggagaaggtcgcaccttatcacgtccagtatacatgcctgcacgagaacctattccactatctgactgatatacagggatctggtggtgtgcgcattccagaggctagaggggacgatgcttggaaagtgtacttcgatgagaccgcccaagagatcgtggacgaattcgcgatgagatacggaattgagtctatctaccaagccatgacccattttgcatgcttgagttccaagtacatgtgccccggtgtccctgccgtcatgagtaccttgctggcaaacatcaacgcttattatgctcatactactgctagcacaaatgtcagtgcctccgatcgcttcgccgcatcaaattttggaaaagaacggtttgtgaaactactggatcagctgcataacagcctgcggattgacctctccacttacaggaataattttccagcaggctcccccgagaggcttcaggaccttaaatcaactgtggatctactgaccagtatcaccttcttccgaatgaaggttcaggaactccagtctccgcctcgggcttctcaggttgtaaaggactgtgtcaaggcgtgccttaatagcacctatgagtatatttttaacaattgccacgacttgtactctcgccagtatcagctcaagcaggagctgcctccggaagaacagggcccaagtatccgcaatctcgacttttggcccaagttgattaccctgatcgtgagcataatagaagaagataagaattcttacaccccggttcttaaccaatttcctcaggagctcaacgttggcaaggtatccgccgaggtcatgtggcatctatttgcacaggacatgaaatacgctctcgaggaacatgagaaagaccatctctgcaagagtgccgactacatgaacttgcattttaaagtgaaatggctccataatgaatacgtgcgcgatctgcccgtgcttcagggacaggtgccggagtacccagcctggttcgagcaattcgtgctacagtggcttgacgagaatgaggacgtaagtctggagttcttgaggggcgctttggaacgggataaaaaggacggctttcaacagacgtcggagcacgccttattcagctgctctgtcgttgatgtttttacccaacttaaccagtctttcgaaatcatacgcaaattggaatgccctgacccctccattcttgcacattatatgcgtagattcgctaaaactatcggaaaagtcctaatgcagtatgcagatattttatccaaggactttccagcctactgtaccaaggaaaaactcccttgcattttgatgaataatgttcagcagctgcgcgttcagcttgaaaagatgtttgaggctatgggcggtaaggaattggacttagaggccgcagattcattaaaagaactgcaggttaaactaaataccgtgttagatgagctctcaatggttttcggcaactcttttcaggtgcgaatcgatgaatgcgtgcgccagatggctgacattctcggccaggttcggggtactgggaacgcttcaccggatgctcgggctagcgctgcacaggacgctgactcggtgttacggcctctcatggactttctggacggcaaccttacactattcgcgactgtttgcgaaaagaccgtcttgaaaagggtattaaaggagctgtggagggtcgtcatgaacacaatggagagaatgattgtcctgccacccctcaccgatcagactggcacgcagctcatctttacagcagccaaggaactgagtcatctgtctaagttaaaggatcacatggtaagagaggagacccgtaacctcacccctaagcagtgtgcagtcctggacctggctctggataccatcaagcaatatttccatgccggagggaacgggctcaagaaaacctttttggagaagagcccagaccttcaaagcttgaggtatgccctctcactctatacccaaaccacagatacgctgatcaagacctttgtgagatctcagacgacacaggttcacgacggaaaaggcattcggttcacagctaacgaggatatcaggcccgagaaaggttctggcgtcgacgatcccgtgggcgaagtgtccattcaggtggacctgtttacccaccctgggacaggggaacacaaggtcaccgttaaggtggtggctgcaaacgacttgaaatggcaaaccgctggtatgttccggcctttcgtggaggtgacgatggtgggacctcaccagtccgacaagaagaggaagtttacaacaaaatctaagtccaacaattgggcgcctaagtacaacgaaactttccactttctcttaggaaatgaggaaggacctgagtcttatgaactgcaaatctgcgttaaggattactgtttcgctcgcgaggaccgagtgcttggtcttgcagtgatgccactgagggacgtgactgccaaaggctcctgcgcgtgttggtgtccattgggcaggaagattcacatggatgagacagggttgacaattcttaggatcctctctcagcgctccaacgatgaagttgccagggagttcgtcaagctaaaatcagagtccaggagtaccgaagagggatcttag

SEQ ID NO: 309169 - DNA, 5034 bp, Artificial Sequence
  derived and/or modified sequence
cagacggtgagatttggggcgggtccgaggcagcggcgggacgctacctgcgaccgggaccatgaggagctgccagacccgtggggccggtaacgagagcagtcgcggcacctgctgagaggaaagagggagcggtccggcgcggctggggcgcggcagaggcttgcccgatcctcggccatgtcactgctctgcgtgcgcgttaaaagggccaaattccagggttcaccagataaatttaacacatatgtgaccctgaaagtacagaatgtgaagagcacaactgtagcagttcgtggtgatcagccttcctgggaacaggatttcatgtttgagattagtcgcctggacctgggtctaagtgtggaggtatggaacaaaggactgatctgggacaccatggtggggactgtgtggattgcgctgaagactattcgtcagtcggatgaggaagggcctggggaatggtccacattagaggcagagacgttaatgaaagacgatgagatctgtggaactagaaacccaactcctcataaaattttgcttgatacaagatttgagttgccttttgatatcccagaggaggaagccagatattggacctacaaatgggagcaaatcaatgccttgggagctgacaatgagtattctagtcaagaagaaagccagaggaagccattgcccactgctgccgcccagtgttcttttgaagaccctgatagtgccgtcgatgaccgagatagtgactatcgcagtgagaccagcaacagcttcccacctccttaccatacagcttcccagcccaacgcttctgtgcaccagttccctgtgccggtgcgatcgccacagcagctgctacttcaaggcagttcccgggactcttgtaatgactctatgcaaagttatgaccttgattatccagagcggcgggctatcagccccaccagcagcagtaggtatggctcctcctgtaatgtgagtcaaggaagctctcagctaagtgaactagaccagtatcacgaacaagatgacgaccatcgggagacggactcgattcattcttgccacagctctcacagcctgtccagagatggccaagcaggttttggagaacaagagaaacccttggaggtgacaggtcaagcagagaaggaggcagcatgtgaacccaaggagatgaaagaagatgccacaacccaccctcccccagatctggtgctgcaaaaagaccacttcctaggtccccaggagagttttcctgaggagaatgcatcttcaccatttacccaagccagagcacattggatccgagcagttaccaaggttcgactccagctgcaggagattccagatgatggtgacccctctctgcctcagtggctcccggaagggccagccggagggctctatggcattgacagcatgccagatttacgcagaaagaagccactgccacttgtcagtgatctgtcactggtccagtctcggaaggcaggaatcacttctgcaatggctacacgcacttctcttaaggacgaagagctgaaatcccacgtgtataagaaaaccctgcaggccttaatctaccccatttcgtgcaccactcctcataactttgaggtctggacggccactaccccaacctactgctatgagtgtgaaggcctgctctggggcattgcccggcagggcatgcgctgcagcgaatgtggagtcaagtgccatgagaagtgccaggatctgctcaatgctgactgcctgcagcgggctgcagaaaagagctgtaaacatggagctgaggaccggacccagaacattatcatggccatgaaggaccgcatgaagatccgagagcgaaataagccagagatctttgaagttatccgggacgtcttcacagtgaacaaagctgcccatgtgcagcagatgaaaacagtgaagcagagtgtactggatggcacctccaaatggtcagccaagatcaccattactgtggtgtgtgcccagggcctacaagccaaggacaaaacaggatccagtgacccttacgtgactgtgcaagtcagcaaaactaagaagcgtaccaagaccatttttggaaacttgaatcctgtttgggaggagaagttccattttgagtgccacaactcctctgaccgcattaaggtgcgtgtatgggatgaggatgatgacatcaagtcaagagtaaagcaacgcctaaagcgagagtctgatgatttccttggccaaaccatcattgaggttcggaccctaagtggcgagatggacgtctggtacaacttggagaagaggacagacaaatcagccgtctcaggggctatccgactacaaatcagtgtggagatcaagggggaggagaaagtagccccataccacgtgcagtatacatgtctccatgagaatcttttccattacctcacagacattcagggcagtggaggagtccgcatccctgaagctcgaggagacgatgcctggaaggtgtactttgatgagacagcccaagaaattgtggatgaatttgccatgcgttatggcattgagtccatatatcaggccatgacgcactttgcatgtttatcatccaagtacatgtgtcctggtgtgccagcagtgatgagcaccttactggccaacatcaacgcctactatgcccacacaactgcctctaccaatgtctctgcatctgatcgctttgcagcctccaactttgggaaagagagatttgtaaaactgctggaccagctacacaactcactgaggatcgacctctctacatacaggaataatttccctgctgggagtcctgaacggcttcaggacttaaaatccacagtggatttgctgaccagcattactttcttcagaatgaaggtacaagaactgcaaagccctccaagagccagccaggtggtaaaggattgtgtgaaggcctgtttgaactccacatatgaatatatcttcaacaactgccacgacttatacagccgccagtaccagctgaagcaggagctacctccagaggaacaagggcccagcattcggaacctggatttctggcccaagctcatcacactcatcgtgtcaatcatagaggaagataagaattcctacacacctgttctgaaccagtttcctcaggagttgaatgtgggaaaagtcagcgcagaagtgatgtggcatttgtttgcccaagacatgaaatatgcattggaggagcatgagaaagaccacctgtgtaaaagtgctgactacatgaacctgcacttcaaggtgaagtggctccacaatgaatacgtgcgggatctgcctgtcctccaggggcaggtgcctgagtacccagcgtggtttgagcagttcgtgctacaatggctggatgagaatgaggatgtatccctggaattcctgcgtggggccctggaacgagataagaaggatggattccagcagacatcagagcatgcactcttttcctgctctgtggtggatgtcttcacacaactcaatcagagctttgagatcatccggaagctggaatgcccagaccccagcatccttgcccactacatgaggaggtttgctaagaccatcgggaaggtgctgatgcagtatgcagacatcttgtcaaaggacttcccagcctattgcacaaaggagaaactgccctgcatcctgatgaacaacgtgcagcaactgagggtccagctggagaaaatgtttgaggccatgggaggcaaggagctggaccttgaagctgcagacagtctgaaggagctgcaggtgaaactgaatacggttctggatgagctcagcatggtgtttggaaacagtttccaggtacggattgatgagtgtgttcgacaaatggccgacatcctgggccaggttcggggcacagggaatgcatctccagacgccagggcctcagcggctcaggatgcagatagcgtactccggcctctcatggacttcctggatggcaacctcaccctctttgccactgtgtgtgagaagacggttctgaagcgtgtactgaaggagctctggcgcgtggtgatgaacacaatggagaggatgattgttctgcccccactcactgaccagacgggcacccagctgatcttcactgctgccaaggagctgagccatctttccaaactcaaggatcacatggtacgagaggaaacacggaatctcactccaaagcagtgtgcagtccttgacctcgccctggacaccatcaagcaatacttccatgcaggaggcaatgggctgaagaaaaccttcctggagaagagcccagatctgcagtctctacgctatgccctgtctctgtacacacagactactgacactctcatcaagacctttgtgcgctcgcagaccacccaagtgcatgatgggaaaggtattagatttactgctaatgaggacattcgtccggaaaaggggtctggtgtggacgatcctgtgggagaagtctctattcaggtggacttgtttacacaccctggtactggggagcacaaggtcacagtgaaagtggtggctgccaatgacctcaagtggcagacagcgggtatgttccggcctttcgtggaggtgactatggttggcccacaccaaagtgataagaagaggaagttcacaaccaaatccaaaagcaacaactgggcccccaagtacaatgagacattccacttcctcctgggaaatgaggaggggcccgagtcctatgagttgcagatatgcgtgaaggattactgctttgcccgggaagatcgcgtgctagggctggctgtgatgcctctgagggatgtcacagccaagggcagctgtgcctgctggtgccccttgggccggaagatccatatggatgagacaggcctgaccattctccggattttatctcagaggagcaatgacgaggtggcccgagaatttgtgaaactcaaatcagagtctcgttccacggaggaggggagctgaacaccttcgactcctgtgcca

SEQ ID NO: 309170 - DNA, 5293 bp, Artificial Sequence
  derived and/or modified sequence
gggagggagtcccggcagctcctacctcccagcgatggcgtcgctgtgccgcgcccagtccccagcctgccggccggtactcaccgctacccggagttcgctcagacggtgagatttggggcgggtccgaggcagcggcgggacgctacctgcgaccgggaccatgaggagctgccagacccgtggggccggtaacgagagcagtcgcggcacctgctgagaggaaagagggagcggtccggcgcggctggggcgcggcagaggcttgcccgatcctcggccatgtcactgctctgcgtgcgcgttaaaagggccaaattccagggttcaccagataaatttaacacatatgtgaccctgaaagtacagaatgtgaagagcacaactgtagcagttcgtggtgatcagccttcctgggaacaggatttcatgtttgagattagtcgcctggacctgggtctaagtgtggaggtatggaacaaaggactgatctgggacaccatggtggggactgtgtggattgcgctgaagactattcgtcagtcggatgaggaagggcctggggaatggtccacattagaggcagagacgttaatgaaagacgatgagatctgtggaactagaaacccaactcctcataaaattttgcttgatacaagatttgagttgccttttgatatcccagaggaggaagccagatattggacctacaaatgggagcaaatcaatgccttgggagctgacaatgagtattctagtcaagaagaaagccagaggaagccattgcccactgctgccgcccagtgttgtcactggacctatttgggctggggagaacaacagacttttgaagaccctgatagtgccgtcgatgaccgagatagtgactatcgcagtgagaccagcaacagcttcccacctccttaccatacagcttcccagcccaacgcttctgtgcaccagttccctgtgccggtgcgatcgccacagcagctgctacttcaaggcagttcccgggactcttgtaatgactctatgcaaagttatgaccttgattatccagagcggcgggctatcagccccaccagcagcagtaggtatggctcctcctgtaatgtgagtcaaggaagctctcagctaagtgaactagaccagtatcacgaacaagatgacgaccatcgggagacggactcgattcattcttgccacagctctcacagcctgtccagagatggccaagcaggttttggagaacaagagaaacccttggaggtgacaggtcaagcagagaaggaggcagcatgtgaacccaaggagatgaaagaagatgccacaacccaccctcccccagatctggtgctgcaaaaagaccacttcctaggtccccaggagagttttcctgaggagaatgcatcttcaccatttacccaagccagagcacattggatccgagcagttaccaaggttcgactccagctgcaggagattccagatgatggtgacccctctctgcctcagtggctcccggaagggccagccggagggctctatggcattgacagcatgccagatttacgcagaaagaagccactgccacttgtcagtgatctgtcactggtccagtctcggaaggcaggaatcacttctgcaatggctacacgcacttctcttaaggacgaagagctgaaatcccacgtgtataagaaaaccctgcaggccttaatctaccccatttcgtgcaccactcctcataactttgaggtctggacggccactaccccaacctactgctatgagtgtgaaggcctgctctggggcattgcccggcagggcatgcgctgcagcgaatgtggagtcaagtgccatgagaagtgccaggatctgctcaatgctgactgcctgcagcgggctgcagaaaagagctgtaaacatggagctgaggaccggacccagaacattatcatggccatgaaggaccgcatgaagatccgagagcgaaataagccagagatctttgaagttatccgggacgtcttcacagtgaacaaagctgcccatgtgcagcagatgaaaacagtgaagcagagtgtactggatggcacctccaaatggtcagccaagatcaccattactgtggtgtgtgcccagggcctacaagccaaggacaaaacaggatccagtgacccttacgtgactgtgcaagtcagcaaaactaagaagcgtaccaagaccatttttggaaacttgaatcctgtttgggaggagaagttccattttgagtgccacaactcctctgaccgcattaaggtgcgtgtatgggatgaggatgatgacatcaagtcaagagtaaagcaacgcctaaagcgagagtctgatgatttccttggccaaaccatcattgaggttcggaccctaagtggcgagatggacgtctggtacaacttggagaagaggacagacaaatcagccgtctcaggggctatccgactacaaatcagtgtggagatcaagggggaggagaaagtagccccataccacgtgcagtatacatgtctccatgagaatcttttccattacctcacagacattcagggcagtggaggagtccgcatccctgaagctcgaggagacgatgcctggaaggtgtactttgatgagacagcccaagaaattgtggatgaatttgccatgcgttatggcattgagtccatatatcaggccatgacgcactttgcatgtttatcatccaagtacatgtgtcctggtgtgccagcagtgatgagcaccttactggccaacatcaacgcctactatgcccacacaactgcctctaccaatgtctctgcatctgatcgctttgcagcctccaactttgggaaagagagatttgtaaaactgctggaccagctacacaactcactgaggatcgacctctctacatacaggaataatttccctgctgggagtcctgaacggcttcaggacttaaaatccacagtggatttgctgaccagcattactttcttcagaatgaaggtacaagaactgcaaagccctccaagagccagccaggtggtaaaggattgtgtgaaggcctgtttgaactccacatatgaatatatcttcaacaactgccacgacttatacagccgccagtaccagctgaagcaggagctacctccagaggaacaagggcccagcattcggaacctggatttctggcccaagctcatcacactcatcgtgtcaatcatagaggaagataagaattcctacacacctgttctgaaccagtttcctcaggagttgaatgtgggaaaagtcagcgcagaagtgatgtggcatttgtttgcccaagacatgaaatatgcattggaggagcatgagaaagaccacctgtgtaaaagtgctgactacatgaacctgcacttcaaggtgaagtggctccacaatgaatacgtgcgggatctgcctgtcctccaggggcaggtgcctgagtacccagcgtggtttgagcagttcgtgctacaatggctggatgagaatgaggatgtatccctggaattcctgcgtggggccctggaacgagataagaaggatggattccagcagacatcagagcatgcactcttttcctgctctgtggtggatgtcttcacacaactcaatcagagctttgagatcatccggaagctggaatgcccagaccccagcatccttgcccactacatgaggaggtttgctaagaccatcgggaaggtgctgatgcagtatgcagacatcttgtcaaaggacttcccagcctattgcacaaaggagaaactgccctgcatcctgatgaacaacgtgcagcaactgagggtccagctggagaaaatgtttgaggccatgggaggcaaggagctggaccttgaagctgcagacagtctgaaggagctgcaggtgaaactgaatacggttctggatgagctcagcatggtgtttggaaacagtttccaggtacggattgatgagtgtgttcgacaaatggccgacatcctgggccaggttcggggcacagggaatgcatctccagacgccagggcctcagcggctcaggatgcagatagcgtactccggcctctcatggacttcctggatggcaacctcaccctctttgccactgtgtgtgagaagacggttctgaagcgtgtactgaaggagctctggcgcgtggtgatgaacacaatggagaggatgattgttctgcccccactcactgaccagacgggcacccagctgatcttcactgctgccaaggagctgagccatctttccaaactcaaggatcacatggtacgagaggaaacacggaatctcactccaaagcagtgtgcagtccttgacctcgccctggacaccatcaagcaatacttccatgcaggaggcaatgggctgaagaaaaccttcctggagaagagcccagatctgcagtctctacgctatgccctgtctctgtacacacagactactgacactctcatcaagacctttgtgcgctcgcagaccacccaagtgcatgatgggaaaggtattagatttactgctaatgaggacattcgtccggaaaaggggtctggtgtggacgatcctgtgggagaagtctctattcaggtggacttgtttacacaccctggtactggggagcacaaggtcacagtgaaagtggtggctgccaatgacctcaagtggcagacagcgggtatgttccggcctttcgtggaggtgactatggttggcccacaccaaagtgataagaagaggaagttcacaaccaaatccaaaagcaacaactgggcccccaagtacaatgagacattccacttcctcctgggaaatgaggaggggcccgagtcctatgagttgcagatatgcgtgaaggattactgctttgcccgggaagatcgcgtgctagggctggctgtgatgcctctgagggatgtcacagccaagggcagctgtgcctgctggtgccccttgggccggaagatccatatggatgagacaggcctgaccattctccggattttatctcagaggagcaatgacgaggtggcccgagaatttgtgaaactcaaatcagagtctcgttccacggaggaggggagctgaacaccttcgactcctgtgccaatcaggcagcagcaatttcacaaatcagggccagtgggagttagctgtgtaaccggcttagggtctttgcagtcaagaggctgaccccttcagttaaagatatttaaggaaaaatttgggg

SEQ ID NO: 309171 - DNA, 3594 bp, Artificial Sequence
  derived and/or modified sequence
atgcccgacctgagaagaaagaagcccctgcccctggtgagcgacctggtgaagagcctggtgcagagcagaaaggccggcatcaccagcgccatggccaccagaaccagcctgaaggacgaggagctgaagagccacgtgtacaagaagaccctgcaggccctgatctaccccatcagctgcaccaccccccacaacttcgaggtgtggaccgccaccacccccacctactgctacgagtgcgagggcctgctgtggggcatcgccagacagggcatgagatgcagcgagtgcggcgtgaagtgccacgagaagtgccaggacctgctgaacgccgactgcctgcagagagccgccgagaagagctgcaagcacggcgccgaggacagaacccagaacatcatcatggccatgaaggacagaatgaagatcagagagagaaacaagcccgagatcttcgaggtgatcagagacgtgttcaccgtgaacaaggccgcccacgtgcagcagatgaagaccgtgaagcagagcgtgctggacggcaccagcaagtggagcgccaagatcaccatcaccgtggtgtgcgcccagggcctgcaggccaaggacaagaccggcagcagcgacccctacgtgaccgtgcaggtgagcaagaccaagaagagaaccaagaccatcttcggcaacctgaaccccgtgtgggaggagaagttccacttcgagtgccacaacagcagcgacagaatcaaggtgagagtgtgggacgaggacgacgacatcaagagcagagtgaagcagagactgaagagagagagcgacgacttcctgggccagaccatcatcgaggtgagaaccctgagcggcgagatggacgtgtggtacaacctggagaagagaaccgacaagagcgccgtgagcggcgccatcagactgcagatcagcgtggagatcaagggcgaggagaaggtggccccctaccacgtgcagtacacctgcctgcacgagaacctgttccactacctgaccgacatccagggcagcggcggcgtgagaatccccgaggccagaggcgacgacgcctggaaggtgtacttcgacgagaccgcccaggagatcgtggacgagttcgccatgagatacggcatcgagagcatctaccaggccatgacccacttcgcctgcctgagcagcaagtacatgtgccccggcgtgcccgccgtgatgagcaccctgctggccaacatcaacgcctactacgcccacaccaccgccagcaccaacgtgagcgccagcgacagattcgccgccagcaacttcggcaaggagagattcgtgaagctgctggaccagctgcacaacagcctgagaatcgacctgagcacctacagaaacaacttccccgccggcagccccgagagactgcaggacctgaagagcaccgtggacctgctgaccagcatcaccttcttcagaatgaaggtgcaggagctgcagagcccccccagagccagccaggtggtgaaggactgcgtgaaggcctgcctgaacagcacctacgagtacatcttcaacaactgccacgacctgtacagcagacagtaccagctgaagcaggagctgccccccgaggagcagggccccagcatcagaaacctggacttctggcccaagctgatcaccctgatcgtgagcatcatcgaggaggacaagaacagctacacccccgtgctgaaccagttcccccaggagctgaacgtgggcaaggtgagcgccgaggtgatgtggcacctgttcgcccaggacatgaagtacgccctggaggagcacgagaaggaccacctgtgcaagagcgccgactacatgaacctgcacttcaaggtgaagtggctgcacaacgagtacgtgagagacctgcccgtgctgcagggccaggtgcccgagtaccccgcctggttcgagcagttcgtgctgcagtggctggacgagaacgaggacgtgagcctggagttcctgagaggcgccctggagagagacaagaaggacggcttccagcagaccagcgagcacgccctgttcagctgcagcgtggtggacgtgttcacccagctgaaccagagcttcgagatcatcagaaagctggagtgccccgaccccagcatcctggcccactacatgagaagattcgccaagaccatcggcaaggtgctgatgcagtacgccgacatcctgagcaaggacttccccgcctactgcaccaaggagaagctgccctgcatcctgatgaacaacgtgcagcagctgagagtgcagctggagaagatgttcgaggccatgggcggcaaggagctggacctggaggccgccgacagcctgaaggagctgcaggtgaagctgaacaccgtgctggacgagctgagcatggtgttcggcaacagcttccaggtgagaatcgacgagtgcgtgagacagatggccgacatcctgggccaggtgagaggcaccggcaacgccagccccgacgccagagccagcgccgcccaggacgccgacagcgtgctgagacccctgatggacttcctggacggcaacctgaccctgttcgccaccgtgtgcgagaagaccgtgctgaagagagtgctgaaggagctgtggagagtggtgatgaacaccatggagagaatgatcgtgctgccccccctgaccgaccagaccggcacccagctgatcttcaccgccgccaaggagctgagccacctgagcaagctgaaggaccacatggtgagagaggagaccagaaacctgacccccaagcagtgcgccgtgctggacctggccctggacaccatcaagcagtacttccacgccggcggcaacggcctgaagaagaccttcctggagaagagccccgacctgcagagcctgagatacgccctgagcctgtacacccagaccaccgacaccctgatcaagaccttcgtgagaagccagaccacccaggtgcacgacggcaagggcatcagattcaccgccaacgaggacatcagacccgagaagggcagcggcgtggacgaccccgtgggcgaggtgagcatccaggtggacctgttcacccaccccggcaccggcgagcacaaggtgaccgtgaaggtggtggccgccaacgacctgaagtggcagaccgccggcatgttcagacccttcgtggaggtgaccatggtgggcccccaccagagcgacaagaagagaaagttcaccaccaagagcaagagcaacaactgggcccccaagtacaacgagaccttccacttcctgctgggcaacgaggagggccccgagagctacgagctgcagatctgcgtgaaggactactgcttcgccagagaggacagagtgctgggcctggccgtgatgcccctgagagacgtgaccgccaagggcagctgcgcctgctggtgccccctgggcagaaagatccacatggacgagaccggcctgaccatcctgagaatcctgagccagagaagcaacgacgaggtggccagagagttcgtgaagctgaagagcgagagcagaagcaccgaggagggcagctag

SEQ ID NO: 309172 - DNA, 3594 bp, Artificial Sequence
  derived and/or modified sequence
atgcctgatcttagaagaaagaagccgctgcccttggtgtctgatcttgtgaagtctctggtacagtcacgaaaggcaggcatcacatcagccatggccacccggaccagtctgaaagacgaagaattgaagtctcacgtctataagaagacactgcaggctctcatctaccccataagctgcactaccccgcacaactttgaagtgtggactgccacaacccccacttactgctacgagtgtgaggggctgctttggggtattgctcgccagggtatgagatgcagcgagtgcggcgtcaagtgccatgagaaatgccaggatctacttaacgccgattgcctgcagcgggcggctgaaaagtcttgcaagcacggtgccgaagataggacacagaacatcattatggccatgaaggacaggatgaaaatcagggagcggaacaaaccggagatattcgaagtgatcagagatgtgttcactgtgaataaggctgctcatgtgcagcagatgaagacggtgaagcaatctgtattggatggcacctccaagtggagcgcaaaaattaccatcacggtcgtctgtgcccagggcctgcaggctaaggataaaactggaagctctgatccatatgtgacagttcaagtatccaagacaaagaaaagaacaaagaccatattcggcaacctcaatcccgtttgggaagaaaagttccactttgaatgtcataattcctcagatagaatcaaagtgagagtgtgggacgaagacgacgacatcaagagtagggtgaagcagagacttaaacgcgaatcggacgactttttgggtcagaccatcattgaagtgcgtactctttctggggaaatggacgtgtggtataacctcgagaaaaggactgacaaatccgctgtgtctggagcaatccgtcttcaaatttcagttgagattaagggagaggaaaaggtcgcaccataccacgtgcaatatacctgtctgcatgagaatttgtttcattatttgaccgacattcaggggtctgggggcgtccgcattccagaggccagaggtgacgatgcctggaaggtttatttcgatgagacagcacaggaaatcgtggacgaatttgccatgaggtacggaatcgaatctatttaccaggcgatgacacattttgcatgtttaagttctaaatatatgtgccccggagtcccagctgtgatgtctacactgcttgctaacattaatgcctactatgctcatacgaccgcaagcactaatgtgtctgccagcgacaggtttgctgcctccaactttggaaaagaacgattcgtaaagctattagaccagttgcacaacagtctaaggatcgacctttctacatacagaaataactttcccgccgggagtcctgaacggctacaggatctgaagtccacagtggatctgctgacgtccattactttcttccggatgaaagtacaggaattgcaatctcctccccgggcaagtcaggtggtgaaggattgtgtgaaagcctgcctcaatagcacttacgagtacatcttcaataactgccatgacctgtattccaggcagtaccaactgaagcaggaattgccccctgaagagcagggtcccagtatccgtaacctagacttctggcccaaactcataaccctgatagtgtcaattattgaggaggacaaaaattcctacacccctgtgctgaaccagtttccccaagaattgaatgtggggaaagtgtcggccgaagtgatgtggcacctgttcgcacaggacatgaaatatgccttggaggaacacgaaaaagatcacttgtgtaagtcggctgactatatgaatctccattttaaggtgaagtggctccacaatgagtacgtgagggacttacccgtgcttcagggtcaggtccctgagtatcctgcttggtttgagcagttcgtcctgcagtggctcgatgagaatgaggatgtcagtctggagttcctcaggggggccttggagcgggataaaaaagacggctttcagcaaaccagcgaacatgctctgttcagttgttcggtagtggacgtgtttactcagttgaatcagtcgtttgagatcatccggaaactagagtgtcccgaccctagtatcctcgcccactacatgcggcggttcgcaaaaacaattggaaaagtgctgatgcagtatgctgacatattgagcaaagatttcccagcatactgcacaaaagaaaagttaccatgtattcttatgaacaacgtacagcaactgagggtgcagcttgagaagatgttcgaggccatggggggaaaggagctggatctggaggctgctgacagtctcaaagagctgcaggttaagttgaataccgttttagacgaactgtcaatggtgttcgggaacagttttcaagtgaggatcgacgaatgtgtgaggcagatggccgacattctggggcaggttcgaggcaccggtaacgccagtccagatgcacgcgcttccgcagctcaggatgcagactccgtgctccggccccttatggactttctagatggcaatctgaccctctttgccacggtgtgcgagaagaccgtcctgaagagggttcttaaagagttatggcgcgtggtgatgaacacaatggagcgtatgatcgtcctccctcccctgacggatcaaacaggcactcagctgatcttcacagccgcgaaagaactcagccacttgtctaaactgaaggatcatatggtgcgtgaagagacacgaaatttaactcctaagcagtgcgcggtactggatctcgccttagacacgattaagcagtacttccacgctggcggcaacggtctcaagaagacgtttctggagaagtccccagacctgcagagtctccgctacgctttgagtctgtacacacagacaacggatacattaatcaaaaccttcgtacggagccaaactacacaggtccacgacggaaagggaatccgattcacggctaatgaggacattcgaccagagaaaggatcaggagtggacgatcctgtcggagaagtcagtatccaggtggacctatttacccaccctggaacgggggaacacaaggtcaccgttaaagtcgtagctgccaatgacctgaaatggcagactgctgggatgttcagacccttcgtcgaggtgaccatggtcgggccccaccaatctgataaaaagaggaaattcactaccaaaagcaagtctaataactgggcgcccaaatacaatgaaacattccactttcttctaggcaatgaggagggccccgaaagttacgagctccagatatgtgttaaagattactgcttcgcacgcgaagatcgggtgctgggattggcagtcatgccactacgagatgtgacagctaaaggttcatgtgcctgctggtgcccactgggaagaaaaatacatatggacgaaactggattgaccatactgcggatcttgtctcagagatctaatgatgaggtcgcacgtgagtttgtgaagctgaaatcagagtcgcgatcaacagaggagggatcatag

SEQ ID NO: 309173 - DNA, 3594 bp, Artificial Sequence
  derived and/or modified sequence
atgccagacctgcggaggaagaagcccctgcccctggtgtctgacctggtgaagagcctggtgcagagcaggaaggccggcatcaccagcgccatggccaccaggaccagcctgaaggatgaggagctgaagagccacgtgtacaagaagaccctgcaggccctgatctaccccatcagctgcaccaccccccacaactttgaggtgtggacagccaccacccccacctactgctatgaatgtgagggcctgctgtggggcatcgcccggcagggcatgcgctgcagtgaatgtggggtgaagtgccacgagaagtgccaggacctgctgaatgctgactgcctgcagagagctgctgagaagagctgcaagcatggagctgaggacaggacccagaacatcatcatggccatgaaggacaggatgaagatccgggagaggaacaagccagagatctttgaagtcatcagagatgtgttcaccgtgaacaaggccgcccacgtgcagcagatgaagacagtgaagcagagcgtgctggatggcaccagcaagtggagcgccaagatcaccatcaccgtggtgtgtgcccagggcctgcaggccaaggacaagacaggcagcagtgacccctacgtgacagtgcaggtgtccaagaccaagaagaggaccaagaccatctttggaaacctgaaccctgtgtgggaggagaagttccactttgagtgccacaacagcagtgaccgcatcaaggtgcgggtgtgggatgaagatgatgacatcaagagccgggtgaagcagaggctgaagcgggagagtgatgacttcctgggccagaccatcatcgaggtgaggaccctgtctggagagatggatgtgtggtacaacctggagaagaggacagacaagtctgctgtgtctggggccatccggctgcagatctctgtggagatcaagggggaggagaaggtggccccctaccacgtgcagtacacctgcctgcatgaaaatctcttccactacctgacagacatccagggcagcggaggagtgcgcatccctgaggcccggggagatgatgcctggaaggtgtactttgatgaaacagcccaggagatcgtggatgaatttgccatgagatatggcatcgagagcatctaccaggccatgacccactttgcctgcctgagcagcaagtacatgtgccctggggtgcctgctgtgatgagcaccctgctggccaacatcaatgcctactatgcccacaccacagccagcaccaacgtgtctgccagtgacagatttgctgccagcaactttgggaaggagagatttgtgaagctgctggaccagctgcacaacagcctgagaattgacctgagcacctacagaaacaacttccctgctggcagccctgagcggctgcaggacctgaagagcacagtggacctgctgaccagcatcaccttcttcaggatgaaggtgcaggagctgcagagccccccccgggccagccaggtggtgaaggactgtgtgaaggcctgcctgaacagcacctatgagtacatcttcaacaactgccacgacctgtacagccggcagtaccagctgaagcaggagctgcccccagaggagcagggccccagcatccggaacctggacttctggcccaagctgatcaccctcatcgtgtccatcatcgaggaggacaagaacagctacacccctgtgctgaaccagttcccccaggagctgaatgtgggcaaggtgtctgctgaggtgatgtggcacctgtttgcccaggacatgaagtatgccctggaggagcacgagaaggaccacctgtgcaagtctgctgactacatgaacctgcacttcaaggtgaagtggctgcacaatgaatatgtgcgggacctgcctgtgctgcagggccaggtgcctgagtacccagcctggtttgagcagtttgtgctgcagtggctggatgaaaatgaagatgtgtccctggagttcctgcggggggccctggagcgggacaagaaggatggcttccagcagaccagcgagcacgccctcttcagctgcagcgtggtggatgtgttcacccagctgaaccagagctttgagatcatcaggaagctggagtgcccagaccccagcatcctggcccactacatgagaagatttgccaagaccatcggcaaggtgctgatgcagtatgctgacatcctgagcaaggacttccctgcctactgcaccaaggagaagctgccctgcatcctgatgaacaacgtgcagcagctgcgggtgcagctggagaagatgtttgaggccatgggcggcaaggagctggacctggaggccgctgacagcctgaaggagctgcaggtgaagctgaacacagtgctggatgagctgtccatggtgtttggaaacagcttccaggtgagaattgatgaatgtgtgcggcagatggctgacatcctgggccaggtgcggggcactggaaatgccagcccagatgcccgggccagcgctgcccaggatgctgacagcgtgctgcggcccctgatggacttcctggatggcaacctgaccctgtttgccaccgtgtgtgagaagacagtgctgaagagggtgctgaaggagctgtggagggtggtgatgaacaccatggagaggatgattgtgctgccccccctgacagaccagacaggcacccagctgatcttcaccgctgccaaggagctgagccacctgagcaagctgaaggaccacatggtgcgggaggagaccaggaacctgacccccaagcagtgtgctgtgctggacctggccctggacaccatcaagcagtacttccacgccggcggcaatggcctgaagaagaccttcctggagaagagcccagacctgcagagcctgcgctatgccctgagcctgtacacccagaccacagacaccctcatcaagacctttgtgcgcagccagaccacccaggtgcatgatggcaagggcatccgcttcaccgccaatgaagacatccggcctgagaagggcagcggcgtggatgatcctgtgggggaggtgtccatccaggtggacctcttcacccaccctggcactggagagcacaaggtgacagtgaaggtggtggccgccaatgacctgaagtggcagacagctggcatgttccggccctttgtggaggtgaccatggtgggcccccaccagagcgacaagaagaggaagttcaccaccaagagcaagagcaacaactgggcccccaagtacaatgagaccttccacttcctgctgggcaatgaggagggccctgagagctatgagctgcagatctgtgtgaaggactactgctttgcccgggaggacagagtgctgggcctggccgtgatgcccctgagagatgtgacagccaagggcagctgtgcctgctggtgccccctgggcaggaagatccacatggatgaaacaggcctgaccatcctgcgcatcctgagccagaggagcaatgatgaggtggcccgggagtttgtgaagctgaagtctgagagccgcagcacagaggagggcagctag

SEQ ID NO: 309174 - DNA, 3594 bp, Artificial Sequence
  derived and/or modified sequence
atgcccgacctgcggcggaagaagcccctgcccctggtgagcgacctagtcaagtcattagtgcagtctcggaaggccggcataacgagcgcaatggccactaggacttccttaaaggacgaggagctcaagagccacgtgtataagaaaaccctccaggcgttaatttatcctatctcctgcactacaccacataactttgaggtttggactgccacaacccccacttactgttacgaatgcgaaggtctgctctgggggattgcacgacaaggtatgcgctgctcagaatgtggggtcaaatgccacgagaagtgccaggatctgctaaacgctgactgcctgcagcgggccgctgagaaaagttgtaaacacggggctgaggatcggacccagaatattattatggcaatgaaggataggatgaagattagagaacggaataaacctgaaatcttcgaggtgatcagggatgtgttcaccgtaaataaagcagcccatgtccagcagatgaagaccgttaagcagagcgtcctggatggtacttccaagtggtccgctaagattactataacagtcgtgtgtgctcagggcctgcaggctaaggataaaaccggcagctcagacccatacgttacggtccaggttagtaagacaaagaagcggacaaaaactatttttggaaacctaaatcctgtttgggaggagaaattccatttcgagtgccataatagtagcgaccgaatcaaggttagggtgtgggatgaagacgatgacatcaaatccagagtgaaacagcgcctgaagagagagtcggatgatttcctggggcaaactataatcgaggtacgcaccctttctggtgagatggatgtgtggtacaacctggagaagcgtacagacaagtccgccgttagtggcgctatccgcctgcagatctcagtggaaattaagggagaggaaaaagtcgccccataccatgtgcagtacacttgcctgcacgaaaacctgtttcactatttaactgacatccaggggagtggaggggtacgcataccggaagcaagaggagatgatgcgtggaaagtctattttgatgaaacggcccaggaaattgtggatgaattcgctatgcgctacgggatcgagtctatttaccaagcaatgacacactttgcctgtttgagctccaaatacatgtgccccggagtgccagctgtaatgtcgacactgctggccaacattaatgcgtattacgcccataccaccgctagcaccaatgtctccgcttccgaccggtttgccgcctccaacttcggtaaggagagattcgtaaagctgctagatcaactccataacagtttgcggatcgacctgtctacatacagaaataatttccctgctggcagtcccgaaagattgcaggatctaaaatctacagtcgatctgttgaccagcatcactttctttcgaatgaaggtgcaagaactgcagtccccaccacgcgcgagtcaggtggtgaaagactgtgtgaaagcctgcctcaatagtacctatgagtatatcttcaataactgtcacgacctgtattctagacagtaccagctgaagcaagagctcccaccagaagagcagggtccttccataagaaatttggatttttggcccaaattgatcaccctgatcgtgtcgatcattgaggaagacaagaactcctacacacctgtgctaaatcagtttccacaggagctgaacgtggggaaagtgtccgcagaggtcatgtggcacctttttgcccaggacatgaaatatgctctggaggagcacgaaaaagatcatctgtgcaaaagtgccgattacatgaacttacacttcaaggtaaagtggctacacaacgagtatgtcagggatctgcctgttctgcaaggacaggtacctgaatacccagcttggtttgaacagtttgtactgcaatggctggacgagaatgaggatgtaagtctggagttcctaaggggggcattagaacgcgataaaaaagacggatttcagcaaacctccgagcacgctttgttctcttgctcggttgtagacgtgtttacccaactgaaccagtccttcgaaatcataaggaaacttgagtgccctgacccatctattctggcccactatatgaggcggttcgctaagacaattggcaaggtcctgatgcagtacgcagacatcctgtccaaggacttccctgcttactgtaccaaggaaaaacttccgtgtatactgatgaacaatgtgcagcagctgagggtgcaactggagaagatgttcgaggcaatgggcgggaaggagctggaccttgaagccgctgacagtctaaaggagctccaggtgaagctgaataccgtccttgatgagcttagcatggtctttggcaattctttccaggtgaggatcgatgagtgcgttaggcagatggcggatattttaggccaggttagaggtactgggaacgcctctcctgacgctcgtgcctcggctgctcaagatgccgatagtgtcctacgtccccttatggacttcctcgatggcaacctgacactttttgctacggtgtgcgaaaagaccgttctgaagagggtgctgaaggagctgtggagagtggttatgaatacaatggagcgtatgatcgtgttgccacctcttactgaccagactggcactcagctgatttttacagctgctaaggagctgtcacacctgtcaaagctgaaggatcacatggtccgcgaagaaacgagaaacctgacaccgaaacaatgtgctgtgctagatctcgcgctggataccatcaagcagtactttcacgctgggggcaacggtctgaaaaaaaccttcctggaaaaatccccagatctccagtccctccggtatgccctgtctctctacacccagacaacggatactctaatcaagaccttcgtccgctctcagactacacaagtccatgatggcaagggcattcgctttacggccaatgaagatattaggcctgagaagggttccggggtcgacgaccctgtgggtgaagtgtcaatccaggtcgatctgttcacccaccctggcaccggtgaacataaagtgaccgtcaaagtggtcgctgccaatgacttgaagtggcaaaccgcgggaatgtttcggcccttcgtggaggtgactatggtggggcctcaccagtctgacaaaaagcgaaaattcacaacaaagagcaaatccaataattgggctcccaagtacaacgagacctttcactttctcctcggcaacgaggagggcccagagtcttacgaactgcagatttgtgtcaaagactattgctttgcgcgtgaagacagagtcttgggcttggccgtcatgccgctgcgggatgtcacagccaagggatcctgcgcctgttggtgcccattaggcagaaagatccacatggatgagactggacttacaattctgaggatactaagtcagcgatctaacgatgaggttgcccgcgagttcgtgaaattgaaaagcgagtctaggtctaccgaggaggggtcatag

SEQ ID NO: 309175 - DNA, 3594 bp, Artificial Sequence
  derived and/or modified sequence
atgccggatctccggcgtaagaagcctctaccattggtctccgacctcgtcaaaagtctggtgcaaagccgcaaggccggaataacttctgctatggccacccgaacatccctcaaggacgaagaactgaaatctcacgtctacaagaaaacgttgcaggctttgatctacccaatatcctgcacgactccacataactttgaagtgtggaccgccaccactcccacgtactgctatgagtgcgaagggctgctgtgggggatcgcgagacagggcatgagatgtagcgagtgcggagttaagtgccatgaaaagtgccaggacctgctcaatgctgactgcctccagagggccgctgagaaatcgtgcaagcatggagcagaggataggacccagaatattatcatggcgatgaaggatcgaatgaagatcagagagcggaacaagccagaaattttcgaggtgatccgagatgttttcactgtgaacaaggcagcccatgttcagcagatgaagacagttaagcagtccgtgctggatgggacctcaaaatggtctgctaaaataaccatcacagtggtttgcgcccaaggtctgcaggccaaggacaagactgggagctcagacccctacgtgaccgtccaagtaagcaaaacgaagaagcggactaaaacaatctttggaaacctgaacccagtctgggaggagaagttccacttcgaatgccacaattcctccgataggataaaggttcgcgtgtgggatgaagacgacgacataaagagcagggtcaagcagcggctgaaaagggagtctgatgacttcctgggccagactataatagaagttagaaccctctccggcgagatggacgtctggtataacctggaaaaaagaacagacaaatcagctgtaagtggtgcaatcagattgcagatctctgtggagatcaagggcgaggaaaaggttgcgccatatcacgtgcagtatacttgcctgcatgaaaatctgttccattacctgacagatatacaaggttcagggggtgtgaggatccccgaggccaggggggacgacgcctggaaggtgtactttgacgagacagcccaggaaatcgttgatgagtttgccatgaggtacggaattgaatccatctatcaggctatgacacactttgcatgcctgtcgtcaaaatacatgtgtcccggagtacccgctgtcatgagcacactgcttgcgaatattaatgcctattacgctcacaccaccgcctccactaatgtaagtgcctccgatcggttcgcagctagtaacttcggcaaggaaagatttgtcaagcttctggatcagctgcacaactcactccggattgacctcagcacttataggaacaattttccagcaggaagccccgaaagactgcaagacctcaagtctacagttgacctcttgaccagtatcacattttttcgcatgaaggtgcaagagctgcagtcacctcctcgcgcatcacaggtcgttaaggattgtgtgaaagcgtgtctgaacagtacttacgaatatatcttcaacaattgccacgatctctactcacggcagtatcagttgaaacaagagctccctcccgaggaacagggtccttctatccgaaatctcgacttctggcccaagctcattaccttgattgtgagcattatcgaagaagacaaaaacagctacacccctgtcctcaaccagtttccacaggaactcaacgtcgggaaggtgagcgccgaggtaatgtggcacctctttgctcaggatatgaaatacgcattggaggagcatgagaaggatcacttgtgtaagtccgctgactacatgaacctgcactttaaggtcaaatggcttcataatgagtacgtccgggaccttccagtactgcaaggacaggtgcctgaatacccagcctggtttgaacagttcgtgctacagtggctagacgaaaacgaggacgtgagcctggagttcctaagaggcgctctggagagggacaagaaggacggatttcaacaaacaagcgagcacgccctgttttcgtgcagcgttgttgacgtcttcacgcagttaaatcagtccttcgagattatcaggaagctggagtgccccgaccccagcatcctggcccattacatgaggcgcttcgctaaaacaattggcaaagtgctgatgcaatacgcagatattctgtccaaggatttccctgcatattgcactaaggaaaagctcccatgcattttgatgaataatgtccaacagttacgcgtgcagctggagaagatgtttgaggcgatgggtggaaaagaactcgatctcgaagccgcagactctcttaaagaactgcaggtgaagcttaataccgtgctggatgaactgagtatggtgttcggaaattcctttcaagttaggatcgacgagtgcgtaagacagatggcagatatcttaggccaggtacgcggaacagggaatgcatctcccgatgctagagcgagcgccgctcaagatgcagacagcgtgctgcgtcctctgatggacttcctcgatgggaatctgaccctttttgcgacagtctgcgagaagaccgtacttaagcgcgtgcttaaagagctgtggcgggtggtgatgaacaccatggagcgaatgatcgtccttcccccacttacggatcagaccgggacccagctaattttcacggccgctaaagaactgagccacttgtctaaattgaaagaccacatggtgagggaggaaaccaggaacctcactcccaagcaatgcgccgtcctagatttagctcttgacacaataaagcaatattttcatgcaggaggtaacgggctaaaaaagactttcctcgaaaagtccccagacctgcagtctctaaggtacgcgctgtctctgtacacgcaaaccactgacacgcttattaaaacattcgttcggtctcagactacgcaggtgcacgatggtaaagggattcggtttacggccaatgaagacattagacccgagaaggggtccggcgtcgatgaccccgtgggcgaagtgtccatccaagttgacctgtttacccatccaggaacaggtgaacacaaagtgactgttaaagtcgttgcagccaacgacctgaagtggcaaactgcgggaatgtttcgcccttttgtggaagtgacaatggttggccctcaccaaagcgacaaaaagcgtaaatttactaccaagtccaaatccaacaactgggctcccaagtataatgagaccttccacttcctgctcgggaatgaagagggtccagaatcttacgagctccaaatctgcgtgaaggattactgttttgcccgagaagacagggttctgggactcgccgtgatgcccctgcgagacgttactgctaaaggaagctgtgcatgttggtgtcccctgggacgcaaaattcatatggatgaaacaggacttacaatcctacgcatcctaagccaacgtagcaatgacgaagtcgccagagaattcgtgaagctgaaatctgagtcccgttccacggaggagggctcatag

SEQ ID NO: 309176 - DNA, 285 bp, Artificial Sequence
  derived and/or modified sequence
atgcagcactctttagtgttttttttcgctgtgattctacatctgtctcatctgttgcacctggacgcgagcattcatcctttccgtttgcccttctctagtaagccattcttactcatccccatgagtaacaccacactgcctcacactgcttggcccctgagctttctccaccagaccgtcagtacactcaaagcagtggcagttacacatagcctgtggcacctccagatccctgtggactgtcaagcatgtaacaggaagtccaagaaaatctactgttag

SEQ ID NO: 309177 - protein, 561 aa, Artificial Sequence
  derived and/or modified sequence
MADPQAGSAAGDWEIDVESLELEEDVCGAPRSTPPGPSPPPADGDCEDDEDDDGVDEDAEEEGDGEEAGASPGMPGQPEQRGGPQPRPPLAPQASPAGTGPRERCTPAGGGAEPRKLSRTPKCARCRNHGVVSCLKGHKRFCRWRDCQCANCLLVVERQRVMAAQVALRRQQATEDKKGLSGKQNNFERKAVYQRQVRAPSLLAKSILEGYRPIPAETYVGGTFPLPPPVSDRMRKRRAFADKELENIMLEREYKEREMLETSQAAALFLPNRMVPGPDYNSYKSAYSPSPVEPPSKDFCNFLPTCLDLTMQYSGSGNMELISSNVSVATTYRQYPLSSRFLVWPKCGPISDTLLYQQCLLNATTSVQALKPGASWDLKGARVQDGLSAEQDMMPSKLEGSLVLPHTPEIQTTRSDLQGHQAVPERSAFSPPRRNFSPIVDTDSLAAQGHVLTKISKENTRHPLPLRHNPFHSLFQQTLTDKSGPELKTPFVKEAFEETPKKHRECLVKDNQKYTFTIDRCAKDLFVAKQVGTKLSVNEPLSFSVESILKRPSSAITRVSQ

SEQ ID NO: 309178 - DNA, 477 bp, Artificial Sequence
  derived and/or modified sequence
atgcctgagccccccacccccagcgtgggcagctgtgccgcccgggccagcaggatgtctgctgccccctgcagccgggcccccagccccatcgaccaccccagggctgaggagtgtggccgggccgcccgggactggcaggccgcccccccagctgcccctgtgcgggaccccctgggggaggcctcctgggcccctgagagcggggaggacatggagaacctgtatgtgcagctgaagctgcagagcgtgggcacctgcttcaaccgggaggagctgcccagcgtgctgcagggcgaggagctgggcgccacctctgtgaccaacaagccaggcctgagcgccatgaggaaggagacagaccagcaggtgggggagaggaagctgacctactgtggggaccaggtgaccctcttcacagaccaggccctgagccagatcctgagcagcgaggagggccgcatcaaggtgatgtag

SEQ ID NO: 309179 - DNA, 1686 bp, Artificial Sequence
  derived and/or modified sequence
atggccgacccgcaggcaggtagtgctgcgggggattgggaaatcgacgtcgagagcctggagctggaggaagatgtgtgtggagccccacgtagcacaccaccggggcctagtccccccccggcagatggtgattgcgaggatgacgaagacgacgatggagtggatgaggacgccgaggaggaaggcgatggagaggaggccggggcttcaccgggcatgcccgggcaaccggaacagcgcgggggccctcagccgcggcctccccttgccccgcaggctagcccagctgggaccggcccccgggagcgttgtactccagctggtggaggagctgaaccacggaaactgagtcgtacacccaagtgcgctagatgcagaaatcacggggttgtgtcctgcctgaagggccacaaaaggttctgcagatggcgggattgccagtgcgctaattgtctgctcgttgtcgagcgccagagagtgatggctgctcaggtcgccctcagaaggcagcaggcaactgaggacaagaaagggttgtcgggtaagcagaacaatttcgagagaaaagccgtctatcaaaggcaggtgagggcgccatccctgctcgccaagagtatcctggagggttatagacccatccccgccgaaacatatgtgggcggaacatttccactgcccccccccgtttcagaccggatgagaaaaagacgcgcattcgctgataaggagctggagaacatcatgttggagcgggagtacaaagaaagagaaatgctggagacgtcgcaagccgctgcgctcttcctacccaatcggatggttccgggaccagattacaactcgtacaaatctgcttacagcccaagcccagtcgaacccccttctaaggacttctgcaacttcctccctacatgcttggacctcaccatgcagtattcaggatcaggcaacatggagctaatctcatcaaatgtaagtgtggccactacctatcgacagtaccctcttagctctcgctttctcgtttggccaaagtgtggaccaatcagtgacactctgttatatcagcagtgtttgttgaacgctacaacatccgttcaggcgctgaagccaggtgcaagctgggacctcaagggagcgagggtgcaggatggactcagcgcagaacaggacatgatgcctagcaagctggaaggctctctggtgctaccccacacccccgagattcagaccacacgcagcgacctccaggggcatcaagctgtgccagaacgctcagccttctctccacctcggagaaacttctcccccatagtcgacacagacagcctggcggcgcagggccatgtgctgaccaagatctcgaaggagaacactcggcaccccctacccctgcggcacaaccccttccattctctgtttcagcaaactctgacggataaatctgggccagagctgaaaaccccatttgtaaaagaggcttttgaggagacgcctaagaagcaccgggaatgtctcgtgaaggataatcagaaatacaccttcaccattgatcggtgcgcaaaggacctgttcgtggctaagcaggtgggtaccaaactgtcggtgaatgagccattatcattctccgtagagagtatcctgaagcggcccagctctgccattacacgcgtaagtcaatag

SEQ ID NO: 309180 - DNA, 1686 bp, Artificial Sequence
  derived and/or modified sequence
atggcagatccccaagcgggttcagccgccggagattgggagatcgacgttgagtcactcgagcttgaagaagacgtttgcggagcccccaggagtacacccccaggccccagcccgcctccagcggacggcgactgtgaggacgatgaagatgatgatggcgtggatgaagacgccgaagaggaaggcgacggggaggaggccggcgcctctccgggaatgccgggtcagcctgaacagaggggcggaccccagccacgcccccctttggcaccccaagcctcacccgctggcactggtccgcgggagcgatgcactccagctggaggtggcgcagagccgcgcaaactgtcacggacccccaaatgtgcccgatgtagaaatcatggcgtagtatcctgcctgaaaggacacaaacgcttctgtcggtggagggactgtcagtgcgccaattgcctcctggtggtcgaaaggcagagggtcatggcggctcaggtggcactgcggagacagcaggctactgaggataagaaaggcttgtccggtaagcagaacaacttcgaacggaaggcagtatatcagcgccaggtgagggccccatctctacttgccaaaagcattctcgagggctatagacccatcccagccgaaacctatgtcggagggaccttcccactacccccacctgtgtctgaccgtatgaggaagaggcgggccttcgcagataaagaattggagaacatcatgctcgagcgagaatacaaagagagagaaatgctggagacttcacaggctgccgcattgttcctgcccaaccgcatggtgccaggtccagactataactcctacaagtcggcttactcaccttcaccggtggagcccccttcaaaggacttctgcaacttcttacccacatgtctggacttgacaatgcaatatagtggttcagggaatatggagctcatctctagtaatgtttcggttgccactacatacagacaatacccactcagctctcggtttctagtctggccaaaatgcgggcctatcagcgatactctgctctaccagcagtgtttgctgaacgcgacaacttccgtgcaggcgctgaaacctggagcctcatgggacctgaaaggggcccgagtccaggacgggctttccgcagagcaggatatgatgcccagcaagctcgaggggtccctggttcttccccacactccagaaattcagaccactcgctctgacctacaaggacaccaggccgtcccagaaaggagtgcctttagcccacctaggcggaatttttcaccaatagttgataccgattctctggccgctcagggacatgtactgacaaaaatttcaaaggagaatacaagacaccccctgcccctaagacataatcccttccattctttgtttcaacagactcttactgataagtcaggccctgagctgaaaactccattcgtaaaagaagcctttgaggagacccctaagaaacaccgggagtgtttggtgaaggataatcaaaaatatacctttaccatcgaccggtgtgcgaaggatcttttcgtggccaaacaggtaggtaccaaattgtcagttaacgaaccactatccttctcagtcgagagcattctgaagagaccttcgtctgccatcacccgtgtgagccagtag

SEQ ID NO: 309181 - DNA, 1686 bp, Artificial Sequence
  derived and/or modified sequence
atggcggacccacaggccggaagcgctgcgggcgactgggagatcgatgtggagtccttagagctggaagaagatgtctgcggcgcaccaagatcaacccctcccggtcctagcccacctcctgccgatggcgattgtgaggacgatgaggatgatgatggcgtagatgaggacgccgaggaagagggcgatggagaggaggcgggcgcttcccccggaatgcccggacaacccgaacagagagggggtcctcagcccagacctccgctcgccccgcaggcttcccccgcaggcactgggcctcgcgaacggtgcactcctgccgggggcggtgcagaaccgaggaaattgtcacgcaccccaaagtgcgccagatgcagaaaccacggcgtggtgtcctgtcttaagggtcataagagattctgtcggtggagggattgtcaatgcgccaactgcttgctcgtcgtcgagagacagagggtaatggcagctcaggtagccctgcgccgccagcaagctaccgaggataagaaggggttgtccggaaagcagaacaattttgagaggaaggccgtataccaaagacaggtgagggcaccatccctacttgccaagtccatcctcgaaggatacaggccaatcccagcagagacttatgtgggcggcacctttccccttccaccgccagtgtccgatcgcatgcgtaagcggcgcgcctttgccgacaaagaactcgagaatatcatgctggaacgcgagtataaggagcgggaaatgctcgaaaccagccaggcagccgcactcttcttgcctaaccgaatggtgcccggaccagactataactcatacaagtcggcgtacagcccctcacctgttgaaccaccttccaaggacttttgcaatttcctgccaacgtgtttggacttgacaatgcagtactccggttcaggaaacatggaactgatctcatcaaacgtgtccgtagccaccacctatcggcagtatcccctcagctctaggtttctcgtttggccaaagtgtgggcccatctccgataccttactgtatcagcagtgtctgttaaacgctactactagcgtgcaggccctcaagcccggggcgtcttgggatcttaagggcgcacgagtgcaggacggcctgagtgctgagcaggacatgatgccaagtaagctggaggggagcctggtgctcccccacacacctgagattcagacaactcgcagcgacctacaggggcaccaggctgtgccagaacgatccgcattcagcccgcctcggagaaacttctctccaatcgtggacaccgatagcttggcagcgcaggggcatgtgctcaccaaaatcagcaaggagaacacacgccatccactccccctgcgccacaaccctttccattcactgtttcaacaaaccttgaccgataaatccgggcccgagttaaagaccccctttgtgaaggaagcattcgaggagactccaaaaaaacaccgggagtgcttggtgaaagacaaccagaaatacacattcacaatagatagatgtgctaaagacctttttgtcgctaagcaggttggcacgaagctttcagtcaatgagcccttatccttctccgtcgaatccattctcaaacgcccttcctccgccataacccgggtgtctcaatag

SEQ ID NO: 309182 - DNA, 1686 bp, Artificial Sequence
  derived and/or modified sequence
atggctgacccccaggccggcagcgctgctggggactgggagattgatgtggagagcctggagctggaggaggatgtgtgtggggcccccaggagcaccccacctggccccagccccccaccagcagatggagactgtgaagatgatgaagatgatgatggagtggatgaagatgctgaggaggagggagatggagaggaggccggggccagccctggcatgcctggccagcctgagcagaggggcggcccccagccccggccccccctggccccccaggccagccctgctggcaccggcccccgggagcgctgcaccccagctgggggcggcgctgagcccaggaagctgagcaggacccccaagtgtgcccgctgcagaaatcatggagtggtgtcctgcctgaagggccacaagcgcttctgccgctggagggactgccagtgtgccaactgcctgctggtggtggagcggcagagggtgatggccgcccaggtggccctgcggcggcagcaggccacagaggacaagaagggcctgagcggcaagcagaacaactttgagaggaaggctgtgtaccagaggcaggtgcgggcccccagcctgctggccaagagcatcctggagggctaccggcccatcccagctgagacctacgtgggcggcaccttccccctgcccccacctgtgtctgacaggatgaggaagagaagagcctttgctgacaaggagctggagaacatcatgctggagcgggagtacaaggagcgggagatgctggagaccagccaggccgccgccctcttcctgcccaacaggatggtgcccggccctgactacaacagctacaagagcgcctacagccccagccctgtggagccccccagcaaggacttctgcaacttcctgcccacctgcctggacctgaccatgcagtacagcggcagcggcaacatggagctgatcagcagcaatgtgtctgtggccaccacctaccggcagtaccccctgagcagccgcttcctggtgtggcccaagtgtggccccatcagtgacaccctgctgtaccagcagtgcctgctgaatgccaccacctctgtgcaggccctgaagccaggggcctcctgggacctgaagggggcccgggtgcaggacggcctgtctgctgagcaggacatgatgcccagcaagctggagggcagcctggtgctgccccacaccccagagatccagaccaccaggagtgacctgcagggccaccaggccgtgcctgagaggtctgccttcagccccccaagaagaaacttcagccccatcgtggacacagacagcctggccgcccagggccacgtgctgaccaagatcagcaaggagaacaccaggcaccccctgcccctgcggcacaaccccttccacagcctcttccagcagaccctgacagacaagagcggccctgagctgaagaccccatttgtgaaggaggcctttgaggagacccccaagaagcacagagaatgtctggtgaaggacaaccagaagtacaccttcaccatcgacagatgtgccaaggacctgtttgtggccaagcaggtgggcaccaagctgtctgtgaatgagcccctgtccttctctgtggagagcatcctgaagaggcccagcagcgccatcaccagggtgtcccagtag

SEQ ID NO: 309183 - DNA, 1686 bp, Artificial Sequence
  derived and/or modified sequence
atggccgacccccaggccggcagcgccgccggcgactgggagatcgatgtggaatccttggaactagaggaggatgtgtgtggtgcccctcgttccacaccacccgggcccagcccccctcccgccgatggcgattgtgaagatgacgaagacgacgacggagtggacgaggatgcagaggaagaaggtgatggggaggaggcaggagcaagtccaggcatgcctggccagcccgagcaaagaggcggtccccagccccgccccccccttgctccccaagctagccccgcagggacaggaccacgagaacgatgcacccccgctggggggggcgcagagccccgtaagcttagtaggactccgaagtgcgcccggtgcaggaatcacggcgtggtttcatgccttaagggacacaagaggttctgccgctggcgggactgccagtgtgctaattgcctgttggtagtggaacgtcagcgcgtcatggcagcccaggtggccttgcggcggcaacaggccaccgaagataaaaagggtctcagcggaaagcaaaacaatttcgagcgcaaagctgtataccagcgtcaagtcagagctccatctctcttagccaaatccatcctggagggataccgccctattcctgcagaaacctacgtcggaggaactttccccttgcccccgcccgtgtctgacagaatgagaaagcggagagcattcgccgacaaggaactggaaaacatcatgctggagcgggaatataaggaaagggagatgctcgagaccagtcaggccgccgccctttttcttcctaatagaatggtgcccggacccgattataatagctacaaatctgcttactcacccagccccgtggagcctccctccaaagacttctgtaactttctccctacatgcctggaccttactatgcagtactctggttctggcaacatggaactgatctcgtccaacgtgagtgtagccaccacatatcgacaatatcctttgagctctaggttccttgtgtggcccaagtgtggccctatttccgacacccttctttatcagcagtgcctcctcaacgccaccactagcgtgcaagcgcttaagcccggagctagttgggacttgaagggtgccagagttcaggatggtctgtctgcggagcaagacatgatgccttctaagctggagggctctctggtcctgccacatacccctgaaatccagaccactaggtccgacttacaagggcaccaggctgtgccagagcggtctgccttttccccacctagacgaaacttctctccaatcgtcgatacggattccctcgcagcgcagggccatgtgcttaccaaaattagcaaggagaacacgaggcaccccctccctttgagacataacccatttcacagtttatttcagcagaccctcaccgataagtccggccccgagctgaagacaccatttgtaaaagaagctttcgaggagactcctaagaagcatcgggaatgtcttgtgaaggataaccagaagtacacatttaccatcgaccgctgtgcgaaggacctgtttgtggcgaagcaggtgggcacaaaactgtctgttaacgaacctctctcattttccgttgagagcatactgaaaaggccttcctcagcaattacaagagtttcccaatag

SEQ ID NO: 309184 - DNA, 1686 bp, Artificial Sequence
  derived and/or modified sequence
atggccgacccccaggccggcagcgccgccggcgactgggagatcgatgtcgagagtctggagttggaagaggatgtctgcggagccccccgatcaacgccaccaggcccctccccccctcctgctgacggagattgtgaggacgatgaggacgacgatggagtggacgaagacgcggaggaggaaggcgatggcgaagaagctggagcctcaccgggcatgccaggccaacccgagcagagagggggtccacagccccgcccgcctctggctcctcaagcgagccccgccgggacagggcccagggagagatgcacaccggctggagggggagcagagcctaggaagctgtctcgaactccaaagtgtgcgcggtgtaggaatcatggggtcgtaagttgcctgaagggccacaaacgtttttgcagatggcgcgactgtcagtgtgccaactgtctgctggtggtcgaacgacagcgggtcatggctgcccaggtcgccctgcggagacagcaagccacggaggacaaaaaaggcctgagcgggaaacagaacaattttgagcgaaaagcagtctaccaaagacaggtgcgggcccccagcctgctcgcaaagagcattctggaaggttatcggcctataccggcggagacgtatgtgggcggaaccttcccactgccaccaccagtttctgaccggatgcgcaagcgccgggcattcgcggataaagaattggagaatattatgctggaaagggagtacaaagaacgggaaatgctggagacttcccaggccgcggccctgttcttgcccaatcgaatggtgccgggacccgattacaacagctacaaatctgcttattccccttcgcccgtcgaacctccatctaaggatttctgcaattttttgcctacctgtctcgacctgactatgcaatattcagggtccgggaacatggagctgatctcgagcaacgtatcagtggctactacatatcgccagtatccgctctcatcccggtttttggtgtggcctaaatgcggaccaattagcgatacgctactataccagcaatgtcttctgaacgccacgacctccgtccaggctctgaagcccggcgccagctgggatttgaagggcgcccgcgtccaagacggcctgtccgccgaacaagatatgatgccatccaagctggaaggaagcctggtcttacctcacacgcctgaaattcaaacaacacgcagcgacctgcagggtcaccaggccgttcccgagcgtagcgcattttctccaccgcgccgtaatttcagccccattgtcgacaccgatagcctagcagcccaaggccatgtcctcacaaagatatcgaaagagaacactcggcaccccctccctctgcgccacaaccctttccacagtctgttccagcagaccctgacagacaaaagcggccctgagcttaaaacccctttcgtgaaggaggcctttgaagagactcctaaaaagcaccgcgaatgcttagtaaaagacaatcagaagtatacatttaccattgatagatgtgctaaagacttattcgtagccaaacaagtggggacaaaactctcagtgaacgagcctctaagcttctctgtggaatcaatcctgaaacgaccgtcatcagccattacgcgagtcagccagtag

SEQ ID NO: 309185 - DNA, 1686 bp, Artificial Sequence
  derived and/or modified sequence
atggccgacccccaggccggcagcgccgccggcgactgggagatcgatgtcgaatccttggagctggaggaggacgtatgtggagccccccgaagcacgccccccggcccaagtccccccccggccgatggggactgcgaggatgatgaagatgatgatggggtcgatgaggatgccgaagaggagggcgatggagaggaggccggtgcctcccccgggatgcctggacagccagaacagcggggcggcccgcagccccggcctcctcttgcgccccaggcaagccccgccggcacagggccaagggaaagatgtacaccagccgggggcggtgctgagccccggaaactaagtcggacccctaaatgtgcacggtgcaggaaccacggtgtggtgagttgtttgaaaggtcataagcggttttgccgctggcgggattgccagtgtgctaattgtttattagtggtggagcggcagcgagtgatggccgcccaggtggccttacgtagacagcaagctactgaagacaaaaaagggttgtcggggaaacagaacaacttcgagaggaaagcggtgtatcagaggcaggtcagggctccatctttactggccaagtcgattttggagggctatcgccccatcccggccgagacatacgtagggggcacattcccgctcccacctcccgtgtccgaccggatgagaaaaaggcgcgcctttgctgataaggagttggagaatattatgctggaaagggagtacaaggagagagagatgctggaaacaagccaggccgccgcattatttctgcccaaccggatggtccctggccctgactataacagctataagtcagcctattctccctcaccagtggagccgccatccaaagatttctgcaactttctccctacatgtcttgacttaacaatgcagtactctgggtccggaaatatggagttgatctccagcaatgtgagcgtggctactacttaccggcagtaccctctgtcgagtcggttcttggtgtggccaaaatgtggcccaatatccgacacgttgttataccagcagtgcctcctgaatgcgacgaccagcgtccaagctcttaaaccaggtgcctcctgggacctgaagggagcccgggtccaagacggactgtccgctgagcaggacatgatgccttcaaagctggaaggcagcctcgtcctcccccacacgcctgaaattcaaacgactcgttcggacctgcagggccatcaggctgtgccagagcggtccgcgtttagccctcctaggaggaatttctctccaatcgtcgatacagacagcctggccgcccaggggcacgtgttgaccaagatctcaaaagaaaacacaagacatcccttgccactgcggcataaccccttccactccctcttccagcagaccctcactgacaagagtggacccgagcttaagacgccttttgtgaaggaggccttcgaagagaccccaaagaaacatcgggagtgtctggtaaaggataaccagaagtatacatttacaatagacagatgcgcaaaagacctgtttgtggccaaacaagtgggaaccaaactgagcgtgaatgaaccattatcattttctgtggagtccattctgaagagaccatcttccgcaataaccagggtgtcccagtag

SEQ ID NO: 309186 - DNA, 1686 bp, Artificial Sequence
  derived and/or modified sequence
atggctgatcctcaagcagggagcgccgctggggactgggagattgatgtcgagtcattggaattagaagaggacgtctgcggcgctcctcgcagcacacctccgggaccctcaccgcctcctgcagacggagattgtgaagacgacgaggatgatgacggagtggacgaggacgctgaagaagagggggatggcgaggaggcaggtgccagtcccggaatgcccggtcagcctgaacagcgcggaggacctcagccgcgacccccactcgccccacaagcatcacctgccggaactgggcctcgcgagcggtgcacacctgctggaggaggagctgagcccagaaagttgagtaggacaccaaagtgtgcgcgttgtagaaatcacggggtcgtgtcttgcttgaagggccacaagagattttgtcgttggagggattgccagtgcgccaactgtctcctcgtcgtggaaaggcagcgcgtgatggccgcacaggtggccctccgaaggcaacaggctacagaggataagaaaggcctgtcggggaagcagaataatttcgaaaggaaggctgtgtaccagcgccaggtgcgggcaccttcactcttagccaaaagcatactggaggggtatcgcccaatcccagctgaaacatacgttggcggtacctttcccctaccccctcccgtgagcgacaggatgcgcaaacggcgtgcattcgctgacaaggaactggaaaatataatgcttgaaagagaatacaaggaaagggaaatgctcgagacttcccaggctgccgcactcttcctgccaaaccgcatggtgcccggacctgattacaattcgtataagagcgcctacagcccaagccctgtggaacccccttcaaaggatttctgtaatttcctgcccacttgtctagacttaaccatgcagtattctgggtctgggaacatggaactgatctcttccaatgtgtctgtggcgaccacttataggcaatatccgttaagcagcaggttcctcgtctggcccaagtgcgggcctatcagcgacacactgttgtaccagcagtgccttttgaacgcgaccacatcagtccaggccctgaaacccggagcctcgtgggatctcaagggtgcgagagtgcaggacggcctgagcgcagaacaagacatgatgccatcgaagttggagggctctttagtgctgcctcacacacccgagatccagaccacaaggtccgatctgcaggggcaccaggctgtgccggaacgcagcgccttcagcccacctcgcagaaacttttcccctatagttgatacagatagcctggccgcacaaggtcacgttcttaccaagattagtaaggaaaacacaaggcacccactccctctcaggcacaatcccttccactccttgttccagcaaaccctgaccgataagtctggaccagagctgaaaacaccttttgtcaaggaggcttttgaagagacgccaaaaaagcatcgtgagtgcctggtaaaggacaatcagaaatacacatttaccattgatcgctgcgccaaagacctcttcgttgcaaaacaggttggtactaagctctccgttaatgagcctctgtcttttagcgttgagagcattctgaagcgtccttcttccgctatcactagagttagtcagtag

SEQ ID NO: 309187 - DNA, 1686 bp, Artificial Sequence
  derived and/or modified sequence
atggctgacccccaagctgggagcgctgctggagactgggagatagatgttgaatcacttgaactggaggaggacgtgtgcggggcacctcgtagtaccccaccgggaccttccccccctcccgctgacggggactgcgaggatgacgaggacgatgacggcgtcgatgaagacgccgaagaagagggagatggtgaagaggctggagcctcccctggaatgcctggacagccagaacagcgcggaggtccccagcctcgccctccgctggccccacaggcctcaccagcgggtactggccctcgcgagcgctgcacaccagcaggcggaggggcagaaccaagaaagctctcccggaccccgaaatgcgcccgatgccggaaccacggggtcgtcagttgcttgaagggccacaagcggttctgtcggtggcgcgactgtcagtgtgcgaattgtttgctggtggtggagcgccagagggtcatggcagctcaggttgccctgcggcgtcagcaggccaccgaggataaaaagggcctgtcggggaaacagaataacttcgagaggaaggccgtgtaccagcgtcaggtccgggctccatctctgctggctaaaagcattctcgaaggctatcgtcccattcctgccgaaacctacgtgggtggcactttcccacttcctccccctgtgtctgacagaatgagaaagcgccgagcattcgcagataaagagttagagaatatcatgttagagcgggagtataaagagcgggagatgctagagacgagtcaagctgcagcactatttctacccaatagaatggtgcccggtcccgactacaacagttacaagagcgcatactcccctagcccagtcgaacctccgtcaaaagacttttgcaacttcttgccaacatgcctcgatcttaccatgcagtacagtggatcgggcaacatggagcttatctcctctaacgtctcggtggctaccacgtataggcagtacccactctcatctagattcctcgtttggccaaagtgcgggcctatctcagacacactgctttatcagcagtgtttgttgaacgctaccaccagcgtgcaggctcttaaaccaggagcctcctgggatctgaaaggagccagagttcaagacggcctgtctgcagagcaggatatgatgcctagcaaactcgaaggctcattggtgttacctcacaccccagagatccagaccaccaggtccgaccttcagggccatcaggccgttcctgagcgatcagcgtttagtcctcctagaagaaacttctctcctatcgtcgacaccgactccttagcagcccagggtcatgttctgacaaagatttctaaggagaacacacggcaccctctgcctcttcgccacaacccatttcactcccttttccagcagactttgactgataagtccgggccagaactcaagacaccattcgtgaaggaagcttttgaggagacgccgaaaaagcaccgcgagtgcttggtgaaggacaatcagaagtataccttcaccattgaccgatgtgctaaagacttgttcgttgccaaacaggtgggtacaaaactgtccgtcaacgagccactgtcttttagcgtcgaaagcatccttaaacgaccctcatccgctatcaccagggtttcccaatag

SEQ ID NO: 309188 - DNA, 1686 bp, Artificial Sequence
  derived and/or modified sequence
atggccgatccgcaagccggaagcgcagcaggagattgggagatcgatgtagaaagcctggaactggaagaggacgtgtgcggggcaccacgttccaccccacccggaccgtcgcctcctcccgcagacggagactgtgaagacgacgaagatgacgacggcgtggatgaggatgccgaggaggagggggacggagaggaagccggagccagccctggcatgccgggtcagccagaacaacgtgggggacctcagcccagacctcccctagctccccaggcttcacctgccggaactggtccacgggaacgctgcaccccggcaggcggaggcgctgaaccccgaaagttgtcccgcactccaaagtgtgccaggtgtcgcaaccacggcgtggttagctgcctcaagggccacaagcgattctgtcgctggcgtgattgtcaatgtgctaactgcttattagttgtcgagagacagagggtgatggccgctcaggtggcgctccggcgacagcaggccaccgaagacaaaaaagggctgtcagggaagcagaataatttcgagagaaaagccgtgtaccagagacaggtaagggcaccatcacttctggccaagtccatacttgagggttacaggccaatacctgccgagacttacgtgggaggtacgttccctctgccccctcccgtgtctgaccgaatgaggaagagaagggcctttgctgataaggaactggagaatattatgctggaaagagaatacaaggagagggaaatgctagaaaccagtcaggcagcggctctcttcttaccaaacagaatggtgcccggtcccgattacaactcttataaaagcgcatattcacccagcccagtcgaaccacccagcaaggacttctgcaattttctgcccacctgccttgatttgacaatgcaatattccggaagcggcaacatggagctgattagtagcaatgtatcagttgccaccacgtataggcagtacccattgagctctagattcctggtgtggcccaagtgcggacccatatccgacaccctgttgtaccaacaatgcctgctgaacgccactacatccgttcaggccctgaagccaggcgcttcctgggacttgaagggcgcaagagtgcaagatgggctgagcgccgaacaggatatgatgccctccaaattagaagggtccctagttctgccacacacgcctgaaatccagacaactaggtccgatctgcaggggcaccaggccgtccctgaaaggtccgcttttagcccccctcgtcgaaattttagcccaatagtcgacactgacagtctggccgcacagggtcacgtgctcacaaaaatatcaaaggaaaataccagacacccccttccactgagacacaatccattccacagcttattccaacaaacgttaactgacaagagtggtcccgagctgaagacaccatttgtcaaggaggcttttgaggagacgcccaagaaacatagggagtgtctggttaaagacaatcagaagtatacatttaccatcgacaggtgcgcgaaggatttgttcgtggctaagcaggtgggaacaaagctgagtgtgaatgaacctttatctttcagcgtggagtccatcctgaaaaggccctccagtgcgattaccagggtgagccaatag

SEQ ID NO: 309189 - DNA, 1686 bp, Artificial Sequence
  derived and/or modified sequence
atggccgacccccaggccggcagcgccgccggcgactgggagatcgacgtggagagcctggagctggaggaggacgtgtgcggcgcccccagaagcaccccccccggccccagccccccccccgccgacggcgactgcgaggacgacgaggacgacgacggcgtggacgaggacgccgaggaggagggcgacggcgaggaggccggcgccagccccggcatgcccggccagcccgagcagagaggcggcccccagcccagaccccccctggccccccaggccagccccgccggcaccggccccagagagagatgcacccccgccggcggcggcgccgagcccagaaagctgagcagaacccccaagtgcgccagatgcagaaaccacggcgtggtgagctgcctgaagggccacaagagattctgcagatggagagactgccagtgcgccaactgcctgctggtggtggagagacagagagtgatggccgcccaggtggccctgagaagacagcaggccaccgaggacaagaagggcctgagcggcaagcagaacaacttcgagagaaaggccgtgtaccagagacaggtgagagcccccagcctgctggccaagagcatcctggagggctacagacccatccccgccgagacctacgtgggcggcaccttccccctgcccccccccgtgagcgacagaatgagaaagagaagagccttcgccgacaaggagctggagaacatcatgctggagagagagtacaaggagagagagatgctggagaccagccaggccgccgccctgttcctgcccaacagaatggtgcccggccccgactacaacagctacaagagcgcctacagccccagccccgtggagccccccagcaaggacttctgcaacttcctgcccacctgcctggacctgaccatgcagtacagcggcagcggcaacatggagctgatcagcagcaacgtgagcgtggccaccacctacagacagtaccccctgagcagcagattcctggtgtggcccaagtgcggccccatcagcgacaccctgctgtaccagcagtgcctgctgaacgccaccaccagcgtgcaggccctgaagcccggcgccagctgggacctgaagggcgccagagtgcaggacggcctgagcgccgagcaggacatgatgcccagcaagctggagggcagcctggtgctgccccacacccccgagatccagaccaccagaagcgacctgcagggccaccaggccgtgcccgagagaagcgccttcagcccccccagaagaaacttcagccccatcgtggacaccgacagcctggccgcccagggccacgtgctgaccaagatcagcaaggagaacaccagacaccccctgcccctgagacacaaccccttccacagcctgttccagcagaccctgaccgacaagagcggccccgagctgaagacccccttcgtgaaggaggccttcgaggagacccccaagaagcacagagagtgcctggtgaaggacaaccagaagtacaccttcaccatcgacagatgcgccaaggacctgttcgtggccaagcaggtgggcaccaagctgagcgtgaacgagcccctgagcttcagcgtggagagcatcctgaagagacccagcagcgccatcaccagagtgagccagtag

SEQ ID NO: 309190 - DNA, 2163 bp, Artificial Sequence
  derived and/or modified sequence
tgggttcgttccgggcctccagctatcagctcccgatctcgtgtttgagggtagcgaccccgatttctgtttgcatgcacagccagcagccctagcgccagatcctaaagctggatatcttttaactgggctaccagcccgggcctcaaagttttgagtgagggccgccaggctcaggccccagcgaagccccgagcgccatggccgacccgcaggctggctccgcggccggggactgggagatcgatgtcgagagcctggagctggaagaggacgtctgcggggcgccgcggtccacgccccccgggcccagcccgccgccggcggacggggactgcgaggacgacgaagatgacgacggggtggacgaagacgcggaagaagagggcgacggcgaggaggcaggcgcgtcccccgggatgcccggccagccggagcagcgggggggaccgcagccgaggccgccgctcgcgcctcaggcctcacccgccggcaccggtccccgagagcgctgcactcccgcgggcggcggcgcggagccgcgcaagctgagccgcacgcccaagtgcgcgcgctgccgcaaccacggcgtggtgtcctgcctgaagggccacaagcgcttctgtcgctggcgcgactgccagtgcgccaactgcctgctggtggtggagcggcagcgcgtcatggccgcccaggtggcgctccggaggcagcaggccaccgaggacaagaaggggctttccgggaaacagaataatttcgagcgcaaagctgtgtaccagaggcaagtcagagcccccagtttgctggccaaaagcattttagaaggctatcgccccattccagcggagacttatgtaggagggaccttccctctacctcccccagttagtgacaggatgaggaaaagaagagcctttgctgataaagagttggagaacattatgctggagagagaatataaagaaagggagatgttggaaacttctcaagctgctgctctgtttctgcccaaccgcatggtgcctggacctgactacaattcctacaaaagtgcctacagccccagcccagtggaaccaccaagcaaggacttctgtaattttttgcccacctgccttgatttaaccatgcagtattcagggtctgggaatatggaactaatttcttctaatgtcagcgtggccacaacttatagacagtatcccttgtcctcaagatttttagtttggcccaagtgtggccccattagcgacaccctcctctaccagcaatgcctgctaaatgccaccacctcagttcaagccctgaagcctggggccagctgggacttgaagggagcacgagtccaggatggactcagtgcagagcaggacatgatgccatcgaaattggaaggttccctggtgctgcctcacactcctgagatccagaccacgagaagtgaccttcagggtcatcaggctgtcccagagaggtccgcgttctccccaccccgacggaatttctctcccattgttgacacggactccctggcagctcaagggcatgtcttaacgaagatcagcaaagaaaacaccaggcaccctctgccacttagacataatccattccactcattattccagcaaacacttactgacaaatcgggtcctgagttgaaaacaccatttgtcaaagaggcctttgaagagacccctaagaaacacagagagtgtttagttaaggacaaccagaagtacacatttacaatagatagatgtgcaaaagacctttttgtagccaaacaagttggaacaaaactctcggtgaatgaaccactgtcattttctgttgagtctattcttaagaggccttcatctgccatcactcgtgtctctcagtgaaaggctgcttaaacagaaagctggattttctgcagtcttagagcattatagccatttgctactttttttaaaagttaagatgtttgtgtaaagaaatttctaatgtaaagatgatgattttgaaaaattttatatattcctaatatgcatgtactttttcttatcacatatatttaaacttacagatggaaattgcccaatgtgcaaattgttaagtaccacactttacacagcatttcaaaaagcaataaaattgacactgtcttctcaaagaccc

SEQ ID NO: 309191 - DNA, 1965 bp, Artificial Sequence
  derived and/or modified sequence
atggccgacccgcaggctggctccgcggccggggactgggagatcgatgtcgagagcctggagctggaagaggacgtctgcggggcgccgcggtccacgccccccgggcccagcccgccgccggcggacggggactgcgaggacgacgaagatgacgacggggtggacgaagacgcggaagaagagggcgacggcgaggaggcaggcgcgtcccccgggatgcccggccagccggagcagcgggggggaccgcagccgaggccgccgctcgcgcctcaggcctcacccgccggcaccggtccccgagagcgctgcactcccgcgggcggcggcgcggagccgcgcaagctgagccgcacgcccaagtgcgcgcgctgccgcaaccacggcgtggtgtcctgcctgaagggccacaagcgcttctgtcgctggcgcgactgccagtgcgccaactgcctgctggtggtggagcggcagcgcgtcatggccgcccaggtggcgctccggaggcagcaggccaccgaggacaagaaggggctttccgggaaacagaataatttcgagcgcaaagctgtgtaccagaggcaagtcagagcccccagtttgctggccaaaagcattttagaaggctatcgccccattccagcggagacttatgtaggagggaccttccctctacctcccccagttagtgacaggatgaggaaaagaagagcctttgctgataaagagttggagaacattatgctggagagagaatataaagaaagggagatgttggaaacttctcaagctgctgctctgtttctgcccaaccgcatggtgcctggacctgactacaattcctacaaaagtgcctacagccccagcccagtggaaccaccaagcaaggacttctgtaattttttgcccacctgccttgatttaaccatgcagtattcagggtctgggaatatggaactaatttcttctaatgtcagcgtggccacaacttatagacagtatcccttgtcctcaagatttttagtttggcccaagtgtggccccattagcgacaccctcctctaccagcaatgcctgctaaatgccaccacctcagttcaagccctgaagcctggggccagctgggacttgaagggagcacgagtccaggatggactcagtgcagagcaggacatgatgccatcgaaattggaaggttccctggtgctgcctcacactcctgagatccagaccacgagaagtgaccttcagggtcatcaggctgtcccagagaggtccgcgttctccccaccccgacggaatttctctcccattgttgacacggactccctggcagctcaagggcatgtcttaacgaagatcagcaaagaaaacaccaggcaccctctgccacttagacataatccattccactcattattccagcaaacacttactgacaaatcgggtcctgagttgaaaacaccatttgtcaaagaggcctttgaagagacccctaagaaacacagagagtgtttagttaaggacaaccagaagtacacatttacaatagatagatgtgcaaaagacctttttgtagccaaacaagttggaacaaaactctcggtgaatgaaccactgtcattttctgttgagtctattcttaagaggccttcatctgccatcactcgtgtctctcagtgaaaggctgcttaaacagaaagctggattttctgcagtcttagagcattatagccatttgctactttttttaaaagttaagatgtttgtgtaaagaaatttctaatgtaaagatgatgattttgaaaaattttatatattcctaatatgcatgtactttttcttatcacatatatttaaacttacagatggaaattgcccaatgtgcaaattgttaagtaccacactttacacagcatttcaaaaagcaataaaattgacactgtcttctcaaagacccaa

SEQ ID NO: 309192 - DNA, 2292 bp, Artificial Sequence
  derived and/or modified sequence
gccagtggcgctgcgctgaatgcaactgcgcgcgcccgccgggtgagccagcgatctgagccaggcgggggcggcccgacctttcccgcccagcctgggtcagaggaagccgaaagcggcctcagcaagtgggttcgttccgggcctccagctatcagctcccgatctcgtgtttgagggtagcgaccccgatttctgtttgcatgcacagccagcagccctagcgccagatcctaaagctggatatcttttaactgggctaccagcccgggcctcaaagttttgagtgagggccgccaggctcaggccccagcgaagccccgagcgccatggccgacccgcaggctggctccgcggccggggactgggagatcgatgtcgagagcctggagctggaagaggacgtctgcggggcgccgcggtccacgccccccgggcccagcccgccgccggcggacggggactgcgaggacgacgaagatgacgacggggtggacgaagacgcggaagaagagggcgacggcgaggaggcaggcgcgtcccccgggatgcccggccagccggagcagcgggggggaccgcagccgaggccgccgctcgcgcctcaggcctcacccgccggcaccggtccccgagagcgctgcactcccgcgggcggcggcgcggagccgcgcaagctgagccgcacgcccaagtgcgcgcgctgccgcaaccacggcgtggtgtcctgcctgaagggccacaagcgcttctgtcgctggcgcgactgccagtgcgccaactgcctgctggtggtggagcggcagcgcgtcatggccgcccaggtggcgctccggaggcagcaggccaccgaggacaagaaggggctttccgggaaacagaataatttcgagcgcaaagctgtgtaccagaggcaagtcagagcccccagtttgctggccaaaagcattttagaaggctatcgccccattccagcggagacttatgtaggagggaccttccctctacctcccccagttagtgacaggatgaggaaaagaagagcctttgctgataaagagttggagaacattatgctggagagagaatataaagaaagggagatgttggaaacttctcaagctgctgctctgtttctgcccaaccgcatggtgcctggacctgactacaattcctacaaaagtgcctacagccccagcccagtggaaccaccaagcaaggacttctgtaattttttgcccacctgccttgatttaaccatgcagtattcagggtctgggaatatggaactaatttcttctaatgtcagcgtggccacaacttatagacagtatcccttgtcctcaagatttttagtttggcccaagtgtggccccattagcgacaccctcctctaccagcaatgcctgctaaatgccaccacctcagttcaagccctgaagcctggggccagctgggacttgaagggagcacgagtccaggatggactcagtgcagagcaggacatgatgccatcgaaattggaaggttccctggtgctgcctcacactcctgagatccagaccacgagaagtgaccttcagggtcatcaggctgtcccagagaggtccgcgttctccccaccccgacggaatttctctcccattgttgacacggactccctggcagctcaagggcatgtcttaacgaagatcagcaaagaaaacaccaggcaccctctgccacttagacataatccattccactcattattccagcaaacacttactgacaaatcgggtcctgagttgaaaacaccatttgtcaaagaggcctttgaagagacccctaagaaacacagagagtgtttagttaaggacaaccagaagtacacatttacaatagatagatgtgcaaaagacctttttgtagccaaacaagttggaacaaaactctcggtgaatgaaccactgtcattttctgttgagtctattcttaagaggccttcatctgccatcactcgtgtctctcagtgaaaggctgcttaaacagaaagctggattttctgcagtcttagagcattatagccatttgctactttttttaaaagttaagatgtttgtgtaaagaaatttctaatgtaaagatgatgattttgaaaaattttatatattcctaatatgcatgtactttttcttatcacatatatttaaacttacagatggaaattgcccaatgtgcaaattgttaagtaccacactttacacagcatttcaaaaagcaataaaattgacactgtcttctcaaagaccc

SEQ ID NO: 309193 - DNA, 2367 bp, Artificial Sequence
  derived and/or modified sequence
gccagtggcgctgcgctgaatgcaactgcgcgcgcccgccgggtgagccagcgatctgagccaggcgggggcggcccgacctttcccgcccagcctgggtcagaggaagccgaaagcggcctcagcaagtgggttcgttccgggcctccagctatcagctcccgatctcgtgtttgagggtagcgaccccgatttctgtttgcatgcacagccagcagccctagcgccagatcctaaagctggatatcttttaactgggctaccagcccgggcctcaaagttttgagtgagggccgccaggctcaggccccagcgaagccccgagcgccatggccgacccgcaggctggctccgcggccggggactgggagatcgatgtcgagagcctggagctggaagaggacgtctgcggggcgccgcggtccacgccccccgggcccagcccgccgccggcggacggggactgcgaggacgacgaagatgacgacggggtggacgaagacgcggaagaagagggcgacggcgaggaggcaggcgcgtcccccgggatgcccggccagccggagcagcgggggggaccgcagccgaggccgccgctcgcgcctcaggcctcacccgccggcaccggtccccgagagcgctgcactcccgcgggcggcggcgcggagccgcgcaagctgagccgcacgcccaagtgcgcgcgctgccgcaaccacggcgtggtgtcctgcctgaagggccacaagcgcttctgtcgctggcgcgactgccagtgcgccaactgcctgctggtggtggagcggcagcgcgtcatggccgcccaggtggcgctccggaggcagcaggccaccgaggacaagaaggggctttccgggaaacagaataatttcgagcgcaaagctgtgtaccagaggcaagtcagagcccccagtttgctggccaaaagcattttagaagttctccttggattattctacagctattatgtgtacataatgaaccatctttagaaaataaaagtgacatcagctctaggctatcgccccattccagcggagacttatgtaggagggaccttccctctacctcccccagttagtgacaggatgaggaaaagaagagcctttgctgataaagagttggagaacattatgctggagagagaatataaagaaagggagatgttggaaacttctcaagctgctgctctgtttctgcccaaccgcatggtgcctggacctgactacaattcctacaaaagtgcctacagccccagcccagtggaaccaccaagcaaggacttctgtaattttttgcccacctgccttgatttaaccatgcagtattcagggtctgggaatatggaactaatttcttctaatgtcagcgtggccacaacttatagacagtatcccttgtcctcaagatttttagtttggcccaagtgtggccccattagcgacaccctcctctaccagcaatgcctgctaaatgccaccacctcagttcaagccctgaagcctggggccagctgggacttgaagggagcacgagtccaggatggactcagtgcagagcaggacatgatgccatcgaaattggaaggttccctggtgctgcctcacactcctgagatccagaccacgagaagtgaccttcagggtcatcaggctgtcccagagaggtccgcgttctccccaccccgacggaatttctctcccattgttgacacggactccctggcagctcaagggcatgtcttaacgaagatcagcaaagaaaacaccaggcaccctctgccacttagacataatccattccactcattattccagcaaacacttactgacaaatcgggtcctgagttgaaaacaccatttgtcaaagaggcctttgaagagacccctaagaaacacagagagtgtttagttaaggacaaccagaagtacacatttacaatagatagatgtgcaaaagacctttttgtagccaaacaagttggaacaaaactctcggtgaatgaaccactgtcattttctgttgagtctattcttaagaggccttcatctgccatcactcgtgtctctcagtgaaaggctgcttaaacagaaagctggattttctgcagtcttagagcattatagccatttgctactttttttaaaagttaagatgtttgtgtaaagaaatttctaatgtaaagatgatgattttgaaaaattttatatattcctaatatgcatgtactttttcttatcacatatatttaaacttacagatggaaattgcccaatgtgcaaattgttaagtaccacactttacacagcatttcaaaaagcaataaaattgacactgtcttctcaaaga

SEQ ID NO: 309194 - protein, 226 aa, Artificial Sequence
  derived and/or modified sequence
MADPQAGSAAGDWEIDVESLELEEDVCGAPRSTPPGPSPPPADGDCEDDEDDDGVDEDAEEEGDGEEAGASPGMPGQPEQRGGPQPRPPLAPQASPAGTGPRERCTPAGGGAEPRKLSRTPKCARCRNHGVVSCLKGHKRFCRWRDCQCANCLLVVERQRVMAAQVALRRQQATEDKKGLSGKQNNFERKAVYQRQVRAPSLLAKSILEVLLGLFYSYYVYIMNHL

SEQ ID NO: 309195 - DNA, 681 bp, Artificial Sequence
  derived and/or modified sequence
atggcagacccacaagccgggagcgctgccggagattgggagattgatgtggaatcacttgagctcgaggaggatgtgtgcggtgctcctcggtccacccccccaggaccctccccacctccagccgatggcgactgcgaagatgacgaagacgatgacggggtggacgaagacgctgaagaggaaggcgacggtgaagaggcgggggcttctcctggaatgcctggccagcctgaacagaggggaggacctcagcctagacctcctcttgccccccaagcatcacccgcaggtacgggtccaagagaacgatgcacccctgcaggcgggggagctgagccacgcaagctctctagaactccgaagtgcgctcggtgtcgcaaccacggtgtcgtgagctgtctcaaagggcacaaacgcttctgcagatggagggattgccagtgtgctaattgtttactagtggtggagcggcaacgcgtaatggccgctcaagttgctcttagacgccaacaagccacagaggataaaaagggcctttcaggtaaacagaataacttcgaacgcaaagcagtttaccagagacaggtccgcgcgccttctcttctggccaagtccattcttgaggttctgcttgggctcttttacagctactacgtctacatcatgaaccatctctag

SEQ ID NO: 309196 - DNA, 681 bp, Artificial Sequence
  derived and/or modified sequence
atggccgatccacaggctggctcagcagctggagactgggaaatagatgtggaatctctcgagctggaagaagacgtgtgtggcgccccccgttccactccacctggcccctctcccccacccgcagatggggattgcgaagacgacgaggatgacgatggagtggatgaggacgccgaggaggagggcgatggcgaggaggctggggcctcccctggcatgccgggccagccagagcaaaggggtggaccccagccgcgaccaccactcgcacctcaggcttcccccgctggtactggccctcgtgaaagatgcactccggctggtggtggagccgaaccccgcaaattatccagaaccccaaagtgtgcgagatgtagaaatcatggagttgtgagttgccttaagggccacaagcggttctgtcgctggagagactgccagtgcgccaactgtctgctcgttgtcgagagacagcgcgtaatggccgcgcaagtggccctgagaagacagcaggctaccgaggacaagaaagggctgagtgggaagcagaataactttgaacgcaaggctgtctaccaacgacaggtgcgggctccctctctattggcaaaatccatactggaggtgctgctgggtcttttttattcttactacgtatatatcatgaatcacttatag

SEQ ID NO: 309197 - DNA, 681 bp, Artificial Sequence
  derived and/or modified sequence
atggctgacccgcaggcaggaagcgcagctggggattgggagatagatgtcgagtcacttgaactcgaggaggacgtgtgtggagcccctcgctccacaccccccgggccctccccccctccagcggatggggactgtgaggatgacgaagacgacgacggggtggacgaggacgccgaagaagagggcgatggtgaggaagccggtgcttctcctgggatgccaggccagcctgaacagcgtggtggccctcaacctcggcccccacttgccccccaggccagccccgctggcaccggacctagggagcgatgcacccccgccggcgggggcgctgaaccccggaaactctcccgcacacctaagtgtgctcggtgtcgaaaccatggtgtcgtttcatgcctaaaaggacataagcgcttctgtaggtggcgtgattgccaatgcgcaaactgtttactcgtagtcgagcgccagagagttatggccgcccaggttgcactccgccggcagcaggccacagaggacaagaaaggactgtcggggaaacaaaataacttcgaaagaaaggctgtgtatcagcggcaagttcgggctccgagcttattggcaaaatccatactggaggtgctcttgggccttttttattcatactatgtctacataatgaatcacctttag

SEQ ID NO: 309198 - DNA, 681 bp, Artificial Sequence
  derived and/or modified sequence
atggctgacccccaggccggcagcgctgctggggactgggagattgatgtggagagcctggagctggaggaggatgtgtgtggggcccccaggagcaccccacctggccccagccccccaccagcagatggagactgtgaagatgatgaagatgatgatggagtggatgaagatgctgaggaggagggagatggagaggaggccggggccagccctggcatgcctggccagcctgagcagaggggcggcccccagccccggccccccctggccccccaggccagccctgctggcaccggcccccgggagcgctgcaccccagctgggggcggcgctgagcccaggaagctgagcaggacccccaagtgtgcccgctgcagaaatcatggagtggtgtcctgcctgaagggccacaagcgcttctgccgctggagggactgccagtgtgccaactgcctgctggtggtggagcggcagagggtgatggccgcccaggtggccctgcggcggcagcaggccacagaggacaagaagggcctgagcggcaagcagaacaactttgagaggaaggctgtgtaccagaggcaggtgcgggcccccagcctgctggccaagagcatcctggaggtgctgctgggcctcttctacagctactacgtgtacatcatgaaccacctgtag

SEQ ID NO: 309199 - DNA, 681 bp, Artificial Sequence
  derived and/or modified sequence
atggccgacccccaggccggcagcgccgccggcgactgggagatcgatgtagaatctctcgaactcgaggaagatgtgtgtggcgctcccagatccaccccccccggcccaagtcctccgcctgccgacggggactgcgaggatgacgaggacgacgacggagtggacgaagatgcagaggaggagggggacggcgaggaagctggggcttcaccaggaatgcctggccagccagagcagcgcggagggccccaaccccgaccccccttagccccgcaggcatctcccgctggcaccggacctagggagaggtgtacccctgccggcggtggcgccgagccaaggaagctgtccagaaccccgaagtgcgcccgttgccgtaaccatggggtggtgtcatgcttaaaggggcataagagattctgtcggtggagggactgccagtgcgctaactgcctgttagttgtggagcgacaaagagtcatggctgcccaggtcgccttgaggagacaacaagcaacagaggataaaaaggggctgagtggtaagcagaacaatttcgagaggaaagccgtttaccaacggcaggtgcgagcaccttcactgctggcgaaaagcatcctggaggtgttgttaggcctattttactcctattacgtgtatattatgaaccacttgtag

SEQ ID NO: 309200 - DNA, 681 bp, Artificial Sequence
  derived and/or modified sequence
atggccgacccccaggccggcagcgccgccggcgactgggagatcgacgtggaatctctggaattggaggaagatgtgtgtggagccccacggtcaacaccaccaggccccagccccccacccgctgatggggattgcgaggacgacgaagacgatgacggcgttgatgaggatgcagaagaggaaggggatggcgaggaagctggggcctctcccgggatgcccgggcagcctgaacagagaggaggaccacagccccgtccgccgctggctccacaggcctctcctgccggaacaggaccacgagagcggtgcacccccgcaggcggcggagccgaacctaggaaattgagtagaactcccaaatgcgctagatgccgtaatcacggcgtggtgtcctgcctgaagggccacaagcggttctgtagatggagggactgtcagtgcgccaactgcctcctcgtggtggaacgccagagagtaatggccgcgcaggtggcattacgaagacaacaggctaccgaagacaaaaaagggctgtctgggaaacagaacaatttcgaacgcaaggcagtatatcaaagacaagtgcgggcccccagcctcctagctaagtccatcttggaggtgctgctcgggctattctactcatactacgtttatattatgaaccacctctag

SEQ ID NO: 309201 - DNA, 681 bp, Artificial Sequence
  derived and/or modified sequence
atggccgacccccaggccggcagcgccgccggcgactgggagatcgacgtggagtcgcttgagctggaagaggacgtttgtggggctccacgtagcaccccacctgggccttccccaccacccgctgacggagattgcgaggacgatgaggacgacgacggcgttgatgaagatgccgaagaagagggtgacggagaagaagccggggcgtcaccaggcatgcccggacagccagagcagcggggaggaccccagcctcgaccacctctggctccccaggcgtctccggcgggcacagggccgagagagcggtgtacaccagctggcggaggtgctgagcctagaaagctgtctcggaccccaaaatgtgcccgctgtcgcaatcacggagtggtcagttgtcttaagggacataagaggttctgcagatggagagactgccaatgtgcaaattgtcttctcgtggtggagcggcagagagtcatggctgcccaggtggccctcaggagacagcaggccacagaggacaagaagggcctgtctggaaagcagaacaatttcgagaggaaagcagtgtatcagaggcaggtgcgggcaccctcactgctggccaaaagcatactggaggtcttacttggactgttttatagttactacgtgtatattatgaaccacctgtag

SEQ ID NO: 309202 - DNA, 681 bp, Artificial Sequence
  derived and/or modified sequence
atggcagatccacaagccggtagcgctgcaggcgattgggagattgatgtcgagtcacttgagctagaggaggacgtgtgtggagctccccgatctacacctccgggaccgtctccgccaccggctgacggcgattgcgaggatgatgaagatgatgacggggtggatgaggacgctgaggaagaaggtgatggagaggaagccggagccagtccaggaatgccagggcagccagaacagcgcggtggcccacagccacgaccaccacttgcgccacaggcttcccctgccggaacaggccctagggagagatgcacccccgctggcggaggtgccgaaccccgaaagctgtcccgaacgccgaaatgcgccagatgtcgtaaccacggcgtggtctcatgtttaaagggtcacaagcggttttgcagatggcgcgattgccagtgcgctaactgcctattggtggtagagcgccaacgagttatggctgcacaggtggcactccgacgacagcaggccaccgaagataagaagggactttctggcaagcagaataacttcgaaaggaaagccgtgtatcagcgccaggtgagggccccaagtctgttggccaagtccattctggaggtgttgcttggattattctactcttattacgtctacatcatgaatcacctgtag

SEQ ID NO: 309203 - DNA, 681 bp, Artificial Sequence
  derived and/or modified sequence
atggccgaccctcaagccggatcagccgcaggagactgggaaatcgacgtggaatcgttagaattggaggaggatgtttgtggcgcaccccgtagcacaccaccaggtcctagccctcccccagccgacggggactgcgaagacgatgaagacgatgacggcgtcgacgaagacgccgaggaggagggcgacggagaagaggcaggcgcatctcctgggatgcctggccagccggaacaacgtgggggaccccagcctcgcccaccactcgctccacaagcttcaccggcaggcacagggccacgcgaaaggtgcacccctgcaggcggtggcgctgaaccaagaaaactgtccaggacaccaaagtgcgccaggtgtcggaatcatggggtggtgtcctgcttgaaaggacataagcgtttctgccggtggcgagactgtcagtgcgccaactgcctgctggttgtggaacgccagagagtgatggcggctcaggtggctttacggagacagcaggctaccgaagacaagaagggtctctctggaaaacagaataattttgagcgcaaagccgtataccaaaggcaggtcagggcaccctcccttctcgccaagtccattctggaagtccttttgggactcttctattcctactatgtctacatcatgaaccatctgtag

SEQ ID NO: 309204 - DNA, 681 bp, Artificial Sequence
  derived and/or modified sequence
atggcggaccctcaggctggcagcgcagctggcgactgggaaattgatgtcgaatctttggagttagaggaagacgtgtgtggagcccctcgctctacgcctccgggaccttctcctccaccagctgatggggattgtgaggacgatgaggatgacgacggtgtggatgaagacgctgaggaggagggcgatggcgaggaagccggagcctcccctggaatgcctggacagccggaacagcggggaggcccacagccgcgacctcctctcgcacctcaggcatctccagcaggcaccggcccaagggaaaggtgtacaccggcaggcggaggagccgagccgagaaaactctctcgcacacccaagtgcgcgcgatgccggaaccacggagtggtgtcttgcctgaaagggcataaacggttctgtaggtggcgggattgccaatgtgctaactgcctcctcgtcgtcgagcgtcagagggtgatggcagcacaggtcgccttacgacggcaacaggctacggaagacaagaagggattaagcggaaagcaaaacaactttgaacgaaaagcagtctatcagcgccaagtcagagccccatccttattagccaagtccattctggaggtgctcctcgggttgttctattcctactacgtatacatcatgaaccacctgtag

SEQ ID NO: 309205 - DNA, 681 bp, Artificial Sequence
  derived and/or modified sequence
atggccgacccccaggccggcagcgccgccggcgactgggagatcgacgtggagagcctggagctggaggaggacgtgtgcggcgcccccagaagcaccccccccggccccagccccccccccgccgacggcgactgcgaggacgacgaggacgacgacggcgtggacgaggacgccgaggaggagggcgacggcgaggaggccggcgccagccccggcatgcccggccagcccgagcagagaggcggcccccagcccagaccccccctggccccccaggccagccccgccggcaccggccccagagagagatgcacccccgccggcggcggcgccgagcccagaaagctgagcagaacccccaagtgcgccagatgcagaaaccacggcgtggtgagctgcctgaagggccacaagagattctgcagatggagagactgccagtgcgccaactgcctgctggtggtggagagacagagagtgatggccgcccaggtggccctgagaagacagcaggccaccgaggacaagaagggcctgagcggcaagcagaacaacttcgagagaaaggccgtgtaccagagacaggtgagagcccccagcctgctggccaagagcatcctggaggtgctgctgggcctgttctacagctactacgtgtacatcatgaaccacctgtag

SEQ ID NO: 309206 - DNA, 1244 bp, Artificial Sequence
  derived and/or modified sequence
ccagtggcgctgcgctgaatgcaactgcgcgcgcccgccgggtgagccagcgatctgagccaggcgggggcggcccgacctttcccgcccagcctgggtcagaggaagccgaaagcggcctcagcaaggtgaggcgcccgaggctgcagaagaccgagcagaactttgcagagttcgggatgtgctgggctaggtcgctgaggacttgactggcttcctccctccttccctccacctaccttctccctccccctccaccatccagtgggttcgttccgggcctccagctatcagctcccgatctcgtgtttgagggtagcgaccccgatttctgtttgcatgcacagccagcagccctagcgccagatcctaaagctggatatcttttaactgggctaccagcccgggcctcaaagttttgagtgagggccgccaggctcaggccccagcgaagccccgagcgccatggccgacccgcaggctggctccgcggccggggactgggagatcgatgtcgagagcctggagctggaagaggacgtctgcggggcgccgcggtccacgccccccgggcccagcccgccgccggcggacggggactgcgaggacgacgaagatgacgacggggtggacgaagacgcggaagaagagggcgacggcgaggaggcaggcgcgtcccccgggatgcccggccagccggagcagcgggggggaccgcagccgaggccgccgctcgcgcctcaggcctcacccgccggcaccggtccccgagagcgctgcactcccgcgggcggcggcgcggagccgcgcaagctgagccgcacgcccaagtgcgcgcgctgccgcaaccacggcgtggtgtcctgcctgaagggccacaagcgcttctgtcgctggcgcgactgccagtgcgccaactgcctgctggtggtggagcggcagcgcgtcatggccgcccaggtggcgctccggaggcagcaggccaccgaggacaagaaggggctttccgggaaacagaataatttcgagcgcaaagctgtgtaccagaggcaagtcagagcccccagtttgctggccaaaagcattttagaagttctccttggattattctacagctattatgtgtacataatgaaccatctttagaaaataaaagtgacatcagctctaggtatagatatattttttaataatgaaaaaagatgacatggataataataaaacattgattgatacaagataaa

SEQ ID NO: 309207 - DNA, 1966 bp, Artificial Sequence
  derived and/or modified sequence
gccgagcgggagccgcgcgggagcagcgcagctacggcggcggcagcggcggcgcggttgcgattccgagccgttgagacgcctctgcggcagctggtggcgcaggtggcttgcgtggacgcgggtagaggcgaccggccagcaaccgcagcgtcggcgcccgcggccccggcaggcgcgtcgggacgccccgaggcatcctcccccgcccgcgggcccggtagctgggcccgcgtccgccgcccgcatccccgcgccgccgcatctcctcgccgcctcccgggcttcggacccccggtctcgcccccgaaacatgactcgcgatttcaaacctggagacctcatcttcgccaagatgaaaggttatccccattggccagctcgagtagacgaagttcctgatggagctgtaaagccacccacaaacaaactacccattttcttttttggaactcatgagactgcttttttaggaccaaaggatatatttccttactcagaaaataaggaaaagtatggcaaaccaaataaaagaaaaggttttaatgaaggtttatgggagatagataacaatccaaaagtgaaattttcaagtcaacaggcagcaactaaacaatcaaatgcatcatctgatgttgaagttgaagaaaaggaaactagtgtttcaaaggaagataccgaccatgaagaaaaagccagcaatgaggatgtgactaaagcagttgacataactactccaaaagctgccagaagggggagaaagagaaaggcagaaaaacaagtagaaactgaggaggcaggagtagtgacaacagcaacagcatctgttaatctaaaagtgagtcctaaaagaggacgacctgcagctacagaagtcaagattccaaaaccaagaggcagacccaaaatggtaaaacagccctgtccttcagagagtgacatcattactgaagaggacaaaagtaagaaaaaggggcaagaggaaaaacaacctaaaaagcagcctaagaaggatgaagagggccagaaggaagaagataagccaagaaaagagccggataaaaaagaggggaagaaagaagttgaatcaaaaaggaaaaatttagctaaaacaggggttacttcaacctccgattctgaagaagaaggagatgatcaagaaggtgaaaagaagagaaaaggtgggaggaactttcagactgctcacagaaggaatatgctgaaaggccaacatgagaaagaagcagcagatcgaaaacgcaagcaagaggaacaaatggaaactgagcattttgctctgtaaagcatttcagatgcagcttgtgtgaaatgcattatgcaaaataaagtttattgtattgtattcccagccaaacaacatgtaatctacagtaataaaaaatatatctcattttgggctcaaagcattaatccagttactgaaaagagaatacaagtggagcaaacaagagatgaagatcttgatacagactcattggactgaatttcccccttccccccattgatggaagaatgttccagattctaaattgaggacttcattattaatggcattactgtgttatgattaacaaatttcctgtaaggtacacactacatactaaggtcggccatcattcctgttttttttttttttttttttttttaaccaagcttaaaatgaagctttgtgtttgaaagtaataacaagctcagacgaagatggtggttgtacattattcatctagaaaatataaaaattcattttgttttgaagctagttattaaactggaatagcagttatatccctgagaatggggcccttctcttgacattcctttgttgtttaattctttagaatcttaataaatgtttttttaatcctgagagattaaacagtagtagacttgttaagaatgaaactgtaaccaaaattttaaaataaagttttttttaaaaaaaaaa

SEQ ID NO: 309208 - protein, 136 aa, Artificial Sequence
  derived and/or modified sequence
MWIQVRTIDGSKTCTIEDVSRKATIEELRERVWALFDVRPECQRLFYRGKQLENGYTLFDYDVGLNDIIQLLVRPDPDHLPGTSTQIEAKPCSNSPPKVKKAPRVGPSNQPSTSARARLIDPGFGIYKGLALSPRL

SEQ ID NO: 309209 - DNA, 411 bp, Artificial Sequence
  derived and/or modified sequence
atgtggatccaggtgagaaccattgatggatctaaaacctgtacaatagaggatgtctctagaaaagccacgattgaagaactgcgtgagcgtgtttgggctctcttcgacgttcgacccgagtgtcagcgactgttctatagaggtaagcaactggagaacggatatacactattcgactatgacgtgggcctgaacgacattatacagctcctcgtcaggccagacccggaccaccttccaggcactagcacgcagattgaagctaagccgtgtagtaactctcctcctaaggttaagaaggccccccgagtggggccatcaaaccagccttccaccagcgcccgtgcgcgattaatcgaccctggctttggcatctataagggactggctttaagccccagactctag

SEQ ID NO: 309210 - DNA, 411 bp, Artificial Sequence
  derived and/or modified sequence
atgtggatccaggtgaggaccattgatggcagcaagacctgcaccattgaagatgtgtccaggaaggccaccatcgaggagctgcgggagcgggtgtgggccctgtttgatgtgcggcctgagtgccagaggctcttctaccggggcaagcagctggagaatggctacaccctgtttgattatgatgtgggcctgaatgacatcatccagctgctggtgcggccagaccctgaccacctgcccggcaccagcacccagatcgaggccaagccctgcagcaacagcccccccaaggtgaagaaggccccccgggtgggccccagcaaccagcccagcaccagcgcccgggcccggctgattgaccccggcttcggcatctacaagggcctggccctgagcccccggctgtag

SEQ ID NO: 309211 - DNA, 411 bp, Artificial Sequence
  derived and/or modified sequence
atgtggatccaggtgcggaccatcgacggcagcaagacctgcaccattgaagatgtttcacggaaagccactatcgaagaattgagggagcgtgtatgggccctgtttgatgtgaggccagaatgtcagcgtctgttctacagagggaagcagttggaaaatggatataccttgtttgattacgacgtcggtctgaacgatatcatccagttgctcgtgcgccctgaccctgaccaccttccagggacctctacgcaaattgaggccaagccctgctctaattcccccccaaaggtcaagaaagcaccccgggtgggtccaagcaatcagccgtctactagtgcaagagctcgcctcatcgatccgggattcggaatatataaaggcttggcactgtcaccccgcctctag

SEQ ID NO: 309212 - DNA, 411 bp, Artificial Sequence
  derived and/or modified sequence
atgtggattcaggttcgtactattgacggatctaagacatgtacaattgaagatgtgtccagaaaagccacaattgaggagcttagggaacgcgtatgggctctgtttgacgtgaggccagaatgccaacgcctgttttatcgcggtaaacagctggagaacggatataccctctttgattacgatgtgggcctgaatgacatcattcagctcctggttaggcccgatcccgaccatttgcccggtacaagcacccagatagaagccaagccatgttctaattctccacccaaagtgaagaaagcccctcgggtcggcccaagcaaccagccttctactagtgccagagcccgtttaatcgatcctggcttcggtatctacaaagggctggcattaagccctcgcctgtag

SEQ ID NO: 309213 - DNA, 802 bp, Artificial Sequence
  derived and/or modified sequence
gcgggccgggcggggcgcggcgcccagagctcagggggagacaaaggggaccggttcctctctaggcgccaagatgtggatacaggttcgcaccattgatggctccaagacgtgcaccattgaggacgtgtctcgcaaagccacgattgaggagctgcgcgagcgggtgtgggcgctgttcgacgtgcggcccgaatgccagcgcctcttctaccggggcaagcagttggaaaatggatataccttatttgattatgatgttggactgaatgatataattcagctgctagttcgcccagaccctgatcatcttcctggcacatctacacagattgaggctaaaccctgttctaatagtccacctaaagtaaagaaagctccgagggtaggaccttccaatcagccatctacatcagctcgtgcccgtcttattgatcctggctttggaatatataagggtctggctctgtcacccaggctgtagtgcagtgacgtgaacacggctcgctgtagccttgacctgctggggtcaagtgatcttcctgctcggcctcccaaagtgctgggatacaggcgtgagccaccatgcccggctaacttagatctttgatatcttgattagttctttctttacatatttaatattttgctttatttctggtagctttgtttttgatgcaattattatatatggttatcttctaaaatagtaatctgtttgctgatatagagaaatgaaattgatttatttggcttttgtaaccagcaaccttttcaaatctaataaattgtgtagaaataa

SEQ ID NO: 309214 - DNA, 474 bp, Artificial Sequence
  derived and/or modified sequence
ctgttctaatagtccacctaaagtaaagaaagctccgagggtaggaccttccaatcagccatctacatcagctcgtgcccgtcttattgatcctggctttggaatatataagatacccagaaagcggtactctagaaatgaatgtcaaggatcttagaccacgagctagaaccattttgaaatggaatgaactaaatgttggtgatgtggtaatggttaattataatgtagaaagtcctggacaaagaggattctggtttgatgcagaaattaccacattgaagacaatctcaaggaccaaaaaagaacttcgtgtgaaaattttcctggggggttctgaaggaacattaaatgactgcaagataatatctgtagatgaaatcttcaagattgagagacctggagcccatcccctttcatttgcagatggaaagtttttaaggcgaaatgaccctgaatgtgacctgtgtggtg

SEQ ID NO: 309215 - DNA, 411 bp, Artificial Sequence
  derived and/or modified sequence
atgtggatccaggtgagaaccatcgacggcagcaagacctgcaccatcgaggacgtgagcagaaaggccaccatcgaggagctgagagagagagtgtgggccctgttcgacgtgagacccgagtgccagagactgttctacagaggcaagcagctggagaacggctacaccctgttcgactacgacgtgggcctgaacgacatcatccagctgctggtgagacccgaccccgaccacctgcccggcaccagcacccagatcgaggccaagccctgcagcaacagcccccccaaggtgaagaaggcccccagagtgggccccagcaaccagcccagcaccagcgccagagccagactgatcgaccccggcttcggcatctacaagggcctggccctgagccccagactgtag

SEQ ID NO: 309216 - DNA, 339 bp, Artificial Sequence
  derived and/or modified sequence
atgaacgtgaaagacttaagaccccgggcgaggacaatcctcaagtggaatgaacttaatgtgggcgacgtagtgatggtgaactataacgtcgagtctccaggccagagggggttttggtttgatgccgagatcacaaccctgaagacgatctctcgcacgaagaaggaactccgcgttaaaatcttcctgggggggtcagagggtacactgaatgactgcaagattatttctgtcgatgagattttcaagatcgagaggccaggagcccacccgctttcgttcgcagacgggaagtttcttcggaggaacgatcctgaatgcgatctgtgcggctag

SEQ ID NO: 309217 - DNA, 339 bp, Artificial Sequence
  derived and/or modified sequence
atgaatgtgaaggacctgcggccccgggcccggaccatcctgaagtggaatgagctgaatgtgggagatgtggtgatggtgaactacaacgtggagagccctggccagaggggcttctggtttgatgctgagatcaccaccctgaagaccatcagcaggaccaagaaggagctgcgggtgaagatcttcctgggcggcagcgagggcaccctgaatgactgcaagatcatctctgtggatgagatcttcaagattgaaagacctggggcccaccccctgagctttgctgatggcaagttcctgcggagaaatgaccctgaatgtgacctgtgtggctag

SEQ ID NO: 309218 - DNA, 339 bp, Artificial Sequence
  derived and/or modified sequence
atgaacgtgaaggacctgcggccccgggcccggaccatcctgaagtggaatgagcttaatgtgggcgacgtggtgatggtcaattacaacgttgagagccccgggcaacgggggttttggtttgacgcggagatcaccacactgaagacaataagccgtacaaaaaaagaattgcgggtcaaaatctttctcggtggaagtgaagggacgctaaatgattgtaaaatcatctctgtggatgagatcttcaagattgaaaggcctggtgcccacccactgagtttcgcggacggaaaattccttcgccggaacgatcccgagtgtgacctttgtggctag

SEQ ID NO: 309219 - DNA, 339 bp, Artificial Sequence
  derived and/or modified sequence
atgaacgtgaaagatctcaggcccagagcgaggacaatcttaaagtggaacgaattaaatgttggagacgttgtcatggtgaattataatgtcgaaagtcccggacaacgtggattttggtttgatgctgaaatcacaacactgaaaacaatttccagaaccaaaaaggagctgagggtcaagatcttccttggaggttccgaaggaacactgaatgactgcaagatcattagcgtcgacgagatctttaagattgaaaggcctggcgctcaccccttgtcatttgcggatggcaaatttctcaggcgcaacgatcccgagtgcgatctctgcggctag

SEQ ID NO: 309220 - DNA, 339 bp, Artificial Sequence
  derived and/or modified sequence
atgaacgtgaaggacctgagacccagagccagaaccatcctgaagtggaacgagctgaacgtgggcgacgtggtgatggtgaactacaacgtggagagccccggccagagaggcttctggttcgacgccgagatcaccaccctgaagaccatcagcagaaccaagaaggagctgagagtgaagatcttcctgggcggcagcgagggcaccctgaacgactgcaagatcatcagcgtggacgagatcttcaagatcgagagacccggcgcccaccccctgagcttcgccgacggcaagttcctgagaagaaacgaccccgagtgcgacctgtgcggctag

SEQ ID NO: 309221 - DNA, 771 bp, Artificial Sequence
  derived and/or modified sequence
atggccgccccagttccttgggcctgttgcgccgtgctggccgccgcagcagctgtggtttacgcacaacgccattcaccccaggaagccccccacgtgcagtacgagcggttgggctccgatgtcaccctgccatgtggcactgccaactgggatgccgcggtaacctggcgggtgaacggcacagatctcgctccggatctactgaatggatctcagctcgtgttacatggcctagagctgggacacagcggactatacgcatgttttcatagagattcatggcacctcagacaccaggtgctactgcatgttggcctgccacccagggagcccgtgctctcttgccggtctaacacctaccctaaggggttttattgcagctggcacctgccaactcccacatatatacccaacacgttcaacgtaacagtgctccacgggtccaaaattatggtgtgtgagaaggatcccgccctcaagaatcgatgccatatccgctacatgcacctgttctcaacaataaaatacaaagtgtccatatctgtcagcaatgccttgggtcataacgctacagctattacttttgacgaatttactatcgtgaaaccagatccccccgaaaacgtggtggcacgaccagtaccctctaatcccagaaggttggaggttacttggcagaccccatctacctggccagatccggaatcatttccactgaaattcttcttgcgataccgcccactcatccttgatcaatggcagcactag

SEQ ID NO: 309222 - DNA, 771 bp, Artificial Sequence
  derived and/or modified sequence
atggccgcccctgtgccctgggcctgctgtgctgtgctggccgctgctgctgctgtggtgtatgcccagaggcacagcccccaggaggccccccacgtgcagtatgagcggctgggcagtgatgtgaccctgccctgtggcacagccaactgggatgctgctgtgacctggagggtgaatggaacagacctggccccagacctgctgaatggcagccagctggtgctgcacggcctggagctgggccacagcggcctgtatgcctgcttccaccgggacagctggcacctgcggcaccaggtgctgctgcacgtgggcctgcccccccgggagcctgtgctgagctgccgcagcaacacctaccccaagggcttctactgctcctggcacctgcccacccccacctacatccccaacaccttcaacgtgacagtgctgcacggcagcaagatcatggtgtgtgagaaggaccctgccctgaagaaccgctgccacatccgctacatgcacctgttcagcaccatcaagtacaaggtgtccatctctgtgtccaatgccctgggccacaatgccacagccatcacctttgatgagttcaccatcgtgaagccagaccccccagaaaatgtggtggcccggcctgtgcccagcaacccccggcggctggaggtgacctggcagacccccagcacctggccagaccctgagagcttccccctgaagttcttcctgcgctaccggcccctcatcctggaccagtggcagcactag

SEQ ID NO: 309223 - DNA, 771 bp, Artificial Sequence
  derived and/or modified sequence
atggccgcccccgtgccctgggcctgctgcgccgtgctggccgccgccgccgccgtggtttacgcacagaggcactctccgcaggaggccccccacgtccaatatgaacggttaggtagcgacgttactctcccctgtgggaccgccaattgggacgctgccgttacgtggagggtgaatggaacagacctggcccctgatctccttaatggatcacaactcgtgctccacggactcgaactggggcactcagggttatatgcctgctttcaccgagacagttggcacctgcgccaccaagtgctgctgcacgtcggtcttccaccgcgtgagcccgtgttgtcctgtcgaagtaacacttatccgaagggattctactgctcctggcatctccctaccccgacgtacattccaaatacctttaacgtgaccgtgctccatggatctaagatcatggtttgtgaaaaagacccggccttgaaaaatagatgccacattcggtacatgcatctgtttagcaccatcaaatacaaggtgtccatttctgtgtcaaacgcacttggccataatgccaccgctatcacatttgatgagtttacaattgtgaaacccgatccccccgaaaacgtcgtggctcggccagttccttcaaaccccagaaggctggaggtgacctggcagactccgagtacctggccggatcctgagagttttccattgaagttcttcctgcgctatcgacccctcatcttagatcagtggcagcactag

SEQ ID NO: 309224 - DNA, 771 bp, Artificial Sequence
  derived and/or modified sequence
atggccgctcctgttccctgggcctgttgcgctgttctagcagcggcagctgctgtggtgtacgcgcagcgccattcacctcaggaagctccacatgtacagtacgagcgactggggagtgatgtcaccctcccttgtgggactgcaaattgggacgccgcagtgacgtggcgggtcaatggaactgacctagcgccagacctgctaaacgggagtcagctggtattacatggccttgaactcgggcacagcgggctgtatgcctgtttccacagagatagctggcacctgcggcaccaggtgctcctgcatgtcggattgccaccacgcgaacccgttctgtcttgccgttccaacacgtacccgaaaggcttttactgctcctggcatctgcctacacccacatacatccctaataccttcaacgtgactgttctgcacggtagcaaaatcatggtgtgcgaaaaagaccccgcactcaagaatcgctgccacatcagatacatgcatctattctctacgatcaagtacaaggtgtctatttcggtgtccaacgccttaggacataatgcaacagccatcacctttgacgaatttactatcgtcaaaccagacccacccgaaaacgtggtggcaaggcctgttcctagcaaccctcgcaggcttgaggtgacttggcagaccccctctacctggcccgatcctgaaagctttccactcaaattcttcctgcgataccgacctctcatcctggatcagtggcagcattag

SEQ ID NO: 309225 - DNA, 921 bp, Artificial Sequence
  derived and/or modified sequence
gcacggggaccacagccgtcttgagggcgcgcccgagaaaggactctagccttgtcacctcatcttgcccccttggttttggaagtcctgaagagttggtctggaggaggaggaggacattgatgtgcttggtgtgtggccagtggtgaagagatggctgctcctgtcccgtgggcctgctgtgctgtgcttgccgccgccgccgcagttgtctacgcccagagacacagtccacaggaggcaccccatgtgcagtacgagcgcctgggctctgacgtgacactgccatgtgggacagcaaactgggatgctgcggtgacgtggcgggtaaatgggacagacctggcccctgacctgctcaacggctctcagctggtgctccatggcctggaactgggccacagtggcctctacgcctgcttccaccgtgactcctggcacctgcgccaccaagtcctgctgcatgtgggcttgccgccgcgggagcctgtgctcagctgccgctccaacacttaccccaagggcttctactgcagctggcatctgcccacccccacctacattcccaacaccttcaatgtgactgtgctgcatggctccaaaattatggtctgtgagaaggacccagccctcaagaaccgctgccacattcgctacatgcacctgttctccaccatcaagtacaaggtctccataagtgtcagcaatgccctgggccacaatgccacagctatcacctttgacgagttcaccattgtgaagcctgatcctccagaaaatgtggtagcccggccagtgcccagcaaccctcgccggctggaggtgacgtggcagaccccctcgacctggcctgaccctgagtcttttcctctcaagttctttctgcgctaccgacccctcatcctggaccagtggcagcat

SEQ ID NO: 309226 - DNA, 771 bp, Artificial Sequence
  derived and/or modified sequence
atggccgcccccgtgccctgggcctgctgcgccgtgctggccgccgccgccgccgtggtgtacgcccagagacacagcccccaggaggccccccacgtgcagtacgagagactgggcagcgacgtgaccctgccctgcggcaccgccaactgggacgccgccgtgacctggagagtgaacggcaccgacctggcccccgacctgctgaacggcagccagctggtgctgcacggcctggagctgggccacagcggcctgtacgcctgcttccacagagacagctggcacctgagacaccaggtgctgctgcacgtgggcctgccccccagagagcccgtgctgagctgcagaagcaacacctaccccaagggcttctactgcagctggcacctgcccacccccacctacatccccaacaccttcaacgtgaccgtgctgcacggcagcaagatcatggtgtgcgagaaggaccccgccctgaagaacagatgccacatcagatacatgcacctgttcagcaccatcaagtacaaggtgagcatcagcgtgagcaacgccctgggccacaacgccaccgccatcaccttcgacgagttcaccatcgtgaagcccgacccccccgagaacgtggtggccagacccgtgcccagcaaccccagaagactggaggtgacctggcagacccccagcacctggcccgaccccgagagcttccccctgaagttcttcctgagatacagacccctgatcctggaccagtggcagcactag

SEQ ID NO: 309227 - protein, 606 aa, Artificial Sequence
  derived and/or modified sequence
MLHTAISCWQPFLGLAVVLIFMGSTIGCPARCECSAQNKSVSCHRRRLIAIPEGIPIETKILDLSKNRLKSVNPEEFISYPLLEEIDLSDNIIANVEPGAFNNLFNLRSLRLKGNRLKLVPLGVFTGLSNLTKLDISENKIVILLDYMFQDLHNLKSLEVGDNDLVYISHRAFSGLLSLEQLTLEKCNLTAVPTEALSHLRSLISLHLKHLNINNMPVYAFKRLFHLKHLEIDYWPLLDMMPANSLYGLNLTSLSVTNTNLSTVPFLAFKHLVYLTHLNLSYNPISTIEAGMFSDLIRLQELHIVGAQLRTIEPHSFQGLRFLRVLNVSQNLLETLEENVFSSPRALEVLSINNNPLACDCRLLWILQRQPTLQFGGQQPMCAGPDTIRERSFKDFHSTALSFYFTCKKPKIREKKLQHLLVDEGQTVQLECSADGDPQPVISWVTPRRRFITTKSNGRATVLGDGTLEIRFAQDQDSGMYVCIASNAAGNDTFTASLTVKGFASDRFLYANRTPMYMTDSNDTISNGTNANTFSLDLKTILVSTAMGCFTFLGVVLFCFLLLFVWSRGKGKHKNSIDLEYVPRKNNGAVVEGEVAGPRRFNMKMI

SEQ ID NO: 309228 - DNA, 1821 bp, Artificial Sequence
  derived and/or modified sequence
atgcttcataccgccatctcatgctggcaacccttcctggggttggcagtcgtgctgatctttatgggatctacaatcggatgccccgcaagatgcgagtgttccgcccagaacaaaagcgtctcatgccatcggcggcgacttattgcgattcctgaaggcatcccaatcgaaactaaaattctggacttgagcaagaaccggctcaaaagcgtgaatccggaagaatttattagttatcctcttctggaggaaatcgacctttccgataatatcatcgccaatgtggaacctggcgccttcaacaatctatttaatttgcgctccctccgactaaagggcaatcgattaaaattggtcccattaggggtgttcaccggcttgagcaacctcacgaagcttgacatttccgaaaataaaattgtgatcctactggactacatgttccaggatctgcacaatctgaaaagtttagaggttggagacaacgacctcgtgtacatctctcatagggcattttcaggcctgcttagtttagagcagctgaccctcgaaaagtgcaacttaactgcagtaccgaccgaagcgctgtcacaccttcggtcacttatctcactccaccttaaacatctgaacatcaacaacatgccagtttatgctttcaaacgtctctttcacctcaagcatttggaaatcgactattggcccttgcttgacatgatgccggcaaattcactgtacggtctgaaccttacatctctgtccgtcacaaatactaacttgtccaccgtgccttttctcgcgtttaagcatctggtttaccttacccatcttaacctctcctataacccaatcagtacaatcgaagccgggatgttttccgatctgatcaggctgcaagagctccacatcgtaggagctcagctccggactatagaaccacattctttccagggtctccgatttcttagagtcctgaatgtgtcacagaatcttctggagactttagaggagaatgtgtttagttcccctcgggccctggaggtgctgtctattaacaataacccgctggcctgtgactgtcggttactctggattctgcaaagacagccaacacttcagttcggaggccagcaacccatgtgtgccggaccagatactatcagagagaggagcttcaaagacttccattccactgcactgtccttctattttacgtgcaagaaacccaaaatacgggagaagaagctgcagcatctgctggttgatgaaggtcaaaccgttcagctcgaatgtagcgcagatggcgatcctcagccggtgataagttgggtgaccccccgtagacgcttcattaccaccaagtcaaatggcagagctactgtgctgggggacggcactctggagatccgattcgctcaggaccaggattccgggatgtatgtctgtatcgcctccaatgcggccggtaatgataccttcaccgcttccctcaccgtgaagggcttcgctagtgaccgctttctgtatgccaatcgcacacccatgtatatgacagactctaacgataccatctccaacggcaccaacgccaatactttcagcttggatctcaagacgatcctcgtatcaaccgccatgggctgctttactttcctgggagtagtactcttctgttttctgctgctcttcgtgtggtcccggggcaaggggaagcacaagaactccattgaccttgagtatgtacccagaaagaataacggcgcagttgtggaaggagaagtcgccgggcctcgacgctttaatatgaaaatgatctag

SEQ ID NO: 309229 - DNA, 1821 bp, Artificial Sequence
  derived and/or modified sequence
atgttacacaccgcaatctcttgttggcaacctttcctcggtctcgcggtggtattgatttttatgggctcaaccatcggttgtccagcgcggtgtgaatgctctgctcagaataaaagtgttagctgccaccggcggcgactcatcgctatccctgaaggcatcccaatcgaaactaagatcctcgatctctctaagaaccgcctgaagtccgtcaatccagaagagtttatatcctacccacttctggaggaaatcgacctgtcggataacataatcgcaaacgtggagcctggagcgtttaataatctgttcaacttgaggtcactgagattgaaagggaacagattgaaactggtcccgttaggggtgttcactgggctctctaacttgactaagctggatatttcggagaacaaaattgtcattctgctggactatatgtttcaagatctgcataacctcaaatcactcgaagtcggagacaatgatctggtttatattagccatagagcattcagcggacttctctctctggagcagttgaccctggagaagtgcaacctcaccgctgtacccaccgaagcattatcccacctccgctctctaatatcactccatctcaagcatctcaacattaataatatgcctgtttacgcatttaaacggctatttcatctgaagcaccttgagatcgactattggccactgctagatatgatgcctgcgaactcgttgtatggactcaatctgacttcattgtctgtgacgaacactaacctgtccactgtgcctttccttgcgttcaagcacttggtgtaccttacccatttaaatctgtcatataaccccattagcaccatcgaagccggaatgttctctgaccttattcgcctacaggaactccatattgtgggcgcccagctacgcaccatcgaacctcacagcttccagggtctgagatttctgagagttctgaacgtcagccagaacttactggaaaccctcgaagaaaacgtatttagcagccccagagcactcgaagtgctgtcaatcaataacaatccccttgcatgtgattgtagactgctatggattctccagcgccagccgaccttacagttcggaggtcaacagccaatgtgcgccgggccagacacaatccgggagcgttcgtttaaagactttcactctacggctctgtccttttattttacctgcaaaaagccaaagataagggagaagaaattacagcatctcctcgtagatgaaggccagactgtgcaattggagtgtagtgcggacggagatcctcaacccgtgatttcttgggtgactcccaggagaagatttattactaccaaaagcaatgggagggccaccgttctgggggatggcactctcgagatccgtttcgcgcaggatcaagacagcggcatgtatgtttgcatagcaagcaacgccgcaggcaatgacacatttactgcttcccttacagtaaaaggcttcgcttcagatcgctttctgtatgccaatcgcaccccgatgtatatgactgactcaaatgacacaattagcaacggcacgaatgcaaacaccttctccctggacttgaaaacgattcttgtaagcactgccatggggtgtttcacctttttgggcgtggttctgttctgtttccttctcctgttcgtctggtcgcgcgggaagggcaagcacaaaaattctattgatctagagtacgtcccacgcaaaaacaacggagcagtagtcgagggcgaggtggccggtccacgaagatttaacatgaaaatgatctag

SEQ ID NO: 309230 - DNA, 1821 bp, Artificial Sequence
  derived and/or modified sequence
atgctgcacacagccatcagctgctggcagcccttcctgggcctggccgtggtgctgatcttcatgggcagcaccatcggctgcccagcccgctgtgaatgttctgcccagaacaagtctgtgtcctgccacagaagaaggctgattgccatccctgagggcatccccatcgagaccaagatcctggacctgagcaagaaccggctgaagtctgtgaaccctgaggagttcatctcctaccccctgctggaggagattgacctgagtgacaacatcatcgccaacgtggagcccggggccttcaacaacctcttcaacctgcggagcctgcggctgaagggcaaccggctgaagctggtgcccctgggcgtcttcaccggcctgagcaacctgaccaagctggacatcagcgagaacaagatcgtcatcctgctggactacatgttccaggacctgcacaacctgaagagcctggaggtgggggacaatgacctggtgtacatcagccaccgggccttcagcggcctgctgagcctggagcagctgaccctggagaagtgcaacctgacagctgtgcccacagaggccctgagccacctgcggagcctcatcagcctgcacctgaagcacctgaacatcaacaacatgcctgtgtatgccttcaagaggctcttccacctgaagcacctggagattgactactggcccctgctggacatgatgcctgccaacagcctgtatggcctgaacctgaccagcctgtctgtgaccaacaccaacctgagcacagtgcccttcctggccttcaagcacctggtgtacctgacccacctgaacctgagctacaaccccatcagcaccatcgaggccggcatgttcagtgacctgatccggctgcaggagctgcacatcgtgggcgcccagctgcggaccatcgagccccacagcttccagggcctgcgcttcctgcgggtgctgaatgtgtcccagaacctgctggagaccctggaggagaatgtgttcagcagcccccgggccctggaggtgctgagcatcaacaacaaccccctggcctgtgactgccgcctgctgtggatcctgcagaggcagcccaccctgcagtttggaggccagcagcccatgtgtgccggccctgacaccatccgggagaggagcttcaaggacttccacagcacagccctgtccttctacttcacctgcaagaagcccaagatccgggagaagaagctgcagcacctgctggtggatgagggccagacagtgcagctggagtgcagcgcagatggagacccccagcccgtcatctcctgggtgaccccccggcggcgcttcatcaccaccaagagcaatggccgggccaccgtgctgggagatggcaccctggagatccgctttgcccaggaccaggacagcggcatgtatgtgtgcatcgccagcaatgctgctggaaatgacaccttcaccgccagcctgactgtgaagggctttgccagtgaccgcttcctgtatgccaacagaacacccatgtacatgacagacagcaatgacaccatcagcaatggcaccaatgccaacaccttcagcctggacctgaagaccatcctggtgtccacagccatgggctgcttcaccttcctgggcgtggtgctcttctgcttcctgctgctgtttgtgtggagccggggcaagggcaagcacaagaacagcattgacctggagtatgtgcccaggaagaacaatggagctgtggtggagggggaggtggccggcccccggcgcttcaacatgaagatgatctag

SEQ ID NO: 309231 - DNA, 2368 bp, Artificial Sequence
  derived and/or modified sequence
aggtggatacatttgcaaagtggaatcctccaggtgcctttaaggagtttacagtctagtaggtatgaatccagccatcctcagcagtggcaccgatatcttcaaaagtgtcgtttgtctggctctctgccttctggatgggaagcctaccctgatgtctctcttcaaatctgataaatcatgaggaacctataacccttttggccacatgcaaaaaagcaagacccgtgaccaaggtgtagactaagaagtggagtcatgcttcacacggccatatcatgctggcagccattcctgggtctggctgtggtgttaatcttcatgggatccaccattggctgccccgctcgctgtgagtgctctgcccagaacaaatctgttagctgtcacagaaggcgattgatcgccatcccagagggcattcccatcgaaaccaaaatcttggacctcagtaaaaacaggctaaaaagcgtcaaccctgaagaattcatatcatatcctctgctggaagagatagacttgagtgacaacatcattgccaatgtggaaccaggagcattcaacaatctctttaacctgcgttccctccgcctaaaaggcaatcgtctaaagctggtccctttgggagtattcacggggctgtccaatctcactaagcttgacattagtgagaataagattgtcattttactagactacatgttccaagatctacataacctgaagtctctagaagtgggggacaatgatttggtttatatatcacacagggcattcagtgggcttcttagcttggagcagctcaccctggagaaatgcaacttaacagcagtaccaacagaagccctctcccacctccgcagcctcatcagcctgcatctgaagcatctcaatatcaacaatatgcctgtgtatgcctttaaaagattgttccacctgaaacacctagagattgactattggcctttactggatatgatgcctgccaatagcctctacggtctcaacctcacatccctttcagtcaccaacaccaatctgtctactgtacccttccttgcctttaaacacctggtatacctgactcaccttaacctctcctacaatcccatcagcactattgaagcaggcatgttctctgacctgatccgccttcaggagcttcatatagtgggggcccagcttcgcaccattgagcctcactccttccaagggctccgcttcctacgcgtgctcaatgtgtctcagaacctgctggaaactttggaagagaatgtcttctcctcccctagggctctggaggtcttgagcattaacaacaaccctctggcctgtgactgccgccttctctggatcttgcagcgacagcccaccctgcagtttggtggccagcaacctatgtgtgctggcccagacaccatccgtgagaggtctttcaaggatttccatagcactgccctttctttttactttacctgcaaaaaacccaaaatccgtgaaaagaagttgcagcatctgctagtagatgaagggcagacagtccagctagaatgcagtgcagatggagacccgcagcctgtgatttcctgggtgacaccccgaaggcgtttcatcaccaccaagtccaatggaagagccaccgtgttgggtgatggcaccttggaaatccgctttgcccaggatcaagacagcgggatgtatgtttgcatcgctagcaatgctgctgggaatgataccttcacagcctccttaactgtgaaaggattcgcttcagatcgttttctttatgcgaacaggacccctatgtacatgaccgactccaatgacaccatttccaatggcaccaatgccaatactttttccctggaccttaaaacaatactggtgtctacagctatgggctgcttcacattcctgggagtggttttattttgttttcttctcctttttgtgtggagccgagggaaaggcaagcacaaaaacagcattgaccttgagtatgtgcccagaaaaaacaatggtgctgttgtggaaggggaggtagctggacccaggaggttcaacatgaaaatgatttgaaggcccacccctcacattactgtctctttgtcaatgtgggtaatcagtaagacagtatggcacagtaaattactagattaagaggcagccatgtgcagctgcccctgtatcaaaagcagggtctatggaagcaggaggacttccaatggagactctccatcgaaaggcaggcaggcaggcatgtgtcagagcccttcacacagtgggatactaagtgtttgcgttgcaaatattggcgttctggggatctcagtaatgaacctgaatatttggctcacactcacggaca

SEQ ID NO: 309232 - DNA, 3048 bp, Artificial Sequence
  derived and/or modified sequence
tgtaggaattgatgagtgccatcagaaagctgtatcatgagctgcctgcacttctaaagtgtccagtggatttttaatcacatgagcctggaaatagggttatgagaagaagctcagagcagagcaccgaaagtggccactaccagcatgaagagcccaacaattcaaactggtgaagtgagaaaaacagaatgcagctttcaaggttggttcgtttcaagcagttggcttgtgggactctgagagatgctgctgcccatgacatgcgggaattatcatgatcaactacccagcttggatttcacccagtggccaagagctttgtgtgggagacggcaagggttggatttttcaaaagagtaaaccaggataaatcatgaggaacctataacccttttggccacatgcaaaaaagcaagacccgtgaccaaggtgtagactaagaagtggagtcatgcttcacacggccatatcatgctggcagccattcctgggtctggctgtggtgttaatcttcatgggatccaccattggctgccccgctcgctgtgagtgctctgcccagaacaaatctgttagctgtcacagaaggcgattgatcgccatcccagagggcattcccatcgaaaccaaaatcttggacctcagtaaaaacaggctaaaaagcgtcaaccctgaagaattcatatcatatcctctgctggaagagatagacttgagtgacaacatcattgccaatgtggaaccaggagcattcaacaatctctttaacctgcgttccctccgcctaaaaggcaatcgtctaaagctggtccctttgggagtattcacggggctgtccaatctcactaagcttgacattagtgagaataagattgtcattttactagactacatgttccaagatctacataacctgaagtctctagaagtgggggacaatgatttggtttatatatcacacagggcattcagtgggcttcttagcttggagcagctcaccctggagaaatgcaacttaacagcagtaccaacagaagccctctcccacctccgcagcctcatcagcctgcatctgaagcatctcaatatcaacaatatgcctgtgtatgcctttaaaagattgttccacctgaaacacctagagattgactattggcctttactggatatgatgcctgccaatagcctctacggtctcaacctcacatccctttcagtcaccaacaccaatctgtctactgtacccttccttgcctttaaacacctggtatacctgactcaccttaacctctcctacaatcccatcagcactattgaagcaggcatgttctctgacctgatccgccttcaggagcttcatatagtgggggcccagcttcgcaccattgagcctcactccttccaagggctccgcttcctacgcgtgctcaatgtgtctcagaacctgctggaaactttggaagagaatgtcttctcctcccctagggctctggaggtcttgagcattaacaacaaccctctggcctgtgactgccgccttctctggatcttgcagcgacagcccaccctgcagtttggtggccagcaacctatgtgtgctggcccagacaccatccgtgagaggtctttcaaggatttccatagcactgccctttctttttactttacctgcaaaaaacccaaaatccgtgaaaagaagttgcagcatctgctagtagatgaagggcagacagtccagctagaatgcagtgcagatggagacccgcagcctgtgatttcctgggtgacaccccgaaggcgtttcatcaccaccaagtccaatggaagagccaccgtgttgggtgatggcaccttggaaatccgctttgcccaggatcaagacagcgggatgtatgtttgcatcgctagcaatgctgctgggaatgataccttcacagcctccttaactgtgaaaggattcgcttcagatcgttttctttatgcgaacaggacccctatgtacatgaccgactccaatgacaccatttccaatggcaccaatgccaatactttttccctggaccttaaaacaatactggtgtctacagctatgggctgcttcacattcctgggagtggttttattttgttttcttctcctttttgtgtggagccgagggaaaggcaagcacaaaaacagcattgaccttgagtatgtgcccagaaaaaacaatggtgctgttgtggaaggggaggtagctggacccaggaggttcaacatgaaaatgatttgaaggcccacccctcacattactgtctctttgtcaatgtgggtaatcagtaagacagtatggcacagtaaattactagattaagaggcagccatgtgcagctgcccctgtatcaaaagcagggtctatggaagcaggaggacttccaatggagactctccatcgaaaggcaggcaggcaggcatgtgtcagagcccttcacacagtgggatactaagtgtttgcgttgcaaatattggcgttctggggatctcagtaatgaacctgaatatttggctcacactcacggacaattattcagcattttctaccactgcaaaaaacaaaagaaaaaataaaaaagaacaacctacagtgtaggatttacatattaaaaagacacatttgtctaaaacatactctacagaaaaatttgtatctatgattatcatttgttaaagccttgcatcataccatattgttggttcagtaccacaaagagatcaatatattcttttcttccttttttgaaacatatatgctgtacatgttttaaagcaatatgaatgagaggttgtgcttttagttactcaccactatagatccaagtgtgatttcaccttccgttacctacagatgaccctgagactagatccctggagttatgggcggagatattttgagagatgtgtttgtctgatgtaggatgccaagaaacaggacccaaggcaaaactgctcaactctgttaacttctgttactataaataaaggcatgtgcctagttttgatacagaa

SEQ ID NO: 309233 - DNA, 1821 bp, Artificial Sequence
  derived and/or modified sequence
atgctgcacaccgccatcagctgctggcagcccttcctgggcctggcagtggtgctgatttttatgggctcaaccatagggtgtccagcacgatgcgaatgcagcgcgcagaataagtccgttagttgccaccgccgaagactgattgccattcccgaagggatcccaatcgagactaagatcctcgacctgagcaaaaacagactcaagagcgtcaatcctgaggagtttatcagttaccctctgctggaagagatcgacttatctgacaatatcattgctaacgtggaaccaggagcctttaacaacctgtttaaccttcggagcctacgcttgaagggtaaccgtctgaaacttgttccgcttggcgtattcacgggactatctaatctgacgaagctggatattagcgagaacaagattgtaattctgctcgattacatgttccaggacctgcacaacctgaagtctcttgaagtcggcgacaatgacctggtatatattagccaccgcgcctttagcggcctgctttccctggaacaactgacactcgagaagtgcaacctcactgctgtaccaacagaggccctcagccacttacgctcacttatttctctgcatctcaagcacctgaatatcaacaacatgcctgtgtacgcctttaaaaggctgttccatcttaaacatcttgaaatagactactggcccttgcttgacatgatgcctgctaacagcttatatggtctcaacctcacctctctctctgtgaccaacacaaacttatctacagttccattcctggccttcaagcatctggtgtacctgacccatctcaatctgtcatataaccctatttccactattgaagccggaatgttctctgatcttatccggttgcaggaactacacattgtcggagcgcaactgcgcaccatagagccacattcatttcaagggctgcgctttttgcgcgtcctgaacgtgtctcagaatctccttgaaactctggaagaaaatgtgttctctagtcctagggcccttgaggtcttgagcatcaataacaaccctctggcttgtgactgtcgactgctttggatactacaaaggcagccaacactgcagtttgggggacagcagcctatgtgtgccggccccgatacaatccgtgaacggtccttcaaagatttccattccaccgcgctctctttctatttcacatgtaaaaaacctaagataagagaaaagaagctgcagcacctgctggtggacgaaggccaaacagtgcaactcgagtgcagcgcagacggggatccacagcctgtaataagttgggtgacgcctcggcggcggttcattaccaccaagtccaatggccgggcaaccgtgcttggcgatggcacattggaaattagattcgcccaggatcaggattcagggatgtatgtctgtattgcgtcaaacgcagcggggaatgacacattcacagcatccctcacagtaaagggcttcgcctctgatagatttctttacgccaacagaactccgatgtacatgacggactccaatgatacgatcagtaatgggactaatgccaacaccttcagcctggatttgaagacaattctggtgtcaacagcaatggggtgttttactttcctgggggtggtgcttttctgctttctgctcctgtttgtgtggagtagaggaaagggtaaacataaaaattccatcgacctcgagtacgtgcctaggaagaacaacggtgcggtcgtcgagggcgaggtagccggcccccgccggtttaatatgaaaatgatttag

SEQ ID NO: 309234 - DNA, 1821 bp, Artificial Sequence
  derived and/or modified sequence
atgctgcacaccgccatcagctgctggcagcccttcctgggcctggccgtggtgttaatctttatgggcagcaccatcggatgtcctgccagatgcgaatgtagcgcgcagaataagtccgtgtcttgtcatcgccgtagactaatcgcaatcccggaagggattccaatagaaactaaaatactggacctgagtaagaatcggttaaaaagcgtcaacccggaagaattcatcagctaccccttgctggaagaaatcgatttaagcgacaacattatcgctaacgtggagccgggggcattcaacaacctctttaacttgaggtcccttaggttaaagggcaatcggctaaagctcgtccctttaggcgtgttcacagggctgtccaacctaaccaagcttgatatttctgagaacaaaatcgtgattctgctggactacatgttccaagacctccacaatctcaagtcccttgaggtcggggacaacgatctggtttacataagtcacagggctttctctggcctgctgtcccttgagcagctgacattagaaaagtgtaatcttacggccgtgcctactgaggccctaagccatttgcgttcactcataagccttcacttaaaacatctgaatatcaacaatatgcctgtctacgcctttaagcgcctgttccaccttaagcatctggagatcgactactggcctcttttagacatgatgccagcaaactctctgtacggattaaacctgacatcactgagtgtcaccaacaccaacctttcaacagtgccctttctcgcatttaagcacctggtatacctcacccaccttaacctctcctacaaccctatttcaactatcgaggccggcatgttttccgatcttattagactccaggagctacatatagtcggcgctcaattgaggactatcgaacctcattcttttcagggtctacggttcctgagggtgctgaacgtgtcacagaacctgcttgaaacgctggaggagaatgtgttttcaagcccgagagccttggaagttctgtctattaacaacaatcccctggcttgcgactgtcgcctcctttggatcctacagcgccagccaactttgcaatttggtgggcagcagccgatgtgtgccggccccgacacaattcgggaacgcagctttaaagatttccattccacggctctctctttttattttacctgtaaaaaaccaaagattcgagagaagaagttgcaacacttgctggtagacgagggccagactgtgcagctggagtgctctgcagatggtgacccacagcctgttatttcatgggtcacccctcggagacgtttcatcacaactaagtccaacggtcgcgctacagtcttgggggatggaactttggagattcgcttcgctcaggatcaggatagtggaatgtacgtgtgtattgcaagtaatgccgccgggaatgacacttttacagccagcctgacagtgaaggggttcgcctcggatcgctttttatacgccaaccgcaccccaatgtacatgaccgacagcaatgataccatctcaaatggtacgaatgccaacacatttagtctggacctgaagaccattctggtgtctacggccatgggctgctttacctttttaggcgtggttctgttctgctttctcctccttttcgtgtggtcacgcggtaaggggaaacataaaaactcaatcgacctggaatatgtacccaggaaaaacaatggagcagtcgtggaaggcgaagtggctgggccacgtcggttcaacatgaaaatgatctag

SEQ ID NO: 309235 - DNA, 1821 bp, Artificial Sequence
  derived and/or modified sequence
atgctgcacactgctatttcctgctggcagccttttctcgggctcgcggttgtgctgatcttcatgggtagtaccattggatgtccagcgagatgtgagtgcagcgctcagaacaagagcgtgtcatgtcatagacggagactcattgctatacccgaaggtatcccaatagagactaagatcctggacttgtcaaagaacaggctgaaaagcgtaaatcctgaagaattcatctcatatcccctcctggaagagattgacttatctgataatataatcgccaacgtggaacccggagcgtttaataatctattcaatttgcgatctctgcgcttgaaggggaacagacttaagttagtgcccctcggggttttcacagggctgagtaatctcacaaagctggatatttccgagaataaaattgtgatcctgttggactacatgtttcaggatctgcataacctgaaaagtttggaggtgggggacaacgacctggtctatatcagccatcgcgctttttctgggctgcttagcctcgaacagctgaccctggagaaatgtaacttgaccgccgttccgacagaagccctgagccacttgcgatccttgatttcactgcacctaaagcacctgaacatcaacaatatgccggtgtatgcttttaagcgcctgttccatctcaaacacctcgagatagattactggccactactcgacatgatgcccgctaactctttatacggcctgaatctcacctctctgagcgttacgaacacgaacctgtctactgtgccttttttggcgttcaaacaccttgtctatctgacgcatcttaatttatcttacaatcccataagcaccatcgaagctgggatgttttctgacctcattcggttgcaggagctgcacattgttggggcacaactgcggaccatagaacctcattcctttcaaggcctccgcttcctgagggtgctgaacgtgtcccagaacctcttggagacactcgaggagaacgtgttcagcagcccacgagctctggaggtgctgtcaatcaataacaaccctctcgcgtgcgattgcaggctgttgtggattctccagaggcaacctaccctgcaatttggtggtcaacagccaatgtgtgcaggaccagacactataagagaacggtcgttcaaggactttcattctactgccctgagcttctacttcacttgtaagaaacctaagatccgtgagaagaagctgcagcacctgctggtcgacgagggtcaaactgtgcagctcgaatgcagcgccgacggcgacccccagcctgtcattagttgggtgaccccaaggcgtcggtttattacaaccaagtccaatggcagagctacagtgttgggcgacggcactttggaaatcagatttgcgcaggaccaggacagcgggatgtacgtctgcattgcctcgaacgccgctggcaatgatacgttcacagctagtctgacagtcaaaggatttgcaagcgacagatttctctacgccaaccggacgccaatgtacatgactgattcgaatgatacaattagcaacggaacaaacgctaacacctttagcctggatttaaaaaccatcctggtttctaccgccatggggtgcttcacattcctgggggtggtcctgttttgcttcctgctgttgtttgtttggtccagagggaaagggaagcataaaaatagcatcgatctggaatacgtaccgcgtaagaacaacggtgccgtggtggaaggggaagtggcgggacccaggagattcaacatgaaaatgatttag

SEQ ID NO: 309236 - DNA, 1821 bp, Artificial Sequence
  derived and/or modified sequence
atgctccatactgccatttcgtgctggcaaccttttttaggacttgcagtagttttgatttttatggggtcaaccattggttgccccgctaggtgtgagtgcagcgctcagaacaaaagcgtttcctgtcacagacgcagactgatcgcaattcctgagggtatacccatagagacgaagatcttggatctctccaaaaaccgtttaaaatctgtgaaccccgaagaatttatcagctaccctttgttggaggagattgacttgtcagacaacataattgctaacgtggaacctggcgcatttaacaatctcttcaacctgagaagtcttcggctgaaaggtaaccggttaaaactcgtgccgcttggcgtgttcaccgggctgagcaatctcacgaagctggacataagcgagaataagatagtgatcctcctggactatatgttccaggacttgcacaacctcaagagtcttgaagtaggcgacaatgatctggtatatatctcacatcgagcgttttccggcttgctttccttggagcagctgactcttgagaaatgcaatctgactgccgtgccaactgaagccctgagccatctgaggagtctcatcagccttcacctgaaacacctgaatatcaacaacatgcccgtctatgcttttaaaaggctgttccacctcaagcatcttgagattgactactggcctctgctagatatgatgcccgcaaattccctgtacgggctgaacctcacttctctctcagtgacgaataccaatctgtccaccgtccctttcttggccttcaagcatttggtttatcttacacatctgaatttatcttacaaccccatttctactatcgaggccggtatgttcagtgaccttataaggctgcaggaactccatattgttggtgcccagcttcgcaccatcgagccccacagctttcagggactacggttcctccgtgtgttaaacgtgtcacagaacttattagagacactcgaggagaatgtcttttcgtctccccgagccctggaggtactgtcaatcaataataatccactggcgtgcgactgtcggctgctttggatcctgcagagacagccaaccctgcagtttggagggcagcaacctatgtgcgcaggcccagacaccatccgggaaaggtcatttaaggatttccactcgaccgcacttagcttctactttacatgtaagaagccgaagattagagaaaaaaaactccagcacctgctcgtcgacgaggggcaaacagttcagctggaatgtagtgccgatggcgatccccagcctgtgatttcttgggtaacacctcgcaggcgcttcattaccacaaagtcgaatgggagagctacagtcctgggagacgggacactggagattagatttgcccaggatcaggattccggcatgtacgtgtgcatcgcaagcaacgcggcaggcaacgacacgtttacggcctccctcacagtcaagggattcgcgtccgatcggtttctatatgccaaccgcacacccatgtacatgacagactccaacgatacaatctccaacggaaccaacgccaacacattctctttagacctgaagacaattctggtttccaccgctatgggatgtttcacatttctgggggtcgtgctcttttgcttcctgcttctgtttgtgtggagccggggaaaagggaaacacaaaaattccatagacctggaatatgtccccagaaagaacaatggggctgtcgttgaaggagaggtggccggtcccagaaggttcaacatgaaaatgatttag

SEQ ID NO: 309237 - DNA, 1821 bp, Artificial Sequence
  derived and/or modified sequence
atgctgcacaccgccatcagctgctggcagcccttcctgggcctggccgtggtgctgatcttcatgggcagcaccatcggctgccccgccagatgcgagtgcagcgcccagaacaagagcgtgagctgccacagaagaagactgatcgccatccccgagggcatccccatcgagaccaagatcctggacctgagcaagaacagactgaagagcgtgaaccccgaggagttcatcagctaccccctgctggaggagatcgacctgagcgacaacatcatcgccaacgtggagcccggcgccttcaacaacctgttcaacctgagaagcctgagactgaagggcaacagactgaagctggtgcccctgggcgtgttcaccggcctgagcaacctgaccaagctggacatcagcgagaacaagatcgtgatcctgctggactacatgttccaggacctgcacaacctgaagagcctggaggtgggcgacaacgacctggtgtacatcagccacagagccttcagcggcctgctgagcctggagcagctgaccctggagaagtgcaacctgaccgccgtgcccaccgaggccctgagccacctgagaagcctgatcagcctgcacctgaagcacctgaacatcaacaacatgcccgtgtacgccttcaagagactgttccacctgaagcacctggagatcgactactggcccctgctggacatgatgcccgccaacagcctgtacggcctgaacctgaccagcctgagcgtgaccaacaccaacctgagcaccgtgcccttcctggccttcaagcacctggtgtacctgacccacctgaacctgagctacaaccccatcagcaccatcgaggccggcatgttcagcgacctgatcagactgcaggagctgcacatcgtgggcgcccagctgagaaccatcgagccccacagcttccagggcctgagattcctgagagtgctgaacgtgagccagaacctgctggagaccctggaggagaacgtgttcagcagccccagagccctggaggtgctgagcatcaacaacaaccccctggcctgcgactgcagactgctgtggatcctgcagagacagcccaccctgcagttcggcggccagcagcccatgtgcgccggccccgacaccatcagagagagaagcttcaaggacttccacagcaccgccctgagcttctacttcacctgcaagaagcccaagatcagagagaagaagctgcagcacctgctggtggacgagggccagaccgtgcagctggagtgcagcgccgacggcgacccccagcccgtgatcagctgggtgacccccagaagaagattcatcaccaccaagagcaacggcagagccaccgtgctgggcgacggcaccctggagatcagattcgcccaggaccaggacagcggcatgtacgtgtgcatcgccagcaacgccgccggcaacgacaccttcaccgccagcctgaccgtgaagggcttcgccagcgacagattcctgtacgccaacagaacccccatgtacatgaccgacagcaacgacaccatcagcaacggcaccaacgccaacaccttcagcctggacctgaagaccatcctggtgagcaccgccatgggctgcttcaccttcctgggcgtggtgctgttctgcttcctgctgctgttcgtgtggagcagaggcaagggcaagcacaagaacagcatcgacctggagtacgtgcccagaaagaacaacggcgccgtggtggagggcgaggtggccggccccagaagattcaacatgaagatgatctag

SEQ ID NO: 309238 - DNA, 585 bp, Artificial Sequence
  derived and/or modified sequence
atggccctgctgggcagcagagccgagctggaggccgacgaggacgtgttcgaggacgccctggagaccatcagcatcagcagccacagcgacatggccaccagcagcctgcacttcgccagctgcgacacccagcaggcccccagacagagaggcgccagcaccgtgagcagcagcagcagcaccaaggtggacctgaagagcggcctggaggagtgcgccgtggccctgaacctgttcctgagcaacaagttcaccgacgccctggagctgctgagaccctgggccaaggagagcatgtaccacgccctgggctacagcaccatcgtggtgctgcaggccgtgctgaccttcgagcagcaggacatccagaacggcatcagcgccatgaaggacgccctgcagacctgccagaagtacagaaagaagtacaccgtggtggagagcttcagcagcctgctgagcagaggcagcctggagcagctgagcgaggaggagatgcacgccgagatctgctacgccgagtgcctgctgcagaaggccgccctgaccttcgtgcagagaatgagcttctaccccgcctag

SEQ ID NO: 309239 - DNA, 585 bp, Artificial Sequence
  derived and/or modified sequence
atggctttacttggatctcgtgcagagctggaggctgatgaagatgtgtttgaagacgcactcgaaactatttcgatctcttcgcattctgatatggcaaccagctcattacactttgcctcttgtgacacccagcaagctccccgtcagcggggggcttccaccgtttcatcatcatcttccactaaagtcgacctgaagagtggcctggaagagtgcgctgtggctttgaacctgttcctaagtaacaagtttacagatgcgctcgaactgttaagaccatgggccaaagaatctatgtaccatgctcttggatattcaaccattgtggtgttacaggccgtgctgacatttgagcaacaggatatacaaaatggtatctctgcaatgaaggatgcattgcaaacgtgtcaaaaatatcgcaagaagtataccgtggtcgaaagtttcagctcattgctgagcagaggaagcctggaacagttatccgaggaggaaatgcatgccgaaatctgttacgctgaatgcctgctccagaaggctgccttaactttcgttcaacgaatgtctttttaccctgcttag

SEQ ID NO: 309240 - DNA, 585 bp, Artificial Sequence
  derived and/or modified sequence
atggccctgctgggcagcagagctgagctggaggctgatgaagatgtgtttgaagatgccctggagaccatcagcatcagcagccacagcgacatggccaccagcagcctgcactttgccagctgtgacacccagcaggccccccggcagagaggagccagcacagtgagcagcagcagcagcaccaaggtggacctgaagagcggcctggaggagtgtgctgtggccctgaacctcttcctgagcaacaagttcacagatgccctggagctgctgcggccctgggccaaggagagcatgtaccacgccctgggctacagcaccatcgtggtgctgcaggccgtgctgacctttgagcagcaggacatccagaatggcatcagcgccatgaaggatgccctgcagacctgccagaagtacaggaagaagtacacagtggtggagagcttcagcagcctgctgagccggggcagcctggagcagctgtctgaggaggagatgcatgctgagatctgctacgcagaatgtctgctgcagaaggccgccctgacctttgtgcagaggatgtccttctacccagcctag

SEQ ID NO: 309241 - DNA, 585 bp, Artificial Sequence
  derived and/or modified sequence
atggccctgctgggcagccgggccgagctggaggccgacgaggacgtgtttgaggacgcgctggagaccatcagcatatcaagtcattccgatatggccactagttccctccacttcgcgtcgtgcgacacccagcaggccccacggcagcggggggcgtccactgtcagtagttcctcctccaccaaagtggacttaaagagcgggctggaagagtgtgcggttgctttaaacctgtttctgagcaacaaatttactgacgctcttgagctgctgcgaccctgggccaaagaaagcatgtatcacgcactgggatattcaaccatagtggtattgcaagcagttcttacctttgagcagcaagacatacagaacggcatttcagccatgaaggacgcattgcaaacgtgccagaagtataggaagaagtacaccgtcgtggagagctttagcagcctactaagcaggggaagcttagagcagttgagtgaggaggaaatgcacgcagaaatttgctacgctgaatgcctgctgcagaaagcagctctgacatttgtgcaaaggatgtctttttatccagcttag

SEQ ID NO: 309242 - DNA, 585 bp, Artificial Sequence
  derived and/or modified sequence
atggccttactggggagcagagcagagctcgaagccgacgaagacgtcttcgaggatgcactcgagacaatcagtatctcctcacattccgacatggcgacttcttccttgcattttgccagttgcgacactcagcaagctccacggcaacgcggagccagcaccgtatcttcgagctccagcacaaaggtagacctcaaaagcgggctggaggagtgcgcagtggcgttgaatctgtttctgagtaataagtttactgatgctttggagctcttgagaccatgggctaaagagtcgatgtaccacgcgctcgggtactccacaattgtcgtattgcaagcggtgttaactttcgagcagcaagacatccaaaatggaataagtgctatgaaagacgctctccagacatgtcagaaatatcgcaaaaagtacacagttgtcgaatcctttagctctcttctaagcaggggcagcctggagcagctgtcagaggaggagatgcatgcggagatttgctacgctgagtgcctgttacagaaggccgctcttaccttcgttcagagaatgtcattctaccccgcatag

SEQ ID NO: 309243 - protein, 2179 aa, Artificial Sequence
  derived and/or modified sequence
MNSLSWGAANAVLLLLLLAWASPTFISINRGVRVMKGHSAFLSGDDLKFAIPKEKDACKVEVVMNEPITQRVGKLTPQVFDCHFLPNEVKYVHNGCPILDEDTVKLRLYRFTERDTFIETFILWVYLLEPDCNIIHMSNNVLEVPEFNGLSQAIDKNLLRFDYDRMASLECTVSLDTARTRLPAHGQMVLGEPRPEEPRGDQPHSFFPESQLRAKLKCPGGSCTPGLKKIGSLKVSCEEFLLMGLRYQHLDPPSPNIDYISIQLDLTDTRSKIVYKSESAWLPVYIRAGIPNQIPKAAFMAVFILEVDQFILTSLTTSVLDCEEDETPKPLLVFNITKAPLQGYVTHLLDHTRPISSFTWKDLSDMQIAYQPPNSSHSERRHDEVELEVYDFFFERSAPMTVHISIRTADTNAPRVSWNTGLSLLEGQSRAITWEQFQVVDNDDIGAVRLVTVGGLQHGWLTLRGGKGFLFTVADLQAGVVRYHHDDSDSTKDFVVFRIFDGHHSIRHKFPINVLPKDDSPPFLITNVVIELEEGQTILIQGSMLRASDVDASDDYIFFNITKPPQAGEIMKKPGPGLIGYPVHGFLQRDLFNGIIYYRHFGGEIFEDSFQFVLWDSHEPPNLSVPQVATIHITPVDDQLPKEAPGVSRHLVVKETEVAYITKKQLHFIDSESYDRELVYTITTPPFFSFSHRHLDAGKLFMVDSIPKVVKNPTALELRSFTQHAVNYMKVAYMPPMQDIGPHCRDVQFTFSVSNQHGGTLHGICFNITILPVDNQVPEAFTNPLKVTEGGQSIISTEHILISDADTKLDNIDLSLRELPLHGRVELNGFPLNSGGTFSWGDLHTLKVRYQHDGTEVLQDDLLLEVTDGTNSAEFVLHVEVFPVNDEPPVLKADLMPVMNCSEGGEVVITSEYIFATDVDSDNLKLMFVIAREPQHGVVRRAGVTVDQFSQRDVISEAVTYKHTGGEIGLMPCFDTITLVVSDGEAGPFVNGCCYNGPNPSVPLHASFPVYDLNITVYPVDNQPPSIAIGPVFVVDEGCSTALTVNHLSATDPDTAADDLEFVLVSPPQFGYLENILPSVGFEKSNIGISIDSFQWKDMNAFHINYVQSRHLRIEPTADQFTVYVTDGKHHSLEIPFSIIINPTNDEAPDFVVQNITVCEGQMKELDSSIISAVDLDIPQDALLFSITQKPRHGLLIDRGFSKDFSENKQPANPHQKHAPVHSFSMELLKTGMRLTYMHDDSESLADDFTIQLSDGKHKILKTISVEVIPVNDEKPMLSKKAEIAMNMGETRIISSAILSAIDEDSPREKIYYVFERLPQNGQLQLKIGRDWVPLSPGMKCTQEEVDLNLLRYTHTGAMDSQNQDSFTFYLWDGNNRSPALDCQITIKDMEKGDIVILTKPLVVSKGDRGFLTTTTLLAVDGTDKPEELLYVITSPPRYGQIEYVHYPGVPITNFSQMDVVGQTVCYVHKSKVTVSSDRFRFIISNGLRTEHGVFEITLETVDRALPVVTRNKGLRLAQGAVGLLSPDLLQLTDPDTPAENLTFLLVQLPQHGQLYLWGTGLLQHNFTQQDVDSKNVAYRHSGGDSQTDCFTFMATDGTNQGFIVNGRVWEEPVLFTIQVDQLDKTAPRITLLHSPSQVGLLKNGCYGIYITSRVLKASDPDTEDDQIIFKILQGPKHGHLENTTTGEFIHEKFSQKDLNSKTILYIINPSLEVNSDTVEFQIMDPTGNSATPQILELKWSHIEWSQTEYEVCENVGLLPLEIIRRGYSMDSAFVGIKVNQVSAAVGKDFTVIPSKLIQFDPGMSTKMWNIAITYDGLEEDDEVFEVILNSPVNAVLGTKTKAAVKILDSKGGQCHPSYSSNQSKHSTWEKGIWHLLPPGSSSSTTSGSFHLERRPLPSSMQLAVIRGDTLRGFDSTDLSQRKLRTRGNGKTVRPSSVYRNGTDIIYNYHGIVSLKLEDDSFPTHKRKAKVSIISQPQKTIKVAELPQADKVESTTDSHFPRQDQLPSFPKNCTLELKGLFHFEEGIQKLYQCNGIAWKAWSPQTKDVEDKSCPAGWHQHSGYCHILITEQKGTWNAAAQACREQYLGNLVTVFSRQHMRWLWDIGGRKSFWIGLNDQVHAGHWEWIGGEPVAFTNGRRGPSQRSKLGKSCVLVQRQGKWQTKDCRRAKPHNYVCSRKL

SEQ ID NO: 309244 - protein, 2180 aa, Artificial Sequence
  derived and/or modified sequence
MNSLSWGAANAVLLLLLLAWASPTFISINRGVRVMKGHSAFLSGDDLKFAIPKEKDACKVEVVMNEPITQRVGKLTPQVFDCHFLPNEVKYVHNGCPILDEDTVKLRLYRFTERDTFIETFILWVYLLEPDCNIIHMSNNVLEVPEFNGLSQAIDKNLLRFDYDRMASLECTVSLDTARTRLPAHGQMVLGEPRPEEPRGDQPHSFFPESQLRAKLKCPGGSCTPGLKKIGSLKVSCEEFLLMGLRYQHLDPPSPNIDYISIQLDLTDTRSKIVYKKSESAWLPVYIRAGIPNQIPKAAFMAVFILEVDQFILTSLTTSVLDCEEDETPKPLLVFNITKAPLQGYVTHLLDHTRPISSFTWKDLSDMQIAYQPPNSSHSERRHDEVELEVYDFFFERSAPMTVHISIRTADTNAPRVSWNTGLSLLEGQSRAITWEQFQVVDNDDIGAVRLVTVGGLQHGWLTLRGGKGFLFTVADLQAGVVRYHHDDSDSTKDFVVFRIFDGHHSIRHKFPINVLPKDDSPPFLITNVVIELEEGQTILIQGSMLRASDVDASDDYIFFNITKPPQAGEIMKKPGPGLIGYPVHGFLQRDLFNGIIYYRHFGGEIFEDSFQFVLWDSHEPPNLSVPQVATIHITPVDDQLPKEAPGVSRHLVVKETEVAYITKKQLHFIDSESYDRELVYTITTPPFFSFSHRHLDAGKLFMVDSIPKVVKNPTALELRSFTQHAVNYMKVAYMPPMQDIGPHCRDVQFTFSVSNQHGGTLHGICFNITILPVDNQVPEAFTNPLKVTEGGQSIISTEHILISDADTKLDNIDLSLRELPLHGRVELNGFPLNSGGTFSWGDLHTLKVRYQHDGTEVLQDDLLLEVTDGTNSAEFVLHVEVFPVNDEPPVLKADLMPVMNCSEGGEVVITSEYIFATDVDSDNLKLMFVIAREPQHGVVRRAGVTVDQFSQRDVISEAVTYKHTGGEIGLMPCFDTITLVVSDGEAGPFVNGCCYNGPNPSVPLHASFPVYDLNITVYPVDNQPPSIAIGPVFVVDEGCSTALTVNHLSATDPDTAADDLEFVLVSPPQFGYLENILPSVGFEKSNIGISIDSFQWKDMNAFHINYVQSRHLRIEPTADQFTVYVTDGKHHSLEIPFSIIINPTNDEAPDFVVQNITVCEGQMKELDSSIISAVDLDIPQDALLFSITQKPRHGLLIDRGFSKDFSENKQPANPHQKHAPVHSFSMELLKTGMRLTYMHDDSESLADDFTIQLSDGKHKILKTISVEVIPVNDEKPMLSKKAEIAMNMGETRIISSAILSAIDEDSPREKIYYVFERLPQNGQLQLKIGRDWVPLSPGMKCTQEEVDLNLLRYTHTGAMDSQNQDSFTFYLWDGNNRSPALDCQITIKDMEKGDIVILTKPLVVSKGDRGFLTTTTLLAVDGTDKPEELLYVITSPPRYGQIEYVHYPGVPITNFSQMDVVGQTVCYVHKSKVTVSSDRFRFIISNGLRTEHGVFEITLETVDRALPVVTRNKGLRLAQGAVGLLSPDLLQLTDPDTPAENLTFLLVQLPQHGQLYLWGTGLLQHNFTQQDVDSKNVAYRHSGGDSQTDCFTFMATDGTNQGFIVNGRVWEEPVLFTIQVDQLDKTAPRITLLHSPSQVGLLKNGCYGIYITSRVLKASDPDTEDDQIIFKILQGPKHGHLENTTTGEFIHEKFSQKDLNSKTILYIINPSLEVNSDTVEFQIMDPTGNSATPQILELKWSHIEWSQTEYEVCENVGLLPLEIIRRGYSMDSAFVGIKVNQVSAAVGKDFTVIPSKLIQFDPGMSTKMWNIAITYDGLEEDDEVFEVILNSPVNAVLGTKTKAAVKILDSKGGQCHPSYSSNQSKHSTWEKGIWHLLPPGSSSSTTSGSFHLERRPLPSSMQLAVIRGDTLRGFDSTDLSQRKLRTRGNGKTVRPSSVYRNGTDIIYNYHGIVSLKLEDDSFPTHKRKAKVSIISQPQKTIKVAELPQADKVESTTDSHFPRQDQLPSFPKNCTLELKGLFHFEEGIQKLYQCNGIAWKAWSPQTKDVEDKSCPAGWHQHSGYCHILITEQKGTWNAAAQACREQYLGNLVTVFSRQHMRWLWDIGGRKSFWIGLNDQVHAGHWEWIGGEPVAFTNGRRGPSQRSKLGKSCVLVQRQGKWQTKDCRRAKPHNYVCSRKL

SEQ ID NO: 309245 - DNA, 7324 bp, Artificial Sequence
  derived and/or modified sequence
ttagtacaaaactagtagtgagaaaggaagctgggaagagactgggaagaggcaaccgacctcattaacaaaagctcagttttgtccctgcggacccaaccagcagaaggcacggggctagcggtggctgtccgccagggaggtcgggctctgtgtaaacagtagaaggcatctttatcatgcccttctcacagggagtcctgaggcttggcgctcaggaagtttgcaaagctgcagcagctgccttggagaagaccagcaaagaaagtggagtgtgtatgtgaacttcaattctgtattttctgtgaggtgggttaatggatttttagtaaaaagaaatctcaaacacagctgacctgaaagactggaatttcagctctcttccttcccggggttctttttcctcccccttcctctcaaagccctttaaaccagattgctgtgtcagtgactcttatcctgcccgccagttccaagggtttctaactttttgtcttggaaaggaaaaccactacctgattagaaaagcacttgggaagcccattaatcttgccggcgttgtcaggagtgatcagcgagttttattaaaagccctgggattgcctgaaaggcccccttgtctgactttgaaatgaaaggggcatgttaagatctcggggcacattgtcaggacccctcaccctgccccttggactatgagctgaccctccaggaggaagcacagaagccctcctttgttaaagggatttcgccggtggacagagaagagttgggccctgtcagcatgaactctctgagttggggggctgcgaatgccgtgctgctgctgctcctcctggcctgggccagccccaccttcatcagcatcaaccgcggggtgagggtgatgaagggccactctgccttcctgtcaggagatgacctgaagtttgccatccctaaagagaaagatgcctgcaaagtggaagttgtgatgaatgagccaataacccagagggttgggaaactcactccacaggtctttgactgccatttccttcccaacgaagtcaagtatgttcacaatggttgtccaattcttgatgaagacacagtgaagctcagactttacagatttactgaaagagataccttcatagaaacttttatcctgtgggtctatctcctggaaccagactgtaacatcatccatatgagtaacaatgtgctggaggtgcctgaattcaatggcttgtcccaagcgattgataaaaatctgctcagattcgattatgataggatggctagcctggaatgtaccgtcagcctggacactgcgagaactcggctgccagcccatggccagatggttctcggggagcctcgaccagaagaacctcgtggagatcagccacacagttttttcccagagtcccaactgagagcaaaactgaagtgtccaggtgggagctgtaccccaggattaaagaaaataggaagcctcaaagtgagctgtgaggagttcctgctgatgggccttcgttatcagcatctggatcccccttcacccaacattgattatatctccatccaactggacctcacagataccaggagcaaaattgtgtacaagtcagagagtgcgtggctgcctgtctatatcagagctggaattccgaatcagattccaaaggctgcattcatggccgtgtttattctggaagtggatcagttcatcctgacctccttgactacatcagttctggactgtgaagaagatgagacccctaaacccttgctggtgttcaacattactaaagccccgctccagggctatgtgactcacctgttggatcacaccagaccaatctcctcattcacctggaaagatctcagtgacatgcagatcgcctatcagccaccaaacagcagccattctgagaggagacatgatgaggtagaattggaggtatacgacttcttctttgaaaggagtgcacctatgacagtccacatctccatcagaacagcagatacaaatgccccccgtgtatcctggaatacaggtctgagtctccttgaggggcagtctcgagccatcacttgggaacagtttcaggttgtcgacaatgacgacattggtgctgtccggctagtcaccgttggtggcctgcagcatggatggctgactttaagaggggggaaagggtttctcttcaccgtggctgacctccaggctggagttgttcgctatcatcatgatgacagcgactccaccaaagacttcgtggtcttccggatatttgatggccatcacagcatccgtcacaaattccccatcaacgtcttgcccaaagatgatagtcccccgttcctcataaccaatgttgtgattgaactggaggaggggcagaccatcctgatccagggatccatgctgcgagcttcagatgtggacgccagtgatgactacatcttcttcaatatcacaaagcctccacaggctggggagatcatgaagaagccagggccaggactgataggctatcctgtccatggcttccttcagagggatttgtttaatggaatcatttattatcgtcattttggtggagaaatctttgaagattcttttcaatttgtcctgtgggacagccatgaacctccaaatctttcagtgccacaggtggcaacaatccatataactccagtggatgaccagcttccaaaagaggctcctggagtttctcggcatttggttgtcaaggaaactgaggtggcctatataactaagaaacagctacattttatagattcagaatcatatgacagggagctggtctacacaataactactcctccatttttctccttcagccacagacacttggatgctgggaaattatttatggtggacagcataccaaaagtagttaagaatcctacggccctggagctgaggtcattcactcagcatgctgtgaactatatgaaagtggcctacatgccccccatgcaagacattggtccccattgcagagatgtccagttcacattttctgtcagtaaccaacatggcggtactttgcatgggatctgctttaacattacaatcctcccagtggacaatcaagttcctgaggcgttcaccaaccctctgaaagtgactgagggaggtcaaagcatcatcagcacagagcacattctaatttctgatgcagataccaagctggacaatattgacctctccctgcgggaattgcctctgcacggaagggtggagctgaatggatttcctctaaattcagggggcacattttcttggggcgatctccataccttaaaagttaggtatcaacatgatggaactgaagttcttcaggatgacctactcttggaggtcaccgatggcacaaattcagcagaatttgtactacatgttgaggtattccctgtcaacgatgagccaccagtcttaaaggctgacctcatgcctgtcatgaattgctcagagggaggagaggtggtcatcacctctgaatacatttttgctactgatgtggacagcgataacttgaagttgatgtttgtgattgctcgcgaacctcagcatggggtggtgaggagagctggagtcacagtggatcagttctctcagagagatgttatctcagaggccgtgacatacaaacacacaggtggcgagattggcctgatgccttgttttgacaccattacattggtggtttcggatggagaggctggcccttttgtgaatggctgttgctacaatggacccaatccatctgttccacttcatgcgtcctttccagtgtatgatctcaacatcacggtatacccagtagacaaccagccaccttccattgcaataggtcccgtgtttgttgtagatgagggctgctcaacagcccttactgttaaccatttgtccgccactgaccctgacactgcagcagatgacttggaatttgttttggtttctcctcctcagtttggctacctcgaaaatatactcccttctgtgggttttgaaaaaagcaatattggcataagtatagattcatttcagtggaaagacatgaacgcttttcacattaactatgtgcagtccaggcatctgaggatagaaccaactgccgaccagttcacggtgtacgtcacagatgggaagcatcactccttggagataccattttctattataatcaaccccacaaatgatgaagctcctgactttgtagtgcagaatattactgtgtgtgagggtcagatgaaagagctggactcttccatcatcagcgctgtggacctggacattccccaggatgccctgctgttcagcatcactcaaaagccacgccatggcctcctcatcgatagggggtttagcaaagacttctctgagaataagcagccagccaaccctcaccagaaacatgcacctgttcacagcttttccatggaactcctcaagactggaatgaggttgacgtacatgcatgatgactcagagagccttgctgatgattttacaatccaattgtcagatgggaaacataagatacttaaaaccatttcagtagaggtcatcccagttaatgatgaaaaaccaatgctgagcaagaaggctgaaattgcaatgaatatgggtgaaactcgtattatttccagtgctattctttcagccatagatgaagactcacccagggagaagatttactatgtatttgaaaggcttccccaaaatgggcaacttcagcttaagatagggagggactgggttcctctctcccctggcatgaaatgcactcaggaggaagtggatctgaacttgctgagatacacacacaccggggcaatggattcccagaatcaagatagcttcaccttctacctttgggatggcaacaacaggtcccctgctcttgactgtcaaatcaccatcaaggacatggaaaaaggtgatattgtcatccttacaaaaccactcgtggtgtctaaaggtgatagaggtttcttaacaaccaccacgctcctggctgtggacggaacagacaagcctgaggaactgctctatgtcatcacctcccctccgcgatatggccagatcgaatatgttcactatcctggagttcccattacaaacttcagccaaatggatgtagtggggcagacagtttgctatgtacacaagagcaaggtgactgtctccagtgacagattcagattcatcatcagcaatggactgcggaccgagcacggggtgtttgagatcacactggagactgtggacagagccctgcctgtggtaaccaggaacaaggggttgagactggcccaaggggccgtgggcctgctttcccctgacctccttcagctgaccgaccctgatacacctgcggagaacctcaccttcctcttggttcagctcccccagcatggccagctctacctgtgggggacagggctacttcaacacaatttcacccagcaggatgtggacagcaagaatgtggcctatcggcactcaggaggggactcccagactgactgctttactttcatggccacagatgggacaaaccaaggctttattgtgaatgggagagtgtgggaagaacctgttttattcaccattcaggtagaccaattggacaaaacagctcctcgtatcacactcttgcattccccttctcaagtggggctcctgaaaaatggctgctacgggatttacatcacttcccgcgtgttgaaggcatcagaccctgacactgaggacgatcagatcatctttaaaattctacaaggcccaaaacatggacatctggagaacacaacaacaggtgaatttatccatgagaaatttagccaaaaggacttaaacagtaagactattctttacatcataaacccatctttggaagtaaattcagataccgtggaatttcaaatcatggaccccacagggaactcggccactcctcaaattttggaactgaagtggtctcatattgaatggtcacagaccgaatatgaagtctgtgagaatgtgggtttgttgcccttggaaattatcagaaggggatattccatggactcggcctttgtgggtataaaggtcaaccaagtgtcagctgcagttggaaaagatttcaccgtgattccatctaaactgattcagtttgacccaggaatgtcaactaagatgtggaatatagcaattacctatgacggattagaggaagatgatgaggtctttgaagtaattctgaactcccctgtgaatgcagttcttggcacaaagacaaaagctgcagtgaaaattttggactcaaaaggaggacaatgccatccttcatattcctccaaccaaagcaagcacagcacatgggagaagggcatttggcatctgctgcccccagggtcttcctcatccaccacttctggttcctttcatctggaaagaagacctcttccatcttccatgcagctagcagtcatcaggggagacaccctgcggggctttgattctacagatctttctcaaaggaagcttaggacccgtgggaatggcaaaacagttcgtccatcctctgtttatagaaatggaacagacatcatctataattatcatgggatagtttccttgaaactggaggatgacagtttcccaactcacaaaaggaaggccaaagtatccatcattagtcagccacaaaagacaatcaaagtggcagaactgcctcaagcagataaggtggaatccacaactgactcacacttccccagacaggaccagttgccctcatttccaaagaactgcactctggaattaaagggactcttccattttgaagaaggcatccagaagctgtatcagtgcaatgggatcgcctggaaagcctggagtccccaaaccaaggatgtggaagacaaatcctgtccagccgggtggcaccagcactcaggctactgtcacatcttgatcacagagcagaaaggcacctggaatgcggctgcccaagcttgcagggaacaatacctgggcaaccttgtaactgtattctccaggcagcacatgcggtggctctgggacattggtgggagaaagtccttttggataggtttgaacgaccaagtgcatgctggccactgggagtggatcggtggtgaacctgttgccttcaccaatgggagaagagggccctctcaacgctccaagcttggaaagagctgtgttttggttcaaagacaagggaaatggcaaacaaaagactgtaggagagccaaacctcataattatgtgtgttccagaaaactctaa

SEQ ID NO: 309246 - DNA, 10089 bp, Artificial Sequence
  derived and/or modified sequence
acacaaaaagccttacaaatggaagaactaaggtggtacttaaaaacagcaccttaggatctagttccatcctatcttttcccttaaatgccatgacaaaagttaaaacgggccctgtcccttctgaatgctgggcttctcatctaaatttaaataaaaacctttgaagatgggaatgtgttggaagaaaagaagggcagaaaaaaagtgtgttggaagagtctgtggagtcctgaggcttggcgctcaggaagtttgcaaagctgcagcagctgccttggagaagaccagcaaagaaagtggagtgtgtatgtgaacttcaattctgtattttctgtgaggtgggttaatggatttttagtaaaaagaaatctcaaacacagctgacctgaaagactggaatttcagctctcttccttcccggggttctttttcctcccccttcctctcaaagccctttaaaccagattgctgtgtcagtgactcttatcctgcccgccagttccaagggtttctaactttttgtcttggaaaggaaaaccactacctgattagaaaagcacttgggaagcccattaatcttgccggcgttgtcaggagtgatcagcgagttttattaaaagccctgggattgcctgaaaggcccccttgtctgactttgaaatgaaaggggcatgttaagatctcggggcacattgtcaggacccctcaccctgccccttggactatgagctgaccctccaggaggaagcacagaagccctcctttgttaaagggatttcgccggtggacagagaagagttgggccctgtcagcatgaactctctgagttggggggctgcgaatgccgtgctgctgctgctcctcctggcctgggccagccccaccttcatcagcatcaaccgcggggtgagggtgatgaagggccactctgccttcctgtcaggagatgacctgaagtttgccatccctaaagagaaagatgcctgcaaagtggaagttgtgatgaatgagccaataacccagagggttgggaaactcactccacaggtctttgactgccatttccttcccaacgaagtcaagtatgttcacaatggttgtccaattcttgatgaagacacagtgaagctcagactttacagatttactgaaagagataccttcatagaaacttttatcctgtgggtctatctcctggaaccagactgtaacatcatccatatgagtaacaatgtgctggaggtgcctgaattcaatggcttgtcccaagcgattgataaaaatctgctcagattcgattatgataggatggctagcctggaatgtaccgtcagcctggacactgcgagaactcggctgccagcccatggccagatggttctcggggagcctcgaccagaagaacctcgtggagatcagccacacagttttttcccagagtcccaactgagagcaaaactgaagtgtccaggtgggagctgtaccccaggattaaagaaaataggaagcctcaaagtgagctgtgaggagttcctgctgatgggccttcgttatcagcatctggatcccccttcacccaacattgattatatctccatccaactggacctcacagataccaggagcaaaattgtgtacaagaagtcagagagtgcgtggctgcctgtctatatcagagctggaattccgaatcagattccaaaggctgcattcatggccgtgtttattctggaagtggatcagttcatcctgacctccttgactacatcagttctggactgtgaagaagatgagacccctaaacccttgctggtgttcaacattactaaagccccgctccagggctatgtgactcacctgttggatcacaccagaccaatctcctcattcacctggaaagatctcagtgacatgcagatcgcctatcagccaccaaacagcagccattctgagaggagacatgatgaggtagaattggaggtatacgacttcttctttgaaaggagtgcacctatgacagtccacatctccatcagaacagcagatacaaatgccccccgtgtatcctggaatacaggtctgagtctccttgaggggcagtctcgagccatcacttgggaacagtttcaggttgtcgacaatgacgacattggtgctgtccggctagtcaccgttggtggcctgcagcatggatggctgactttaagaggggggaaagggtttctcttcaccgtggctgacctccaggctggagttgttcgctatcatcatgatgacagcgactccaccaaagacttcgtggtcttccggatatttgatggccatcacagcatccgtcacaaattccccatcaacgtcttgcccaaagatgatagtcccccgttcctcataaccaatgttgtgattgaactggaggaggggcagaccatcctgatccagggatccatgctgcgagcttcagatgtggacgccagtgatgactacatcttcttcaatatcacaaagcctccacaggctggggagatcatgaagaagccagggccaggactgataggctatcctgtccatggcttccttcagagggatttgtttaatggaatcatttattatcgtcattttggtggagaaatctttgaagattcttttcaatttgtcctgtgggacagccatgaacctccaaatctttcagtgccacaggtggcaacaatccatataactccagtggatgaccagcttccaaaagaggctcctggagtttctcggcatttggttgtcaaggaaactgaggtggcctatataactaagaaacagctacattttatagattcagaatcatatgacagggagctggtctacacaataactactcctccatttttctccttcagccacagacacttggatgctgggaaattatttatggtggacagcataccaaaagtagttaagaatcctacggccctggagctgaggtcattcactcagcatgctgtgaactatatgaaagtggcctacatgccccccatgcaagacattggtccccattgcagagatgtccagttcacattttctgtcagtaaccaacatggcggtactttgcatgggatctgctttaacattacaatcctcccagtggacaatcaagttcctgaggcgttcaccaaccctctgaaagtgactgagggaggtcaaagcatcatcagcacagagcacattctaatttctgatgcagataccaagctggacaatattgacctctccctgcgggaattgcctctgcacggaagggtggagctgaatggatttcctctaaattcagggggcacattttcttggggcgatctccataccttaaaagttaggtatcaacatgatggaactgaagttcttcaggatgacctactcttggaggtcaccgatggcacaaattcagcagaatttgtactacatgttgaggtattccctgtcaacgatgagccaccagtcttaaaggctgacctcatgcctgtcatgaattgctcagagggaggagaggtggtcatcacctctgaatacatttttgctactgatgtggacagcgataacttgaagttgatgtttgtgattgctcgcgaacctcagcatggggtggtgaggagagctggagtcacagtggatcagttctctcagagagatgttatctcagaggccgtgacatacaaacacacaggtggcgagattggcctgatgccttgttttgacaccattacattggtggtttcggatggagaggctggcccttttgtgaatggctgttgctacaatggacccaatccatctgttccacttcatgcgtcctttccagtgtatgatctcaacatcacggtatacccagtagacaaccagccaccttccattgcaataggtcccgtgtttgttgtagatgagggctgctcaacagcccttactgttaaccatttgtccgccactgaccctgacactgcagcagatgacttggaatttgttttggtttctcctcctcagtttggctacctcgaaaatatactcccttctgtgggttttgaaaaaagcaatattggcataagtatagattcatttcagtggaaagacatgaacgcttttcacattaactatgtgcagtccaggcatctgaggatagaaccaactgccgaccagttcacggtgtacgtcacagatgggaagcatcactccttggagataccattttctattataatcaaccccacaaatgatgaagctcctgactttgtagtgcagaatattactgtgtgtgagggtcagatgaaagagctggactcttccatcatcagcgctgtggacctggacattccccaggatgccctgctgttcagcatcactcaaaagccacgccatggcctcctcatcgatagggggtttagcaaagacttctctgagaataagcagccagccaaccctcaccagaaacatgcacctgttcacagcttttccatggaactcctcaagactggaatgaggttgacgtacatgcatgatgactcagagagccttgctgatgattttacaatccaattgtcagatgggaaacataagatacttaaaaccatttcagtagaggtcatcccagttaatgatgaaaaaccaatgctgagcaagaaggctgaaattgcaatgaatatgggtgaaactcgtattatttccagtgctattctttcagccatagatgaagactcacccagggagaagatttactatgtatttgaaaggcttccccaaaatgggcaacttcagcttaagatagggagggactgggttcctctctcccctggcatgaaatgcactcaggaggaagtggatctgaacttgctgagatacacacacaccggggcaatggattcccagaatcaagatagcttcaccttctacctttgggatggcaacaacaggtcccctgctcttgactgtcaaatcaccatcaaggacatggaaaaaggtgatattgtcatccttacaaaaccactcgtggtgtctaaaggtgatagaggtttcttaacaaccaccacgctcctggctgtggacggaacagacaagcctgaggaactgctctatgtcatcacctcccctccgcgatatggccagatcgaatatgttcactatcctggagttcccattacaaacttcagccaaatggatgtagtggggcagacagtttgctatgtacacaagagcaaggtgactgtctccagtgacagattcagattcatcatcagcaatggactgcggaccgagcacggggtgtttgagatcacactggagactgtggacagagccctgcctgtggtaaccaggaacaaggggttgagactggcccaaggggccgtgggcctgctttcccctgacctccttcagctgaccgaccctgatacacctgcggagaacctcaccttcctcttggttcagctcccccagcatggccagctctacctgtgggggacagggctacttcaacacaatttcacccagcaggatgtggacagcaagaatgtggcctatcggcactcaggaggggactcccagactgactgctttactttcatggccacagatgggacaaaccaaggctttattgtgaatgggagagtgtgggaagaacctgttttattcaccattcaggtagaccaattggacaaaacagctcctcgtatcacactcttgcattccccttctcaagtggggctcctgaaaaatggctgctacgggatttacatcacttcccgcgtgttgaaggcatcagaccctgacactgaggacgatcagatcatctttaaaattctacaaggcccaaaacatggacatctggagaacacaacaacaggtgaatttatccatgagaaatttagccaaaaggacttaaacagtaagactattctttacatcataaacccatctttggaagtaaattcagataccgtggaatttcaaatcatggaccccacagggaactcggccactcctcaaattttggaactgaagtggtctcatattgaatggtcacagaccgaatatgaagtctgtgagaatgtgggtttgttgcccttggaaattatcagaaggggatattccatggactcggcctttgtgggtataaaggtcaaccaagtgtcagctgcagttggaaaagatttcaccgtgattccatctaaactgattcagtttgacccaggaatgtcaactaagatgtggaatatagcaattacctatgacggattagaggaagatgatgaggtctttgaagtaattctgaactcccctgtgaatgcagttcttggcacaaagacaaaagctgcagtgaaaattttggactcaaaaggaggacaatgccatccttcatattcctccaaccaaagcaagcacagcacatgggagaagggcatttggcatctgctgcccccagggtcttcctcatccaccacttctggttcctttcatctggaaagaagacctcttccatcttccatgcagctagcagtcatcaggggagacaccctgcggggctttgattctacagatctttctcaaaggaagcttaggacccgtgggaatggcaaaacagttcgtccatcctctgtttatagaaatggaacagacatcatctataattatcatgggatagtttccttgaaactggaggatgacagtttcccaactcacaaaaggaaggccaaagtatccatcattagtcagccacaaaagacaatcaaagtggcagaactgcctcaagcagataaggtggaatccacaactgactcacacttccccagacaggaccagttgccctcatttccaaagaactgcactctggaattaaagggactcttccattttgaagaaggcatccagaagctgtatcagtgcaatgggatcgcctggaaagcctggagtccccaaaccaaggatgtggaagacaaatcctgtccagccgggtggcaccagcactcaggctactgtcacatcttgatcacagagcagaaaggcacctggaatgcggctgcccaagcttgcagggaacaatacctgggcaaccttgtaactgtattctccaggcagcacatgcggtggctctgggacattggtgggagaaagtccttttggataggtttgaacgaccaagtgcatgctggccactgggagtggatcggtggtgaacctgttgccttcaccaatgggagaagagggccctctcaacgctccaagcttggaaagagctgtgttttggttcaaagacaagggaaatggcaaacaaaagactgtaggagagccaaacctcataattatgtgtgttccagaaaactctaaatataacagaccctacagggggccacctggagtttgtcacctatttattcacaggatctgtgaatattgctccatagaaaacaaattgttatgattgagtgggtatacctttgtgattctgtctagtgaaaatgggacatttttaatagtgccagaaagattgataaataaatattttttacaagataagatacaatttttgtatctcaataccttttaaaataaatgccagcagtattataaagtgtaaggtttgtttattccagaagaccctcacccttaccccattccaaatctcagggagcaccagtctcatagtccttggatttttttaaaaaaaatttttggtcccgttacctctaatgaatttattctgaaatatgtatcgtaggtgctcctaccactttagtctgagtgaagctaactctactagttcattaaaccaaagttgaaccgcaaagttgtccctttggagccctttaaatgtgaaatctaagattagaggctggggttgaaaaagagaattttctatgatgaaaaagaaagactttagatgaaagaatcttgtaggtggaggctcatctacaaagctgtagttcaggtaagaattcggggggctggctgtactcagagttctactcatcactattcatgaaacagatctccctttccaatttgagtgttggcattgtaccatcccaaagctaatgattgggtttccccagccttacagagtcatgagaaatttcaagtaacataatctgttcctctgtgtttattgtactgacaagcatttctcagggacacttgggataaggagtatatatgaatgatggttgacacatggaagaaaaatactgcttcctcagaaatgtcctgatgaactgtgctgatgaacagagaaaaataataccgaaaacagagcccctgaaagcctacattctcggaaaggattttgaggaattttgagccaccttaaatctttaatatttgcagaaatgccatgttaactagattctctaacggaaaggtaccttattaatttataatctcaggtgagtggaacatttttgtaacaatgaagtatgttgcagcgttaccagaactcccttctgaaatcaaggtttaacagttataggaaattagaatgtctgaaacatttatttaaagtttttctcttttcataatcactgagaaatatggttgtgccaaatgtcacttgctctatgagcaccaatgtaacttcagaatcaaattggggttatcaagtaggctagagctctggtgctggttttattataaaaataccttgagtgttgtagacactaaaactgcttgaagaaagtcagttcagtttctgggatataaaaacatggcaagctttttttatttcagttcatttatcaaggttgtaattaatagaaacatttagaaagagatattggaatatgatccagacattctgtctattacttaaatctaaacataattatagtgtcagagggtccttacctgagatgtcgcaggtgggctccagattggcataatgtacaggttctctgtgagacacaagcagtttctggcatttaaccaaaagatgccacacctatcctcttaccagctcctttcaaattccttctggtccacaggcttcttgcagtatggaaatgtgagatttgggctaaagaaaaaatagttgtttacctaaagggttaagtcctaggaaggaagtagaagtttgggaaatgagggattcaagggccactccttccactggaactctaaaactatataaaccatctaaaactggaaatctagaactatgtcaactgtgtagaaccttgtcagcatggcagatttattatacatttctgcaatataaatgataaatgatactgaactaattgcaaatgttagcataaagagtgttttgatttttataacaattagaaatgctacaagaatatttaaaaatattcctgatcatgaaagcattaatcaaattagaaaatccaagtcattttaagaagataaaaatagaaattcaggcaagtttgggtgatgggcggtattcatcacaaccttcattttattcttacaattgagctttgactcagggggaaaagaagtaaatgattgtcaaggttccctctgccttgattgatagtttctgatgggagtgggaaggaaggaattggagtaatgggtagaatgggaatgagagattacgggagagagagatgagatgggttgaacagaagaggatgggaactgatggtagctaggaaggaaagcgtcaagaaggacctgaatgtacccagcttttctccccaaacttcaataccacctcaggaaaaggcccactgtgtccaggggcgtcagtccagctcaatagtgtctagcttttcagaatcttctgattgtttggtctttaacaaaaacatagcatctatttgctaacaataaacttaagcaacatatgataatcatttcatctccttccaagaagtggtgaaaatgaaccaggtgacattaatttaacttctgtttttgtttatttttaatacaaccaaaaagatatgcacatattttaatttacattatggtactgtataatttaaaccataaactggtgctgattaatttctgcaacaaagcagcatattaaatgtactacatctagtgttgtagcaaaattaataaacttgttttaagttctgagacactttc

SEQ ID NO: 309247 - DNA, 10086 bp, Artificial Sequence
  derived and/or modified sequence
acacaaaaagccttacaaatggaagaactaaggtggtacttaaaaacagcaccttaggatctagttccatcctatcttttcccttaaatgccatgacaaaagttaaaacgggccctgtcccttctgaatgctgggcttctcatctaaatttaaataaaaacctttgaagatgggaatgtgttggaagaaaagaagggcagaaaaaaagtgtgttggaagagtctgtggagtcctgaggcttggcgctcaggaagtttgcaaagctgcagcagctgccttggagaagaccagcaaagaaagtggagtgtgtatgtgaacttcaattctgtattttctgtgaggtgggttaatggatttttagtaaaaagaaatctcaaacacagctgacctgaaagactggaatttcagctctcttccttcccggggttctttttcctcccccttcctctcaaagccctttaaaccagattgctgtgtcagtgactcttatcctgcccgccagttccaagggtttctaactttttgtcttggaaaggaaaaccactacctgattagaaaagcacttgggaagcccattaatcttgccggcgttgtcaggagtgatcagcgagttttattaaaagccctgggattgcctgaaaggcccccttgtctgactttgaaatgaaaggggcatgttaagatctcggggcacattgtcaggacccctcaccctgccccttggactatgagctgaccctccaggaggaagcacagaagccctcctttgttaaagggatttcgccggtggacagagaagagttgggccctgtcagcatgaactctctgagttggggggctgcgaatgccgtgctgctgctgctcctcctggcctgggccagccccaccttcatcagcatcaaccgcggggtgagggtgatgaagggccactctgccttcctgtcaggagatgacctgaagtttgccatccctaaagagaaagatgcctgcaaagtggaagttgtgatgaatgagccaataacccagagggttgggaaactcactccacaggtctttgactgccatttccttcccaacgaagtcaagtatgttcacaatggttgtccaattcttgatgaagacacagtgaagctcagactttacagatttactgaaagagataccttcatagaaacttttatcctgtgggtctatctcctggaaccagactgtaacatcatccatatgagtaacaatgtgctggaggtgcctgaattcaatggcttgtcccaagcgattgataaaaatctgctcagattcgattatgataggatggctagcctggaatgtaccgtcagcctggacactgcgagaactcggctgccagcccatggccagatggttctcggggagcctcgaccagaagaacctcgtggagatcagccacacagttttttcccagagtcccaactgagagcaaaactgaagtgtccaggtgggagctgtaccccaggattaaagaaaataggaagcctcaaagtgagctgtgaggagttcctgctgatgggccttcgttatcagcatctggatcccccttcacccaacattgattatatctccatccaactggacctcacagataccaggagcaaaattgtgtacaagtcagagagtgcgtggctgcctgtctatatcagagctggaattccgaatcagattccaaaggctgcattcatggccgtgtttattctggaagtggatcagttcatcctgacctccttgactacatcagttctggactgtgaagaagatgagacccctaaacccttgctggtgttcaacattactaaagccccgctccagggctatgtgactcacctgttggatcacaccagaccaatctcctcattcacctggaaagatctcagtgacatgcagatcgcctatcagccaccaaacagcagccattctgagaggagacatgatgaggtagaattggaggtatacgacttcttctttgaaaggagtgcacctatgacagtccacatctccatcagaacagcagatacaaatgccccccgtgtatcctggaatacaggtctgagtctccttgaggggcagtctcgagccatcacttgggaacagtttcaggttgtcgacaatgacgacattggtgctgtccggctagtcaccgttggtggcctgcagcatggatggctgactttaagaggggggaaagggtttctcttcaccgtggctgacctccaggctggagttgttcgctatcatcatgatgacagcgactccaccaaagacttcgtggtcttccggatatttgatggccatcacagcatccgtcacaaattccccatcaacgtcttgcccaaagatgatagtcccccgttcctcataaccaatgttgtgattgaactggaggaggggcagaccatcctgatccagggatccatgctgcgagcttcagatgtggacgccagtgatgactacatcttcttcaatatcacaaagcctccacaggctggggagatcatgaagaagccagggccaggactgataggctatcctgtccatggcttccttcagagggatttgtttaatggaatcatttattatcgtcattttggtggagaaatctttgaagattcttttcaatttgtcctgtgggacagccatgaacctccaaatctttcagtgccacaggtggcaacaatccatataactccagtggatgaccagcttccaaaagaggctcctggagtttctcggcatttggttgtcaaggaaactgaggtggcctatataactaagaaacagctacattttatagattcagaatcatatgacagggagctggtctacacaataactactcctccatttttctccttcagccacagacacttggatgctgggaaattatttatggtggacagcataccaaaagtagttaagaatcctacggccctggagctgaggtcattcactcagcatgctgtgaactatatgaaagtggcctacatgccccccatgcaagacattggtccccattgcagagatgtccagttcacattttctgtcagtaaccaacatggcggtactttgcatgggatctgctttaacattacaatcctcccagtggacaatcaagttcctgaggcgttcaccaaccctctgaaagtgactgagggaggtcaaagcatcatcagcacagagcacattctaatttctgatgcagataccaagctggacaatattgacctctccctgcgggaattgcctctgcacggaagggtggagctgaatggatttcctctaaattcagggggcacattttcttggggcgatctccataccttaaaagttaggtatcaacatgatggaactgaagttcttcaggatgacctactcttggaggtcaccgatggcacaaattcagcagaatttgtactacatgttgaggtattccctgtcaacgatgagccaccagtcttaaaggctgacctcatgcctgtcatgaattgctcagagggaggagaggtggtcatcacctctgaatacatttttgctactgatgtggacagcgataacttgaagttgatgtttgtgattgctcgcgaacctcagcatggggtggtgaggagagctggagtcacagtggatcagttctctcagagagatgttatctcagaggccgtgacatacaaacacacaggtggcgagattggcctgatgccttgttttgacaccattacattggtggtttcggatggagaggctggcccttttgtgaatggctgttgctacaatggacccaatccatctgttccacttcatgcgtcctttccagtgtatgatctcaacatcacggtatacccagtagacaaccagccaccttccattgcaataggtcccgtgtttgttgtagatgagggctgctcaacagcccttactgttaaccatttgtccgccactgaccctgacactgcagcagatgacttggaatttgttttggtttctcctcctcagtttggctacctcgaaaatatactcccttctgtgggttttgaaaaaagcaatattggcataagtatagattcatttcagtggaaagacatgaacgcttttcacattaactatgtgcagtccaggcatctgaggatagaaccaactgccgaccagttcacggtgtacgtcacagatgggaagcatcactccttggagataccattttctattataatcaaccccacaaatgatgaagctcctgactttgtagtgcagaatattactgtgtgtgagggtcagatgaaagagctggactcttccatcatcagcgctgtggacctggacattccccaggatgccctgctgttcagcatcactcaaaagccacgccatggcctcctcatcgatagggggtttagcaaagacttctctgagaataagcagccagccaaccctcaccagaaacatgcacctgttcacagcttttccatggaactcctcaagactggaatgaggttgacgtacatgcatgatgactcagagagccttgctgatgattttacaatccaattgtcagatgggaaacataagatacttaaaaccatttcagtagaggtcatcccagttaatgatgaaaaaccaatgctgagcaagaaggctgaaattgcaatgaatatgggtgaaactcgtattatttccagtgctattctttcagccatagatgaagactcacccagggagaagatttactatgtatttgaaaggcttccccaaaatgggcaacttcagcttaagatagggagggactgggttcctctctcccctggcatgaaatgcactcaggaggaagtggatctgaacttgctgagatacacacacaccggggcaatggattcccagaatcaagatagcttcaccttctacctttgggatggcaacaacaggtcccctgctcttgactgtcaaatcaccatcaaggacatggaaaaaggtgatattgtcatccttacaaaaccactcgtggtgtctaaaggtgatagaggtttcttaacaaccaccacgctcctggctgtggacggaacagacaagcctgaggaactgctctatgtcatcacctcccctccgcgatatggccagatcgaatatgttcactatcctggagttcccattacaaacttcagccaaatggatgtagtggggcagacagtttgctatgtacacaagagcaaggtgactgtctccagtgacagattcagattcatcatcagcaatggactgcggaccgagcacggggtgtttgagatcacactggagactgtggacagagccctgcctgtggtaaccaggaacaaggggttgagactggcccaaggggccgtgggcctgctttcccctgacctccttcagctgaccgaccctgatacacctgcggagaacctcaccttcctcttggttcagctcccccagcatggccagctctacctgtgggggacagggctacttcaacacaatttcacccagcaggatgtggacagcaagaatgtggcctatcggcactcaggaggggactcccagactgactgctttactttcatggccacagatgggacaaaccaaggctttattgtgaatgggagagtgtgggaagaacctgttttattcaccattcaggtagaccaattggacaaaacagctcctcgtatcacactcttgcattccccttctcaagtggggctcctgaaaaatggctgctacgggatttacatcacttcccgcgtgttgaaggcatcagaccctgacactgaggacgatcagatcatctttaaaattctacaaggcccaaaacatggacatctggagaacacaacaacaggtgaatttatccatgagaaatttagccaaaaggacttaaacagtaagactattctttacatcataaacccatctttggaagtaaattcagataccgtggaatttcaaatcatggaccccacagggaactcggccactcctcaaattttggaactgaagtggtctcatattgaatggtcacagaccgaatatgaagtctgtgagaatgtgggtttgttgcccttggaaattatcagaaggggatattccatggactcggcctttgtgggtataaaggtcaaccaagtgtcagctgcagttggaaaagatttcaccgtgattccatctaaactgattcagtttgacccaggaatgtcaactaagatgtggaatatagcaattacctatgacggattagaggaagatgatgaggtctttgaagtaattctgaactcccctgtgaatgcagttcttggcacaaagacaaaagctgcagtgaaaattttggactcaaaaggaggacaatgccatccttcatattcctccaaccaaagcaagcacagcacatgggagaagggcatttggcatctgctgcccccagggtcttcctcatccaccacttctggttcctttcatctggaaagaagacctcttccatcttccatgcagctagcagtcatcaggggagacaccctgcggggctttgattctacagatctttctcaaaggaagcttaggacccgtgggaatggcaaaacagttcgtccatcctctgtttatagaaatggaacagacatcatctataattatcatgggatagtttccttgaaactggaggatgacagtttcccaactcacaaaaggaaggccaaagtatccatcattagtcagccacaaaagacaatcaaagtggcagaactgcctcaagcagataaggtggaatccacaactgactcacacttccccagacaggaccagttgccctcatttccaaagaactgcactctggaattaaagggactcttccattttgaagaaggcatccagaagctgtatcagtgcaatgggatcgcctggaaagcctggagtccccaaaccaaggatgtggaagacaaatcctgtccagccgggtggcaccagcactcaggctactgtcacatcttgatcacagagcagaaaggcacctggaatgcggctgcccaagcttgcagggaacaatacctgggcaaccttgtaactgtattctccaggcagcacatgcggtggctctgggacattggtgggagaaagtccttttggataggtttgaacgaccaagtgcatgctggccactgggagtggatcggtggtgaacctgttgccttcaccaatgggagaagagggccctctcaacgctccaagcttggaaagagctgtgttttggttcaaagacaagggaaatggcaaacaaaagactgtaggagagccaaacctcataattatgtgtgttccagaaaactctaaatataacagaccctacagggggccacctggagtttgtcacctatttattcacaggatctgtgaatattgctccatagaaaacaaattgttatgattgagtgggtatacctttgtgattctgtctagtgaaaatgggacatttttaatagtgccagaaagattgataaataaatattttttacaagataagatacaatttttgtatctcaataccttttaaaataaatgccagcagtattataaagtgtaaggtttgtttattccagaagaccctcacccttaccccattccaaatctcagggagcaccagtctcatagtccttggatttttttaaaaaaaatttttggtcccgttacctctaatgaatttattctgaaatatgtatcgtaggtgctcctaccactttagtctgagtgaagctaactctactagttcattaaaccaaagttgaaccgcaaagttgtccctttggagccctttaaatgtgaaatctaagattagaggctggggttgaaaaagagaattttctatgatgaaaaagaaagactttagatgaaagaatcttgtaggtggaggctcatctacaaagctgtagttcaggtaagaattcggggggctggctgtactcagagttctactcatcactattcatgaaacagatctccctttccaatttgagtgttggcattgtaccatcccaaagctaatgattgggtttccccagccttacagagtcatgagaaatttcaagtaacataatctgttcctctgtgtttattgtactgacaagcatttctcagggacacttgggataaggagtatatatgaatgatggttgacacatggaagaaaaatactgcttcctcagaaatgtcctgatgaactgtgctgatgaacagagaaaaataataccgaaaacagagcccctgaaagcctacattctcggaaaggattttgaggaattttgagccaccttaaatctttaatatttgcagaaatgccatgttaactagattctctaacggaaaggtaccttattaatttataatctcaggtgagtggaacatttttgtaacaatgaagtatgttgcagcgttaccagaactcccttctgaaatcaaggtttaacagttataggaaattagaatgtctgaaacatttatttaaagtttttctcttttcataatcactgagaaatatggttgtgccaaatgtcacttgctctatgagcaccaatgtaacttcagaatcaaattggggttatcaagtaggctagagctctggtgctggttttattataaaaataccttgagtgttgtagacactaaaactgcttgaagaaagtcagttcagtttctgggatataaaaacatggcaagctttttttatttcagttcatttatcaaggttgtaattaatagaaacatttagaaagagatattggaatatgatccagacattctgtctattacttaaatctaaacataattatagtgtcagagggtccttacctgagatgtcgcaggtgggctccagattggcataatgtacaggttctctgtgagacacaagcagtttctggcatttaaccaaaagatgccacacctatcctcttaccagctcctttcaaattccttctggtccacaggcttcttgcagtatggaaatgtgagatttgggctaaagaaaaaatagttgtttacctaaagggttaagtcctaggaaggaagtagaagtttgggaaatgagggattcaagggccactccttccactggaactctaaaactatataaaccatctaaaactggaaatctagaactatgtcaactgtgtagaaccttgtcagcatggcagatttattatacatttctgcaatataaatgataaatgatactgaactaattgcaaatgttagcataaagagtgttttgatttttataacaattagaaatgctacaagaatatttaaaaatattcctgatcatgaaagcattaatcaaattagaaaatccaagtcattttaagaagataaaaatagaaattcaggcaagtttgggtgatgggcggtattcatcacaaccttcattttattcttacaattgagctttgactcagggggaaaagaagtaaatgattgtcaaggttccctctgccttgattgatagtttctgatgggagtgggaaggaaggaattggagtaatgggtagaatgggaatgagagattacgggagagagagatgagatgggttgaacagaagaggatgggaactgatggtagctaggaaggaaagcgtcaagaaggacctgaatgtacccagcttttctccccaaacttcaataccacctcaggaaaaggcccactgtgtccaggggcgtcagtccagctcaatagtgtctagcttttcagaatcttctgattgtttggtctttaacaaaaacatagcatctatttgctaacaataaacttaagcaacatatgataatcatttcatctccttccaagaagtggtgaaaatgaaccaggtgacattaatttaacttctgtttttgtttatttttaatacaaccaaaaagatatgcacatattttaatttacattatggtactgtataatttaaaccataaactggtgctgattaatttctgcaacaaagcagcatattaaatgtactacatctagtgttgtagcaaaattaataaacttgttttaagttctgagacactttc

SEQ ID NO: 309248 - DNA, 6540 bp, Artificial Sequence
  derived and/or modified sequence
atgaattctttgtcatggggggccgcgaacgccgtcctgctgttgctactgctcgcctgggcttcccctaccttcatcagcattaatcgcggcgtgagggtgatgaagggccactccgctttcctatccggagacgacctgaagtttgcgattccgaaggaaaaggatgcgtgcaaagtagaggtggtaatgaatgaacctatcacccagcgagtgggcaagctcacaccacaggtttttgactgtcacttcctgcccaacgaggtgaagtatgtccataacggttgtccaatattggatgaagatacagtgaaactgcggctgtaccgcttcactgagagagacacgttcatcgagaccttcatcctttgggtttatctactagaacccgactgtaacataatccatatgagtaataacgtcctggaggtgcccgagtttaacgggcttagtcaggccatcgataagaacctgctgcgtttcgactacgacagaatggcgtctctggaatgcactgtgtctctggacacagctaggacccgcttgcccgcccacggccagatggttcttggggagcccagacctgaggagccccgtggtgatcagcctcatagtttttttccagagtctcagttaagggccaaactgaagtgcccgggaggcagctgcacacccggccttaaaaagatcggatccctcaaggtgtcatgtgaggagttcctcctcatgggactgagatatcagcacctggatccaccctcacctaatatagattacatctccattcagctggacctaaccgacacaagatccaaaatagtgtacaaatcagagtcggcttggctgcctgtctacattcgggcaggcattcctaaccagatacccaaggcagccttcatggccgttttcatcctggaggtcgatcagttcatcctaacgagtttaacgacgtccgtcttggattgcgaggaggatgaaacgccaaaacccctgctggttttcaatataactaaggctccactgcaggggtacgtaacgcatctgctggatcacacccggccaatttcaagctttacctggaaggacctttctgacatgcaaattgcttaccagcctcccaacagtagccacagcgagcggaggcatgatgaggtggagttggaggtctatgacttcttctttgaacgctccgcccccatgaccgtgcacatctccatacgcaccgcagataccaacgccccgcgggtgagttggaatacgggactgagcctgctggagggtcagtctcgagccatcacctgggagcagtttcaggttgtcgataacgatgatattggtgccgtacgacttgtcacagtcggtggcctgcagcatggatggctgactctgagaggcggaaagggttttttatttaccgtggccgatctccaggcaggcgtcgttcgttatcaccacgatgattccgacagcaccaaggactttgtggtttttcgcatttttgatggtcaccattccatcaggcacaagttccctataaatgttcttcctaaagacgactcaccacccttcctgattaccaatgtcgtgatcgaactcgaggaagggcagactatccttattcaaggcagcatgctgagggcctcggatgtggacgcaagtgatgattacatcttcttcaatattaccaagcctccccaggcaggtgaaattatgaagaaacccggccccggtctcatcggctatcctgtccacggattcttacaaagggatctgttcaatgggataatatactaccggcatttcgggggggagattttcgaagattcttttcagtttgtgctgtgggattctcacgagccccccaaccttagcgtgccgcaggtcgccaccatccacatcaccccggtggacgatcagcttccaaaggaggcccctggcgtgtcaagacacttggtggtgaaagagacagaggtggcctacataactaagaagcaattgcatttcatcgactctgagagttatgatagggagctcgtctacacaattactacaccacccttcttctcattcagccatagacatctggatgccggcaaactgttcatggttgatagcattcccaaggttgtaaagaaccctacagccctagaactacgtagctttacacagcacgctgtgaactacatgaaggtggcatatatgccccccatgcaggacatcggaccccattgcagagatgtgcagtttacttttagcgtgagtaaccagcatggagggacgctgcatggcatttgctttaacatcacaatcttacccgtggataatcaagttccagaggcattcaccaatccgctcaaggtgactgaaggaggtcagtccattatttccacagaacatatcctgataagcgacgcagacaccaaactggacaacattgacctcagcctgcgggagcttccccttcacggcagggtggagctcaatggctttccgctcaactcagggggcaccttttcctggggggacctacatacgttgaaagttcgctaccagcacgacggtactgaagtcctgcaggatgatctcttgctcgaagtcaccgacggaaccaattccgccgaattcgttctccacgtcgaggtcttccccgtcaatgacgagccccctgtcctcaaagcagatttaatgccggtcatgaattgcagcgaaggcggagaagtcgtgattacctcagaatatatttttgcaacagacgttgattccgataatctgaagttgatgtttgtaatcgccagggagcctcagcacggggtggtgcggcgcgcaggcgttactgtagatcaatttagccagagagacgttatctcagaggcagtgacctacaagcacacaggcggcgaaattggacttatgccatgctttgatacaatcacactggtggtaagtgacggcgaggctggcccgtttgtgaacgggtgttgttacaacggccccaacccatcagtcccgttgcacgcaagcttccccgtgtacgacttgaacatcactgtctatcctgtggataatcagcccccatcgatcgcaattggaccagtttttgtcgtcgatgagggttgctcgacagccctgactgtgaaccacttatctgcaacagatcccgacacagcagccgatgacttggaatttgtgctggtgtctcctccgcaatttggttatcttgaaaacattctgccgagtgtcggattcgagaagtctaacattgggattagcattgacagcttccagtggaaggatatgaacgccttccacatcaactacgtccagtctcgccacctaagaattgagccaaccgccgatcagttcacggtatacgtgactgacggcaaacaccatagtctcgaaatacctttcagtatcataatcaacccaacaaatgacgaggcccccgactttgttgtgcaaaacattaccgtgtgtgaagggcaaatgaaggagctcgactcttcaattatctccgcagttgacctggacatccctcaggatgctctcctcttctctatcactcaaaaaccccggcatggactcctgattgatcggggcttctccaaagatttcagcgagaataagcagcccgcaaacccccatcaaaagcacgccccagtccattcattttccatggagctacttaagacaggcatgaggctgacatacatgcacgacgacagtgagtctctcgcagatgactttaccatacaattgtcagatggaaaacataagatcttgaaaaccatttcagtggaagtaattcccgtgaacgatgagaagccaatgctcagcaaaaaggcagaaattgcaatgaatatgggcgagacgaggatcatcagctcagctattttatctgctattgatgaggatagtccacgggagaagatatattatgtgttcgaaagactcccccaaaacgggcagttgcagctgaagatcggcagggattgggtaccactctccccgggcatgaagtgcacacaggaggaggtggaccttaatctcctgcgctatacccacacaggggcaatggactcacagaatcaggattccttcaccttttacttgtgggacggcaataatcgaagccctgccctagattgtcagatcactattaaggacatggaaaagggtgacattgttatcttaacgaagcctctcgtcgtatccaagggggataggggctttttaactacaactacacttctcgccgtcgacgggacggataagccggaggagctgctgtatgtgattacctcgccacctcgctatgggcaaattgaatacgtgcattatccgggagtccccatcaccaatttctcacaaatggacgtcgtgggccaaaccgtttgctacgtgcataagagcaaggttacggtgagctcagaccgctttcggtttattatctccaatgggctgcgaacggagcatggagtatttgaaatcaccctcgagacggttgaccgagcgctccccgtcgtcaccaggaataaaggtttgcgcctggctcagggcgcagttggtctgctgtctccagacctgctgcagttaacagaccctgacactcccgcagaaaacctcaccttcttgctggtgcagctgcctcagcacgggcagctctatctgtggggaactggactcttgcagcacaacttcacccagcaagatgtggactcaaagaatgtcgcataccgacattccggaggggactcacaaaccgattgcttcacctttatggcaaccgatggtacaaaccagggattcatcgtcaacgggagagtgtgggaagagccggtactctttaccatccaagtggaccagctggataagacggcccctcgaataacactccttcatagtccgagtcaggtcggcctcctgaagaacggatgttacggcatctacatcacctctcgtgtgctgaaggctagcgatcctgatacagaggatgaccagattatctttaagatactacaaggaccaaaacacggacacctggagaataccaccaccggagaatttattcatgagaaattctcgcagaaggacctgaactcaaagaccatcctgtatataataaatcctagtctcgaggtgaactcagatactgtcgagtttcagattatggatccgacgggcaattccgctacaccgcagatcctcgagctcaaatggtcacacatcgagtggtcacagaccgaatatgaagtatgtgaaaatgtcgggctgttgccattggagataatcagacgcggctactccatggacagcgcattcgtcgggattaaggtcaatcaggtaagtgccgcagtcggtaaagactttacagtgattcccagtaagttgatacagttcgatccaggaatgagcactaagatgtggaatattgcaattacatatgatggcctcgaggaagatgatgaagtctttgaggtaatcctgaactcacctgtgaatgccgtccttggcacaaagaccaaggctgccgttaagattctcgacagcaagggagggcagtgtcacccctcttactccagcaatcagtccaaacattctacttgggagaagggaatatggcatctgcttcccccggggtcatcttcttcgaccacaagtggttcctttcacctcgagaggcgtcccctgcctagtagtatgcagctcgcggtgataaggggtgatacactgcgtggcttcgacagcacagacctttcccagagaaaacttcggacacgcggcaatgggaagaccgtcaggccgtcatccgtgtacagaaatgggaccgacataatttacaattaccacggcatcgtaagcctgaagttagaagacgacagtttccccacacataagcgtaaggcaaaagttagcattatatcacagccacaaaaaactatcaaagttgcggagctaccccaggcagacaaggtcgaatctacaactgactcacacttccccagacaggaccagctcccgagcttcccaaagaactgcactttagagctgaaaggcctgttccactttgaagagggcatacagaagctctatcagtgtaacggcatcgcctggaaggcctggtcaccccagaccaaagacgtagaggacaagagctgccccgccgggtggcaccagcattctggctattgccacatactaattaccgagcagaaagggacctggaacgcagccgctcaagcttgcagagagcagtatttgggcaatttggtgactgtgtttagccggcagcacatgcggtggctctgggatattggcgggaggaagagcttttggattggcctcaatgatcaggtgcacgcagggcattgggaatggattggcggcgagccagtagccttcaccaacgggcgccgggggcccagtcagagaagcaagctcggcaagtcatgcgtcctggtccagcgccaagggaaatggcagactaaggattgtcgacgagctaaaccccacaactatgtgtgttcccgtaagttgtag

SEQ ID NO: 309249 - DNA, 6543 bp, Artificial Sequence
  derived and/or modified sequence
atgaactccctgagctggggcgctgccaacgcagtgctattgcttctcttgctggcctgggccagcccgacattcatttctatcaatcggggagtgagggtgatgaaagggcatagtgccttccttagcggcgacgacttgaagttcgcaattcccaaggagaaagatgcctgcaaagttgaagtggtaatgaacgaacccatcactcagcgggttgggaaactgactccacaggtattcgactgtcacttcctccctaatgaagtcaagtatgtccacaacggttgtccaattctggacgaagacacagttaagctccggctttacaggtttaccgaaagagatacatttattgagacatttatactgtgggtgtaccttctcgaacctgattgtaacataatccacatgtctaataacgtactcgaggtgccagagttcaatgggttgtctcaggccatcgacaaaaatctcctgcggtttgattatgatcggatggcgtcgttagagtgcacagtgagccttgacactgcacggactcgcttaccagctcatggccaaatggtgcttggggagcctaggcctgaggaaccgcgtggagaccagccccactccttctttcccgagagtcagcttcgggcaaaactcaagtgtcctggcggatcctgcacacccggcttaaaaaagatcggatctctcaaggtttcctgcgaagagttcctcttgatgggtctgcgctaccagcatctagacccgccaagccccaatatcgactacatttcaatccaattagatctgacagatacccgcagtaagattgtgtacaagaaatctgaatctgcctggctgcctgtgtatatcagagcaggaattcccaaccagatccccaaggctgcatttatggcagtgtttatcctggaagtagaccaatttatcttaacatccctgaccacgtcggtccttgactgtgaggaagacgagacccctaaaccactgctggttttcaatataacaaaagcccccttgcagggctatgtcacccaccttcttgatcacacgagaccaattagtagctttacttggaaagacctaagcgatatgcagatcgcctaccagccacccaattctagtcatagcgaacggaggcatgatgaagtagaattagaggtgtatgatttttttttcgagcgctcagcccctatgacagtccatatatctatacgaaccgctgatacaaacgcgccgagagtgtcatggaacacgggattgtctctgctggaggggcagtctcgggccattacgtgggagcagttccaagtcgtagataacgacgacatcggcgctgttcgtctcgtgactgtcggtggccttcaacatggctggctcactctcagaggtggaaagggattcctgttcaccgttgctgacctgcaggcaggggtggtccggtaccatcatgacgatagtgattctactaaagacttcgtggtcttccgcatctttgacggccatcattccatacgtcacaaatttcccattaacgtgctgcccaaggacgactctccacccttcctgatcaccaacgtcgtgattgaattggaggagggacagacaattttgatccaggggtccatgctgagggcgagtgatgtcgacgcttcagacgactacattttctttaacattaccaagccaccacaggctggagaaatcatgaagaagcctgggcctggcctgatcgggtatccagttcatgggtttctgcagcgcgacttgttcaacggcataatatactaccggcacttcggaggagaaatcttcgaggacagctttcagtttgtattgtgggatagccatgaaccacccaacctctccgtaccgcaagtggctacaatccatattacaccagttgacgaccagcttcccaaggaggctccaggtgtctctagacatctggtggttaaggaaaccgaagttgcatatataactaagaaacagctgcactttattgactccgagtcttatgatcgtgaattagtctatacaataacaaccccgccatttttcagtttctctcataggcacctggacgccggcaagctgtttatggtggatagcattcccaaggttgtgaagaaccctaccgccctggagcttcgttcatttacccaacatgcagtgaactatatgaaagttgcctatatgccccccatgcaggatattggacctcactgccgggatgtgcagttcacattcagcgtgagcaatcagcatggcggaaccctacatggcatctgcttcaacattacgatcttgccagtcgacaatcaagtgcctgaagcttttacaaatccactcaaagtgacagagggggggcagagcatcatttcaaccgagcacattctgattagtgacgccgacactaaacttgacaatattgatttgtctctccgcgaattacccctgcacggtagagtggagctgaacggtttcccgcttaattccggcgggacctttagctggggggatttacacactcttaaagtccgctatcagcacgacgggacagaggtacttcaggacgacctgctgctggaagtgacagacggcactaatagcgcggagttcgttctccatgttgaagtcttcccagtcaacgacgaacccccggttttgaaggcagatctgatgcctgtgatgaactgcagcgaaggcggggaggtggtgataacatcagagtacatttttgccaccgacgtcgatagtgacaacctaaaattgatgtttgttattgccagagaaccccagcatggcgtcgtgagacgggctggggtgactgtggaccaattttcacaacgtgatgtaatctcagaggccgtgacctacaaacacaccgggggggaaattgggctcatgccatgctttgacactatcaccctcgtagtatctgacggagaggcgggcccattcgtgaatggctgctgctacaacgggccaaatccatctgtgccattacacgcctctttccccgtgtatgacctgaacattactgtttacccagtggataatcaacctccaagtatcgctattggacccgtttttgtagttgacgaaggttgtagcaccgctctcaccgtcaaccaccttagcgcgacagacccagacacagctgcagatgatctcgaatttgtgctcgtgtctcctcctcagtttggatatttagagaacatcctcccgtctgtgggattcgagaaatcgaacattggaatttccatcgatagcttccagtggaaagacatgaacgcgtttcacataaattatgttcagtccagacaccttcggattgaacccacagccgaccagtttaccgtctacgtgacagatggcaagcatcattcgctcgagatcccgttctcaattatcatcaacccaacaaacgacgaggcgccagacttcgtcgtgcagaacatcacagtttgtgaggggcagatgaaagagttagattcaagtattatttccgccgtggatctggatatccctcaggatgcactgctcttctctatcactcagaaacctcggcatgggttgctcattgatcggggtttcagcaaggacttttcagagaacaaacaacccgccaaccctcatcagaaacatgcccctgtgcatagtttctcgatggaactgctgaaaacagggatgcgtctaacttatatgcatgacgactccgagtccctggccgatgactttactatccagctctctgatggtaaacacaaaattcttaagacaatatccgtcgaagtgataccagtgaacgacgagaaacccatgctttctaagaaagctgagatcgccatgaacatgggtgaaaccagaattatatctagcgcaattctgtccgcaatcgacgaagattcaccaagagaaaagatttactatgtgtttgagagattacctcagaacggccagctccagctgaagataggcagagactgggtgcctctcagtccgggcatgaagtgtacacaggaagaggtggatctgaatctgttgagatatacacataccggagccatggactcccagaaccaggactcttttaccttctacttatgggacggcaacaatcgctctcccgccttggattgccagattaccatcaaagacatggaaaaaggcgacatcgtaattctcacaaaacccctcgtcgtgtctaagggagatcgcggattcctgactacgaccacactgctcgctgtggacggtactgacaaaccagaagaactactatatgtgataacttcaccaccacggtacggtcaaatcgagtatgtgcattaccccggggttcctatcacaaacttcagtcagatggacgtggtgggccagaccgtgtgctatgtccacaagagtaaagtaacagtcagctcagatcgatttagatttattattagtaacggactgcgaaccgagcatggcgtgttcgagattacactcgagacggtggacagagctctaccagttgtcacccgcaacaaaggcttaagactagcgcagggggcagtgggattgctgtctcccgatcttctgcagctgaccgacccagacactcccgcagagaatctaacctttcttctcgtgcaactcccacagcacggccaactgtacctttggggaactggactgctgcagcataactttactcaacaggatgttgatagtaaaaacgtcgcctaccgccacagtggaggagacagccagacagattgcttcacctttatggctaccgacggcacgaatcagggcttcatcgttaacggtcgggtctgggaggagcccgtcctctttaccattcaagttgaccagctcgataagactgctcctaggattactctacttcacagcccttcgcaggtcggactactcaaaaatggttgctatggtatctatattaccagccgtgtacttaaagcctccgaccccgatacagaagatgaccagatcatctttaagatcctgcagggccccaagcacggccacttggagaatacgacaacaggggaatttattcacgaaaagttttcccagaaagatctcaactcaaagaccatcctgtacattattaacccatctctggaggtgaattcggacactgtggagttccagatcatggatccaaccggcaactccgccaccccacagatacttgagttgaagtggagtcacattgaatggtcccagaccgagtacgaggtttgtgagaatgtggggcttctgccactggagatcatccggcggggctactcaatggacagcgcctttgtcggtataaaagtaaaccaagtgtcagccgcagtgggtaaggacttcacagtgattccaagcaaactgattcagtttgaccctgggatgagcacgaagatgtggaacatagccatcacttatgatggactggaagaggatgatgaagtcttcgaggtcatcctgaatagtcccgttaacgctgtgttgggcactaaaacgaaggccgcggtgaagatcttagactccaagggggggcagtgccatcccagctattctagtaatcaatctaaacactcaacatgggagaaggggatttggcatctcctcccgcctggcagttctagctcgacgacttcggggtcttttcatctcgaaaggcgtcctctccccagtagtatgcagcttgccgtaatccggggtgacacactccgaggttttgattctacagatctgtcccagagaaaactgagaactaggggtaatgggaaaaccgtccgtccttcttccgtgtatagaaacggcactgatatcatctataactatcatggaattgtgagcttgaaactcgaggatgattcttttcccacccacaaacgaaaagccaaagtctcaattatatcccaacctcaaaaaaccattaaggtggctgagctgccccaggccgataaggtggaaagcactaccgattcccactttcccaggcaagaccagcttccgtccttccctaagaattgcactctggagttgaagggcctgttccatttcgaagagggcattcaaaaattgtatcagtgtaatggcattgcttggaaagcctggtccccgcagactaaagacgtcgaggataagtcctgccctgcgggctggcaccagcactcggggtactgccacattctgattaccgaacagaagggaacgtggaatgctgccgcacaagcttgccgggaacaatatctggggaatctggtcaccgtgttttccagacagcatatgcgctggttatgggatattggaggccgaaagagtttttggatcgggctgaacgaccaagtgcacgccggccactgggagtggatcggaggcgagccagtggcctttacaaacgggcgcaggggaccgagtcagcgatctaaactgggcaaaagttgcgtcctcgtccaacgccaggggaaatggcaaaccaaggattgtcgaagagccaagccccacaattatgtgtgttccaggaagctctag

SEQ ID NO: 309250 - DNA, 6540 bp, Artificial Sequence
  derived and/or modified sequence
atgaactctctgtcatggggagctgctaacgcagtgctgttgttacttttgttggcatgggcaagtcccactttcataagcattaatcgaggagtgcgcgtgatgaaaggccacagtgcttttctttcgggggacgacctcaaattcgcgatccctaaggaaaaggacgcttgtaaagtagaagtggtgatgaatgaacccattacccagcgagtggggaagcttacccctcaggtgttcgactgccacttcctccctaatgaagtgaagtacgtacataatggatgtccgatcctggacgaggacacagttaaactacggctctatcggttcaccgaacgagatacattcatcgagacttttattttatgggtgtaccttctcgaacctgattgcaatataatccacatgtcgaataacgtgctcgaggttcctgagtttaacgggttgtcccaggcgatagacaagaacttactgcgcttcgactatgataggatggccagccttgagtgtacagtgtccctagatacggcccgcactcgactgccagctcacgggcagatggttctgggcgaacctcggcccgaggaacctcgcggagaccagcctcatagcttctttcccgaatcacagctgcgagccaagctgaaatgcccaggcggcagctgcacgcctggactcaaaaagatcggctccctgaaagttagttgcgaggagttcctccttatgggcctgcggtaccaacacttggaccctccctcacctaacattgactatataagtatccagttggacctaaccgacacacggtctaagattgtgtataagagcgaaagcgcatggctaccagtctatattagggccggcattccaaaccagatccccaaggccgccttcatggccgttttcatcctggaagttgatcagtttatcctcacaagcttaaccacctcggtgctcgactgtgaggaagatgaaaccccaaagcccctgctggtgtttaatataaccaaagcgcccctgcagggctacgtgacccacctgctcgatcatacccggcccatcagctcatttacatggaaggatctcagcgacatgcagatagcctatcagccccctaactccagtcatagcgagagaagacatgatgaggtggagcttgaagtatacgacttctttttcgagcgctccgccccaatgactgtgcatatttccattcggactgccgacaccaacgccccacgagtatcatggaatacggggctgtcactgttggaaggtcaatcgcgcgccatcacttgggagcagttccaggttgtcgacaatgatgacatcggagccgtccgcctcgttaccgtcggcggactgcaacacggttggctcacattgaggggcggaaagggctttttgtttacagtggcagacttacaggctggcgttgtaagatatcatcacgatgatagtgactcaacaaaggactttgtagtgttcaggatcttcgacggtcaccatagcatacgccataagttccccatcaatgtgctccctaaggatgacagtccacctttcctcatcactaacgtagtaattgagctagaggagggccaaacaattctgatccagggaagtatgctccgcgccagcgatgtggacgcatccgacgattacatatttttcaatataacaaagcccccccaggctggtgagatcatgaaaaaaccggggcccggactgatagggtatcctgttcacggatttctgcagagagacctcttcaatggcatcatctattaccgtcactttgggggggaaatctttgaagattcatttcaatttgtgttgtgggactcacacgagccacctaatctctcagtccctcaggtggctaccatacacatcacccctgtcgatgaccagctgccaaaggaggcacccggcgtcagccggcatctcgtcgtcaaagaaactgaagtcgcttacattaccaagaagcagttgcactttattgactccgagagttacgatagggaactcgtgtacaccatcaccactccaccattcttctccttctcccaccgacacctggacgcagggaaactgttcatggtggacagtatccctaaggtggtcaagaatcccacggccctggaacttcgttccttcacccagcacgcggtgaactacatgaaagtggcctacatgccacccatgcaagacatcggcccacactgccgcgacgtgcaattcactttctctgtgtcgaaccagcatggaggaactctgcatggcatctgtttcaatatcactatcctcccggtggacaatcaggtgcccgaagcctttaccaatcctttgaaggtgaccgagggcggccagtctatcatctccaccgagcacatactgatcagcgatgctgatactaaactcgataacatagatctttcattacgcgagctacccctgcatggacgtgtggagttgaatggcttcccattaaattcaggtgggacctttagttggggcgacttgcacacactgaaggttcgataccagcacgacgggacagaagtgctccaggatgatttgctgctagaggtaaccgacggtaccaattcagccgagtttgttttgcacgtcgaagtgttcccagtcaatgatgagcctcctgtgctcaaggcagatctgatgcctgtcatgaattgtagcgagggcggcgaggtcgtgattacctccgagtacattttcgccaccgatgtggactcggacaatctcaagctcatgttcgtgatagcacgcgagccacagcatggtgttgtgcggagggcgggtgtcaccgtggatcagttctctcagcgtgatgtgatttccgaagcagtcacgtacaagcatactgggggcgagattggcttaatgccctgctttgatacgatcactctggttgtgagtgacggcgaagctggaccgtttgtgaacggctgctgctacaacggcccgaatccgtccgtcccactgcatgcttcattccctgtttatgatttgaacattactgtttatcccgtcgataaccagccccccagtattgcaataggccccgtgttcgttgtggatgaaggctgctctacggctctcaccgtgaaccatttgagcgctacagaccccgacaccgccgcagatgacctggagtttgtgctggtcagcccccctcagttcggttacctcgagaacattcttccaagcgtagggttcgaaaaatctaatattggaatttccatagacagctttcagtggaaagacatgaacgctttccatattaattacgttcagtccaggcacctgaggatagaaccaacagccgatcagtttactgtctacgtaacagacgggaagcaccactctctggaaatacctttcagcatcatcattaatcccaccaacgatgaagctcctgactttgttgttcagaacattactgtgtgcgagggccagatgaaggagcttgattcttcaatcatcagtgctgttgatcttgacattccacaagatgccctactcttctcaattacgcaaaaacctagacatggcctcctcattgatcgaggcttctctaaggatttcagcgaaaacaaacagcctgctaatccacatcagaaacacgcaccggtacattctttctcaatggaactactcaagaccggcatgagactgacatacatgcacgatgactcggagagcctggcggatgattttactattcagctgagcgatggtaagcataagattctgaagacgatttcagtcgaggtgattcctgtgaatgacgagaagccgatgctttctaaaaaagccgaaattgctatgaatatgggggagactcgaatcatcagcagcgcgattctttctgctatcgacgaggattctcctagagagaagatctactacgtgtttgaacggctgccgcagaatggacagttacagctgaaaattggcagagactgggttcctctgtccccaggcatgaaatgcacccaagaggaggtggacctcaacctactcaggtatactcacaccggcgccatggactcacaaaaccaagactctttcaccttttacttgtgggatggtaacaatcgctctccagccctggattgccagattacaatcaaggacatggagaaaggggacatcgtgatactgactaagccattggtagtgagtaaaggcgacaggggcttcttaacaaccaccaccttgctcgctgtagatggtaccgataagccagaggagctgctctacgtgattactagcccccctcggtacgggcagattgagtacgtccactacccaggagtacccatcaccaatttctcgcagatggacgtggtagggcagactgtctgttacgttcataagagcaaggtgaccgttagtagtgacagatttcgttttatcattagtaacggattgagaaccgagcacggggtttttgagattactctggaaacagtcgaccgcgcgcttcctgtggtcacccgcaacaaaggcctgagacttgcccagggagctgtgggcctgctgtcccccgacttgctgcagttaactgatcctgacactcctgctgaaaacctcacatttctgctggtacagctgccccagcatggtcagctgtatctctgggggaccggcctcctgcagcacaactttacacagcaagatgttgactccaaaaacgtagcctaccgccatagcgggggggatagccagacggactgcttcacgtttatggccacagacgggacaaaccagggatttattgtcaatggtagggtgtgggaggaaccagttctctttacaatccaagttgatcaactggacaaaacagcgcccagaattactcttctacattctccatcccaggtgggcctgctgaagaatggctgttacgggatctacatcacctcacgtgtgttaaaggcgtctgatcccgacaccgaagatgaccagattatctttaagattctccagggccccaagcatggccacctggagaatacaacaactggcgaatttattcacgagaaattttctcagaaagaccttaacagtaagactatactgtatatcatcaatccaagcctcgaggtcaattctgacactgtcgaattccagatcatggacccgacaggaaacagcgcaacacctcagatcctggagctcaaatggagtcacatagagtggtctcagactgagtacgaagtttgcgaaaacgtggggctcctcccactggagatcatcagaagaggctacagcatggattctgcattcgtgggcattaaagttaaccaggtatcagctgccgtgggaaaagactttaccgtcatcccatccaagctgatccagttcgatcccgggatgtcaacaaaaatgtggaatatagccattacgtatgacggcctcgaagaagacgacgaggtgtttgaggtcatactgaactcgcccgtgaacgctgtgctgggaaccaagacgaaggctgcagtaaagattctggattcaaagggcggacagtgccatcccagctattccagtaatcagtctaaacacagcacctgggaaaaagggatttggcatctgttacctcccgggtcttcttctagcaccacatccgggtccttccatctggaacgcagacccctcccctccagcatgcaacttgccgtcatccgcggggacacactccgtggatttgattctaccgatttaagccaaagaaagttgcgaaccagggggaatgggaagactgtgagaccaagctcggtttaccgcaatggaaccgatattatatataactatcatggcatcgttagcctgaagttagaggatgacagctttccaacgcacaagcgcaaagcaaaagtgagcatcataagccaacctcagaagaccatcaaggtggcagagctcccccaagctgataaagtggaaagcacaaccgacagccacttcccccggcaggatcagttgccctccttcccaaaaaactgcaccctggagctcaaagggttatttcacttcgaggaaggtatccaaaaactttatcagtgcaatggcatagcctggaaggcttggtctccccagaccaaagacgtcgaagataagtcgtgcccggctggttggcaccaacattcaggttactgccacatcctgatcacggaacagaaaggaacttggaatgcggccgctcaggcctgccgggaacagtacttggggaatttggtaaccgtcttttcccggcagcatatgaggtggctgtgggacatcggcggtcgcaaatccttctggataggactgaatgatcaggtgcacgccggccactgggaatggattggcggggagcccgtggcattcactaatggccgacgcggtcccagccaaagatcaaagttgggaaagtcttgcgtgctcgtccaaagacaagggaagtggcagacaaaagactgcagacgtgcgaagcctcacaactatgtctgcagtcggaagctgtag

SEQ ID NO: 309251 - DNA, 6540 bp, Artificial Sequence
  derived and/or modified sequence
atgaacagcctgtcctggggcgccgccaatgctgtgctgctgctgctgctgctggcctgggccagccccaccttcatcagcatcaacagaggagtgcgggtgatgaagggccacagcgccttcctgtctggagatgacctgaagtttgccatccccaaggagaaggatgcctgcaaggtggaggtggtgatgaatgagcccatcacccagagggtgggcaagctgaccccccaggtgtttgactgccacttcctgcccaatgaggtgaagtatgtgcacaacggctgccccatcctggatgaagatactgtgaagctgcggctgtaccgcttcacagagcgggacaccttcatcgagaccttcatcctgtgggtgtacctgctggagccagactgcaacatcatccacatgagcaacaacgtgctggaggtgcctgagttcaacggcctgagccaggccatcgacaagaacctgctgcgctttgattatgacaggatggccagcctggagtgcaccgtgtccctggacacagcccggacccggctgcctgcccacggccagatggtgctgggggagcccaggcctgaggagcccaggggggaccagccccacagcttcttccctgagagccagctgcgggccaagctgaagtgccctgggggcagctgcaccccaggcctgaagaagattggcagcctgaaggtgtcctgtgaggagttcctgctgatgggcctgcgctaccagcacctggacccccccagccccaacatcgactacatcagcatccagctggacctgacagacaccaggagcaagatcgtgtacaagtctgagagcgcctggctgcctgtgtacatccgggccggcatccccaaccagatccccaaggccgccttcatggctgtgttcatcctggaggtggaccagttcatcctgaccagcctgaccacctctgtgctggactgtgaggaggatgagacccccaagcccctgctggtgttcaacatcaccaaggcccccctgcagggctacgtgacccacctgctggaccacacccggcccatcagcagcttcacctggaaggacctgagtgacatgcagatcgcctaccagccccccaacagcagccacagcgagaggagacatgatgaggtggagctggaggtgtatgacttcttctttgagaggtctgcccccatgacagtgcacatcagcatcagaacagctgacaccaatgccccccgggtgtcctggaacacaggcctgagcctgctggagggccagagccgggccatcacctgggagcagttccaggtggtggacaatgatgacattggagctgtgcggctggtgacagtgggcggcctgcagcacggctggctgaccctgcggggcggcaagggcttcctgttcaccgtggccgacctgcaggccggcgtggtgcgctaccaccatgatgacagcgacagcaccaaggactttgtggtgttccgcatctttgatggccaccacagcatccgccacaagttccccatcaacgtgctgcccaaggatgacagcccccccttcctgatcaccaacgtggtgattgagctggaggagggccagaccatcctgatccagggctccatgctgcgggccagtgatgtggatgccagtgatgactacatcttcttcaacatcaccaagccaccccaggccggggagatcatgaagaagccaggccctggcctgattggctaccctgtgcacggcttcctgcagagggacctcttcaacggcatcatctactaccgccactttggaggagagatctttgaagattccttccagtttgtgctgtgggacagccatgagccccccaacctgtctgtgccccaggtggccaccatccacatcacccctgtggatgaccagctgcccaaggaggcccctggggtgagccgccacctggtggtgaaggagacagaggtggcctacatcaccaagaagcagctgcacttcattgattctgagagctatgaccgggagctggtgtacaccatcaccaccccacccttcttctccttcagccaccgccacctggatgctgggaagctgttcatggtggacagcatccccaaggtggtgaagaaccccacagccctggagctgcggagcttcacccagcacgctgtgaactacatgaaggtggcctacatgccacccatgcaggacatcggcccccactgcagagatgtgcagttcaccttctctgtgagcaaccagcacggcggcaccctgcacggcatctgcttcaacatcaccatcctgcctgtggacaaccaggtgcctgaggccttcaccaaccccctgaaggtgacagagggcggccagagcatcatcagcacagagcacatcctgatcagtgatgctgacaccaagctggacaacatcgacctgagcctgcgggagctgcccctgcacggccgggtggagctgaatggcttccccctgaacagcggcggcaccttctcctggggagacctgcacaccctgaaggtgcgctaccagcatgatggaacagaggtgctgcaggatgacctgctgctggaggtgacagatggcaccaacagcgctgagtttgtgctgcacgtggaggtgtttcctgtgaatgatgagccccctgtgctgaaggctgacctgatgcctgtgatgaactgcagcgagggcggggaggtggtgatcaccagcgagtacatctttgccacagatgtggacagcgacaacctgaagctgatgtttgtgattgcccgggagccccagcacggcgtggtgcggcgggccggcgtgacagtggaccagttcagccagagagatgtgatcagcgaggccgtgacctacaagcacactggaggagagatcggcctgatgccctgctttgacaccatcaccctggtggtgtctgatggagaggccggcccctttgtgaatggctgctgctacaacggccccaaccccagcgtgcccctgcacgccagcttccctgtgtatgacctgaacatcaccgtgtaccctgtggacaaccagccccccagcatcgccatcggccctgtgtttgtggtggatgagggctgcagcacagccctgactgtgaaccacctgagcgccacagatcctgacacagctgctgatgacctggagtttgtgctggtgtccccaccccagtttggctacctggagaacatcctgcccagcgtgggctttgagaagagcaacatcggcatcagcattgacagcttccagtggaaggacatgaatgccttccacatcaactacgtgcagagccgccacctgcgcatcgagcccacagctgaccagttcaccgtgtatgtgacagatggcaagcaccacagcctggagatccccttcagcatcatcatcaaccccaccaatgatgaggccccagactttgtggtgcagaacatcaccgtgtgtgagggccagatgaaggagctggacagcagcatcatctctgctgtggacctggacatcccccaggatgccctgctcttcagcatcacccagaagcccaggcatggcctgctgattgaccggggcttcagcaaggacttcagcgagaacaagcagcctgccaacccccaccagaagcacgcccctgtgcacagcttctccatggagctgctgaagacaggcatgaggctgacctacatgcatgatgacagcgagagcctggctgatgacttcaccatccagctgagtgatggcaagcacaagatcctgaagaccatctctgtggaggtgattcctgtgaatgatgagaagcccatgctgagcaagaaggccgagatcgccatgaacatgggagagacccgcatcatcagcagcgccatcctgagcgccattgatgaggacagcccccgggagaagatctactacgtgtttgagcggctgccccagaatggccagctgcagctgaagattggccgggactgggtgcccctgagccctggcatgaagtgcacccaggaggaggtggacctgaacctgctgcgctacacccacactggagccatggacagccagaaccaggacagcttcaccttctacctgtgggatggcaacaacagaagccctgccctggactgccagatcaccatcaaggacatggagaagggggacatcgtcatcctgaccaagcccctggtggtgtccaagggggaccggggcttcctgaccaccaccaccctgctggccgtggatggaacagacaagccagaggagctgctgtatgtgatcaccagcccccccaggtatggccagatcgagtatgtgcactacccaggagtgcccatcaccaacttcagccagatggatgtggtgggccagacagtgtgctacgtgcacaagagcaaggtgacagtgtccagtgaccgcttccgcttcatcatcagcaatggcctgaggacagagcacggcgtgtttgagatcaccctggagaccgtggaccgggccctgcctgtggtgaccagaaataaaggcctgcggctggcccagggcgctgtgggcctgctgagcccagacctgctgcagctgacagatcctgacaccccagctgagaacctgaccttcctgctggtgcagctgccccagcacggccagctgtacctgtggggcaccggcctgctgcagcacaacttcacccagcaggatgtggacagcaagaatgtggcctaccgccacagcggcggggacagccagacagactgcttcaccttcatggccacagatggcaccaaccagggcttcatcgtgaatggccgggtgtgggaggagcctgtgctcttcaccatccaggtggaccagctggacaagacagccccccgcatcaccctgctgcacagccccagccaggtgggcctgctgaagaatggctgctacggcatctacatcaccagccgggtgctgaaggccagtgaccctgacacagaagatgaccagatcatcttcaagatcctgcagggccccaagcacggccacctggagaacaccaccaccggggagttcatccacgagaagttcagccagaaggacctgaacagcaagaccatcctgtacatcatcaaccccagcctggaggtgaacagcgacacagtggagttccagatcatggaccccactggaaacagcgccaccccccagatcctggagctgaagtggagccacatcgagtggagccagacagaatatgaggtgtgtgaaaatgtgggcctgctgcccctggagatcatcagaagaggctacagcatggacagcgcctttgtgggcatcaaggtgaaccaggtgtctgctgctgtgggcaaggacttcaccgtcatccccagcaagctgatccagtttgaccccggcatgagcaccaagatgtggaacatcgccatcacctatgatggcctggaggaggatgatgaggtgtttgaagtcatcctgaacagccctgtgaatgctgtgctgggcaccaagaccaaggctgctgtgaagatcctggacagcaaaggaggccagtgccaccccagctacagcagcaaccagagcaagcacagcacctgggagaagggcatctggcacctgctgcccccaggcagcagcagcagcaccaccagcggcagcttccacctggagcggcggcccctgcccagctccatgcagctggccgtcatccggggggacaccctgcggggctttgacagcacagacctgagccagaggaagctgcggaccagaggaaatggcaagacagtgcggcccagctctgtgtacagaaatggaacagacatcatctacaactaccacggcatcgtgtccctgaagctggaggatgacagcttccccacccacaagaggaaggccaaggtgtccatcatcagccagccccagaagaccatcaaggtggccgagctgccccaggccgacaaggtggagagcaccacagacagccacttcccccggcaggaccagctgcccagcttccccaagaactgcaccctggagctgaagggcctcttccactttgaggagggcatccagaagctgtaccagtgcaatggcatcgcctggaaggcctggagcccccagaccaaggatgtggaggacaagagctgcccagctggctggcaccagcacagcggctactgccacatcctgatcacagagcagaagggcacctggaatgctgctgcccaggcctgccgggagcagtacctgggcaacctggtgaccgtcttcagccggcagcacatgcgctggctgtgggacattggaggcaggaagagcttctggattggcctgaatgaccaggtgcatgctggccactgggagtggattggaggagagcctgtggccttcaccaacggccggcggggccccagccagaggagcaagctgggcaagagctgtgtgctggtgcagaggcagggcaagtggcagaccaaggactgccggcgggccaagccccacaactacgtgtgcagcaggaagctgtag

SEQ ID NO: 309252 - DNA, 6543 bp, Artificial Sequence
  derived and/or modified sequence
atgaacagcctgtcctggggcgccgccaatgctgtgctgctgctgctgctgctggcctgggccagccccaccttcatcagcatcaacagaggagtgcgggtgatgaagggccacagcgccttcctgtctggagatgacctgaagtttgccatccccaaggagaaggatgcctgcaaggtggaggtggtgatgaatgagcccatcacccagagggtgggcaagctgaccccccaggtgtttgactgccacttcctgcccaatgaggtgaagtatgtgcacaacggctgccccatcctggatgaagatactgtgaagctgcggctgtaccgcttcacagagcgggacaccttcatcgagaccttcatcctgtgggtgtacctgctggagccagactgcaacatcatccacatgagcaacaacgtgctggaggtgcctgagttcaacggcctgagccaggccatcgacaagaacctgctgcgctttgattatgacaggatggccagcctggagtgcaccgtgtccctggacacagcccggacccggctgcctgcccacggccagatggtgctgggggagcccaggcctgaggagcccaggggggaccagccccacagcttcttccctgagagccagctgcgggccaagctgaagtgccctgggggcagctgcaccccaggcctgaagaagattggcagcctgaaggtgtcctgtgaggagttcctgctgatgggcctgcgctaccagcacctggacccccccagccccaacatcgactacatcagcatccagctggacctgacagacaccaggagcaagatcgtgtacaagaagtctgagagcgcctggctgcctgtgtacatccgggccggcatccccaaccagatccccaaggccgccttcatggctgtgttcatcctggaggtggaccagttcatcctgaccagcctgaccacctctgtgctggactgtgaagaagatgagacccccaagcccctgctggtgttcaacatcaccaaggcccccctgcagggctacgtgacccacctgctggaccacacccggcccatcagcagcttcacctggaaggacctgagtgacatgcagatcgcctaccagccccccaacagcagccacagcgagaggagacatgatgaggtggagctggaggtgtatgacttcttctttgagaggtctgcccccatgacagtgcacatcagcatcagaacagctgacaccaatgccccccgggtgtcctggaacacaggcctgagcctgctggagggccagagccgggccatcacctgggagcagttccaggtggtggacaatgatgacatcggggctgtgcggctggtgacagtgggcggcctgcagcacggctggctgaccctgcggggcggcaagggcttcctgttcaccgtggccgacctgcaggccggcgtggtgcgctaccaccatgatgacagcgacagcaccaaggactttgtggtgttccgcatctttgatggccaccacagcatccgccacaagttccccatcaacgtgctgcccaaggatgacagcccccccttcctgatcaccaacgtggtgattgagctggaggagggccagaccatcctgatccagggctccatgctgcgggccagtgatgtggatgccagtgatgactacatcttcttcaacatcaccaagccaccccaggccggggagatcatgaagaagccaggccctggcctcatcggctaccctgtgcacggcttcctgcagagggacctcttcaacggcatcatctactaccgccactttggaggagagatctttgaggacagcttccagtttgtgctgtgggacagccatgagccccccaacctgtctgtgccccaggtggccaccatccacatcacccctgtggatgaccagctgcccaaggaggcccctggggtgagccgccacctggtggtgaaggagacagaggtggcctacatcaccaagaagcagctgcacttcatcgacagcgagagctatgaccgggagctggtgtacaccatcaccaccccacccttcttctccttcagccaccgccacctggatgctgggaagctgttcatggtggacagcatccccaaggtggtgaagaaccccacagccctggagctgcgctccttcacccagcacgctgtgaactacatgaaggtggcctacatgccacccatgcaggacatcggcccccactgcagagatgtgcagttcaccttctctgtgagcaaccagcacggcggcaccctgcacggcatctgcttcaacatcaccatcctgcctgtggacaaccaggtgcctgaggccttcaccaaccccctgaaggtgacagaaggaggccagagcatcatcagcacagagcacatcctgatcagtgatgctgacaccaagctggacaacatcgacctgagcctgcgggagctgcccctgcacggccgggtggagctgaatggcttccccctgaacagcggcggcaccttctcctggggagacctgcacaccctgaaggtgcgctaccagcatgatggaacagaggtgctgcaggatgacctgctgctggaggtgacagatggcaccaacagcgctgagtttgtgctgcacgtggaggtgtttcctgtgaatgatgagccccctgtgctgaaggctgacctgatgcctgtgatgaactgcagcgagggcggggaggtggtgatcaccagcgagtacatctttgccacagatgtggacagcgacaacctgaagctgatgtttgtgattgcccgggagccccagcacggcgtggtgagaagagctggggtgacagtggaccagttcagccagagagatgtgatcagcgaggccgtgacctacaagcacactggaggagaaattggcctgatgccctgctttgacaccatcaccctggtggtgtctgatggagaggccggcccctttgtgaatggctgctgctacaacggccccaaccccagcgtgcccctgcacgccagcttccctgtgtatgacctgaacatcaccgtgtaccctgtggacaaccagcccccatccatcgccatcggccctgtgtttgtggtggatgagggctgcagcacagccctgactgtgaaccacctgagcgccacagatcctgacacagctgctgatgacctggagtttgtgctggtgagccccccccagtttggctacctggagaacatcctgcccagcgtgggctttgagaagagcaacatcggcatcagcattgacagcttccagtggaaggacatgaatgccttccacatcaactacgtgcagagccgccacctgagaattgagcccacagctgaccagttcaccgtgtatgtgacagatggcaagcaccacagcctggagatccccttcagcatcatcatcaaccccaccaatgatgaggccccagactttgtggtgcagaacatcaccgtgtgtgagggccagatgaaggagctggacagcagcatcatctctgctgtggacctggacatcccccaggatgccctgctcttcagcatcacccagaagcccaggcatggcctgctgattgaccggggcttcagcaaggacttcagcgagaacaagcagcctgccaacccccaccagaagcacgcccctgtgcacagcttctccatggagctgctgaagacaggcatgaggctgacctacatgcatgatgattctgagagcctggctgatgacttcaccatccagctgagtgatggcaagcacaagatcctgaagaccatctctgtggaggtgattcctgtgaatgatgagaagcccatgctgagcaagaaggccgagatcgccatgaacatgggagagacccgcatcatcagcagcgccatcctgagcgccattgatgaggacagcccccgggagaagatctactacgtgtttgagcggctgccccagaatggccagctgcagctgaagattggccgggactgggtgcccctgagccctggcatgaagtgcacccaggaggaggtggacctgaacctgctgcgctacacccacactggagccatggacagccagaaccaggacagcttcaccttctacctgtgggatggcaacaacagaagccctgccctggactgccagatcaccatcaaggacatggagaagggggacatcgtcatcctgaccaagcccctggtggtgtccaaaggagaccggggcttcctgaccaccaccaccctgctggccgtggatggaacagacaagccagaggagctgctgtatgtgatcaccagccccccaagatatggccagattgaatatgtgcactacccaggagtgcccatcaccaacttcagccagatggatgtggtgggccagacagtgtgctacgtgcacaagagcaaggtgacagtgtccagtgaccgcttccgcttcatcatcagcaatggcctgaggacagaacatggagtgtttgagatcaccctggagaccgtggaccgggccctgcctgtggtgaccaggaacaagggcctgcggctggcccagggcgctgtgggcctgctgagcccagacctgctgcagctgacagatcctgacaccccagctgagaacctgaccttcctgctggtgcagctgccccagcacggccagctgtacctgtggggcaccggcctgctgcagcacaacttcacccagcaggatgtggacagcaagaatgtggcctaccgccacagcggcggggacagccagacagactgcttcaccttcatggccacagatggcaccaaccagggcttcatcgtgaatggccgggtgtgggaggagcctgtgctcttcaccatccaggtggaccagctggacaagacagccccccgcatcaccctgctgcacagccccagccaggtgggcctgctgaagaatggctgctacggcatctacatcaccagccgggtgctgaaggccagtgaccctgacacagaagatgaccagatcatcttcaagatcctgcagggccccaagcacggccacctggagaacaccaccactggagagttcatccacgagaagttcagccagaaggacctgaacagcaagaccatcctgtacatcatcaaccccagcctggaggtgaacagcgacacagtggagttccagatcatggaccccaccggcaacagcgccaccccccagatcctggagctgaagtggagccacatcgagtggagccagacagaatatgaggtgtgtgaaaatgtgggcctgctgcccctggagatcatccggcggggctacagcatggattctgcctttgtgggcatcaaggtgaaccaggtgtctgctgctgtgggcaaggacttcaccgtcatccccagcaagctgatccagtttgatcctggcatgagcaccaagatgtggaacatcgccatcacctatgatggcctggaggaggatgatgaggtgtttgaggtgatcctgaacagccctgtgaatgctgtgctgggcaccaagaccaaggctgctgtgaagatcctggacagcaagggcggccagtgccaccccagctacagcagcaaccagagcaagcacagcacctgggagaagggcatctggcacctgctgcccccaggcagcagcagcagcaccaccagcggcagcttccacctggagcggcggcccctgcccagctccatgcagctggccgtcatccggggggacaccctgcggggctttgacagcacagacctgagccagaggaagctgcggaccagaggaaatggcaagacagtgcggcccagctctgtgtacagaaatggaacagacatcatctacaactaccatggaattgtgtccctgaagctggaggatgacagcttccccacccacaagaggaaggccaaggtgtccatcatcagccagccccagaagaccatcaaggtggccgagctgccccaggccgacaaggtggagagcaccacagacagccacttcccccggcaggaccagctgcccagcttccccaagaactgcaccctggagctgaagggcctcttccactttgaggagggcatccagaagctgtaccagtgcaatggaattgcctggaaggcctggagcccccagaccaaggatgtggaggacaagagctgcccagctggctggcaccagcacagcggctactgccacatcctgatcacagagcagaagggcacctggaatgctgctgcccaggcctgccgggagcagtacctgggcaacctggtgacagtgttcagccggcagcacatgcgctggctgtgggacatcggcggcaggaagagcttctggattggcctgaatgaccaggtgcacgccggccactgggagtggattggaggagagcctgtggccttcaccaatggaagaagaggccccagccagaggagcaagctgggcaagagctgtgtgctggtgcagaggcagggcaagtggcagaccaaggactgcagaagagccaagccccacaactacgtgtgcagcaggaagctgtag

SEQ ID NO: 309253 - DNA, 6540 bp, Artificial Sequence
  derived and/or modified sequence
atgaacagcctgagctggggcgccgccaacgccgtgctgctgctgttgctgctggcttgggcctctcctaccttcattagtattaacagaggcgtgagggtgatgaaagggcacagcgctttccttagtggagatgatctgaaatttgccattcctaaagaaaaggatgcgtgtaaggttgaagtcgtgatgaacgaacctattacccagagagttggcaaactcaccccgcaggtatttgactgccacttcctcccaaacgaagtgaagtacgtacacaacgggtgcccaattcttgacgaggatacagtcaagcttcgattataccgctttacagagcgcgataccttcattgaaacctttatcctgtgggtatacctgctggaacccgactgcaacatcatccacatgagcaacaacgtcctggaagtgccggaatttaatggtctcagtcaggccattgataagaacctgctaagattcgactacgatcgtatggcgtctctcgaatgtaccgtaagcctcgacacagctaggacaaggcttccggcacatgggcaaatggtgctgggagagcctcgaccagaggaaccacgaggagaccagccccacagtttctttccggaaagccagctacgggctaaattgaagtgtcctggaggaagctgcacaccaggattgaagaaaataggctctctgaaagttagctgtgaggagttcctcctcatgggtctccggtaccagcatcttgatccgccctcgcccaacattgattatattagtatccaactggatctgactgacacaagatccaaaatagtctacaagagcgagtcagcctggcttcctgtgtacatacgtgctggaatccctaaccaaattcccaaggccgcctttatggcagtgtttatcctggaggtcgaccagtttattctcacatccctcacgacgagcgtcttggactgcgaggaggacgagacacccaagccactgcttgtctttaacatcaccaaagcacccctacaaggctatgtgacccatctgctggatcatacgagacctatttcttccttcacatggaaggatttgtccgacatgcagatcgcataccagccacccaacagttctcactccgagagaaggcatgacgaggtagagctcgaggtgtatgattttttttttgaacgctcagctccgatgaccgtgcatatcagtatcagaaccgcagatacaaatgctccccgggtctcctggaatacaggtctgagcctcctcgaggggcagagccgggcaatcacatgggagcagttccaggtcgtggacaacgacgacattggcgccgtgcgcctagtcacagtaggcgggctgcagcacggctggctgaccctgaggggtgggaagggcttcctgttcactgttgctgatctacaggcgggcgtggtgaggtaccaccatgacgattctgacagtaccaaggacttcgtcgtttttagaatctttgatgggcatcacagcattcgtcacaaatttccaataaacgtgctgccaaaagacgatagtccaccattccttatcacaaacgttgtcatcgaactggaggaaggtcagaccattctaattcagggctctatgctacgtgcatctgatgtggatgcatccgatgattacatattctttaatataaccaaaccacctcaagcaggagagatcatgaaaaagcccgggcctggcctaattggctatccagtgcacggattcctccaacgagatctatttaatggtataatctattacaggcacttcggcggagagatcttcgaggatagtttccagtttgtactgtgggacagccatgaaccgcctaatctgtcagtgccgcaagtagcaaccattcatatcacccctgtcgatgaccaacttcctaaagaagcccctggagtgagtaggcatcttgttgtaaaagaaacagaggtggcttacataaccaaaaagcagctccatttcatagattctgagagttatgaccgggaactcgtatacacaatcaccactccgccattcttctcatttagccaccggcatctggatgctgggaagttgtttatggtggatagtatccccaaggtcgtcaagaatccaacggccctggaactgcgtagcttcacacagcatgccgtgaattatatgaaggtcgcgtacatgcccccaatgcaagatattggtccgcactgcagggacgtgcaatttaccttcagtgtgtcaaatcagcatggcggcacactccatggcatctgtttcaacataactattcttcctgtcgacaatcaggtgcctgaggcctttactaatcctttgaaggtgaccgagggagggcagtcaatcatcagtaccgaacatatcttaatctccgatgccgatactaaattagataatattgacttgtcgctgcgggagttaccgcttcatggtcgtgttgaactgaacggttttccgctgaatagtggcggcacattctcctggggagacctgcatacactgaaagtgcgataccaacatgacggaacagaagtgctgcaagatgatttattgctcgaagtgaccgacggcaccaacagcgcagagtttgtgctccatgtcgaggttttccccgtaaatgatgagcccccggtcctgaaagcggacctgatgcctgtaatgaattgctctgaaggcggagaggtcgtcatcacttcagagtacatcttcgcgactgacgtggacagcgacaacctcaagctaatgttcgtcatcgcccgggaacctcagcatggcgtggtgaggagagctggtgttaccgtggaccagttttcacaaagagatgttatttcagaggccgtgacctacaaacacaccggcggagagattggcctcatgccatgctttgacaccatcacgctagttgtgagtgacggggaagcagggccatttgtgaacggttgttgttataatggaccaaaccccagcgttccactgcacgcctcatttcctgtgtatgacctcaatatcactgtatatcctgtagacaatcaaccaccaagcattgcaattgggcctgtttttgttgttgacgagggctgctcaaccgcccttacggtcaatcatctgtcggctacggatccagataccgccgcagatgacttggaattcgtgcttgtatcgccaccacagtttggataccttgagaacatccttccgagtgtcggcttcgaaaagtccaatatagggatctcgatagactcctttcagtggaaagatatgaacgcctttcacattaattacgtgcagtcccggcacctcagaatcgaaccgacagccgatcagttcacggtgtatgtgacggacggtaaacaccactcactggaaataccgttcagtatcattattaaccctaccaacgacgaggcccccgatttcgtggtgcagaacatcaccgtctgcgaggggcagatgaaagagctggactcctctatcatcagtgccgtggatcttgacattccacaggatgcactgcttttcagcattactcagaagcctaggcatggcttgctcattgatagaggcttctccaaggacttcagcgagaataaacagcccgcaaatccacatcaaaaacatgctcctgtgcattccttttcgatggagctgttaaaaacgggcatgcgcctgacctacatgcacgatgattctgagtccctggctgacgacttcactatccaattgagcgacgggaaacacaagattctgaagactatctccgtggaagtaatccccgtcaacgatgagaagcctatgttatctaagaaggccgaaatcgcaatgaacatgggagagacaagaattatttcctctgcgatcctgtcagcgatagacgaagatagtcccagggagaagatttactacgtgttcgaaaggctacctcagaacggccaacttcagttgaagattggcagggattgggtacctttatcccccgggatgaagtgtactcaagaggaggtggatctcaatctgctccggtacacccacacgggcgcgatggactctcaaaatcaagacagcttcacgttttacctgtgggacggtaataaccgtagccccgctctcgactgtcaaattacaatcaaggatatggaaaagggggatatcgtgattctcaccaagccattggtggtaagcaaaggggaccgaggcttcctgacgacgactacattactcgccgtcgacggaacggacaagcccgaagaattgctgtacgtcattaccagcccccctaggtacggacaaatcgagtacgtgcattaccccggcgtgcctataactaatttttcccagatggacgttgtcgggcagacggtttgctatgtgcataagtccaaagttactgtgagtagtgacagattcagatttataataagtaacggcctgagaaccgaacacggtgtgtttgagattactctcgaaaccgtagatcgtgcgctgcctgtggttactaggaacaaaggtctgaggctggcacagggggccgtcgggttactaagtccagatctgctccagttaactgatccggatacacccgctgagaatctaacctttctgctggtgcagctgccgcagcatgggcagctctacttgtggggaactggcctcctgcagcataacttcactcaacaggatgttgacagcaaaaatgtcgcctaccgccattctggtggggatagtcagaccgattgcttcaccttcatggcgacagacggtacaaaccaggggtttattgttaatgggcgcgtttgggaggagcccgtgctgtttaccatccaggttgatcagctcgacaagaccgccccaagaattacccttctccatagcccatctcaggttggactgttgaagaacggctgctacggaatctatatcacatcacgagttttgaaggcatctgacccagatactgaggacgaccagatcatttttaagattctgcagggaccaaaacatgggcaccttgaaaacacaacaacaggagagttcatacacgagaagttttcacagaaggacttgaactccaaaaccatcctctacatcattaatccaagtctcgaggtgaactctgatacagttgaattccagattatggacccgactggcaatagcgctacgccacaaattctcgaactgaagtggagtcatatcgagtggtcacagacagaatacgaggtctgtgagaatgtcggtttgcttcccttggaaatcattcgccgaggctattccatggatagtgcctttgtggggattaaagtcaaccaagtctcggctgcggtcggcaaggatttcaccgtgatcccttccaaactgattcagtttgacccaggtatgagtacaaaaatgtggaacattgctatcacttacgatgggctcgaggaagatgacgaggtttttgaagttattctgaatagtccagttaacgctgtgttgggcacaaagaccaaggcagcagtgaaaatccttgacagtaaaggcggacagtgccatccctcttatagctcaaaccagtctaagcatagtacatgggagaagggtatctggcatttgttgccaccgggatccagtagcagtaccacgagtgggtccttccacctggagaggagacctcttccaagtagtatgcagctcgctgtcattcggggggacactctcaggggctttgacagcacggacctctctcagcgaaagttaagaacaaggggtaacggtaagacagttagaccctcatctgtgtataggaatgggaccgacatcatttataactaccacggcattgtgtcccttaaattggaagatgactccttccctacccataaaagaaaagccaaggtgtccatcatttctcagcctcagaaaacaatcaaagtcgcggagctgccccaggccgataaggtagagtccacgacggattcccactttccaaggcaggaccagctgccatccttccccaagaactgcacccttgaactcaagggtctgtttcacttcgaggagggtatccagaagctgtaccagtgcaatggtatcgcctggaaggcctggtccccacagacaaaggacgtcgaggacaaatcatgccctgccggctggcaccagcactctggctactgtcacatcttgattacggaacagaagggtacatggaatgccgccgcgcaggcctgccgggaacagtatcttgggaacctcgtgacagtgttctcacgccagcacatgcggtggctttgggacattggcggaagaaagagtttctggatcggtctgaatgatcaggttcacgcagggcattgggaatggattggcggggaacctgtagcgttcaccaacgggcggagggggcccagtcagaggagtaaactggggaaaagctgcgtccttgttcaaaggcaaggcaagtggcagaccaaggactgtcgcagggccaagcctcacaactacgtgtgctcccgaaagctctag

SEQ ID NO: 309254 - DNA, 6543 bp, Artificial Sequence
  derived and/or modified sequence
atgaacagcctgagctggggcgccgccaacgccgtgctgctgctgctcctgttggcatgggcctctccaaccttcattagtatcaatcggggtgtgagggtcatgaaaggacactccgccttcctgagcggcgacgacttaaaattcgcgataccaaaagaaaaagatgcatgcaaggtcgaggtcgtgatgaacgagcctataacccaaagagtgggcaagttgacaccccaggtgtttgattgtcacttcctccccaacgaggtgaaatacgttcacaatggctgccccatcctcgatgaagatactgtgaaactgaggctgtaccgctttacggagagggacaccttcattgagaccttcatcctgtgggtctatttactggaaccggactgcaatattatccacatgtctaataacgtcctagaagttccagagttcaacggcctgagtcaggccatcgacaagaacctgctgagattcgactatgataggatggcgtcgctagaatgcacagtgtcattagacactgctcggacaagactgcctgcccatgggcagatggtactcggcgagccaaggccggaggaaccaagaggtgaccagccccattcttttttcccagaaagccagttgagagctaagctgaaatgtccagggggatcctgtacgccgggccttaagaagattgggagcttaaaggttagttgtgaagagttcctactaatgggcctccgttatcagcacctggaccctccttcgcccaacatagattacatttctatccagttagacctcacagacaccaggtctaaaattgtatataagaaaagcgaatctgcctggcttcccgtttatatccgcgccggaattcctaaccagattccaaaagccgcctttatggcagttttcattctggaagtggaccaattcatcctgacaagtcttacgactagtgtgcttgattgtgaagaagatgaaacccctaaaccgcttctcgtatttaatattaccaaggcaccgctacaaggctacgtgacacaccttctagatcacacccggccgatttcctcttttacttggaaggatctttccgatatgcagattgcctatcagcctcctaacagctcacacagtgaacgccgtcatgatgaggttgaactcgaggtttatgacttcttttttgagaggtctgccccaatgactgtccatatttctatccggactgcagacacaaatgccccacgcgttagctggaacactggccttagcttattggaaggccagtctcgtgcaattacgtgggaacagtttcaggtcgtcgataacgatgatatcggtgccgtcagactagtcaccgtcgggggactgcagcacggctggcttaccctgagaggcgggaaaggcttcctgttcaccgttgcagacctccaggctggagtcgtgcggtaccaccatgacgatagtgacagcacaaaagactttgtagtgttccgtatatttgatggccaccattcaatccggcacaaattccctataaacgttctgccaaaagacgactcgccacccttcttaataacaaatgtcgtcatcgaactggaggagggtcagacaatcttgatccaggggtccatgctgcgcgcctcggatgttgatgccagtgatgattacatctttttcaatatcactaaaccccctcaggcgggtgagatcatgaagaaacctggacccggacttatcggctaccctgtccacggattccttcagagagacttgttcaacgggatcatctactaccggcattttggcggggagatatttgaggactcttttcagttcgtgttgtgggatagccacgaacccccaaatttgtccgtccctcaggtggcaacgattcacatcacaccggtggacgatcagctgcccaaagaggcccctggcgtcagtaggcatctggttgtgaaggaaacagaggtcgcctatatcacgaagaaacagcttcactttatcgattccgaaagctacgacagagaactcgtgtataccatcacgactcctccctttttcagcttttcccatcgccacctagacgccggcaaactgtttatggtcgacagtattcccaaggtggttaagaatccgacggcactggagctgcgatcgttcactcagcacgccgtcaactatatgaaagtagcttatatgcctccaatgcaggatattggacctcactgcagggatgtgcagttcacatttagtgtctcaaatcaacacgggggcactctgcatgggatatgctttaacataacaatactacccgtcgacaatcaggtacctgaagctttcacaaaccccctcaaggtgactgagggcggccagagtattatcagcaccgagcatatcttgatctctgatgctgacacaaagctggacaatattgatttgagcctcagagaactgccactgcacggtagagtggagctgaacgggtttccactcaattctggcggcactttttcctggggggacctacatactctcaaagtcagataccagcatgatggcactgaagtcctccaagatgatttgctgctggaagttacagatggaactaactccgccgagttcgtcttgcacgtagaagtctttccagtcaatgatgagcccccggtcctgaaagccgacttgatgccagttatgaattgcagtgaagggggagaggtggtgatcacctcagaatacatatttgccaccgatgtggatagtgataatcttaaactgatgttcgttattgcccgtgagccccagcacggcgtcgtgcgtagggccggcgtgacagtggatcaattctctcagagggacgtaatttccgaggccgttacatacaaacatactggcggcgagatcgggctcatgccctgtttcgacacaataacgttggttgtttcagacggtgaggccggccctttcgtgaatggttgctgctacaacggaccgaatccctccgtgccactccacgctagtttccccgtgtatgacctgaacatcacggtgtatcctgtagacaaccagcctccttctattgcgataggccccgtcttcgtcgttgacgaaggatgttcgactgccctgactgtgaaccacctgagcgccacagatccagatacggctgcagatgacttagagttcgtgttggtcagcccaccccagtttggctacctggagaacatactgccaagcgtgggtttcgagaaaagcaacattggcatctccatcgatagcttccagtggaaagatatgaacgcattccacataaattacgtgcagagccgtcacctcaggattgagcccacagcggaccaatttactgtctacgtgacagatggcaagcatcactctctagaaattccgtttagtattatcattaatccaacaaacgacgaggctcccgattttgtggtacagaatattaccgtttgtgaaggacagatgaaagagctggacagtagtatcattagcgccgtcgatttggacattccacaagatgccctactgttcagcatcacacaaaagccaagacatggacttttaatcgacaggggctttagcaaagacttttcagaaaacaagcaaccagcgaaccctcatcaaaaacacgcccccgtccactctttctcgatggaactcctgaaaactggtatgcggctgacgtacatgcacgacgacagcgaatctctagccgatgactttacgatccaattgtccgatgggaagcacaaaatactgaagactatctccgtggaagtcattcccgtgaacgatgagaaaccaatgctcagtaaaaaggcagaaattgcgatgaatatgggtgagacccgaataatatcctcagcaatcctcagtgctattgacgaagactcaccaagggagaagatctattatgtctttgagaggcttccacagaacggacagctgcagctaaagatcgggagggattgggttcccctatcaccagggatgaagtgtacacaggaagaagtagatttaaatttgttgagatacacccatactggggccatggactcccagaatcaggatagcttcaccttctatctgtgggacgggaacaaccgcagcccagcactggactgtcagattacaatcaaggacatggagaagggggatatcgttattctgacgaaacctctagttgttagcaagggtgatcgcggattccttacaacgactacattgctcgctgtggacggcactgacaaacccgaagagctcctatacgttattacgagcccaccaaggtatggccaaatcgaatacgtccattaccctggtgtcccaatcaccaatttttcacagatggatgttgtgggacaaactgtatgctatgtgcacaagagcaaagttacagtgagctccgataggtttcggtttatcataagtaatggacttcgaaccgagcacggagtgttcgaaattactctcgaaacagttgacagagctctgcctgtcgttacacgtaataagggccttcgcctcgctcaaggcgcagtgggcctgctgagcccggatctcctccagctgaccgacccggacacacctgctgaaaatttaacttttctgctggtccagcttccacaacatggtcaactctacctgtggggcaccgggctgctgcagcataacttcacgcagcaggatgtggactcaaaaaacgtagcttacagacatagcggcggggattcgcagacagactgcttcacgttcatggctaccgacgggactaaccaaggttttatcgtgaacggcagagtctgggaggaacctgtgctgtttactattcaggtcgatcagctggataagactgcccctcgcatcaccttgttgcacagtccaagtcaagtagggctcctcaagaatggctgctacggaatctacattacctcgcgggttctcaaggcctctgatcccgacacagaggatgatcaaatcatctttaaaattttgcaagggcctaagcacggacacctggagaacacaacaaccggggagtttattcatgaaaagtttagccagaaggatttaaactcaaagacgattctctacattatcaatcccagcctggaagtgaattcagacaccgtagagttccagatcatggaccccaccggtaatagcgcgacccctcagatcctcgagctgaagtggtcacatattgagtggagtcaaacagagtacgaagtctgtgaaaatgtgggcctgcttcccctggagatcatccgtcgaggctacagcatggacagcgccttcgtggggattaaagttaatcaggtctcagcagctgtggggaaggattttacggttattcccagcaagctaatccaatttgaccccggaatgagtacaaagatgtggaatatagctatcacttatgatgggctcgaggaggacgacgaagtttttgaagttattcttaattcaccagtcaatgccgtgttgggcactaagaccaaggcagctgtaaagatcctggacagtaaaggcggccagtgccacccatcttattcctcgaatcaaagtaagcacagtacatgggagaagggaatctggcatctcctgcctcccggctcgagtagcagtaccacctcgggatcatttcacctggagcgtaggcctttgccaagttctatgcaactggcagtgattcggggcgacactctccgcggatttgattcgacagacctgagtcagcgtaaacttcgaaccaggggcaacggaaaaacggttcgacccagtagtgtgtaccgaaacggtacagatattatctacaactatcacgggatcgtctccttaaagctcgaggacgatagcttcccaactcacaagagaaaggcaaaggtgtccattataagtcagccacagaaaaccattaaggtggcagagctgccacaggctgataaagtggaatctaccaccgatagtcactttccacgacaggaccaactccctagctttcctaagaactgcactcttgagctgaaggggttgttccatttcgaggagggcattcagaagctgtaccagtgcaacggaattgcctggaaagcctggagtccacagactaaagacgtcgaggataagtcttgccctgcgggttggcaccagcattccggatattgtcatattctcatcactgagcagaagggcacttggaatgctgcagctcaagcctgccgtgagcagtacttgggtaatctcgtgaccgttttctccaggcagcacatgcggtggctctgggacatcggtgggcgaaaaagcttctggatcggcctgaacgaccaggttcatgccggccactgggagtggatcgggggagaacctgtggcctttacaaacggccgccggggaccctcacagagatccaaactcgggaaatcctgcgtactggtacagcgccaaggcaagtggcagaccaaagactgtcggagagctaagcctcacaattacgtgtgctctagaaaactctag

SEQ ID NO: 309255 - DNA, 6540 bp, Artificial Sequence
  derived and/or modified sequence
atgaacagcctgagctggggcgccgccaacgccgtgctgctgctgctcctgcttgcgtgggccagtcccacattcattagcattaatcgcggcgtgagggtcatgaaaggacattccgccttcctgagcggcgatgatctgaaatttgccataccgaaagaaaaagacgcatgtaaagtggaggtggtgatgaatgaaccaataacacagagggtcggaaagctgaccccccaagtgtttgattgccactttctgccaaatgaagtcaaatacgttcataatggctgtcccattctggatgaggacacagtgaagttacggctgtaccgctttaccgagagggatacctttattgagacattcatcctttgggtttacctgctggaacccgattgcaatatcatccatatgtctaacaacgtgctggaggttcctgagttcaacgggcttagtcaagccatcgataaaaatttgctgcgcttcgactacgaccgaatggccagcctggaatgtaccgtgtcgttggatacagctcgcacaaggctgccagcccacggacagatggtattgggcgagccccggcccgaggagccaaggggagaccagccacatagcttttttccggagtcacaacttcgggctaagctaaaatgtcctggaggcagctgcacgccaggccttaagaagataggaagcctcaaggtctcatgcgaggaattcctgctgatgggactgagataccagcatttagacccaccctcccctaatattgattatatttcaatccagctggatctgactgacacccgttcaaagatcgtgtacaaaagtgaatccgcgtggctgccagtctacatcagagctggaatccctaatcagatacccaaggcagcatttatggcagtgttcatccttgaagtggatcagtttattctcacctctctgaccacgagtgtactggactgcgaggaagacgagactcctaagcccctcttagtcttcaatatcaccaaagctcctcttcaggggtacgtgactcatcttctggatcacacgaggcctatctcaagtttcacttggaaagatcttagtgatatgcaaatcgcatatcagcctcccaattcatcacatagcgagagaaggcacgacgaggtcgagctggaagtgtacgatttctttttcgagaggtcagcgccgatgacggttcatatctctataagaaccgcggacaccaacgccccacgtgtgtcctggaataccggtctcagcctgctggaaggccaaagccgcgccatcacttgggaacaattccaggtcgtggataatgatgacatcggagccgtacgcctggtcactgtggggggccttcaacatggctggctcaccctccggggggggaagggcttcctgttcaccgtggctgacctccaggctggggttgtccgctaccaccatgacgattctgacagcaccaaggactttgtcgtctttaggatctttgacggacaccacagcatcaggcataagtttcccatcaacgtgttacccaaagacgattccccccctttcctgataaccaacgtagtgatcgaactcgaggaagggcagaccatactgatccaaggaagcatgttgagagcatctgatgtcgatgccagcgacgattacatctttttcaatattaccaagccgccccaagctggtgaaattatgaaaaagcccggaccgggcttgatcgggtaccccgtccacgggttcctgcagcgagacctgttcaacggcatcatttactacagacacttcggtggggaaatcttcgaagattcgtttcaattcgttctatgggacagccacgagccacctaatttgtcagttccgcaagtggccactattcatatcacgcccgtggacgaccaactcccaaaggaggccccgggggtgtcccggcacctcgtggtcaaggaaacggaagtcgcttacatcaccaagaagcaactgcactttattgactctgaaagctacgatagagagcttgtgtacaccattaccaccccgccattcttttcgttcagccataggcacctcgatgcgggcaaattatttatggtagatagcataccaaaggtggtgaagaacccaactgccttggagttgagatctttcacacagcatgccgtcaactatatgaaggtggcgtatatgcccccgatgcaagacatcggcccacattgcagagatgtgcagttcactttcagcgtgagtaaccagcatggcgggaccttgcatggcatttgtttcaacatcaccattcttcctgtggataaccaggtcccagaagcttttacgaatccacttaaggtgactgagggcggacagtccataatcagcaccgagcatatacttatcagcgatgcggatactaaactcgacaacatagacctgagccttcgcgaactccccctacatggacgggtagaactcaatgggtttcccctgaactccggcggcacgttctcctggggcgaccttcataccctcaaggttcgataccaacacgatggtacagaggtgctgcaggatgacctcctgttggaggtcactgatgggacaaactctgcagaatttgttctgcatgtcgaagtttttcctgttaacgatgaacctcccgtgctgaaggctgatcttatgcctgtaatgaattgcagcgagggtggcgaggtcgttataaccagcgaatacatcttcgccaccgatgtggactccgacaacctgaagcttatgtttgtgatcgccagagagccacagcacggagtagtgcgccgagccggcgtgacagtcgaccagtttagccagcgggacgttatctccgaagccgtgacatataaacataccgggggggaaataggccttatgccctgctttgacaccataactcttgtggtctctgatggagaagcgggcccatttgtcaatggctgttgttacaacggccctaacccatccgtgcctcttcacgcaagctttcctgtatacgatctgaatattactgtttatccagtggacaatcagccaccttctatcgcaatcgggccggtcttcgtggtggacgaaggctgttccaccgcgctgaccgtgaaccacctttccgcaacagatcccgacaccgctgctgacgacctcgagtttgtgttagttagcccccctcagttcggttacttggagaatatccttccgtctgtgggctttgaaaaaagtaacattgggattagtatcgattcctttcaatggaaggacatgaacgcttttcacatcaattacgtccagtctagacacttgcggatcgaacccaccgcggatcagttcacagtgtatgtgacagacggaaaacaccattccttggagatcccattcagtatcatcattaaccctacgaacgatgaagcgcccgacttcgttgtgcagaacattaccgtgtgcgaaggacaaatgaaggaactcgactcaagcattattagtgctgtcgaccttgatataccacaagatgcattacttttctctattactcaaaaaccacgacacggattactcattgacagagggttcagcaaggacttctcagagaataagcagccggcaaatccccatcaaaagcatgcccctgtgcactctttctccatggaattgttgaagacggggatgcgcctaacttacatgcacgatgatagcgaaagtttagccgatgacttcacaatccaactgagtgatgggaaacacaaaatcttgaagacgatatctgtggaagtgattccggtgaacgacgagaaacccatgctctcaaagaaggctgaaattgcaatgaatatgggtgaaactaggataatttcttcggccatcttgtccgctattgatgaggattctccacgggagaagatctactacgtatttgagaggcttccccagaatggacagttacagctgaaaatcggtcgggactgggtcccactctctcccggcatgaaatgcacacaagaggaagtggatcttaacctgttacggtacacccataccggtgctatggactcacagaatcaggattcatttactttttacctgtgggacgggaataaccgttcgccggccttggattgtcagattaccattaaagacatggagaaaggcgacattgtaatcctgaccaagccacttgtcgtgtctaaaggggaccgggggttcctgaccaccactactcttctggccgtggacgggacagataaaccggaagaactgctgtacgtcattaccagccctccacgctatggccagattgagtacgtgcattacccaggggtccccatcacaaacttcagtcaaatggacgtcgtgggtcaaactgtgtgttacgttcacaaaagcaaggttacagtatcctccgacaggtttcgctttatcatctctaacggtctacggacagagcacggcgtgtttgagattaccctggaaactgtcgaccgggctctcccggtggtgactaggaataaagggttgcgattagcccagggagcagtagggttgctgtcccccgatctattacagctcacagaccctgacacccccgctgagaatctgacattcttgctggtccagctgcctcagcacggacagctgtacctttggggcaccggtctccttcagcacaatttcacacaacaagacgtcgattctaaaaacgtggcatatcggcattcagggggggacagtcagacagattgtttcacatttatggctacggatggtaccaaccagggcttcattgtgaacggcagagtatgggaggagcctgtattatttactatccaggtcgaccaacttgacaagaccgctccccgaattactttactgcattccccttcccaggtgggactgctgaagaatgggtgctacggcatttacataacaagccgtgtgctgaaggcttccgatcccgacacggaagatgaccagattattttcaagatcttacaaggccccaagcacggacatttagagaacaccaccacaggcgagttcattcacgagaaattcagtcagaaggatttgaactcaaaaaccatcctgtacatcattaacccttcgctggaggtgaacagcgacacggtggagtttcagataatggatcctacaggaaactcagcgacgccccagattcttgagctgaaatggagccacattgagtggtcccagaccgagtatgaggtgtgcgaaaacgtagggctgctcccactagagataatcagacgcggctatagtatggacagcgcttttgtggggattaaggtgaatcaggtctccgccgcagtgggaaaggacttcactgtgattcccagtaagttaatccaattcgatcctggtatgagcacaaagatgtggaacatcgcaattacctacgacgggctggaggaagacgatgaggttttcgaagtgatcctgaacagcccagtgaatgctgtgttgggtacaaagactaaagctgcagtgaaaatactcgactctaagggtggacagtgccatccatcctattcatcaaaccaatccaaacattccacttgggagaagggtatttggcacctgctccccccaggatctagcagcagtaccacttcgggttcatttcacctcgaaagacggcctctcccttcctccatgcagctcgcagtgattagaggagacacgcttcgaggattcgatagcactgacctttcgcagcgaaaattgagaacacgagggaatgggaagactgtgaggccatcttccgtgtaccggaatggaacagacatcatttacaactaccatgggattgtgtctctgaagctggaggatgattcctttcccactcacaagaggaaggccaaggtcagtatcatcagtcagccccagaagaccattaaggttgctgaactgccgcaggcagataaagttgagtctactaccgattcccatttccctcgacaggaccagcttcccagctttcctaaaaattgcacccttgagttgaagggcttgttccactttgaggagggaatccagaaactgtatcaatgcaatggtattgcctggaaagcctggtcaccgcagactaaggacgtagaggacaaatcatgcccggccgggtggcatcagcattcgggatattgccacatcctgataacagagcaaaagggtacatggaacgccgccgcacaggcatgccgggagcaatatctgggcaacctggtgaccgtgtttagtcggcaacacatgcgctggctctgggacattggtggtaggaaatccttttggattggcctgaatgatcaagtgcacgcaggccactgggagtggattgggggtgagccagtggctttcacaaatggccgacgcggcccctctcagaggagcaagcttggcaaatcttgcgtgcttgtgcagagacaggggaagtggcagaccaaggattgcagaagggccaaaccacacaactatgtgtgctcacgaaagctctag

SEQ ID NO: 309256 - DNA, 6539 bp, Artificial Sequence
  derived and/or modified sequence
atgaattctctgagctggggagccgctaatgccgtgctgttgcttctgcttctcgcctgggccagccctacctttatttctataaaccggggagtgagagtgatgaaaggacattctgcgtttctgtcaggcgatgatctgaaattcgccattcctaaggagaaagacgcgtgtaaagtggaggtggttatgaatgagcccatcacgcagcgggtgggtaagctgaccccccaggtttttgactgtcactttctgcccaatgaagtgaaatatgtccataacggctgcccgattctggatgaagacaccgtgaaactaaggttgtatcggttcaccgaaagggatacattcatagaaacattcattttgtgggtgtacctattggagccggattgcaatatcatccacatgagtaacaatgtgctcgaggttcccgagtttaacggcctgtcccaggctattgacaagaatctgctccggtttgattatgatcgcatggcaagcctggagtgtaccgtgtcgctggataccgccaggacccgactgcccgctcacggccagatggtgcttggagaacccaggcctgaagagcccaggggcgaccagcctcactcctttttccccgagtcgcagctccgcgctaaacttaaatgcccagggggtagttgcaccccaggcctgaagaaaatagggtccttgaaggtgagttgcgaagagttcctgcttatgggactgcgctatcagcatctcgacccaccatccccaaacatcgactatatttctatccaactggacctgacagatacacgcagcaagatcgtctacaaaagcgaatcggcttggttacctgtttacatacgggctggcatacctaatcagattccaaaggcagctttcatggccgtctttatactggaggtggatcagtttatcttgactagcctgacaacctcggtacttgactgcgaggaggatgaaacccccaaacctttgcttgtttttaacatcactaaagcccctctccagggatatgtgactcacctgctggaccacacccggccaattagcagtttcacttggaaagacctttccgatatgcagattgcttatcagcctccaaacagctctcactccgaacgcagacatgacgaggtggagctagaggtgtacgattttttcttcgaacgtagtgcccctatgaccgttcacataagtataaggaccgctgatacgaacgcgcctcgggtctcttggaataccggtctgagtctcttagaaggtcagagtcgcgcaattacttgggagcaatttcaggtagtagacaatgacgatatcggagcggttagactggttactgttggtggactacagcatggctggctgaccctgcgcggaggtaaaggctttctgtttacagtcgccgacttacaggctggagtggtacgttaccatcacgacgacagtgattcaaccaaggattttgttgtctttagaatctttgacggtcaccattctatcaggcacaaattcccaattaacgtcttgccaaaggatgactccccgccattcttaatcacaaatgtcgtgattgagctggaggaggggcagactatacttattcagggctctatgctgagagcctccgacgttgatgcatctgatgattatatattctttaatatcacaaagccgccacaggcaggcgagataatgaagaagcccggacctggcttgatcggataccccgtgcatgggttcctgcaaagggatctttttaacggcattatatactatagacattttgggggagaaatctttgaggatagtttccagttcgtcctctgggactctcacgagcccccaaacctaagcgtgccgcaagtggccacgatacacataacacctgtggacgatcaacttccgaaagaggcccctggagtttctagacatttggtcgtcaaagaaactgaggttgcctatattaccaaaaagcagctgcatttcatcgattcagaaagctatgatagggagctggtctatacaattaccactccccctttcttttcattctcacaccggcatctggatgccggaaagctttttatggttgactcaatccctaaagtggtgaagaatcctacggctttagagcttaggtctttcactcagcacgccgtgaattatatgaaagtggcctacatgccccctatgcaggacatcggtccacattgccgcgacgtgcagtttaccttttcggtgtcaaatcagcatggcggaacacttcacggcatctgctttaatattactattctgccagtggataatcaggtgcctgaagcgttcaccaatcctctcaaggtcacagaaggtggccagtccatcataagtaccgaacatatcctgatctccgacgccgatactaagttggacaatattgacctgtcactgagagagctccctctccacggaagagtcgagctgaacgggtttcctctgaattccggcggtacatttagctggggagaccttcatactctgaaggttcggtaccagcacgacggtaccgaggtgcttcaggatgatctgctcttagaggtgactgatggcacaaattctgcggaattcgtcctgcatgtcgaagtgttccctgtcaacgatgagccacctgtcctcaaagcagacctgatgccagtgatgaattgcagcgaagggggtgaggtagtgatcacatcggagtacattttcgcaacagatgtggacagcgacaacctgaagctgatgttcgtcatcgcacgagaaccccaacatggggttgtgagaagggcaggagtgacggtcgaccaattctctcagagagatgttatatcggaggccgtaacatataagcacactgggggtgagattggcttaatgccctgtttcgataccattacgttggtggtttctgacggggaggctggacctttcgttaatggatgttgctataatggcccaaatccctctgtgccattacatgcgtcttttccggtctatgatctcaacatcacagtttaccctgtggacaaccagcccccatctattgccattgggccagtgttcgtggtagatgaaggttgttctaccgctctgaccgtgaaccatctgagtgctactgacccggacaccgctgctgacgatctggaatttgtgctggtgagccctccacagtttgggtatctggaaaacattttgccatcagtcggctttgaaaaaagtaatatcggtatctcaattgactcctttcaatggaaggatatgaacgcattccatattaactatgtacagagcagacacctccggatagagcctacagcggaccagtttaccgtctatgtgactgacgggaaacaccactctctggaaattcctttcagcattattattaacccaacaaatgatgaggcccctgacttcgtggttcagaatatcactgtgtgtgagggacagatgaaagaactggattcctcaatcatttctgctgtagacttggacatcccccaggatgcattgctgttttccatcacacagaagccaaggcatggactgttgatagaccgcggattttctaaggatttcagcgagaataaacaaccagctaatccccatcagaagcacgctcctgtccattctttctcaatggagctgcttaagacgggaatgagactgacgtacatgcatgatgattccgagtctttggccgacgatttcacgattcaactcagcgatggaaagcacaagatcttaaagaccattagcgtcgaagttattccagtgaatgacgaaaagcccatgctaagcaagaaagcggagatcgccatgaacatgggggagactcgcatcataagcagcgctattttgtccgcaatcgatgaggattctccacgggaaaagatctattatgtattcgaaagattgccccagaacggccaactgcagctcaagattgggagggactgggtgcccctgagcccgggaatgaagtgcacccaggaagaggtcgatctgaacctcctccgctacactcacaccggagcaatggatagccaaaatcaggattctttcaccttctacttgtgggacgggaacaaccggagtccagcacttgactgtcagatcaccattaaagatatggagaagggtgacattgtgatcttgaccaagcccctggtggtttccaagggggatcgcggatttctcacgacgactaccctgctggcagtggatggcaccgacaaacctgaggaactgttgtatgtgatcactagtcctcccaggtatggccagattgagtacgtgcattatcctggcgttccaattaccaacttttctcagatggacgtcgtaggccagacagtatgttacgtgcacaagtcaaaggtgaccgtctctagcgatagattccgctttataatctcaaatggtctgagaacagagcacggggttttcgagataaccttagagacagtcgaccgtgccctccccgtagttacccgtaataaaggcctgcgccttgctcagggcgctgtagggttgttatcccctgacctcttgcagctaacagatccggatacccccgctgaaaacttaacctttcttcttgtgcagcttcctcagcacggacagctgtacttgtggggaacgggattgctacagcacaacttcacccagcaggatgtggacagcaaaaacgtggcctaccgccattctggcggagatagtcaaaccgactgctttacctttatggccactgatgggacaaatcaaggatttattgtaaacggaagggtgtgggaagagcccgtcttgtttacaattcaagtggaccagctcgacaagactgcgcctcgaattacactgcttcacagtccatcacaggtgggcctgctgaagaacgggtgctacggcatctatatcaccagtcgagtgctgaaagcctctgatccagacacagaagacgaccagatcatctttaagatcttgcagggccctaagcatggtcacctggagaacacaacaactggagagttcatccatgagaaattctctcagaaggacttgaatagcaagaccattctatatattattaatccttctctcgaagttaatagcgacactgtggaattccagataatggatcccacaggcaacagtgcgactccccagattctggagttgaaatggagccatatcgagtggtcccagactgaatacgaggtgtgcgagaatgtcggattgttgcccctggagatcattcgacggggatactccatggattcagcctttgtggggattaaggtcaatcaggtatccgcagcagtcggaaaggacttcacagtcatcccgtcaaaactgattcagttcgatcccggtatgtcaaccaagatgtggaacatcgccatcacctatgacgggcttgaggaagacgatgaggttttcgaggttattctgaactccccagtgaatgccgtcctgggtaccaagaccaaagccgctgtgaagatcctggacagtaaaggcggacagtgtcatccatcctattcctctaatcagtcaaagcattcaacctgggagaaaggcatatggcatctgctgccacccggtagctccagctccaccacttctgggtccttccaccttgagcgaagaccactgccatcatcgatgcaacttgcagtaatccggggagacaccctacggggattcgatagcactgatctctcccagcggaagctgaggactaggggcaatggaaagaccgtgcgaccgtcctccgtgtaccggaacggtaccgacatcatttacaactatcacgggatagtgagcctgaagctggaggacgactcattccctacccataaaagaaaagcgaaggtctctattatctcacaaccgcagaaaacaataaaggtcgccgagctccctcaggcagacaaagtggagtccacaaccgactcccatttccctcgccaggatcaacttccaagcttccctaagaattgtactctcgaactgaaggggctgtttcacttcgaggaagggattcagaagctgtaccagtgtaacggcattgcatggaaagcatggtccccgcagaccaaagatgtcgaagataagagctgccctgccggttggcaccagcactccgggtattgtcatatattaatcaccgagcaaaaggggacctggaacgctgccgcacaagcctgtagagagcagtacctgggaaacctggtcactgtcttttctagacagcacatgaggtggctatgggacattggcggtaggaaatcattttggattggtctcaatgatcaggtgcacgcagggcattgggagtggataggaggtgaacccgttgccttcaccaatggccgacggggaccaagtcaacgcagcaaactcggcaaatcatgcgtgctcgtgcagcggcagggtaaatggcagaccaaggattgtagacgggctaagcctcacaattatgtgtgtagccggaaacttta

SEQ ID NO: 309257 - DNA, 6542 bp, Artificial Sequence
  derived and/or modified sequence
atgaattcactgagctggggggcagcgaatgcagttttgctcttattgctgctggcctgggcctcccccaccttcatctccattaacaggggggtccgagtaatgaaaggccacagtgctttcctgtctggagatgatttgaaatttgccatcccaaaggagaaggacgcctgcaaggtggaagtcgttatgaacgagccaataacacaaagagttgggaaactgactccgcaggtatttgattgccacttcctgcctaatgaagtgaagtacgtgcacaatgggtgtccgattctggatgaggacaccgtaaagcttcggctctataggttcacagaaagagataccttcatcgagaccttcattctttgggtgtacctgctcgagccagactgcaatattatccacatgtcaaacaatgtcctcgaggtgccagagttcaacggcctatcccaggcaatcgacaagaacctgctccgtttcgactacgaccggatggctagcctcgaatgcactgtgtccctggatactgctcgtactcggttacccgctcacggccaaatggtgctgggagagccccgtcctgaagagcccagaggtgaccagcctcatagctttttcccagaatcacagctccgggctaagcttaagtgccctggcggtagctgtacacctggtctcaaaaaaatcggctctttaaaggtgagttgtgaagagttcctgttgatgggccttagataccagcatctcgaccctccttcccccaatattgactatatttccattcagctggacttgaccgacacgagatccaagatcgtctataagaaatctgagtctgcttggcttccagtttatatcagagcgggaatcccaaatcagatacctaaggcagcatttatggcggtgtttatactcgaagtagaccagtttatcctgacatctctgaccaccagcgtcttagactgtgaagaggacgagacaccaaaaccattgttggtatttaatataaccaaagccccattacagggctacgttactcacctactggaccatacacgcccaatctcctccttcacctggaaagatctcagcgacatgcagattgcgtaccagcccccaaatagttctcattcagagcgaaggcacgatgaggtcgagcttgaagtatacgacttcttcttcgaacggtcagctcctatgacagtgcatatctcgatccggaccgcagacactaacgctcctcgggtgtcatggaatactggcctcagtttgctcgaaggccaatcccgtgccattacctgggagcaattccaggtcgtggacaacgatgacattggtgcggtgcggctggtcacagtggggggtcttcagcacgggtggttgactctgcgaggaggtaaaggattccttttcacggtcgccgatctgcaagctggcgtggtgcgttatcatcatgatgacagtgactctacgaaagacttcgtagtatttaggatttttgatggacaccatagcattcgccacaaatttcctattaacgtgctgcctaaagatgacagtcctccatttctgattaccaatgtcgttattgagctggaagagggacagacaattttgattcaaggttccatgttgcgcgcttcagacgttgacgcaagtgatgattatatatttttcaacataaccaagccgccacaggctggagaaatcatgaaaaagcccggtcccggtttgataggctatccagtgcatgggtttctccaaagagatttgtttaatggaatcatttactataggcatttcgggggagaaattttcgaggactcgttccagttcgtcttgtgggactcccacgagccgccaaacttgtcagtccctcaagtcgccaccatccacattacaccggtcgatgatcagctgcctaaggaagcacctggcgtgtctagacatctcgtggttaaggagacagaggtcgcttatatcactaagaagcagctgcactttattgattctgagtcatatgatagagagctggtgtatacaatcaccacccctccattctttagcttctcgcatagacacttagatgctggcaagctgtttatggtggattccatccccaaggtggtgaagaatcctacagcactggaactgaggtcattcacacagcacgctgttaattatatgaaggtggcctatatgcctccaatgcaggacatcggccctcattgccgggatgtgcagtttactttcagtgtgagtaaccaacatggaggaacgctgcatggcatctgtttcaacatcacgatacttcctgttgacaatcaggtcccagaagctttcacaaaccctctgaaagtgaccgagggcggtcagtcgatcatcagtacagagcatatcctgattagcgacgcagacacaaaattggacaacatcgatctgtccctgagagaactgcctctgcacggccgagtggaactaaacgggtttcccttgaacagcggcggtaccttcagttggggcgacctgcacactctaaaagtgcgctaccagcatgatgggaccgaagtccttcaagacgatttactccttgaagtcacagatgggactaactcggcagagtttgtgcttcacgtcgaagtatttccagttaacgatgaaccaccagtgctcaaagcagacttgatgcctgtgatgaactgttcggagggcggtgaggtggtcatcacttctgaatacattttcgctaccgacgttgattccgacaacctgaagttaatgttcgtcatcgcaagggagccacagcacggtgttgttagaagggctggggttactgtggaccagttctcacagagggatgtgatcagtgaggccgtcacctataagcacactggcggtgagattgggcttatgccttgtttcgatacgatcaccttagttgtctcagacggcgaagctgggccatttgtgaacggatgttgctataatgggcctaacccaagtgtgcctctccacgcctccttccctgtgtacgacctcaatattaccgtctacccagtagacaatcagcctccctctatcgcaatcgggcctgtgtttgtggtcgacgaggggtgtagcactgccttgaccgtgaatcacctgtccgcgactgacccagataccgcagccgacgacctggagttcgtactcgtatcccccccacaattcggctatctagaaaatatactccccagcgttggcttcgaaaaaagtaatattgggatcagcattgacagttttcagtggaaggacatgaacgcatttcacataaactacgtgcagtcgcggcatctccgcatcgagcccaccgctgatcagttcactgtgtatgtcactgacggtaagcaccacagcttggaaatcccattttcaatcattatcaatccgacaaatgatgaggccccagactttgtcgtgcaaaatatcacagtatgtgaaggccagatgaaggagctggattcctctatcatatctgcggtagacctggacattccacaggacgcgctgctgttttctattacacagaaaccacgccacgggctgttgattgatcgtggattctccaaggatttttctgagaataagcagcctgccaatccgcaccaaaagcacgcacctgtgcactcgttttccatggagcttctgaagacaggcatgcgactgacgtatatgcatgacgactccgagtcactggcggacgattttacaatacagctgagtgatggcaagcacaaaatcctaaagaccatctccgttgaagtcattcctgtgaatgatgagaaaccaatgctctccaaaaaggcggaaattgcaatgaacatgggtgaaaccagaatcatctcaagcgcgatactctccgctatcgacgaggactcccccagggagaagatctattatgtgttcgagcggctccctcagaatgggcaactgcaactgaaaattgggagagattgggtgcctctgagcccaggaatgaagtgtacccaggaagaggtggatctcaacctacttaggtatacacataccggggcaatggattcacaaaatcaagacagcttcaccttttatctgtgggacggcaataatcggagccccgctcttgactgtcagattactatcaaggatatggagaagggcgatattgttattttgaccaagccactcgtggtgagtaaaggggaccggggattcctgacaacaacaacactgctagcagtcgacggcacagacaaacccgaggagttgctgtatgttattactagtcctccacggtatggtcagatcgaatacgttcattatcccggtgtcccaataaccaatttcagtcagatggacgttgtgggacaaacagtctgctacgttcacaagtccaaagttacagtgtcctctgacagatttaggttcattattagcaatggccttcgaactgagcatggcgtgttcgaaatcactctggagacagttgacagggccctccccgttgtaacccgcaataagggacttcggctggcacaaggagctgtggggctgctcagtcccgacttgttgcagttgacagatcccgacaccccagccgagaacctgaccttcctcctggttcagctgccacaacatggacagctgtacctgtgggggacaggtctgctgcagcataatttcactcagcaggatgtggacagcaagaatgtcgcctacagacacagcggaggggattcacagactgattgtttcaccttcatggccacggacggaacaaaccagggctttatcgtaaatggcagagtctgggaggagcccgtgttgtttaccatacaagtggatcagctggacaagacagccccacggatcactctgctccactctccttctcaggttggcctcttgaaaaatggatgttacggaatttatatcacgtcaagggttctcaaggcttccgatcccgacacagaagatgatcagattatattcaagatcttgcaggggcctaaacacggccacctagaaaacactacaacaggtgagttcattcatgagaagtttagccagaaagatctcaattctaagacaatcctctacatcatcaatccaagcttagaggtgaattctgatacggtagaattccaaatcatggaccccacaggcaactctgctacccctcagatccttgagcttaagtggtcacatattgagtggtcgcagactgaatacgaagtgtgcgaaaatgtaggcttgttaccgttggagatcattcggcgaggctatagcatggatagcgcttttgtgggaatcaaagtcaatcaggttagcgccgcagttggtaaggattttaccgtgattccttctaaacttattcagtttgaccctgggatgtctactaagatgtggaatatcgctatcacttatgacggtctagaggaagacgatgaagtcttcgaggtaatcctgaactcgcctgttaatgcagtactgggcaccaaaacgaaggctgccgtgaaaatcctggacagcaagggcggacagtgtcatcctagctatagcagcaaccagtccaagcactccacatgggagaaaggaatctggcacctgcttcccccaggatctagctcctcaacaacatcggggtcattccacttggaacggaggcctctgccgtcatccatgcagcttgcagtgatccgcggagataccctccgaggcttcgacagcaccgacttatctcaacggaaactgagaacacggggaaatggaaagaccgttcggccaagttctgtctacaggaatggaaccgacattatatacaattaccacggcatagtcagcctcaagctcgaagatgactcattccctacgcacaagcggaaggctaaggtgtcaatcatctcgcagccccagaagaccatcaaggtggccgaacttccgcaggctgacaaggtagagtcaacaaccgactcacacttcccacgccaggaccagctgccgtcatttcctaagaattgtacacttgaactaaaagggttattccatttcgaagaggggatccaaaaactctaccagtgtaatggaatcgcttggaaagcctggagcccacagacaaaagacgtggaggataaaagttgccctgctgggtggcaccagcattctgggtactgtcatatccttatcacagagcagaaagggacatggaatgctgctgcccaggcctgtagagaacagtaccttgggaaccttgtgaccgtcttctccaggcagcatatgagatggctctgggacatcggcggtcggaagtcattctggataggactcaatgatcaggtacacgccggacactgggaatggattgggggtgagcctgtggcattcaccaacggcaggagaggcccttctcagaggtcaaaactgggcaaatcatgtgttctcgtgcagagacagggaaagtggcagaccaaagattgtagacgggctaagccgcacaactatgtgtgctctaggaaattgta

SEQ ID NO: 309258 - DNA, 6539 bp, Artificial Sequence
  derived and/or modified sequence
atgaatagtttgtcttggggagccgcaaatgccgtgctgctgctcttattactcgcttgggctagcccaaccttcatcagtattaataggggcgtaagggttatgaagggccactccgcattcctgtccggagacgatctgaagttcgctatccccaaagagaaggacgcctgtaaagtggaagtcgtgatgaatgaacctataacgcagagagtggggaagctgacaccgcaggtgttcgactgtcatttcttgcccaacgaggtgaagtatgtgcataatggatgcccaattctcgacgaggacacggtgaaactcagactctacagattcactgaaagagacaccttcatcgagaccttcatactgtgggtctatctgctggagccggactgtaatataattcacatgagtaataatgtactcgaggtgcctgaatttaatggactctcgcaggccattgataagaacctgctgaggtttgattacgatcgaatggcatccctggaatgtacagtctctctggacacggcccgaacccgactccccgctcatggacagatggttctgggggagcctcggcctgaggagcctcgaggagaccaacctcactcgttcttcccagaatctcagctgcgggctaagcttaaatgccctgggggatcttgcaccccaggtctgaagaaaattggatcgttaaaagtgtcctgcgaagagttcctgctgatgggattgaggtaccagcatcttgatcccccatcacccaacatagattacatttccattcagctggatctcactgatacacgctctaaaattgtgtacaaatcagaaagtgcatggctgcccgtctacatcagagccggaatccccaaccagatccccaaagccgcttttatggccgtttttatcctggaagtggatcagtttattctaacctctctgaccaccagcgttctggattgtgaggaagacgagactcctaaacccctgctggtctttaatatcactaaggcccctctgcagggctatgtgacccatcttctagatcatacacgtcccattagctctttcacctggaaggatctttctgatatgcagattgcttaccaaccccctaatagctctcactcagaacggaggcacgacgaagtcgagctggaggtgtacgattttttttttgagagaagcgcccctatgacagtccacatcagtatcaggacggccgatactaatgcacctcgtgtgtcttggaacaccggattgtcacttctggagggacaatcacgggcaattacatgggagcaatttcaggtagtagataatgatgatatcggggctgtacgcctcgtgacagttgggggactgcagcacggatggctgaccttgcggggaggtaagggttttctgtttaccgtggctgatctccaggcaggggtggtgaggtaccatcacgatgactccgattctacaaaagacttcgtagttttccggatcttcgatgggcaccacagtatcagacacaagttccccattaacgtgcttccaaaagacgactcgcccccattcctgatcaccaatgtggtcatcgagttggaagaggggcagaccattttgatacagggaagtatgctccgtgccagcgatgttgatgcatcagacgactatatcttcttcaatatcactaaaccaccccaggccggtgaaattatgaaaaaacctggccctgggttgattggctatccggtccatggtttcctccagcgcgacctatttaatggcattatttattataggcacttcgggggagaaattttcgaggactctttccagtttgtgctgtgggattctcatgaaccccctaacctaagcgtcccccaggtggccaccatacacataacgcccgttgacgaccaacttcctaaagaagccccaggcgtaagccggcatcttgtagtcaaagaaacggaagttgcctatattaccaaaaagcaactgcacttcatcgatagcgagtcatacgaccgcgaactcgtttacaccataaccacacctcccttcttttcgtttagccatcgtcacttggatgccggaaaactcttcatggtcgattctatacccaaggtcgtgaagaatcctaccgcgctggaactgcgatcttttacccagcacgccgtcaattacatgaaagtcgcttacatgccacccatgcaggacatcggcccacattgcagggacgttcagtttacattttctgtctccaaccagcacggtggcacactgcatggcatatgctttaacatcacaatcttaccagttgacaatcaggtaccagaagctttcacaaaccccttgaaggttacagagggcggtcagagcatcatctccactgaacatatcctcattagtgatgccgataccaaattggacaatatagacctcagtctgagagaattacccctgcacggcagggtggaattaaacgggtttccattgaactctggcggaaccttctcttggggcgacctgcacactctcaaagtccgctaccagcacgatggaacagaggtactgcaggacgacctgctgctggaggtcaccgacggcactaactccgcagaattcgtgctgcatgtggaagtcttccctgttaatgatgagcctccagtcttaaaggctgatttaatgccagtcatgaattgtagtgaaggcggagaagtcgtcatcactagtgaatacatcttcgctactgacgtagattcagacaatttgaaacttatgttcgtgatcgctcgcgagccacagcacggagttgtcagacgtgccggtgtcactgtggaccaattttctcaaagggatgttataagcgaggcagtaacctacaagcacactgggggagagataggactgatgccttgctttgacacaatcaccctggtggtgagtgacggggaggcgggacccttcgtaaatggctgttgttataatggcccaaaccccagcgtgccactccatgcgtccttcccagtttacgacttgaacattacggtttacccggtggataatcagcctccctccatagctatcgggcctgtcttcgttgtggacgaggggtgctcaaccgcgctgacagtcaatcatctgagcgccacggacccagataccgctgccgatgaccttgagtttgtgcttgtctccccacctcagtttgggtacttggaaaatattctgccctctgttggattcgagaagtcaaatatcgggatctcaatagattctttccagtggaaggatatgaacgcctttcatattaactacgtgcaatcccgacatctcaggattgaacccacagccgatcagttcacagtctacgtgactgatggaaaacaccacagcctggagattccattttctatcattattaaccctaccaatgacgaggccccagacttcgttgttcaaaacataaccgtctgcgaagggcagatgaaggagctagacagttcaattataagtgccgtggacttggatatcccccaggacgccctgcttttttcaatcacccaaaagcccagacatggtttacttattgacagaggattcagtaaggacttcagtgaaaataagcaaccggctaaccctcatcagaaacatgcgcctgtccactcgttttctatggagcttctgaaaaccggaatgcgactgacctacatgcacgatgacagtgagtctctggccgacgatttcacaattcaactcagcgatggcaagcataagattcttaaaactattagtgtcgaagtcatcccagtgaatgacgaaaaacccatgctgtctaagaaagccgagattgccatgaacatgggggagactcgaatcatctctagtgcgatcctgtcggctattgacgaggactcacccagagaaaaaatttactatgtgttcgagcgtctgcctcaaaatggtcagctgcagctcaagatcggacgggattgggtgcctctctcccccggaatgaaatgcacacaggaggaggtcgatcttaaccttcttcggtacacacacactggcgcaatggattctcagaaccaggactcgtttacattctacctatgggacggaaataaccggagccccgcactcgactgccagattactatcaaggatatggagaaaggggacatagtgatcttgacgaaaccattggtggtttctaaaggagaccggggattccttaccaccaccacccttttggcagtcgacggcacggataagccagaagaattactttacgtcattacctctccccctaggtacggccaaattgagtacgtgcattaccctggagtgcccattacaaacttctcacagatggatgtcgtgggccagaccgtctgctatgttcataaaagcaaagtcactgtgtcctccgacaggttccggtttatcattagcaatggtcttaggactgagcacggtgtcttcgaaatcaccctggaaacagttgatcgcgctctccccgtggtaacacggaacaagggcctgagactggcccagggcgcagttggtttgttaagcccagaccttctgcagctgaccgatccggacacgccagctgaaaatctgaccttcctgctcgtgcagttacctcagcatggtcagctatatctatggggcaccgggctactgcagcataactttacccagcaggatgtggattcaaagaatgtggcctaccggcacagcggtggcgatagccagactgattgctttacattcatggctactgatggtacaaatcaagggtttatcgtgaacggacgggtgtgggaagaacctgtcctgttcacaattcaggtagaccagcttgacaaaacagctcctagaataactctcctgcacagcccctctcaggtcggcttacttaagaatggctgttatgggatatacattacatcaagggtgttaaaagcgtctgatcctgataccgaggatgaccagattatctttaaaatcctccagggaccaaagcacggacacctggagaatacgactactggtgaatttattcatgagaagttctctcaaaaagatctcaactccaaaacaattctgtacatcatcaatccgtccctggaagtaaactccgatacagtggaattccagatcatggaccccaccggaaacagtgccaccccacagatcctagagctgaagtggtcgcatattgagtggtctcagactgaatatgaagtgtgcgagaacgtggggctattgccacttgaaatcatccgcaggggctactctatggactccgcttttgtgggcattaaggtcaatcaggttagcgccgcagtagggaaagactttacagttatccccagcaagctcatccagttcgaccctggcatgtccacaaagatgtggaatatagccatcacctatgatggcctggaggaggacgacgaggtgtttgaggtgatccttaatagtcccgtgaacgccgtgctagggacaaaaaccaaagcggcagttaaaatactcgacagtaaaggaggtcagtgccacccatcctattcttctaatcaaagcaagcacagtacatgggagaaagggatatggcatctccttccacccggaagctcctcatccactacatccgggagctttcacctagaacgacgaccactgccctccagcatgcagctggccgtcatccgcggagatacactgcgaggttttgactccaccgatctcagccagaggaaacttcggacccggggtaacggcaagaccgttcgcccatcatctgtctatcgtaatggaaccgatatcatatacaactatcatgggattgtgtctttaaaactggaggacgattcttttccgacacataagcgcaaagccaaagtgagcatcatctcacaaccccagaaaacgattaaagtcgccgaactccctcaggctgataaggtcgaaagcaccaccgactctcatttccccagacaagatcagctgcctagcttccctaaaaattgcactctggaactaaaaggactgttccacttcgaggagggaatccaaaagttgtaccagtgcaatgggatcgcatggaaggcatggtctccgcaaacaaaggacgtggaggacaaaagctgcccggcaggttggcaccagcattccggctactgccacattctgataacagagcagaagggcacctggaacgcggctgctcaagcatgccgagagcaatatctgggtaatctggttacagtattctcccgccaacacatgaggtggctgtgggacatcggaggacgcaaatcgttttggatcggtctgaacgatcaggtgcatgcaggacattgggaatggataggcggagaacctgttgcctttaccaacggaagaagaggaccatctcagcgctccaaattaggtaagtcttgcgttcttgtgcaacggcaggggaaatggcagacgaaagactgtcggagggcaaagccacataactatgtttgttcaaggaagttgta

SEQ ID NO: 309259 - DNA, 6540 bp, Artificial Sequence
  derived and/or modified sequence
atgaacagcctgagctggggcgccgccaacgccgtgctgctgctgctgctgctggcctgggccagccccaccttcatcagcatcaacagaggcgtgagagtgatgaagggccacagcgccttcctgagcggcgacgacctgaagttcgccatccccaaggagaaggacgcctgcaaggtggaggtggtgatgaacgagcccatcacccagagagtgggcaagctgaccccccaggtgttcgactgccacttcctgcccaacgaggtgaagtacgtgcacaacggctgccccatcctggacgaggacaccgtgaagctgagactgtacagattcaccgagagagacaccttcatcgagaccttcatcctgtgggtgtacctgctggagcccgactgcaacatcatccacatgagcaacaacgtgctggaggtgcccgagttcaacggcctgagccaggccatcgacaagaacctgctgagattcgactacgacagaatggccagcctggagtgcaccgtgagcctggacaccgccagaaccagactgcccgcccacggccagatggtgctgggcgagcccagacccgaggagcccagaggcgaccagccccacagcttcttccccgagagccagctgagagccaagctgaagtgccccggcggcagctgcacccccggcctgaagaagatcggcagcctgaaggtgagctgcgaggagttcctgctgatgggcctgagataccagcacctggacccccccagccccaacatcgactacatcagcatccagctggacctgaccgacaccagaagcaagatcgtgtacaagagcgagagcgcctggctgcccgtgtacatcagagccggcatccccaaccagatccccaaggccgccttcatggccgtgttcatcctggaggtggaccagttcatcctgaccagcctgaccaccagcgtgctggactgcgaggaggacgagacccccaagcccctgctggtgttcaacatcaccaaggcccccctgcagggctacgtgacccacctgctggaccacaccagacccatcagcagcttcacctggaaggacctgagcgacatgcagatcgcctaccagccccccaacagcagccacagcgagagaagacacgacgaggtggagctggaggtgtacgacttcttcttcgagagaagcgcccccatgaccgtgcacatcagcatcagaaccgccgacaccaacgcccccagagtgagctggaacaccggcctgagcctgctggagggccagagcagagccatcacctgggagcagttccaggtggtggacaacgacgacatcggcgccgtgagactggtgaccgtgggcggcctgcagcacggctggctgaccctgagaggcggcaagggcttcctgttcaccgtggccgacctgcaggccggcgtggtgagataccaccacgacgacagcgacagcaccaaggacttcgtggtgttcagaatcttcgacggccaccacagcatcagacacaagttccccatcaacgtgctgcccaaggacgacagcccccccttcctgatcaccaacgtggtgatcgagctggaggagggccagaccatcctgatccagggcagcatgctgagagccagcgacgtggacgccagcgacgactacatcttcttcaacatcaccaagcccccccaggccggcgagatcatgaagaagcccggccccggcctgatcggctaccccgtgcacggcttcctgcagagagacctgttcaacggcatcatctactacagacacttcggcggcgagatcttcgaggacagcttccagttcgtgctgtgggacagccacgagccccccaacctgagcgtgccccaggtggccaccatccacatcacccccgtggacgaccagctgcccaaggaggcccccggcgtgagcagacacctggtggtgaaggagaccgaggtggcctacatcaccaagaagcagctgcacttcatcgacagcgagagctacgacagagagctggtgtacaccatcaccaccccccccttcttcagcttcagccacagacacctggacgccggcaagctgttcatggtggacagcatccccaaggtggtgaagaaccccaccgccctggagctgagaagcttcacccagcacgccgtgaactacatgaaggtggcctacatgccccccatgcaggacatcggcccccactgcagagacgtgcagttcaccttcagcgtgagcaaccagcacggcggcaccctgcacggcatctgcttcaacatcaccatcctgcccgtggacaaccaggtgcccgaggccttcaccaaccccctgaaggtgaccgagggcggccagagcatcatcagcaccgagcacatcctgatcagcgacgccgacaccaagctggacaacatcgacctgagcctgagagagctgcccctgcacggcagagtggagctgaacggcttccccctgaacagcggcggcaccttcagctggggcgacctgcacaccctgaaggtgagataccagcacgacggcaccgaggtgctgcaggacgacctgctgctggaggtgaccgacggcaccaacagcgccgagttcgtgctgcacgtggaggtgttccccgtgaacgacgagccccccgtgctgaaggccgacctgatgcccgtgatgaactgcagcgagggcggcgaggtggtgatcaccagcgagtacatcttcgccaccgacgtggacagcgacaacctgaagctgatgttcgtgatcgccagagagccccagcacggcgtggtgagaagagccggcgtgaccgtggaccagttcagccagagagacgtgatcagcgaggccgtgacctacaagcacaccggcggcgagatcggcctgatgccctgcttcgacaccatcaccctggtggtgagcgacggcgaggccggccccttcgtgaacggctgctgctacaacggccccaaccccagcgtgcccctgcacgccagcttccccgtgtacgacctgaacatcaccgtgtaccccgtggacaaccagccccccagcatcgccatcggccccgtgttcgtggtggacgagggctgcagcaccgccctgaccgtgaaccacctgagcgccaccgaccccgacaccgccgccgacgacctggagttcgtgctggtgagccccccccagttcggctacctggagaacatcctgcccagcgtgggcttcgagaagagcaacatcggcatcagcatcgacagcttccagtggaaggacatgaacgccttccacatcaactacgtgcagagcagacacctgagaatcgagcccaccgccgaccagttcaccgtgtacgtgaccgacggcaagcaccacagcctggagatccccttcagcatcatcatcaaccccaccaacgacgaggcccccgacttcgtggtgcagaacatcaccgtgtgcgagggccagatgaaggagctggacagcagcatcatcagcgccgtggacctggacatcccccaggacgccctgctgttcagcatcacccagaagcccagacacggcctgctgatcgacagaggcttcagcaaggacttcagcgagaacaagcagcccgccaacccccaccagaagcacgcccccgtgcacagcttcagcatggagctgctgaagaccggcatgagactgacctacatgcacgacgacagcgagagcctggccgacgacttcaccatccagctgagcgacggcaagcacaagatcctgaagaccatcagcgtggaggtgatccccgtgaacgacgagaagcccatgctgagcaagaaggccgagatcgccatgaacatgggcgagaccagaatcatcagcagcgccatcctgagcgccatcgacgaggacagccccagagagaagatctactacgtgttcgagagactgccccagaacggccagctgcagctgaagatcggcagagactgggtgcccctgagccccggcatgaagtgcacccaggaggaggtggacctgaacctgctgagatacacccacaccggcgccatggacagccagaaccaggacagcttcaccttctacctgtgggacggcaacaacagaagccccgccctggactgccagatcaccatcaaggacatggagaagggcgacatcgtgatcctgaccaagcccctggtggtgagcaagggcgacagaggcttcctgaccaccaccaccctgctggccgtggacggcaccgacaagcccgaggagctgctgtacgtgatcaccagcccccccagatacggccagatcgagtacgtgcactaccccggcgtgcccatcaccaacttcagccagatggacgtggtgggccagaccgtgtgctacgtgcacaagagcaaggtgaccgtgagcagcgacagattcagattcatcatcagcaacggcctgagaaccgagcacggcgtgttcgagatcaccctggagaccgtggacagagccctgcccgtggtgaccagaaacaagggcctgagactggcccagggcgccgtgggcctgctgagccccgacctgctgcagctgaccgaccccgacacccccgccgagaacctgaccttcctgctggtgcagctgccccagcacggccagctgtacctgtggggcaccggcctgctgcagcacaacttcacccagcaggacgtggacagcaagaacgtggcctacagacacagcggcggcgacagccagaccgactgcttcaccttcatggccaccgacggcaccaaccagggcttcatcgtgaacggcagagtgtgggaggagcccgtgctgttcaccatccaggtggaccagctggacaagaccgcccccagaatcaccctgctgcacagccccagccaggtgggcctgctgaagaacggctgctacggcatctacatcaccagcagagtgctgaaggccagcgaccccgacaccgaggacgaccagatcatcttcaagatcctgcagggccccaagcacggccacctggagaacaccaccaccggcgagttcatccacgagaagttcagccagaaggacctgaacagcaagaccatcctgtacatcatcaaccccagcctggaggtgaacagcgacaccgtggagttccagatcatggaccccaccggcaacagcgccaccccccagatcctggagctgaagtggagccacatcgagtggagccagaccgagtacgaggtgtgcgagaacgtgggcctgctgcccctggagatcatcagaagaggctacagcatggacagcgccttcgtgggcatcaaggtgaaccaggtgagcgccgccgtgggcaaggacttcaccgtgatccccagcaagctgatccagttcgaccccggcatgagcaccaagatgtggaacatcgccatcacctacgacggcctggaggaggacgacgaggtgttcgaggtgatcctgaacagccccgtgaacgccgtgctgggcaccaagaccaaggccgccgtgaagatcctggacagcaagggcggccagtgccaccccagctacagcagcaaccagagcaagcacagcacctgggagaagggcatctggcacctgctgccccccggcagcagcagcagcaccaccagcggcagcttccacctggagagaagacccctgcccagcagcatgcagctggccgtgatcagaggcgacaccctgagaggcttcgacagcaccgacctgagccagagaaagctgagaaccagaggcaacggcaagaccgtgagacccagcagcgtgtacagaaacggcaccgacatcatctacaactaccacggcatcgtgagcctgaagctggaggacgacagcttccccacccacaagagaaaggccaaggtgagcatcatcagccagccccagaagaccatcaaggtggccgagctgccccaggccgacaaggtggagagcaccaccgacagccacttccccagacaggaccagctgcccagcttccccaagaactgcaccctggagctgaagggcctgttccacttcgaggagggcatccagaagctgtaccagtgcaacggcatcgcctggaaggcctggagcccccagaccaaggacgtggaggacaagagctgccccgccggctggcaccagcacagcggctactgccacatcctgatcaccgagcagaagggcacctggaacgccgccgcccaggcctgcagagagcagtacctgggcaacctggtgaccgtgttcagcagacagcacatgagatggctgtgggacatcggcggcagaaagagcttctggatcggcctgaacgaccaggtgcacgccggccactgggagtggatcggcggcgagcccgtggccttcaccaacggcagaagaggccccagccagagaagcaagctgggcaagagctgcgtgctggtgcagagacagggcaagtggcagaccaaggactgcagaagagccaagccccacaactacgtgtgcagcagaaagctgtag

SEQ ID NO: 309260 - DNA, 6543 bp, Artificial Sequence
  derived and/or modified sequence
atgaacagcctgagctggggcgccgccaacgccgtgctgctgctgctgctgctggcctgggccagccccaccttcatcagcatcaacagaggcgtgagagtgatgaagggccacagcgccttcctgagcggcgacgacctgaagttcgccatccccaaggagaaggacgcctgcaaggtggaggtggtgatgaacgagcccatcacccagagagtgggcaagctgaccccccaggtgttcgactgccacttcctgcccaacgaggtgaagtacgtgcacaacggctgccccatcctggacgaggacaccgtgaagctgagactgtacagattcaccgagagagacaccttcatcgagaccttcatcctgtgggtgtacctgctggagcccgactgcaacatcatccacatgagcaacaacgtgctggaggtgcccgagttcaacggcctgagccaggccatcgacaagaacctgctgagattcgactacgacagaatggccagcctggagtgcaccgtgagcctggacaccgccagaaccagactgcccgcccacggccagatggtgctgggcgagcccagacccgaggagcccagaggcgaccagccccacagcttcttccccgagagccagctgagagccaagctgaagtgccccggcggcagctgcacccccggcctgaagaagatcggcagcctgaaggtgagctgcgaggagttcctgctgatgggcctgagataccagcacctggacccccccagccccaacatcgactacatcagcatccagctggacctgaccgacaccagaagcaagatcgtgtacaagaagagcgagagcgcctggctgcccgtgtacatcagagccggcatccccaaccagatccccaaggccgccttcatggccgtgttcatcctggaggtggaccagttcatcctgaccagcctgaccaccagcgtgctggactgcgaggaggacgagacccccaagcccctgctggtgttcaacatcaccaaggcccccctgcagggctacgtgacccacctgctggaccacaccagacccatcagcagcttcacctggaaggacctgagcgacatgcagatcgcctaccagccccccaacagcagccacagcgagagaagacacgacgaggtggagctggaggtgtacgacttcttcttcgagagaagcgcccccatgaccgtgcacatcagcatcagaaccgccgacaccaacgcccccagagtgagctggaacaccggcctgagcctgctggagggccagagcagagccatcacctgggagcagttccaggtggtggacaacgacgacatcggcgccgtgagactggtgaccgtgggcggcctgcagcacggctggctgaccctgagaggcggcaagggcttcctgttcaccgtggccgacctgcaggccggcgtggtgagataccaccacgacgacagcgacagcaccaaggacttcgtggtgttcagaatcttcgacggccaccacagcatcagacacaagttccccatcaacgtgctgcccaaggacgacagcccccccttcctgatcaccaacgtggtgatcgagctggaggagggccagaccatcctgatccagggcagcatgctgagagccagcgacgtggacgccagcgacgactacatcttcttcaacatcaccaagcccccccaggccggcgagatcatgaagaagcccggccccggcctgatcggctaccccgtgcacggcttcctgcagagagacctgttcaacggcatcatctactacagacacttcggcggcgagatcttcgaggacagcttccagttcgtgctgtgggacagccacgagccccccaacctgagcgtgccccaggtggccaccatccacatcacccccgtggacgaccagctgcccaaggaggcccccggcgtgagcagacacctggtggtgaaggagaccgaggtggcctacatcaccaagaagcagctgcacttcatcgacagcgagagctacgacagagagctggtgtacaccatcaccaccccccccttcttcagcttcagccacagacacctggacgccggcaagctgttcatggtggacagcatccccaaggtggtgaagaaccccaccgccctggagctgagaagcttcacccagcacgccgtgaactacatgaaggtggcctacatgccccccatgcaggacatcggcccccactgcagagacgtgcagttcaccttcagcgtgagcaaccagcacggcggcaccctgcacggcatctgcttcaacatcaccatcctgcccgtggacaaccaggtgcccgaggccttcaccaaccccctgaaggtgaccgagggcggccagagcatcatcagcaccgagcacatcctgatcagcgacgccgacaccaagctggacaacatcgacctgagcctgagagagctgcccctgcacggcagagtggagctgaacggcttccccctgaacagcggcggcaccttcagctggggcgacctgcacaccctgaaggtgagataccagcacgacggcaccgaggtgctgcaggacgacctgctgctggaggtgaccgacggcaccaacagcgccgagttcgtgctgcacgtggaggtgttccccgtgaacgacgagccccccgtgctgaaggccgacctgatgcccgtgatgaactgcagcgagggcggcgaggtggtgatcaccagcgagtacatcttcgccaccgacgtggacagcgacaacctgaagctgatgttcgtgatcgccagagagccccagcacggcgtggtgagaagagccggcgtgaccgtggaccagttcagccagagagacgtgatcagcgaggccgtgacctacaagcacaccggcggcgagatcggcctgatgccctgcttcgacaccatcaccctggtggtgagcgacggcgaggccggccccttcgtgaacggctgctgctacaacggccccaaccccagcgtgcccctgcacgccagcttccccgtgtacgacctgaacatcaccgtgtaccccgtggacaaccagccccccagcatcgccatcggccccgtgttcgtggtggacgagggctgcagcaccgccctgaccgtgaaccacctgagcgccaccgaccccgacaccgccgccgacgacctggagttcgtgctggtgagccccccccagttcggctacctggagaacatcctgcccagcgtgggcttcgagaagagcaacatcggcatcagcatcgacagcttccagtggaaggacatgaacgccttccacatcaactacgtgcagagcagacacctgagaatcgagcccaccgccgaccagttcaccgtgtacgtgaccgacggcaagcaccacagcctggagatccccttcagcatcatcatcaaccccaccaacgacgaggcccccgacttcgtggtgcagaacatcaccgtgtgcgagggccagatgaaggagctggacagcagcatcatcagcgccgtggacctggacatcccccaggacgccctgctgttcagcatcacccagaagcccagacacggcctgctgatcgacagaggcttcagcaaggacttcagcgagaacaagcagcccgccaacccccaccagaagcacgcccccgtgcacagcttcagcatggagctgctgaagaccggcatgagactgacctacatgcacgacgacagcgagagcctggccgacgacttcaccatccagctgagcgacggcaagcacaagatcctgaagaccatcagcgtggaggtgatccccgtgaacgacgagaagcccatgctgagcaagaaggccgagatcgccatgaacatgggcgagaccagaatcatcagcagcgccatcctgagcgccatcgacgaggacagccccagagagaagatctactacgtgttcgagagactgccccagaacggccagctgcagctgaagatcggcagagactgggtgcccctgagccccggcatgaagtgcacccaggaggaggtggacctgaacctgctgagatacacccacaccggcgccatggacagccagaaccaggacagcttcaccttctacctgtgggacggcaacaacagaagccccgccctggactgccagatcaccatcaaggacatggagaagggcgacatcgtgatcctgaccaagcccctggtggtgagcaagggcgacagaggcttcctgaccaccaccaccctgctggccgtggacggcaccgacaagcccgaggagctgctgtacgtgatcaccagcccccccagatacggccagatcgagtacgtgcactaccccggcgtgcccatcaccaacttcagccagatggacgtggtgggccagaccgtgtgctacgtgcacaagagcaaggtgaccgtgagcagcgacagattcagattcatcatcagcaacggcctgagaaccgagcacggcgtgttcgagatcaccctggagaccgtggacagagccctgcccgtggtgaccagaaacaagggcctgagactggcccagggcgccgtgggcctgctgagccccgacctgctgcagctgaccgaccccgacacccccgccgagaacctgaccttcctgctggtgcagctgccccagcacggccagctgtacctgtggggcaccggcctgctgcagcacaacttcacccagcaggacgtggacagcaagaacgtggcctacagacacagcggcggcgacagccagaccgactgcttcaccttcatggccaccgacggcaccaaccagggcttcatcgtgaacggcagagtgtgggaggagcccgtgctgttcaccatccaggtggaccagctggacaagaccgcccccagaatcaccctgctgcacagccccagccaggtgggcctgctgaagaacggctgctacggcatctacatcaccagcagagtgctgaaggccagcgaccccgacaccgaggacgaccagatcatcttcaagatcctgcagggccccaagcacggccacctggagaacaccaccaccggcgagttcatccacgagaagttcagccagaaggacctgaacagcaagaccatcctgtacatcatcaaccccagcctggaggtgaacagcgacaccgtggagttccagatcatggaccccaccggcaacagcgccaccccccagatcctggagctgaagtggagccacatcgagtggagccagaccgagtacgaggtgtgcgagaacgtgggcctgctgcccctggagatcatcagaagaggctacagcatggacagcgccttcgtgggcatcaaggtgaaccaggtgagcgccgccgtgggcaaggacttcaccgtgatccccagcaagctgatccagttcgaccccggcatgagcaccaagatgtggaacatcgccatcacctacgacggcctggaggaggacgacgaggtgttcgaggtgatcctgaacagccccgtgaacgccgtgctgggcaccaagaccaaggccgccgtgaagatcctggacagcaagggcggccagtgccaccccagctacagcagcaaccagagcaagcacagcacctgggagaagggcatctggcacctgctgccccccggcagcagcagcagcaccaccagcggcagcttccacctggagagaagacccctgcccagcagcatgcagctggccgtgatcagaggcgacaccctgagaggcttcgacagcaccgacctgagccagagaaagctgagaaccagaggcaacggcaagaccgtgagacccagcagcgtgtacagaaacggcaccgacatcatctacaactaccacggcatcgtgagcctgaagctggaggacgacagcttccccacccacaagagaaaggccaaggtgagcatcatcagccagccccagaagaccatcaaggtggccgagctgccccaggccgacaaggtggagagcaccaccgacagccacttccccagacaggaccagctgcccagcttccccaagaactgcaccctggagctgaagggcctgttccacttcgaggagggcatccagaagctgtaccagtgcaacggcatcgcctggaaggcctggagcccccagaccaaggacgtggaggacaagagctgccccgccggctggcaccagcacagcggctactgccacatcctgatcaccgagcagaagggcacctggaacgccgccgcccaggcctgcagagagcagtacctgggcaacctggtgaccgtgttcagcagacagcacatgagatggctgtgggacatcggcggcagaaagagcttctggatcggcctgaacgaccaggtgcacgccggccactgggagtggatcggcggcgagcccgtggccttcaccaacggcagaagaggccccagccagagaagcaagctgggcaagagctgcgtgctggtgcagagacagggcaagtggcagaccaaggactgcagaagagccaagccccacaactacgtgtgcagcagaaagctgtag

SEQ ID NO: 309261 - protein, 215 aa, Artificial Sequence
  derived and/or modified sequence
MLDESLAVRRSKKCKEMIMHWEKKEDIDIVNTVDQLDKTAPRITLLHSPSQVGLLKNGCYGIYITSRVLKASDPDTEDDQIIFKILQGPKHGHLENTTTGEFIHEKFSQKDLNSKTILYIINPSLEVNSDTVEFQIMDPTGNSATPQILELKWSHIEWSQTEYEVCENVGLLPLEIIRRGYSMDSAFVGIKVNQVSAAVGKDFTVIPSKLIQFDP

SEQ ID NO: 309262 - protein, 715 aa, Artificial Sequence
  derived and/or modified sequence
MVTQESMLKAALPLFTRFIISNGLRTEHGVFEITLETVDRALPVVTRNKGLRLAQGAVGLLSPDLLQLTDPDTPAENLTFLLVQLPQHGQLYLWGTGLLQHNFTQQDVDSKNVAYRHSGGDSQTDCFTFMATDGTNQGFIVNGRVWEEPVLFTIQVDQLDKTAPRITLLHSPSQVGLLKNGCYGIYITSRVLKASDPDTEDDQIIFKILQGPKHGHLENTTTGEFIHEKFSQKDLNSKTILYIINPSLEVNSDTVEFQIMDPTGNSATPQILELKWSHIEWSQTEYEVCENVGLLPLEIIRRGYSMDSAFVGIKVNQVSAAVGKDFTVIPSKLIQFDPGMSTKMWNIAITYDGLEEDDEVFEVILNSPVNAVLGTKTKAAVKILDSKGGQCHPSYSSNQSKHSTWEKGIWHLLPPGSSSSTTSGSFHLERRPLPSSMQLAVIRGDTLRGFDSTDLSQRKLRTRGNGKTVRPSSVYRNGTDIIYNYHGIVSLKLEDDSFPTHKRKAKVSIISQPQKTIKVAELPQADKVESTTDSHFPRQDQLPSFPKNCTLELKGLFHFEEGIQKLYQCNGIAWKAWSPQTKDVEDKSCPAGWHQHSGYCHILITEQKGTWNAAAQACREQYLGNLVTVFSRQHMRWLWDIGGRKSFWIGLNDQVHAGHWEWIGGEPVAFTNGRRGPSQRSKLGKSCVLVQRQGKWQTKDCRRAKPHNYVCSRKL

SEQ ID NO: 309263 - DNA, 2481 bp, Artificial Sequence
  derived and/or modified sequence
agtctgcagggaggaaagtcagaattagatattcaagatggccgcctctgatggagtccctggcactcactcaagcttgcatttggtagatggtgacacaagaatccatgctgaaggctgccttgcctctctttaccagattcatcatcagcaatggactgcggaccgagcacggggtgtttgagatcacactggagactgtggacagagccctgcctgtggtaaccaggaacaaggggttgagactggcccaaggggccgtgggcctgctttcccctgacctccttcagctgaccgaccctgatacacctgcggagaacctcaccttcctcttggttcagctcccccagcatggccagctctacctgtgggggacagggctacttcaacacaatttcacccagcaggatgtggacagcaagaatgtggcctatcggcactcaggaggggactcccagactgactgctttactttcatggccacagatgggacaaaccaaggctttattgtgaatgggagagtgtgggaagaacctgttttattcaccattcaggtagaccaattggacaaaacagctcctcgtatcacactcttgcattccccttctcaagtggggctcctgaaaaatggctgctacgggatttacatcacttcccgcgtgttgaaggcatcagaccctgacactgaggacgatcagatcatctttaaaattctacaaggcccaaaacatggacatctggagaacacaacaacaggtgaatttatccatgagaaatttagccaaaaggacttaaacagtaagactattctttacatcataaacccatctttggaagtaaattcagataccgtggaatttcaaatcatggaccccacagggaactcggccactcctcaaattttggaactgaagtggtctcatattgaatggtcacagaccgaatatgaagtctgtgagaatgtgggtttgttgcccttggaaattatcagaaggggatattccatggactcggcctttgtgggtataaaggtcaaccaagtgtcagctgcagttggaaaagatttcaccgtgattccatctaaactgattcagtttgacccaggaatgtcaactaagatgtggaatatagcaattacctatgacggattagaggaagatgatgaggtctttgaagtaattctgaactcccctgtgaatgcagttcttggcacaaagacaaaagctgcagtgaaaattttggactcaaaaggaggacaatgccatccttcatattcctccaaccaaagcaagcacagcacatgggagaagggcatttggcatctgctgcccccagggtcttcctcatccaccacttctggttcctttcatctggaaagaagacctcttccatcttccatgcagctagcagtcatcaggggagacaccctgcggggctttgattctacagatctttctcaaaggaagcttaggacccgtgggaatggcaaaacagttcgtccatcctctgtttatagaaatggaacagacatcatctataattatcatgggatagtttccttgaaactggaggatgacagtttcccaactcacaaaaggaaggccaaagtatccatcattagtcagccacaaaagacaatcaaagtggcagaactgcctcaagcagataaggtggaatccacaactgactcacacttccccagacaggaccagttgccctcatttccaaagaactgcactctggaattaaagggactcttccattttgaagaaggcatccagaagctgtatcagtgcaatgggatcgcctggaaagcctggagtccccaaaccaaggatgtggaagacaaatcctgtccagccgggtggcaccagcactcaggctactgtcacatcttgatcacagagcagaaaggcacctggaatgcggctgcccaagcttgcagggaacaatacctgggcaaccttgtaactgtattctccaggcagcacatgcggtggctctgggacattggtgggagaaagtccttttggataggtttgaacgaccaagtgcatgctggccactgggagtggatcggtggtgaacctgttgccttcaccaatgggagaagagggccctctcaacgctccaagcttggaaagagctgtgttttggttcaaagacaagggaaatggcaaacaaaagactgtaggagagccaaacctcataattatgtgtgttccagaaaactctaaatataacagaccctacagggggccacctggagtttgtcacctatttattcacaggatctgtgaatattgctccatagaaaacaaattgttatgattgagtgggtatacctttgtgattctgtctagtgaaaatgggacatttttaatagtgccagaaagattgataaataaatattttttacaagataagatacaatttttgtatctcaataccttttaaaataaatgccagcagtattataaa

SEQ ID NO: 309264 - protein, 930 aa, Artificial Sequence
  derived and/or modified sequence
MNGRSCSMSLHRTSGTPQGPRMVSGHHIPAIRAHSGTPGPSPCGSTSSPTMASLANNLHLKMPSGGGMAPQNNVAESRIHLPALSPRRQMLTNGKPRFQVTQAGGMSGSHTLKPKQQEFGSPFPPNPGKGALGFGPQCKSIGKGSCNNLVVTSSPMMVQRLGLISPPASQVSTACNQISPSLQRAMNAANLNIPPSDTRSLISRESLASTTLSLTESQSASSMKQEWSQGYRALPSLSNHGSQNGLDLGDLLSLPPGTSMSSNSVSNSLPSYLFGTESSHSPYPSPRHSSTRSHSARSKKRALSLSPLSDGIGIDFNTIIRTSPTSLVAYINGSRASPANLSPQPEVYGHFLGVRGSCIPQPRPVPGSQKGVLVAPGGLALPAYGEDGALEHERMQQLEHGGLQPGLVNHMVVQHGLPGPDSQSAGLFKTERLEEFPGSTVDLPPAPPLPPLPPPPGPPPPYHAHAHLHHPELGPHAQQLALPQATLDDDGEMDGIGGKHCCRWIDCSALYDQQEELVRHIEKVHIDQRKGEDFTCFWAGCPRRYKPFNARYKLLIHMRVHSGEKPNKCTFEGCEKAFSRLENLKIHLRSHTGEKPYLCQHPGCQKAFSNSSDRAKHQRTHLDTKPYACQIPGCTKRYTDPSSLRKHVKAHSSKEQQARKKLRSSTELHPDLLTDCLTVQSLQPATSPRDAAAEGTVGRSPGPGPDLYSAPIFSSNYSSRSGTAAGAVPPPHPVSHPSPGHNVQGSPHNPSSQLPPLTAVDAGAERFAPSAPSPHHISPRRVPAPSSILQRTQPPYTQQPSGSHLKSYQPETNSSFQPNGIHVHGFYGQLQKFCPPHYPDSQRIVPPVSSCSVVPSFEDCLVPTSMGQASFDVFHRAFSTHSGITVYDLPSSSSSLFGESLRSGAEDATFLQISTVDRCPSQLSSVYTEG

SEQ ID NO: 309265 - protein, 244 aa, Artificial Sequence
  derived and/or modified sequence
MNGRSCSMSLHRTSGTPQGPRMVSGHHIPAIRAHSGTPGPSPCGSTSSPTMASLANNLHLKMPSGGGMAPQNNVAESRIHLPALSPRRQMLTNGKPRFQVTQAGGMSGSHTLKPKQQEFGSPFPPNPGKGALGFGPQCKSIGKGSCNNLVVTSSPMMVQRLGLISPPASQVSTACNQISPSLQRAMNAANLNIPPSDTRSLISRESLASTTLSLTESQSASSMKQEWSQGYRALPSLSNHGSQN

SEQ ID NO: 309266 - DNA, 2793 bp, Artificial Sequence
  derived and/or modified sequence
atgaacggacggtcttgcagcatgagccttcaccgtacatccggcaccccccaggggccccgtatggtgtccggccaccatattcctgcgattcgggcgcacagtggcactccaggaccctcgccatgcgggtccacctcatcacctaccatggctagcctagcgaataacctgcacctgaagatgccgagtggtggggggatggccccccagaataacgtcgcagagagtaggattcacctccctgccttatctcccaggcggcagatgttaaccaatggtaagccccggtttcaggtgactcaggccgggggtatgagcgggagccacactctcaagccgaaacaacaagaattcggcagcccattccctccaaacccggggaagggcgcattgggattcggtccacagtgtaagtcaatagggaagggatcatgcaacaacctggtggttacttcatcaccaatgatggttcagcggttgggcctcataagccccccagcatcacaagtgagcacagcatgcaatcagatctcaccctctctacaacgagccatgaacgctgccaatctcaacatccctccatctgacactcgttcattgatttcgcgagaatctttggctagcacaacgcttagtttaaccgaatctcagagcgcaagcagtatgaaacaggaatggtcgcaggggtatcgagcactgccttccctgtcaaatcacggtagtcagaatggtctggacctgggggacctgctgtctctgccccccggcacaagtatgtccagtaattcagtgtccaattcattaccctcttaccttttcggtacggaatcttcccattccccttatccgtcccccaggcactcaagcacacgcagccattcagcacgcagtaagaaacgggccctctctctgagtccgttgtctgatggcattggcatagactttaacaccatcataaggacttcacctacatcgctcgtcgcctatattaacggaagtagagccagccccgcgaaccttagccctcagcccgaagtgtacggacactttctgggggttcgagggtcatgtatcccacagcctcgccccgtacccggatctcaaaagggtgtgttagtggcccccggtgggctggctctgccggcctacggcgaggatggcgccctggagcatgaaaggatgcaacagctggaacacggaggcctacagcctgggctcgtgaaccacatggtggtgcagcacggtttgcctgggccggatagccagtctgccggcctgtttaaaacggaaagattggaagagtttcctggctctaccgtcgacctacccccagctcctccccttccgccactgccccctccccccggacctcccccaccctatcacgcccatgctcacctgcaccaccctgagttgggtccccatgctcagcaactggccctgccacaagcgacattagatgacgacggagaaatggacgggattgggggcaagcactgttgtcgctggatcgactgcagcgccctgtacgaccagcaggaggagctggtgcgacacatcgagaaggttcacattgatcaacgtaaaggcgaagattttacctgtttttgggccgggtgcccacgccgctataagcccttcaacgcgcgatacaaacttctcattcatatgcgcgtccactctggtgaaaaaccaaacaagtgcactttcgagggatgtgagaaagccttctcccgacttgagaacctgaaaatacatctgcgctcccacacaggcgaaaagccatatctttgccagcaccctggctgccagaaggcttttagcaactcatctgatagagctaagcaccagcgaacacatctggacaccaaaccttacgcctgtcagatcccaggatgcaccaagcgctacacagacccttcgtctttgcggaaacacgtcaaggctcactcaagtaaggaacagcaggcaagaaagaaactccgctcctccaccgagctgcaccccgacctgttaactgactgccttacggtccagtccttgcagcctgcaactagccctagagatgctgctgccgaagggactgtcgggcgctccccaggtcctggaccggatctctattctgctcctattttttcctcgaactactcttccagatcagggaccgccgctggagcagtccccccccctcacccagtctctcacccttctccaggccataatgtgcagggcagcccccataatccctcaagccagcttccacctttgactgccgtggatgccggagccgagagatttgccccctctgcaccgtccccccatcatatcagtcctagacgggtgccggcaccaagcagcattttacagcgaacccagcccccctatacacagcaacctagtggttctcacttaaagtcataccagccggaaaccaactctagtttccagccaaacgggatccacgtgcacggattctatggccagctgcagaagttttgccctccccattatcccgacagtcagagaatcgttccaccggtcagcagctgttcggtggtgccgtctttcgaggactgtctggtccccactagtatgggacaggcatcctttgacgtgtttcatcgcgctttcagcacccattctgggatcactgtgtatgatctgccttcatcatcctctagtctctttggggagtccctccggtccggcgccgaagacgcaacctttctgcagatttcgaccgtggatcgctgtccatcccagctgtcctccgtctacacagagggctag

SEQ ID NO: 309267 - DNA, 6667 bp, Artificial Sequence
  derived and/or modified sequence
atcctttatggttgaagggtgttggaggaagcagagttttcatcagctgctgaagtggcaactaatagaggtttgaatggccgtagaaaaatattgtgttacttgtttgttgtctaggggctcttggctttgggcctcagtgcaagtccattggaaaaggcagctgcaacaatctagtggtcaccagcagtcccatgatggttcagcgactgggactcatttcacctccagcaagccaggtctctacagcatgcaaccagatcagtcctagcttacagagggcaatgaatgcagccaacctgaatatacctccttcagataccaggtcccttatttcgcgtgagtctttggcgtccacgaccttgagtctgacggaaagtcagtcggcctcaagcatgaagcaggagtggtcccagggctacagggccctcccttcgctctccaaccacggctctcagaatggccttgatctaggggatctccttagccttcctcccgggacatccatgtccagcaatagtgtctctaactcattaccatcctacctttttggcacggaaagtagccactctccttaccctagtcctcggcactcatccaccaggtcccactcggcccgctccaagaagagagcgctgtccttgtccccgctgtccgatggcatcgggatagatttcaataccatcatccgcacgtcgcccacgtccttggtggcctacatcaacgggtcgagggcttcgccggccaacctgtccccgcagccggaggtctacgggcatttcctgggcgtgcgcggcagctgcattccccagccgcgcccggtgcccggcagccagaagggcgtgctggtggcccctggaggcctggcgctgccggcctacggcgaggacggggccctggagcacgagcgcatgcaacagctggagcacggcggcctgcagccaggcctggtcaaccacatggtggtgcagcatggcctgccgggccccgacagccagtcggccggcctgttcaagaccgaacgcctggaggagttcccgggcagcaccgtagacctaccccccgcgcctccgctccctcctctgccgccgcccccaggccccccacccccttaccatgcccatgcgcaccttcaccacccggagctcgggccccacgcccagcagctggccttgccccaggccaccctggacgacgacggggagatggacggcatcgggggcaagcattgctgccgctggatcgactgcagcgccctgtacgaccagcaggaggagctcgtgcggcacatcgagaaggtccacatcgaccagcgcaaaggggaggacttcacttgcttctgggccggttgccctcgaagatacaagcccttcaacgcccgctataaactgctgatccacatgagagtccactctggggagaagcccaacaagtgtacgtttgaaggttgcgagaaggccttttcaaggcttgaaaatctcaagatccacttgcggagccacacaggcgagaagccgtatttgtgccagcatccgggttgtcagaaggccttcagtaactccagtgaccgcgccaaacaccagcggacgcatctggacaccaaaccttatgcttgtcaaattccaggatgtaccaaacgctacacagacccaagttccctaagaaagcatgtgaaggcacattcttccaaagagcaacaagcaaggaaaaagttgcggtccagcacagagctccatccagacctgctcacagattgcctcaccgtgcagtccctgcagccggccacttcccctagagatgctgctgctgaagggaccgtgggacgctcccctggacccgggcctgacctctattcagctcccattttctccagcaattattcaagccgaagtggaacagctgctggggccgtaccacccccacatcctgtcagtcacccttctccaggacataatgtacaggggagccctcacaacccctcctcccagttacctccactcacagctgtggacgcaggagctgagaggtttgcaccttctgctccatctcctcaccacatcagcccccggagagttccagctccttcttcaatactgcaaagaacacagcctccctatacccagcagccatcaggttcacacctgaagtcctatcagccagaaacaaactcttcttttcaaccaaatggtatccatgtccatggattttatgggcagctgcagaagttctgtcccccacactaccccgattcccagagaattgtgccgcctgtcagctcctgcagtgtggtgccttcgtttgaggactgcctagtccctacatccatgggccaggccagttttgatgttttccacagagccttctcgactcactcgggcattacagtgtatgatttaccttcaagttcctcgagcctctttggggagtctctccgcagcggggctgaagatgctaccttcttgcagatcagcaccgtggaccgctgtcctagccagctctcctctgtctacaccgaaggctaaaagctctcttggccactcctgcacacccaggaccttgatgttgcttgccaccttttgttttcgtactctcacagactgcttgaggaaggatgtcagcccaatcagcgggccctgcagagttactgatgttctttcagaaggcaggactgaatggcagagctagctttgcaggaatcattacagttgctcctttttctctctggttttcctggactatgtgaccaggaggactgtcttttcaaagggaatttagagcctcactctcctggatacctgttacttcctggctgtcaacccttaaaggaccccagtgaaatgatgtgcatatgaaaatgtagtttggggatgactctacctgaaaactccaaacagggaaaaagacctcaattacgagaggcatagtgacctgcctcacctaatcctcacccttgctgctcctgatgcaaagccaggcacaacaagggaaatccatgtccaaagcatagtgtggtctcaactcttagaaactccctgggtttcccttttctcttagccacatgctaaccagttgcttctcagtgtttctcttcaatagaaaaataaggttttatatgccagcagcctatccttgtttttgcattttaaagacttagttatttatacgtattttaaaatgaaaaaaaaatgtaaaggtctgtgctttggatggaaatcattattattgtaatcaccccagctatagacattttgcacagctgtggttctgcctggccccacctctagcatgttagttttgcagttagcaaaggttacctgagggaaatggagtgggcacctcccgcaccaacagtcctgtagctggaaccttcctgagttgactgtttagtaactccacctcaaagactgtgttcaaagaaaaatgttgtttgactggtttacccattgcctccactctggtgctgcacccagagaagtgccagatgtgagaactgggacagactgagtcatgtgccagcttcccttggaaaaccaaacctagtgatacttgacttccagtgctcagattttactaacgtttttcaggatatccactcatctgtctgtctcttccctacacttctctccaccctctttttgcatccctcttaccctcttcctgactgtggttcatatatccccaccagccgccattgtctgatcatcttgggaaggtagaggtgacagttctcgaaaagtctacagaaagaggcaattctttttctgagttccagtttgaaggcctggaattttcacatagcacttggtcgaaaatatcaagcctaaataggaagtcattttctgtgacacctctacatagctattacagatcctaagtcctagggcatcagctataaaaattggccagtcccaaagacacagtaagttctaacattctggtactatcatatttcaagtattttttctcactttttaaaaatgtttttctgaacaaaagtgaaacaatgccatttatcaaactgagatcattacaatcttcaacaagacaactaaaacagcttgatgttagatgggattctgtgacagtttgtatactgacaggtccttccagtctccctccacagtcccacaagcggaagtattctacctgattccagagttcattccaacatgcagtagaatgaggtgaatgaagaaccaagtgtgggttttgttttcacagtgcacttggtcaatctagtttctctgagtagtgggctgtattctaagaaaagctttcacgtagacgtcaaagtctgcaaaagagatgagttagccactttaaaaaacctgctctgctttacaaaagatgcacaccaggcttcctttacaagtgaactccaaggctgcttgtaaagtaccacccttcctgcagactttgtgggtcgtgtcacttggcctaaacaagtggcctaacatatgcatgctcacagctagtagcatccctcatgcgtcctttgtcatactctggaaagaaaaaaactctgctatcttcagagaaaccatctattcatacttaaatatggaagcctttacaaggaactcaaaatacatttcatttcatttgtacaatgagaaaaaagatgaaaaggcaaggttgttattgcagttgacattgtcagccctgccttttggctttatgtaatttaaaatagaaagggggaaggaggacaagacagaagctcaactttagaaaccatggacatcacctccctctttgagaggagctgcttgtgaaccaggctccagtcttcctgtggcctctcacagtaaccctgcccctttcttacctcacaggggcaagagggactctaaagagggcgtaagcaatagaggcacctgcagccctccttcctcagcaggaaatcaatgtggagccccagagggacattttatctcagagagagcatgctggccacaggacccagtgcagccctgcttcccgcaccgtgggtctttcctgatagctgcaggcttgagattgcagcctcaggataggacacgttcagatgccttccagactacacacactatgcttagattcgagagtctttcctgaccttaaaatttgtcccttgcttactttcacactgcagaagatttatatatatattcatcattatttttgcagcagtacaagtggaaacttcaaaaaaatcattccctttcatgtcctggtctttttaagtcttgatatgtaaccattttcataaatgtccaaacagagattgtcattccccttaaaaacagaaacaaaacacaaaactagtgcttgtgaaaacacacagcgcaaagacaattatcctattgcattaaaaaaaaaatcagtctgcctagagacatttcattggctgcattgtcttaattccctaacgaaactgcatcaaaatgtcagttgtaatttagcctctgatcagctgttaaatattatttaaatatttacaggtcctgtggggtatctcccattacccatgtcgccctcaaattacataagcgatcataaaataagaagaaaaaaaaaggtctttagtagatcacagcagagttaccactgataagagtgttggctttgttcagttgtttctaaattaccagccgtcaagcacagtagcccctaaaaccaattttgagcaaggataaattcaactccctcatctgagaaccttgactttccagttgccttgaagtattgggaatagtaactgtacattttcaatttaattatttggtattttatttgactgtcttggccatgtcattttatggaagcatttttaaatagcactttttgttagtggtgtggaatttctgcggttattatttttttttttttttgcaacagatgaagcaaaaaaaaaaaagcactcattggagaaatagtgagtgtaaaaagagatttattttgtacagacagcaaagtatcctgtgtaatgttgctgacataaagcactttgggggaaaaaagtggaaatctgttttccataaatcacacagactcttgtacatagttatatacactcacgtagagaaatgaactgcatatatcatactggatatggggccgattttactctagaggcacatctggtgcttattgtcataaatcttttaaagaattaggtacacttttttctattaatatgtatagttttgtgatttgtcacagttatgtttcatataatcataagttattttgtcttgttcatgaagtcctttttttatgtcaaaagtaaaatgaagggattgtgcacttggtacagaataaaactggaaatagagaagacgccctcctgcctaaaatcctccttcagcctgtcggtttaaaacacaatggcaaccatcattgtttgtttgtttgtttttttgttttgttttaccatcagcctcttacatactgggaatggtaattataattaaaggcagatgatgcgggagggaatgttcaagtccagctttaaaatgctgcattgctttgggccagagctgtagcctggatttaattatagatatgaggaggaaatggcagtaaaaatgaatgtctccctgagtcctttacatgttgggagtgtccataaataaaacatgaagttttatttcatcagatttaattaaagcttttatacatgttt

SEQ ID NO: 309268 - DNA, 3961 bp, Artificial Sequence
  derived and/or modified sequence
cgggaccccctgtacgccgtccgcgccgtccagggtcacaccggcgacggaacccgccggcagcaattagccagcatcccggggtcggcccccagaagcattccccggcccaggacgaggatgaacaggacaggcgaggcacaaagtcgcaactgaactttttagaaacattatttgtgtgtgtatgtgtgtagcaggggagaatgagctgatgccgagggtccagccaccccgcctctgcctcctcctccccctgccgccgctgccctcgcagacgcgcgcgcacacacggcacttgggccgggtttccgcgctccgtccccccgtttggatgggggttttcatttccgaaggaggcacagcccgcggagcgctctgaagggctggagccccaagttactcctcgccagcgccggccgcccgctgtcactcgcgctggccggccgggggaagggacccgcacgccgggctttgttgtggaaatcccggttacctggcttataacccacaccatggataacttattggactttgcctgaaaggagtcattagtgacattggatatttgaccgtcttggccacaggtttttcagaatgaatggaagatcatgcagcatgagtctccaccggacatcgggaaccccacaggggcctaggatggtcagtggtcatcacattcctgccatccgagcccactccgggactcctggcccctcgccctgtggcagcacatcgagtcccactatggcaagccttgctaacaacctccatctcaagatgccctcaggaggagggatggctcctcagaacaacgtggctgagagccgcatccatctgcctgccttaagccccaggagacaaatgctcaccaatgggaagccgcgattccaggtcacccaggctggaggcatgtcagggtcacatactttaaagccaaagcagcaggagtttggaagcccttttcctccaaatcctgggaaaggggctcttggctttgggcctcagtgcaagtccattggaaaaggcagctgcaacaatctagtggtcaccagcagtcccatgatggttcagcgactgggactcatttcacctccagcaagccaggtctctacagcatgcaaccagatcagtcctagcttacagagggcaatgaatgcagccaacctgaatatacctccttcagataccaggtcccttatttcgcgtgagtctttggcgtccacgaccttgagtctgacggaaagtcagtcggcctcaagcatgaagcaggagtggtcccagggctacagggccctcccttcgctctccaaccacggctctcagaatggccttgatctaggggatctccttagccttcctcccgggacatccatgtccagcaatagtgtctctaactcattaccatcctacctttttggcacggaaagtagccactctccttaccctagtcctcggcactcatccaccaggtcccactcggcccgctccaagaagagagcgctgtccttgtccccgctgtccgatggcatcgggatagatttcaataccatcatccgcacgtcgcccacgtccttggtggcctacatcaacgggtcgagggcttcgccggccaacctgtccccgcagccggaggtctacgggcatttcctgggcgtgcgcggcagctgcattccccagccgcgcccggtgcccggcagccagaagggcgtgctggtggcccctggaggcctggcgctgccggcctacggcgaggacggggccctggagcacgagcgcatgcaacagctggagcacggcggcctgcagccaggcctggtcaaccacatggtggtgcagcatggcctgccgggccccgacagccagtcggccggcctgttcaagaccgaacgcctggaggagttcccgggcagcaccgtagacctaccccccgcgcctccgctccctcctctgccgccgcccccaggccccccacccccttaccatgcccatgcgcaccttcaccacccggagctcgggccccacgcccagcagctggccttgccccaggccaccctggacgacgacggggagatggacggcatcgggggcaagcattgctgccgctggatcgactgcagcgccctgtacgaccagcaggaggagctcgtgcggcacatcgagaaggtccacatcgaccagcgcaaaggggaggacttcacttgcttctgggccggttgccctcgaagatacaagcccttcaacgcccgctataaactgctgatccacatgagagtccactctggggagaagcccaacaagtgtacgtttgaaggttgcgagaaggccttttcaaggcttgaaaatctcaagatccacttgcggagccacacaggcgagaagccgtatttgtgccagcatccgggttgtcagaaggccttcagtaactccagtgaccgcgccaaacaccagcggacgcatctggacaccaaaccttatgcttgtcaaattccaggatgtaccaaacgctacacagacccaagttccctaagaaagcatgtgaaggcacattcttccaaagagcaacaagcaaggaaaaagttgcggtccagcacagagctccatccagacctgctcacagattgcctcaccgtgcagtccctgcagccggccacttcccctagagatgctgctgctgaagggaccgtgggacgctcccctggacccgggcctgacctctattcagctcccattttctccagcaattattcaagccgaagtggaacagctgctggggccgtaccacccccacatcctgtcagtcacccttctccaggacataatgtacaggggagccctcacaacccctcctcccagttacctccactcacagctgtggacgcaggagctgagaggtttgcaccttctgctccatctcctcaccacatcagcccccggagagttccagctccttcttcaatactgcaaagaacacagcctccctatacccagcagccatcaggttcacacctgaagtcctatcagccagaaacaaactcttcttttcaaccaaatggtatccatgtccatggattttatgggcagctgcagaagttctgtcccccacactaccccgattcccagagaattgtgccgcctgtcagctcctgcagtgtggtgccttcgtttgaggactgcctagtccctacatccatgggccaggccagttttgatgttttccacagagccttctcgactcactcgggcattacagtgtatgatttaccttcaagttcctcgagcctctttggggagtctctccgcagcggggctgaagatgctaccttcttgcagatcagcaccgtggaccgctgtcctagccagctctcctctgtctacaccgaaggctaaaagctctcttggccactcctgcacacccaggaccttgatgttgcttgccaccttttgttttcgtactctcacagactgcttgaggaaggatgtcagcccaatcagcgggccctgcagagttactgatgttctttcagaaggcaggactgaatggcagagctagctttgcaggaatcattacagttgctcctttttctctctggttttcctggactatgtgaccaggaggactgtcttttcaaagggaatttagagcctcactctcctggatacctgttacttcctggctgtcaacccttaaaggaccccagtgaaatgatgtgcatatgaaaatgtagtttggggatgactctacctgaaaactccaaacagggaaaaagacctcaattacgagaggcatagtgacctgcctcacctaatcctcacccttgctgctcctgatgcaaagccaggcacaacaagggaaatccatgtccaaagcatagtgtggtctcaactcttagaaactccctgggtttcccttttctcttagccacatgctaaccagttgcttctcagtgtttctcttcaatag

SEQ ID NO: 309269 - DNA, 2793 bp, Artificial Sequence
  derived and/or modified sequence
atgaatggccgcagctgcagcatgagcctgcacaggaccagcggcaccccccagggccccaggatggtgtctggccaccacatcccagccatccgggcccacagcggcaccccaggccccagcccctgtggcagcaccagcagccccaccatggccagcctggccaacaacctgcacctgaagatgcccagcggcggcggcatggccccccagaacaacgtggccgagagccgcatccacctgcctgccctgagcccccggcggcagatgctgaccaacgggaagccccgcttccaggtgacccaggccggcggcatgagcggcagccacaccctgaagcccaagcagcaggagtttggcagccccttcccccccaaccctggaaaaggagccctgggcttcggcccccagtgcaagagcatcggcaagggcagctgcaacaacctggtggtgaccagcagccccatgatggtgcagaggctgggcctcatcagccccccagccagccaggtgtccacagcctgcaaccagatcagccccagcctgcagagggccatgaatgctgccaacctgaacatcccccccagcgacaccaggagcctcatcagccgggagagcctggccagcaccaccctgagcctgacagagagccagagcgccagctccatgaagcaggagtggagccagggctaccgggccctgcccagcctgagcaaccacggcagccagaatggcctggacctgggggacctgctgagcctgcccccaggcacctccatgagcagcaacagcgtgagcaacagcctgcccagctacctgtttggaacagagagcagccacagcccctaccccagccccaggcacagcagcaccaggagccacagcgcccggagcaagaagagggccctgagcctgagccccctgagtgatggcatcggcatcgacttcaacaccatcatccgcaccagccccaccagcctggtggcctacatcaatggcagccgggccagccctgccaacctgagcccccagcctgaggtgtatggccacttcctgggcgtgcggggcagctgcatcccccagcccaggcctgtgcccggcagccagaagggcgtgctggtggcccctgggggcctggccctgcctgcctacggggaggatggagccctggagcacgagaggatgcagcagctggagcacggcggcctgcagcccggcctggtgaaccacatggtggtgcagcacggcctgcccggccctgacagccagagcgctggcctcttcaagacagagcggctggaggagttccctggcagcacagtggacctgcccccagccccacccctgccccccctgcccccacctcctggccccccaccaccctaccacgcccacgcccacctgcaccaccctgagctgggcccccacgcccagcagctggccctgccccaggccaccctggatgatgatggagagatggatggcatcggcggcaagcactgctgccgctggattgactgcagcgccctgtatgaccagcaggaggagctggtgcgccacatcgagaaggtgcacatcgaccagaggaagggggaggacttcacctgcttctgggccggctgcccccggcgctacaagcccttcaatgcccgctacaagctgctgatccacatgagggtgcacagcggggagaagcccaacaagtgcacctttgagggctgtgagaaggccttcagccggctggagaacctgaagatccacctgcggagccacactggagagaagccctacctgtgccagcaccctggctgccagaaggccttcagcaacagcagtgaccgggccaagcaccagaggacccacctggacaccaagccctatgcctgccagatccctggctgcaccaagcgctacacagaccccagcagcctgaggaagcacgtgaaggcccacagcagcaaggagcagcaggccaggaagaagctgcggagcagcacagagctgcacccagacctgctgacagactgcctgactgtgcagagcctgcagcctgccaccagccccagagatgctgctgctgagggcaccgtgggccgcagccctggccctggccctgacctgtacagcgcccccatcttcagcagcaactacagcagccgctctggaacagctgctggagctgtgcccccaccccaccctgtgagccaccccagccctggccacaacgtgcagggcagcccccacaaccccagcagccagctgccccccctgacagctgtggatgctggagctgagagatttgcccccagcgcccccagcccccaccacatcagcccccggcgggtgcctgcccccagcagcatcctgcagaggacccagcccccctacacccagcagcccagcggcagccacctgaagagctaccagcctgagaccaacagcagcttccagcccaacggcatccacgtgcacggcttctacggccagctgcagaagttctgccccccccactacccagacagccagagaattgtgccccctgtgagcagctgcagcgtggtgcccagctttgaggactgcctggtgcccacctccatgggccaggccagctttgatgtgttccaccgggccttcagcacccacagcggcatcaccgtgtatgacctgcccagcagcagcagcagcctgtttggagagagcctgcggtctggagcagaagatgccaccttcctgcagatcagcacagtggaccgctgccccagccagctgagctctgtgtacacagagggctag

SEQ ID NO: 309270 - DNA, 2793 bp, Artificial Sequence
  derived and/or modified sequence
atgaacggccggagctgcagcatgagcctgcaccggaccagcggcaccccacagggcccacgtatggtctcaggccatcacatccccgcaataagagcacattctgggacccctggaccgagtccttgtggttcaacgtctagcccaaccatggctagcttagcaaataatctgcacctgaaaatgccgagcggaggaggtatggctccccagaacaacgtcgctgagagccgtatccacttgccagctctctctccgcgacggcaaatgttgaccaacggcaaaccccgtttccaggtcacgcaggccggaggaatgtctggcagtcacacgctgaaacctaaacaacaggaattcggctcaccatttcctccaaatccaggcaagggtgccttgggatttggaccacagtgtaagtcaatcggcaagggctcttgtaacaatctcgttgtaaccagctcgcctatgatggttcaaaggctcggcctgatctctccccctgccagtcaagtgtccacagcgtgtaaccaaatctccccctccctgcagcgcgcgatgaacgctgctaatctcaacatccccccatccgacacccggagtctcatctctcgcgagtccctggccagcaccaccttatccttgaccgaatcccaatcagcttctagcatgaagcaagagtggtctcagggttatcgcgccctacctagcttgtctaaccacggctcccagaacgggctcgacctcggagatctgttgtctcttccgccgggcaccagcatgtctagtaactccgtgagtaactccctccccagttaccttttcgggacggaatcaagtcatagtccatatccctccccaagacattcctccacaagaagccattctgctaggtctaaaaagagagctctcagcttgtcccctctgagcgatgggatcggaattgatttcaacaccataatccggacatctccaacctctttggtcgcttatattaacggctcccgcgcatctcctgctaatctgagcccccaacctgaggtgtatggacacttcctcggcgtgcgcggctcatgcataccccagcccaggcctgtccctggtagtcaaaagggtgtgcttgttgcaccggggggcctcgcccttcccgcctatggggaagatggcgcccttgaacatgagcggatgcagcagctcgaacatggagggctgcagcccggcctagtgaaccacatggtggtgcagcacggcttgcctgggccagactcacagtctgcaggactgtttaagacagagcgtttggaagagttccctggttcaactgtggacctgcctcccgctccacccttgcctcctcttcctcctccccccggtccccctcctccataccacgcccacgctcatctgcaccaccccgaactgggacctcacgcccagcaactggctctgccccaggctactttggatgacgacggagagatggacggaatcgggggtaagcactgttgtcgttggatagattgctctgccctgtacgatcagcaggaagaattagttaggcatatagagaaggttcacatagatcagcgcaagggagaagacttcacatgcttttgggcagggtgcccacgcagatacaaaccctttaacgcccgatataagcttctgattcacatgagggtccattcaggagagaaaccaaataaatgcactttcgaaggctgtgagaaagccttctcccgcctggaaaacctcaaaatccatctcagaagccatactggggaaaagccctacttgtgccagcatcctggatgccagaaggccttcagtaacagctcagatagagcaaagcatcaaaggacacacctcgacactaaaccctacgcatgtcagatccccggatgtaccaaacgctataccgacccttcttctctgcggaaacacgtgaaggcacatagtagcaaagaacaacaagctcgaaagaaactgcgatccagcacagagcttcacccagacttactgacagattgtctgaccgtacagtctttgcaaccagccacgtcccctcgggacgccgctgccgagggcacagtgggccgctctccggggccgggaccagacctctatagtgctcctatcttctcctctaactattccagcagatctggtaccgcggcaggcgccgtaccaccaccccatcccgtatcgcacccctcacctgggcacaacgttcaagggagcccacacaacccctcatcccaactgccccccctcactgccgtcgatgctggagctgaacggttcgcacctagcgctccttcgccacaccatatttccccacgaagagtgcccgccccttcctctattctgcagcggactcagccaccttacacccaacagcctagcggatctcacctgaagagctaccagccagaaactaactccagttttcagcccaatgggatacatgtgcacgggttttacggccaacttcagaaattttgcccaccacattatccagattcacagcgcatcgtaccacccgtgtcatcttgttctgttgtgcccagcttcgaggactgtctggtccctacatccatgggccaagcgtccttcgacgtgttccatcgcgcattttcgacccacagcggaattaccgtgtatgacctgccatcgagtagctccagcttatttggtgagagcttgcgctcgggcgcagaggacgccacgttcttacagatatctacagttgatagatgccccagtcaattgtcgagtgtctatactgaggggtag

SEQ ID NO: 309271 - DNA, 2793 bp, Artificial Sequence
  derived and/or modified sequence
atgaatgggaggagctgctccatgtcacttcatagaacctctggaaccccacagggtccaagaatggtctctgggcatcacatcccagccattcgtgcccattctggtactcccggtccttctccctgtggctctacaagttcacccacaatggcctccctggctaataatctgcatctaaagatgccgtcgggaggcggaatggcaccacaaaacaacgttgcagaatcaaggatacatctgcccgctctgtcacccagaaggcagatgctgacaaatggcaaaccgagattccaggtcacacaggccggaggaatgtccggaagtcataccctcaagccaaaacaacaggagttcggcagcccgtttccccctaatccaggaaagggtgctttgggcttcggcccacagtgcaaatctatcggcaagggctcctgcaacaatctggttgttacttcttcccctatgatggtacaacgcctgggccttatctccccaccagcttcccaggtgtccacggcctgcaaccagatcagcccctccttgcagagagcaatgaacgccgctaacctgaatatacccccttccgatacccgctcactgatcagccgcgaaagtctggcatccaccacgctcagcttaaccgagtcccagtctgcgagttccatgaagcaagaatggagtcaagggtacagggccctgccgagtctgtctaatcatggcagccaaaatggtcttgacctgggcgacctgctgtccctgccccctggaacgtcaatgagttccaattctgtgagtaactccttgccaagctacctctttggcaccgagtcctctcattcaccatacccctcccctcgccattccagtacccggtcccatagcgccagatcgaagaagagagcgctgtcccttagtccactctctgatggcatcggcattgacttcaacacgattatcaggacctcccccacttctttggttgcatacatcaatggtagtcgggcaagtccagctaacctgtcaccccagcccgaagtctatggccacttcttgggagtccggggatcttgcattccacaacccaggcctgtgcccggatctcagaaaggagttctggtcgcccctgggggtctcgcactgccagcttatggggaagacggagctctagagcatgaacgcatgcagcagctggagcacgggggtctccagcccggacttgtgaaccacatggtggtccagcacggactgcccggaccggactcccagagtgccggactgtttaagacagaaagacttgaagagttccccggttcgacagtcgacctgccaccagcccctcccttgcctcccttaccaccaccacccggacctccaccaccataccatgcccacgctcacttgcaccatccagagttgggcccacatgcccagcaattggcactgccacaggccacattggacgatgacggcgaaatggacggtattggtggcaagcattgctgccgttggatcgactgctcagcactgtacgaccagcaggaggagctagtaagacacatcgaaaaggtacacatcgaccagcgaaaaggggaggactttacgtgtttctgggccggttgcccaagacggtacaagcccttcaacgcaaggtacaagctgctgattcacatgagggtgcacagtggagaaaaacccaacaagtgcacctttgaagggtgcgaaaaagcattctcccgactggagaatctgaaaatccatcttagatcccacacaggggagaaaccttacctttgccaacacccagggtgccagaaggccttctctaactcttccgaccgagcaaagcaccagcgtacccacttggatacaaagccttacgcttgtcaaatccctggctgcactaagagatacacggatccttccagtctccgaaagcacgttaaagcgcatagttctaaagaacagcaagcaaggaaaaagctcagatcctccacagaactccatcccgacctgctgaccgactgcctgacagtgcaatctctgcaaccggcaaccagcccgagagacgctgcggcagagggcactgtcggacgcagtcctggtccgggacccgacctgtactccgccccaatcttctcgagtaattacagttcgcggagtggaacagccgctggggcagtcccccctccccacccagtgtctcacccttcacctggtcacaatgtgcaggggtccccacataaccctagctcccagttgccgcctttgaccgccgtcgacgcaggggcagaaaggttcgccccaagcgctccttcccctcaccacatctcaccgcgacgcgtcccagccccaagtagtatactccagcgcacccagccgccatatactcagcagccaagcggctcacacttgaaatcttaccagccagagactaatagctcctttcaaccaaatggaatacacgtgcatggattttatggccagctgcagaaattctgtcctccccattaccctgattcgcagagaatagtgcccccagtctcttcatgctctgtggtgccctcctttgaagactgcctggtgccaacgtctatgggccaggccagtttcgacgtatttcatcgtgctttctctacacacagcggtattacagtctatgacctgccatcaagcagctcatctctgtttggggaatcactcagaagtggcgctgaggatgccacttttcttcagatctcgactgttgatcgatgcccgtctcagttgtcatctgtatataccgagggttag

SEQ ID NO: 309272 - DNA, 2793 bp, Artificial Sequence
  derived and/or modified sequence
atgaacggcagaagctgcagcatgagcctgcacagaaccagcggcaccccccagggccccagaatggtgagcggccaccacatccccgccatcagagcccacagcggcacccccggccccagcccctgcggcagcaccagcagccccaccatggccagcctggccaacaacctgcacctgaagatgcccagcggcggcggcatggccccccagaacaacgtggccgagagcagaatccacctgcccgccctgagccccagaagacagatgctgaccaacggcaagcccagattccaggtgacccaggccggcggcatgagcggcagccacaccctgaagcccaagcagcaggagttcggcagccccttcccccccaaccccggcaagggcgccctgggcttcggcccccagtgcaagagcatcggcaagggcagctgcaacaacctggtggtgaccagcagccccatgatggtgcagagactgggcctgatcagcccccccgccagccaggtgagcaccgcctgcaaccagatcagccccagcctgcagagagccatgaacgccgccaacctgaacatcccccccagcgacaccagaagcctgatcagcagagagagcctggccagcaccaccctgagcctgaccgagagccagagcgccagcagcatgaagcaggagtggagccagggctacagagccctgcccagcctgagcaaccacggcagccagaacggcctggacctgggcgacctgctgagcctgccccccggcaccagcatgagcagcaacagcgtgagcaacagcctgcccagctacctgttcggcaccgagagcagccacagcccctaccccagccccagacacagcagcaccagaagccacagcgccagaagcaagaagagagccctgagcctgagccccctgagcgacggcatcggcatcgacttcaacaccatcatcagaaccagccccaccagcctggtggcctacatcaacggcagcagagccagccccgccaacctgagcccccagcccgaggtgtacggccacttcctgggcgtgagaggcagctgcatcccccagcccagacccgtgcccggcagccagaagggcgtgctggtggcccccggcggcctggccctgcccgcctacggcgaggacggcgccctggagcacgagagaatgcagcagctggagcacggcggcctgcagcccggcctggtgaaccacatggtggtgcagcacggcctgcccggccccgacagccagagcgccggcctgttcaagaccgagagactggaggagttccccggcagcaccgtggacctgccccccgccccccccctgccccccctgccccccccccccggccccccccccccctaccacgcccacgcccacctgcaccaccccgagctgggcccccacgcccagcagctggccctgccccaggccaccctggacgacgacggcgagatggacggcatcggcggcaagcactgctgcagatggatcgactgcagcgccctgtacgaccagcaggaggagctggtgagacacatcgagaaggtgcacatcgaccagagaaagggcgaggacttcacctgcttctgggccggctgccccagaagatacaagcccttcaacgccagatacaagctgctgatccacatgagagtgcacagcggcgagaagcccaacaagtgcaccttcgagggctgcgagaaggccttcagcagactggagaacctgaagatccacctgagaagccacaccggcgagaagccctacctgtgccagcaccccggctgccagaaggccttcagcaacagcagcgacagagccaagcaccagagaacccacctggacaccaagccctacgcctgccagatccccggctgcaccaagagatacaccgaccccagcagcctgagaaagcacgtgaaggcccacagcagcaaggagcagcaggccagaaagaagctgagaagcagcaccgagctgcaccccgacctgctgaccgactgcctgaccgtgcagagcctgcagcccgccaccagccccagagacgccgccgccgagggcaccgtgggcagaagccccggccccggccccgacctgtacagcgcccccatcttcagcagcaactacagcagcagaagcggcaccgccgccggcgccgtgccccccccccaccccgtgagccaccccagccccggccacaacgtgcagggcagcccccacaaccccagcagccagctgccccccctgaccgccgtggacgccggcgccgagagattcgcccccagcgcccccagcccccaccacatcagccccagaagagtgcccgcccccagcagcatcctgcagagaacccagcccccctacacccagcagcccagcggcagccacctgaagagctaccagcccgagaccaacagcagcttccagcccaacggcatccacgtgcacggcttctacggccagctgcagaagttctgccccccccactaccccgacagccagagaatcgtgccccccgtgagcagctgcagcgtggtgcccagcttcgaggactgcctggtgcccaccagcatgggccaggccagcttcgacgtgttccacagagccttcagcacccacagcggcatcaccgtgtacgacctgcccagcagcagcagcagcctgttcggcgagagcctgagaagcggcgccgaggacgccaccttcctgcagatcagcaccgtggacagatgccccagccagctgagcagcgtgtacaccgagggctag

SEQ ID NO: 309273 - protein, 775 aa, Artificial Sequence
  derived and/or modified sequence
MMVQRLGLISPPASQVSTACNQISPSLQRAMNAANLNIPPSDTRSLISRESLASTTLSLTESQSASSMKQEWSQGYRALPSLSNHGSQNGLDLGDLLSLPPGTSMSSNSVSNSLPSYLFGTESSHSPYPSPRHSSTRSHSARSKKRALSLSPLSDGIGIDFNTIIRTSPTSLVAYINGSRASPANLSPQPEVYGHFLGVRGSCIPQPRPVPGSQKGVLVAPGGLALPAYGEDGALEHERMQQLEHGGLQPGLVNHMVVQHGLPGPDSQSAGLFKTERLEEFPGSTVDLPPAPPLPPLPPPPGPPPPYHAHAHLHHPELGPHAQQLALPQATLDDDGEMDGIGGKHCCRWIDCSALYDQQEELVRHIEKVHIDQRKGEDFTCFWAGCPRRYKPFNARYKLLIHMRVHSGEKPNKCTFEGCEKAFSRLENLKIHLRSHTGEKPYLCQHPGCQKAFSNSSDRAKHQRTHLDTKPYACQIPGCTKRYTDPSSLRKHVKAHSSKEQQARKKLRSSTELHPDLLTDCLTVQSLQPATSPRDAAAEGTVGRSPGPGPDLYSAPIFSSNYSSRSGTAAGAVPPPHPVSHPSPGHNVQGSPHNPSSQLPPLTAVDAGAERFAPSAPSPHHISPRRVPAPSSILQRTQPPYTQQPSGSHLKSYQPETNSSFQPNGIHVHGFYGQLQKFCPPHYPDSQRIVPPVSSCSVVPSFEDCLVPTSMGQASFDVFHRAFSTHSGITVYDLPSSSSSLFGESLRSGAEDATFLQISTVDRCPSQLSSVYTEG

SEQ ID NO: 309274 - protein, 89 aa, Artificial Sequence
  derived and/or modified sequence
MMVQRLGLISPPASQVSTACNQISPSLQRAMNAANLNIPPSDTRSLISRESLASTTLSLTESQSASSMKQEWSQGYRALPSLSNHGSQN

SEQ ID NO: 309275 - DNA, 2328 bp, Artificial Sequence
  derived and/or modified sequence
atgatggttcaacgattgggtctgattagtccgcccgcatctcaggtttctaccgcctgcaatcagatcagcccgtccctccagcgtgccatgaatgccgctaacctgaacattccaccttcggacacacgcagccttatctctagggaatcattagcatccactaccttatctttgactgagtcccaatctgccagtagtatgaaacaggagtggtcccaaggataccgagcacttcccagtctgtcaaatcatggctctcagaatggcctcgacctgggcgacctgttgtcccttccaccaggcacctcaatgtccagcaattccgtgagcaattccttaccttcttatctgttcggcacagaatcctctcacagtccatatcccagtccaagacatagtagtacgcgctcacactccgcacgaagcaagaagcgtgccctgagcctgtcccctctgtccgatgggattggcattgatttcaatacgattattaggacttcacctacctcccttgttgcttacattaacgggtcgcgggccagtccagccaacctgtctcctcagcctgaggtatacggccactttctgggcgtacggggatcttgcattccacagccccgacccgtccctggatcacagaaaggggttctcgtcgcaccaggagggctggccctcccagcctatggggaggacggggccttggaacatgaacggatgcaacagttggaacacgggggtttgcagccgggattggtaaaccacatggtagtacagcatggtctccccggccctgattcacaatcagccgggctcttcaaaacagagagactcgaggagttcccaggaagtacagtggatctccctcctgccccacctctcccaccactccccccccctcctggaccaccacctccctatcatgcacatgcccatctccaccaccctgagctgggtcctcacgcgcagcaactggctctgcctcaagctacactggatgacgatggggaaatggacggcatagggggaaagcactgctgcaggtggatagactgcagcgccctttacgaccagcaggaggaactggtgcgacacatcgagaaggttcatatcgaccagaggaagggcgaggacttcacttgcttctgggctggctgcccaagacggtacaaaccttttaacgctagatataagcttctgatccacatgcgggttcacagtggggagaaacccaataagtgtacttttgaagggtgcgagaaggcattctccagactggagaatcttaagattcacctgcgcagccacactggtgagaagccctatctgtgccagcatccaggctgtcagaaggcattttcaaactccagtgatcgcgcgaagcaccagagaacccacttagacacaaaaccctacgcctgtcagattccagggtgtactaagcgctacaccgatccctcctcactgcgaaagcatgtaaaggcccacagctctaaagagcagcaagcgcgcaaaaaacttagaagtagcacagaactgcatcctgatctcctgacagactgtctcaccgtgcagtccctccaaccagcgacctcaccaagagatgctgctgctgaaggtacagtaggtcgatctcccggcccggggccagatctgtatagtgccccaatttttagctccaattacagttctagatcaggcacagccgcgggcgcagtaccgccccctcacccagtgtctcaccctagccccgggcacaacgtccagggctctccacacaacccctccagccagctgcccccactcactgccgtagatgccggcgcagagagatttgccccatctgctccctctcctcatcatattagtcctagacgggttccagccccgtccagcatactgcaaaggacgcagcctccatacacacaacaaccatcaggaagccatctcaaatcctatcagcccgagacaaattctagtttccaacctaatggaatacatgtccacggtttttacggccagctccagaagttttgtcctcctcactatcccgacagccagcggatcgttccccccgtgtcctcctgctcggtggttccctccttcgaggattgtttggtccctaccagcatgggccaggccagcttcgacgtgtttcatagagcattctctacacacagcggaattactgtctacgatttgccttcatcatctagttccctttttggagaatccctcaggtcgggtgcagaggacgccacattcttacagatctccaccgtcgatcgatgcccaagtcagcttagttcagtgtatacggagggatag

SEQ ID NO: 309276 - DNA, 2328 bp, Artificial Sequence
  derived and/or modified sequence
atgatggtgcagaggctgggcctcatcagccccccagccagccaggtgtccacagcctgcaaccagatcagccccagcctgcagagggccatgaatgctgccaacctgaacatccccccaagtgacaccaggagcctcatcagccgggagagcctggccagcaccaccctgagcctgacagagagccagagcgccagctccatgaagcaggagtggagccagggctaccgggccctgcccagcctgagcaaccacggcagccagaatggcctggacctgggggacctgctgagcctgcccccaggcacctccatgagcagcaacagcgtgagcaacagcctgcccagctacctgtttggaacagagagcagccacagcccctaccccagccccaggcacagcagcaccaggagccacagcgcccggagcaagaagagggccctgagcctgagccccctgagtgatggcattggaattgacttcaacaccatcatccgcaccagccccaccagcctggtggcctacatcaatggcagccgggccagccctgccaacctgagcccccagcctgaggtgtatggccacttcctgggcgtgcggggcagctgcatcccccagcccaggcctgtgcccggcagccagaagggcgtgctggtggcccctgggggcctggccctgcctgcctatggagaagatggagccctggagcacgagaggatgcagcagctggagcacggcggcctgcagcccggcctggtgaaccacatggtggtgcagcacggcctgcccggccctgacagccagagcgctggcctcttcaagacagagcggctggaggagttccctggcagcacagtggacctgcccccagccccacccctgccccccctgcccccacctcctggccccccaccaccctaccacgcccacgcccacctgcaccaccctgagctgggcccccacgcccagcagctggccctgccccaggccaccctggatgatgatggagagatggatggcattggaggcaagcactgctgccgctggattgactgcagcgccctgtatgaccagcaggaggagctggtgcgccacatcgagaaggtgcacatcgaccagaggaaaggagaggacttcacctgcttctgggccggctgcccccggcgctacaagcccttcaatgcccgctacaagctgctgatccacatgagggtgcacagcggggagaagcccaacaagtgcacctttgagggctgtgagaaggccttcagccggctggagaacctgaagatccacctgcggagccacactggagagaagccctacctgtgccagcaccctggctgccagaaggccttcagcaacagcagtgaccgggccaagcaccagaggacccacctggacaccaagccctatgcctgccagatccctggctgcaccaagcgctacacagaccccagcagcctgaggaagcacgtgaaggcccacagcagcaaggagcagcaggccaggaagaagctgcggagcagcacagagctgcacccagacctgctgacagactgcctgactgtgcagagcctgcagcctgccaccagccccagagatgctgctgctgagggcaccgtgggccgcagccctggccctggccctgacctgtacagcgcccccatcttcagcagcaactacagcagccgcagcggcacagctgctggagctgtgcccccaccccaccctgtgagccaccccagccctggccacaacgtgcagggcagcccccacaaccccagcagccagctgccccccctgacagctgtggatgctggagctgagagatttgcccccagcgcccccagcccccaccacatcagccccaggagagtgcctgcccccagcagcatcctgcagaggacccagcccccctacacccagcagcccagcggcagccacctgaagagctaccagcctgagaccaacagcagcttccagcccaacggcatccacgtgcacggcttctacggccagctgcagaagttctgccccccccactacccagacagccagagaattgtgccccctgtgagcagctgcagcgtggtgcccagctttgaggactgcctggtgcccacctccatgggccaggccagctttgatgtgttccaccgggccttcagcacccacagcggcatcaccgtgtatgacctgcccagcagcagcagcagcctgtttggagagagcctgcggagcggggctgaagatgccaccttcctgcagatcagcacagtggaccgctgccccagccagctgagctctgtgtacacagagggctag

SEQ ID NO: 309277 - DNA, 2328 bp, Artificial Sequence
  derived and/or modified sequence
atgatggtgcagcggctgggcctgatcagcccccccgccagccaggtgagcacagcctgcaaccaaatctctcccagccttcagagagctatgaacgccgcaaatctgaacattcccccctccgatacccggtcactgatctcccgggaatctctggctagtaccactctgagcttgactgagtctcaaagtgcttccagcatgaaacaggagtggtcacagggatacagagctctgccgagcctcagcaaccatggatcccagaatggcctggacctcggtgacctcctttctctgccacccggcacctccatgtcaagcaacagcgtttcaaactccttgccttcctatctcttcggcaccgaaagcagtcattccccctatcctagcccaaggcatagttcaaccagaagccattcagccagaagcaagaaacgcgcactgtcgctttctccactgagtgacgggatcggcattgactttaacacaatcatccgaacctcacccacaagcctcgttgcctacatcaatggatctcgcgccagtcccgcaaacctgtctccacagcccgaggtgtacgggcacttcctgggtgtccgggggagctgtattccgcaaccgcgcccagtgccaggaagccagaaaggcgtgctggtcgcccccgggggccttgccctgcccgcctacggcgaagacggagccctggagcacgaacgcatgcagcagctcgaacacggaggactgcagcccggactggtgaaccacatggttgtgcagcacggcctgcctggacccgactcacagagcgcggggttgttcaaaacagaacgccttgaggaattcccaggaagcacagtagatctccccccggcccccccattgccccccttgccacccccacctgggccgccaccgccctatcacgcccacgcacatcttcatcatccagaactcggcccccatgcacaacaattagcactacctcaggccaccctggacgatgacggagaaatggacggcattggagggaagcattgctgccgctggatcgattgcagcgccttgtatgatcagcaggaagagctggtacgacatatcgaaaaagtgcatatagatcaaaggaaaggggaggatttcacttgcttctgggcaggttgtcctcgccgatataagcccttcaatgcccgatataaactcctcatccacatgagagtccactctggggaaaagcccaacaagtgcacctttgaaggctgcgaaaaagccttctctcgcctggaaaaccttaaaattcatctccggtctcacacgggtgagaaaccttatctttgtcaacaccctggatgtcaaaaagccttctcaaattcgagtgaccgcgcaaaacaccagcgaactcacctggacacgaagccttatgcatgccaaattcctggatgcaccaaacgctataccgaccccagcagtctcagaaaacacgttaaagcgcactccagtaaagaacagcaggccaggaagaagcttaggtcatcgacagagctgcaccccgatctgctgactgactgtcttactgtgcagagcctccagcccgcgacatcaccccgtgacgcagccgccgaaggaacagtcggaagatcacccgggcctggtcccgacctatattccgctcctatttttagctctaactactcaagcaggtccggcaccgcggccggagccgttcccccgccccacccagtgagccaccccagccctggccataacgtgcagggctccccccataacccatccagccaattgccacctctgacggccgttgatgccggggccgagcgattcgccccctcagcacctagtccgcatcatatctctccacggcgtgtgcccgccccgagttccattttacaaagaacccagccaccctacactcagcagccgtctggctctcatttaaagagctatcagcccgagactaacagttcattccaacctaatggcatacacgtgcatggtttctacggtcagctccaaaagttctgcccccctcactatccagattcccagcgcattgtgccaccggtgagtagctgtagtgtggttccgagcttcgaggactgcctagtacctacgtcaatgggacaggctagctttgacgtgttccatcgggccttttctactcacagtgggatcactgtgtatgacctgccatcttcttccagctccctcttcggggagagtctccggagtggagctgaagacgcaaccttcctgcagattagcactgtggaccgatgtccttcccagttaagtagcgtttataccgaaggatag

SEQ ID NO: 309278 - DNA, 2328 bp, Artificial Sequence
  derived and/or modified sequence
atgatggttcaacgcctgggtttgattagccccccagctagccaggtgtcaacggcatgcaatcagatctcaccctcactgcaacgtgcgatgaatgcggcaaacctgaatatcccacccagcgatacaagatcactcatctctcgcgagtccctggcaagcaccacgctgtctctgactgaaagccagagtgcatcgtccatgaagcaggaatggagccagggatatagggctctgccatcactctcaaaccatggctcccagaatggactggacctaggggatctactcagcctgcctccgggaacgagtatgtcttctaatagcgtatccaatagcttgccgtcttatctgtttggaacagagagctcccactcaccgtatccttcccctcgtcactcctcaacgcgttcacactctgctagatctaagaagagggccctcagcttgagtccactcagtgacggaatcggtatcgacttcaatactattattagaacctctcccacgagtctggtggcctatattaatggcagtcgggcatcccctgcaaacttatcaccacaaccagaggtctatgggcacttcctcggggtgaggggaagctgtatccctcagcccaggccagtccccggaagtcagaaaggagtgctggttgctccgggaggtcttgctctgccagcttatggagaagatggagccttggaacacgagcgcatgcaacagctcgaacacggtggattgcagccaggactagtgaaccatatggtggtgcaacacggacttccgggacccgactcccagagcgcaggcctcttcaaaacggagcggttggaagagtttccaggaagtactgtggatcttccccctgcaccccctcttccacccctgcctcccccaccaggccctcccccaccctaccatgctcacgcccacctccatcaccctgagctcggccctcacgctcagcagctggccttgccacaggctactctcgatgacgatggagagatggatggtatagggggtaagcactgttgcagatggatcgattgtagtgccctatacgatcagcaggaggagctcgtcagacatatcgaaaaggttcacatcgaccaaaggaaaggggaagactttacttgtttttgggcgggatgtcccagacgctacaagcccttcaatgccagatataaacttctcatccatatgagagtgcattccggcgaaaagccaaataagtgcactttcgagggatgcgaaaaggctttcagtcggctcgaaaacctgaagatccacctgaggtctcacaccggggagaagccatatctgtgccagcaccctgggtgtcagaaagctttttctaattcatcagatcgagccaaacatcaacgtactcacctggacaccaagccctacgcctgtcagataccaggctgtacaaagcgctatactgaccccagctcgctgcgtaagcacgttaaggcacattcgtctaaagagcagcaggctcgcaagaagctgagatctagcactgagcttcacccggacttgctgaccgactgcctgactgtacaatctctccagccagctaccagtccgagagacgcagctgccgagggaaccgttggcaggtccccgggtcccggtcccgacctctattctgccccaatcttcagcagcaactattcgtctagatcaggaaccgctgctggcgctgtcccgccaccccatcctgtctcgcacccgtcccccggtcacaacgtgcagggatctccccacaatccctcatcacagctgccaccacttacagccgtcgacgccggagctgagcgcttcgcgccaagtgcaccgtccccacatcatatcagccccagacgggtgccggcaccttcctcaattctgcagcggacacagcctccttatacgcaacaaccctcgggctcacacctgaaaagctaccaacctgaaactaactcctctttccaaccaaatgggattcacgtgcatggattctacggccagctccaaaaattctgcccaccccactatcccgattctcagagaattgtgcccccagtgagcagctgcagtgtcgtgcccagctttgaggattgtcttgtgcctaccagtatgggccaggcctctttcgacgtgttccatcgggctttttcaacacactctggcatcacagtctacgacctcccttcttcctccagctccctcttcggagagtcacttcgctctggcgcagaggacgccacctttctgcagatctctactgtcgacaggtgtccatctcaactttcttctgtttataccgaaggttag

SEQ ID NO: 309279 - DNA, 2328 bp, Artificial Sequence
  derived and/or modified sequence
atgatggtgcagagactgggcctgatcagcccccccgccagccaggtgagcaccgcctgcaaccagatcagccccagcctgcagagagccatgaacgccgccaacctgaacatcccccccagcgacaccagaagcctgatcagcagagagagcctggccagcaccaccctgagcctgaccgagagccagagcgccagcagcatgaagcaggagtggagccagggctacagagccctgcccagcctgagcaaccacggcagccagaacggcctggacctgggcgacctgctgagcctgccccccggcaccagcatgagcagcaacagcgtgagcaacagcctgcccagctacctgttcggcaccgagagcagccacagcccctaccccagccccagacacagcagcaccagaagccacagcgccagaagcaagaagagagccctgagcctgagccccctgagcgacggcatcggcatcgacttcaacaccatcatcagaaccagccccaccagcctggtggcctacatcaacggcagcagagccagccccgccaacctgagcccccagcccgaggtgtacggccacttcctgggcgtgagaggcagctgcatcccccagcccagacccgtgcccggcagccagaagggcgtgctggtggcccccggcggcctggccctgcccgcctacggcgaggacggcgccctggagcacgagagaatgcagcagctggagcacggcggcctgcagcccggcctggtgaaccacatggtggtgcagcacggcctgcccggccccgacagccagagcgccggcctgttcaagaccgagagactggaggagttccccggcagcaccgtggacctgccccccgccccccccctgccccccctgccccccccccccggccccccccccccctaccacgcccacgcccacctgcaccaccccgagctgggcccccacgcccagcagctggccctgccccaggccaccctggacgacgacggcgagatggacggcatcggcggcaagcactgctgcagatggatcgactgcagcgccctgtacgaccagcaggaggagctggtgagacacatcgagaaggtgcacatcgaccagagaaagggcgaggacttcacctgcttctgggccggctgccccagaagatacaagcccttcaacgccagatacaagctgctgatccacatgagagtgcacagcggcgagaagcccaacaagtgcaccttcgagggctgcgagaaggccttcagcagactggagaacctgaagatccacctgagaagccacaccggcgagaagccctacctgtgccagcaccccggctgccagaaggccttcagcaacagcagcgacagagccaagcaccagagaacccacctggacaccaagccctacgcctgccagatccccggctgcaccaagagatacaccgaccccagcagcctgagaaagcacgtgaaggcccacagcagcaaggagcagcaggccagaaagaagctgagaagcagcaccgagctgcaccccgacctgctgaccgactgcctgaccgtgcagagcctgcagcccgccaccagccccagagacgccgccgccgagggcaccgtgggcagaagccccggccccggccccgacctgtacagcgcccccatcttcagcagcaactacagcagcagaagcggcaccgccgccggcgccgtgccccccccccaccccgtgagccaccccagccccggccacaacgtgcagggcagcccccacaaccccagcagccagctgccccccctgaccgccgtggacgccggcgccgagagattcgcccccagcgcccccagcccccaccacatcagccccagaagagtgcccgcccccagcagcatcctgcagagaacccagcccccctacacccagcagcccagcggcagccacctgaagagctaccagcccgagaccaacagcagcttccagcccaacggcatccacgtgcacggcttctacggccagctgcagaagttctgccccccccactaccccgacagccagagaatcgtgccccccgtgagcagctgcagcgtggtgcccagcttcgaggactgcctggtgcccaccagcatgggccaggccagcttcgacgtgttccacagagccttcagcacccacagcggcatcaccgtgtacgacctgcccagcagcagcagcagcctgttcggcgagagcctgagaagcggcgccgaggacgccaccttcctgcagatcagcaccgtggacagatgccccagccagctgagcagcgtgtacaccgagggctag

SEQ ID NO: 309280 - protein, 359 aa, Artificial Sequence
  derived and/or modified sequence
METQLSNGPTCNNTANGPTTINNNCSSPVDSGNTEDSKTNLIVNYLPQNMTQEELKSLFGSIGEIESCKLVRDKITGQSLGYGFVNYIDPKDAEKAINTLNGLRLQTKTIKVSYARPSSASIRDANLYVSGLPKTMTQKELEQLFSQYGRIITSRILVDQVTGISRGVGFIRFDKRIEAEEAIKGLNGQKPPGATEPITVKFANNPSQKTNQAILSQLYQSPNRRYPGPLAQQAQRFRLDNLLNMAYGVKRFSPMTIDGMTSLAGINIPGHPGTGWCIFVYNLAPDADESILWQMFGPFGAVTNVKVIRDFNTNKCKGFGFVTMTNYDEAAMAIASLNGYRLGDRVLQVSFKTNKTHKA

SEQ ID NO: 309281 - DNA, 2370 bp, Artificial Sequence
  derived and/or modified sequence
gagcctggcagagcagctgcacacacggcagtgcggaggcagagaaggggttggtgatacggtgctataaatctgtggtccagtccacctcccttttaagacgtcctcccccctatttctgttcttagttagagatgcagcagcttactcctgtagcgacctactaaaaagcaacaaggagaaagacatcgtctttttgaaaaaacgttctttcgtctcttttctttgttccttggtttgtttttcttgcccctttttgtttagttgaacggcaataggagggtagtctctccgtctttttaaactcttttttaagtttcccctcccctttcatattttttttcgccatttcttttagcattggactttggggtcgaaagcgtttctttttatttgcttcttttaagccgagcacagtttaggtttcgtgctgtcttaagagaactatccagcagcttcttgctcatccttattgggagaactgcaccgttactttaaaaacacacatacacaaaaaccttaagggagaaaggtaattgctgccatggaaacacaactgtctaatgggccaacttgcaataacacagccaatggtccaaccaccataaacaacaactgttcgtcaccagttgactctgggaacacagaagacagcaagaccaacttaatagtcaactaccttcctcagaacatgacacaggaggaactaaagagtctctttgggagcattggtgaaatagagtcctgtaagcttgtaagagacaaaataacagggcagagcttgggatatggctttgtgaactacattgaccccaaggatgcagagaaagctatcaacaccctgaatggattgagacttcaaaccaaaacaataaaagtttcctatgctcgcccaagttcagcttctatcagagatgcaaatttatatgtcagcggacttccaaaaacaatgacccagaaggagttggaacagcttttttcacaatatggacgcattattacttctcgtattcttgtcgaccaggtcactggcatatcaaggggtgtagggtttattcgatttgacaagcgaattgaggcagaagaagctatcaaaggcctaaatggccagaaacctcccggtgccacggagccaatcactgtaaagtttgctaataacccaagccaaaaaaccaatcaggccatcctttcccagctgtaccagtctccaaacagaaggtatccaggaccgctagctcagcaggcacagcgttttaggttggacaatctgctcaatatggcttatggagtaaagaggttttctccaatgaccattgacggaatgaccagtttggctggaattaatatccctgggcaccctggaacagggtggtgtatatttgtgtacaacctggctcctgacgcagatgagagtatcctgtggcaaatgtttgggccttttggagctgtcaccaatgtgaaggtcatccgtgactttaacaccaataaatgcaaaggttttggatttgtgactatgacaaactatgatgaggctgccatggcgatagctagcctcaatggataccgtctgggagacagagtactgcaggtctcctttaagacaaacaaaacgcacaaagcctaatgagctcttgtcctcagtccatttatatatgaaaactatacaacaaaggcaagttaagagaaactttatacattagtaaatgtctttgtaagtcagtgttgagatggggataaaatgactacttagcatcctaagaaatatgtgagattttttattgctagtatttgaattaaaacttcttaaatatcttttatgtttgaatatggacaagaggtacagggtttttacctgtcacattgcattctattgccttctttgaagaaggtggaccttttaaagtgtttcagctaagggaagacatttcttttctttttacataactgccttgaacctgtgagtaaatattgaggctttgtgttgtaattcttcagttggttgtgtcttttttttcccccctttttttcctttttctgattagctttgtgtttggtttacatttaaagcattgctgttatgtctgtttaagaaaagtattttgaagtttacatttttatttatgaagtttaaaacagtatttattttgtaattatgatttgggttggggaagggggggctacattataaacgcttattgtaagaatactggagaacttttcgtaaagcagtaccttgccaaagagataagagcctctttgatgtgggtttaaaaaaagcatctatttttataaaaaagaaaatttggagaaactttttactggtcctggaacaaatattttgacttgaatactttgagaaatctcttcata

SEQ ID NO: 309282 - DNA, 3805 bp, Artificial Sequence
  derived and/or modified sequence
caataggagggtagtctctccgtctttttaaactcttttttaagtttcccctcccctttcatattttttttcgccatttcttttagcattggactttggggtcgaaagcgtttctttttatttgcttcttttaagccgagcacagtttaggtttcgtgctgtcttaagagaactatccagcagcttcttgctcatccttattgggagaactgcaccgttactttaaaaacacacatacacaaaaaccttaagggagaaagcaggtaattgctgccatggaaacacaactgtctaatgggccaacttgcaataacacagccaatggtccaaccaccataaacaacaactgttcgtcaccagttgactctgggaacacagaagacagcaagaccaacttaatagtcaactaccttcctcagaacatgacacaggaggaactaaagagtctctttgggagcattggtgaaatagagtcctgtaagcttgtaagagacaaaataacagggcagagcttgggatatggctttgtgaactacattgaccccaaggatgcagagaaagctatcaacaccctgaatggattgagacttcaaaccaaaacaataaaagtttcctatgctcgcccaagttcagcttctatcagagatgcaaatttatatgtcagcggacttccaaaaacaatgacccagaaggagttggaacagcttttttcacaatatggacgcattattacttctcgtattcttgtcgaccaggtcactggcatatcaaggggtgtagggtttattcgatttgacaagcgaattgaggcagaagaagctatcaaaggcctaaatggccagaaacctcccggtgccacggagccaatcactgtaaagtttgctaataacccaagccaaaaaaccaatcaggccatcctttcccagctgtaccagtctccaaacagaaggtatccaggaccgctagctcagcaggcacagcgttttaggttggacaatctgctcaatatggcttatggagtaaagaggttttctccaatgaccattgacggaatgaccagtttggctggaattaatatccctgggcaccctggaacagggtggtgtatatttgtgtacaacctggctcctgacgcagatgagagtatcctgtggcaaatgtttgggccttttggagctgtcaccaatgtgaaggtcatccgtgactttaacaccaataaatgcaaaggttttggatttgtgactatgacaaactatgatgaggctgccatggcgatagctagcctcaatggataccgtctgggagacagagtactgcaggtctcctttaagacaaacaaaacgcacaaagcctaatgagctcttgtcctcagtccatttatatatgaaaactatacaacaaaggcaagttaagagaaactttatacattagtaaatgtctttgtaagtcagtgttgagatggggataaaatgactacttagcatcctaagaaatatgtgagattttttattgctagtatttgaattaaaacttcttaaatatcttttatgtttgaatatggacaagaggtacagggtttttacctgtcacattgcattctattgccttctttgaagaaggtggaccttttaaagtgtttcagctaagggaagacatttcttttctttttacataactgccttgaacctgtgagtaaatattgaggctttgtgttgtaattcttcagttggttgtgtcttttttttcccccctttttttcctttttctgattagctttgtgtttggtttacatttaaagcattgctgttatgtctgtttaagaaaagtattttgaagtttacatttttatttatgaagtttaaaacagtatttattttgtaattatgatttgggttggggaagggggggctacattataaacgcttattgtaagaatactggagaacttttcgtaaagcagtaccttgccaaagagataagagcctctttgatgtgggtttaaaaaaagcatctatttttataaaaaagaaaatttggagaaactttttactggtcctggaacaaatattttgacttgaatactttgagaaatctcttcatatgacacctagtgagcttttaaaatttaccaggaaatttgcagcggttggaaaatttagaaagatttatggtgtagaaaatacttttgagatctttgtatgaaaggagtagaatcaatggggggaaacactgctggtttcatttttgtaatcaccagtggagcgtctgatcatcctggttattatgtgataggtggctcacattgatttgtgattttgaaacaaataaaaaaaatttacaaaagaatatataagagcaggcaagaaatttaaattaccgagagatgggggaaaaaatctgttcttcctaaagaaatcccttcagatagagctcatggtgtttagtgatgtacttgcagtattgtttgaagaattgttttgtcttaaggaaaaaagacgttgcacatgatttgtactgcagcaaatcagcaaaagtgatctgagttggatatatttgaaggtattttgaaagttacgttcaaggctaacacctgagctttgtgtaatgtaaataagaccttgtgtttatgaacctttcagctaatttaattttttttcccttacatgccaagtgatgttcaggttttgaatgtttttgtatcagttttttcctttgtaaatggcattaacattgttacttgaggtcttgcttaatcacttttgttgtcctgaggacttgaatttacagtgcatcagatttgttgcaaattttgtctgtagatagtctagcttcagctgtttatggtgatgctacattttggtttataaatatgtttgtggtataaaaaaatgagtataaccataggttttgaacaaatttccttacatttttcatacaaaaatcataaatatctgtatgctattgaaatttaactttgtatgatgcttaaaaaccactatttggggaaataataaaataagtctttaccatgtatgaaagaaattttaaaaaatacaaaatattttctgattagcatctagcttataataaattttcaaaaaagctgaaggcaaaaatgccttcatcaggatgcactgagaactatatagttacgtcctgctttttgtataaactgagatgctcacatgcttccccttagaacaggcaatgtgctatgcataacatagttgtacattatctttgcggttgctttgagttttattttttattatttaaaattgtagttataaaatttttcagtatagtacagtacatatactgtgaggcgcgtgctaaagtgaataagcgagttttcatgctgacccactcaatgctattcagaaatcaattggcttagcactttctcatatccttaggtgcatttagattgccagagttaaccttctgcgtttaaaaaaagaaaaacactaaaaaataaaatacatgtatatacttaaaaaaaaataataaggtttccctcaagggaaaacagcagctacatgcttctttcctatactactgtagcaaaccaaggcattgatgagagggcatgcaaattgtgcttcactttacagtgttttatcagagcacttaataaaatgtaaggctggtatttatttgaagttgtacagtatgacttaattcacatctgttggaatagaaaatatattctgttgagtatttaagaggctgtacatgttttcttttgtgtttggattctttgtactttttcatgttcagtacatcaataaacaaagttgaaggg

SEQ ID NO: 309283 - DNA, 3789 bp, Artificial Sequence
  derived and/or modified sequence
acaaacggcgggaccgcggcgcctgggcgtcactgaggcagtagccggccgggtgaggagggcggttgccggcgcggcgcggcgcggcgcgggtggggcgggggttccgccggcttccagtcccctttcccgccgccgccgccgccaccgcctctccgcggagctcgccccgagcgactcctccgcggcagtgctgacggccagcggcacgagccgtagtagctgcagcttcgagtcacagcagcaggtaattgctgccatggaaacacaactgtctaatgggccaacttgcaataacacagccaatggtccaaccaccataaacaacaactgttcgtcaccagttgactctgggaacacagaagacagcaagaccaacttaatagtcaactaccttcctcagaacatgacacaggaggaactaaagagtctctttgggagcattggtgaaatagagtcctgtaagcttgtaagagacaaaataacagggcagagcttgggatatggctttgtgaactacattgaccccaaggatgcagagaaagctatcaacaccctgaatggattgagacttcaaaccaaaacaataaaagtttcctatgctcgcccaagttcagcttctatcagagatgcaaatttatatgtcagcggacttccaaaaacaatgacccagaaggagttggaacagcttttttcacaatatggacgcattattacttctcgtattcttgtcgaccaggtcactggcatatcaaggggtgtagggtttattcgatttgacaagcgaattgaggcagaagaagctatcaaaggcctaaatggccagaaacctcccggtgccacggagccaatcactgtaaagtttgctaataacccaagccaaaaaaccaatcaggccatcctttcccagctgtaccagtctccaaacagaaggtatccaggaccgctagctcagcaggcacagcgttttaggttggacaatctgctcaatatggcttatggagtaaagaggttttctccaatgaccattgacggaatgaccagtttggctggaattaatatccctgggcaccctggaacagggtggtgtatatttgtgtacaacctggctcctgacgcagatgagagtatcctgtggcaaatgtttgggccttttggagctgtcaccaatgtgaaggtcatccgtgactttaacaccaataaatgcaaaggttttggatttgtgactatgacaaactatgatgaggctgccatggcgatagctagcctcaatggataccgtctgggagacagagtactgcaggtctcctttaagacaaacaaaacgcacaaagcctaatgagctcttgtcctcagtccatttatatatgaaaactatacaacaaaggcaagttaagagaaactttatacattagtaaatgtctttgtaagtcagtgttgagatggggataaaatgactacttagcatcctaagaaatatgtgagattttttattgctagtatttgaattaaaacttcttaaatatcttttatgtttgaatatggacaagaggtacagggtttttacctgtcacattgcattctattgccttctttgaagaaggtggaccttttaaagtgtttcagctaagggaagacatttcttttctttttacataactgccttgaacctgtgagtaaatattgaggctttgtgttgtaattcttcagttggttgtgtcttttttttcccccctttttttcctttttctgattagctttgtgtttggtttacatttaaagcattgctgttatgtctgtttaagaaaagtattttgaagtttacatttttatttatgaagtttaaaacagtatttattttgtaattatgatttgggttggggaagggggggctacattataaacgcttattgtaagaatactggagaacttttcgtaaagcagtaccttgccaaagagataagagcctctttgatgtgggtttaaaaaaagcatctatttttataaaaaagaaaatttggagaaactttttactggtcctggaacaaatattttgacttgaatactttgagaaatctcttcatatgacacctagtgagcttttaaaatttaccaggaaatttgcagcggttggaaaatttagaaagatttatggtgtagaaaatacttttgagatctttgtatgaaaggagtagaatcaatggggggaaacactgctggtttcatttttgtaatcaccagtggagcgtctgatcatcctggttattatgtgataggtggctcacattgatttgtgattttgaaacaaataaaaaaaatttacaaaagaatatataagagcaggcaagaaatttaaattaccgagagatgggggaaaaaatctgttcttcctaaagaaatcccttcagatagagctcatggtgtttagtgatgtacttgcagtattgtttgaagaattgttttgtcttaaggaaaaaagacgttgcacatgatttgtactgcagcaaatcagcaaaagtgatctgagttggatatatttgaaggtattttgaaagttacgttcaaggctaacacctgagctttgtgtaatgtaaataagaccttgtgtttatgaacctttcagctaatttaattttttttcccttacatgccaagtgatgttcaggttttgaatgtttttgtatcagttttttcctttgtaaatggcattaacattgttacttgaggtcttgcttaatcacttttgttgtcctgaggacttgaatttacagtgcatcagatttgttgcaaattttgtctgtagatagtctagcttcagctgtttatggtgatgctacattttggtttataaatatgtttgtggtataaaaaaatgagtataaccataggttttgaacaaatttccttacatttttcatacaaaaatcataaatatctgtatgctattgaaatttaactttgtatgatgcttaaaaaccactatttggggaaataataaaataagtctttaccatgtatgaaagaaattttaaaaaatacaaaatattttctgattagcatctagcttataataaattttcaaaaaagctgaaggcaaaaatgccttcatcaggatgcactgagaactatatagttacgtcctgctttttgtataaactgagatgctcacatgcttccccttagaacaggcaatgtgctatgcataacatagttgtacattatctttgcggttgctttgagttttattttttattatttaaaattgtagttataaaatttttcagtatagtacagtacatatactgtgaggcgcgtgctaaagtgaataagcgagttttcatgctgacccactcaatgctattcagaaatcaattggcttagcactttctcatatccttaggtgcatttagattgccagagttaaccttctgcgtttaaaaaaagaaaaacactaaaaaataaaatacatgtatatacttaaaaaaaaataataaggtttccctcaagggaaaacagcagctacatgcttctttcctatactactgtagcaaaccaaggcattgatgagagggcatgcaaattgtgcttcactttacagtgttttatcagagcacttaataaaatgtaaggctggtatttatttgaagttgtacagtatgacttaattcacatctgttggaatagaaaatatattctgttgagtatttaagaggctgtacatgttttcttttgtgtttggattctttgtactttttcatgttcagtacatcaataaacaaagttgaaggg

SEQ ID NO: 309284 - protein, 387 aa, Artificial Sequence
  derived and/or modified sequence
MAVRLCDVASLLRSGSWAAEPWTGVIAAMETQLSNGPTCNNTANGPTTINNNCSSPVDSGNTEDSKTNLIVNYLPQNMTQEELKSLFGSIGEIESCKLVRDKITGQSLGYGFVNYIDPKDAEKAINTLNGLRLQTKTIKVSYARPSSASIRDANLYVSGLPKTMTQKELEQLFSQYGRIITSRILVDQVTGISRGVGFIRFDKRIEAEEAIKGLNGQKPPGATEPITVKFANNPSQKTNQAILSQLYQSPNRRYPGPLAQQAQRFRLDNLLNMAYGVKRFSPMTIDGMTSLAGINIPGHPGTGWCIFVYNLAPDADESILWQMFGPFGAVTNVKVIRDFNTNKCKGFGFVTMTNYDEAAMAIASLNGYRLGDRVLQVSFKTNKTHKA

SEQ ID NO: 309285 - DNA, 1164 bp, Artificial Sequence
  derived and/or modified sequence
atggctgtgcggctgtgtgacgtcgcttctctcctccgttccggctcttgggccgcagaaccttggaccggagtcattgcagcgatggaaacacaactgtcaaatggcccaacctgtaacaatacagctaatggtccaaccaccataaataacaactgttcctcacccgtagactcggggaacaccgaggactcaaagaccaatctgattgtcaattatttgccacagaatatgacacaggaagagctcaagtccttattcggctccatcggcgagatcgaatcctgcaagctcgtgagggacaaaatcacaggacagagtctggggtacggctttgtcaattacatagatcccaaggatgctgagaaagcgatcaacacgttaaacggcctgcgcctacaaacaaaaacaatcaaggtatcatacgcccgaccttcctctgctagtattcgagacgctaacctctatgtgtcaggactgcccaagacaatgacacagaaagagctggagcagctgtttagccagtacggaaggattattacctcacgtattctggttgatcaggtgacaggaatctcccgcggtgtgggttttatccgctttgacaagcggatcgaagccgaagaagctattaaagggctgaacgggcaaaagcccccaggcgctacagaacctatcactgttaaattcgcaaataacccatctcagaaaaccaaccaggctatcctgtcccagctgtaccagtccccaaacaggcgctacccggggcctcttgcgcaacaggctcagcggtttagattggataacttacttaacatggcgtatggtgtgaaacgttttagtcccatgactatagacgggatgaccagcctagccgggattaacatccccggccatccaggaacgggctggtgcatcttcgtgtataacctggcgccagacgccgatgagtccatcctgtggcagatgtttggaccgtttggagccgtcactaatgtgaaagtgatcagggattttaatacgaataaatgtaaagggttcggatttgttaccatgacaaattatgatgaggcagcaatggcaatcgcctctctcaatggatacagactgggcgacagagtcctgcaggttagttttaaaacaaacaaaacgcataaagcttag

SEQ ID NO: 309286 - DNA, 1164 bp, Artificial Sequence
  derived and/or modified sequence
atggctgtgcggctgtgtgatgtggccagcctgctgcggagcggctcctgggccgctgagccctggacaggagtgattgctgccatggagacccagctgagcaatggccccacctgcaacaacacagccaacggccccaccaccatcaacaacaactgcagcagccctgtggacagcggcaacacagaggacagcaagaccaacctgattgtgaactacctgccccagaacatgacccaggaggagctgaagagcctgtttggcagcatcggggagattgagagctgcaagctggtgcgggacaagatcaccggccagagcctgggctacggctttgtgaactacatcgaccccaaggatgctgagaaggccatcaacaccctgaatggcctgcggctgcagaccaagaccatcaaggtgtcctatgcccggcccagcagcgccagcatcagagatgccaacctgtatgtgtctggcctgcccaagaccatgacccagaaggagctggagcagctgttcagccagtatggccgcatcatcaccagccgcatcctggtggaccaggtgacaggcatcagcagaggagtgggcttcatccgctttgacaagagaattgaagctgaggaggccatcaagggcctgaatggccagaagcccccaggggccacagagcccatcaccgtgaagtttgccaacaaccccagccagaagaccaaccaggccatcctgagccagctgtaccagagccccaacagacgctacccaggccccctggcccagcaggcccagcgcttccggctggacaacctgctgaacatggcctatggagtgaagcgcttcagccccatgaccattgatggcatgaccagcctggccggcatcaacatccctggccaccctggcaccggctggtgcatctttgtgtacaacctggccccagatgctgatgagagcatcctgtggcagatgtttggcccctttggagctgtgaccaacgtgaaggtgatccgggacttcaacaccaacaagtgcaagggctttggatttgtgaccatgaccaactatgatgaggccgccatggccatcgccagcctgaatggctaccgcctgggggacagagtgctgcaggtgtccttcaagaccaacaagacccacaaggcctag

SEQ ID NO: 309287 - DNA, 1164 bp, Artificial Sequence
  derived and/or modified sequence
atggccgtgcggctgtgcgacgtggccagcctgctgcggagcggctcatgggctgccgagccatggacaggagtcatagccgccatggaaactcaactaagcaacggtccaacgtgcaataatacagccaacggaccgactacgattaacaacaattgcagttctccggtggacagtgggaacacagaggacagcaagactaatctgatcgtcaactatttaccccaaaatatgacccaggaagaattgaagtccttgttcggcagcatcggcgaaattgagagctgcaaattggtgcgggacaagatcactggacagagcctggggtacggattcgttaactacatagaccccaaggacgcggagaaggctatcaacaccctgaacggcctccgcctccagacgaagactatcaaggtctcctacgcccgtccctcttctgcatcaatccgggatgcaaatctgtacgtgagtggactgcctaagaccatgacccagaaggagctcgaacaactgttcagtcaatatggccggatcattacatcacgcattttagtagaccaagtaactggcatatcacgtggcgtaggattcattagattcgacaagcgcatcgaagccgaggaggcgattaaaggtctgaatggtcagaaaccacctggcgcgactgaaccgataacagtaaagttcgcaaacaaccccagtcagaaaactaaccaggccattttgagtcagctgtatcagagcccaaataggcgctatccgggccccttagcgcagcaggcacagcgcttcaggctggataacttgcttaacatggcttacggtgtaaaacgtttctctccaatgactatcgatggtatgacttccctcgccggcatcaatatccccggccatccagggaccgggtggtgcatcttcgtgtataacctagcccccgacgctgatgagtcgattctatggcaaatgtttgggcccttcggggcagttacgaatgtgaaggttatccgagacttcaacacaaataagtgtaaaggtttcgggttcgttacaatgactaattacgatgaagctgctatggctattgcttccctgaatggctacaggttgggcgaccgcgtgcttcaggtgtctttcaagacaaacaagacgcacaaagcctag

SEQ ID NO: 309288 - DNA, 1164 bp, Artificial Sequence
  derived and/or modified sequence
atggccgtgcgactctgtgacgtcgcgagtcttttacggtctggcagctgggccgcagaaccttggaccggtgtgattgctgctatggaaactcagctgtccaacgggcctacctgtaataacacagctaacgggccaaccacgatcaataacaactgcagctcgcccgtggactccggcaacactgaagactccaagactaaccttatcgtgaactacctgccacagaatatgactcaagaggaactgaagtctttgtttgggtctatcggagagattgagagctgcaaattagttcgcgataaaatcacagggcaatccctggggtatggtttcgtgaattatatcgatcccaaggatgccgagaaagccatcaatacgttgaacggcctaagattgcagactaagacaattaaggtgagctatgcacgaccatcgtccgcctccatccgggatgctaacttgtatgtgtcaggtttaccgaaaactatgacccaaaaagagttggagcaactgttctcgcaatatggtcgtatcattacttctcgaatcttagttgatcaagttacgggcatatccaggggggtgggtttcatcaggttcgacaaacggatcgaagcagaggaggcaattaagggcctgaatgggcaaaagcctcccggagccacagaaccaattaccgttaagttcgctaataaccctagtcaaaagacaaatcaggcaattctgtcccagctttaccagagccccaataggcgatacccagggccactcgcccaacaggcccagcgattccgccttgataacctcctgaacatggcctacggggtcaagcgcttttctcccatgactattgacgggatgaccagcctcgccggaatcaatatacccggtcatcctggcacaggctggtgcattttcgtttataatttagcccctgatgcggatgaatcaatcctgtggcagatgtttggtccctttggggcagttacaaacgtgaaagttatcagggactttaataccaacaagtgtaagggatttggctttgtgacaatgacaaactacgatgaagccgcaatggccattgcctcattgaatgggtaccgcttaggggacagagtgctccaggtaagcttcaaaacaaacaaaacgcacaaagcctag

SEQ ID NO: 309289 - DNA, 1164 bp, Artificial Sequence
  derived and/or modified sequence
atggccgtgagactgtgcgacgtggccagcctgctgagaagcggcagctgggccgccgagccctggaccggcgtgatcgccgccatggagacccagctgagcaacggccccacctgcaacaacaccgccaacggccccaccaccatcaacaacaactgcagcagccccgtggacagcggcaacaccgaggacagcaagaccaacctgatcgtgaactacctgccccagaacatgacccaggaggagctgaagagcctgttcggcagcatcggcgagatcgagagctgcaagctggtgagagacaagatcaccggccagagcctgggctacggcttcgtgaactacatcgaccccaaggacgccgagaaggccatcaacaccctgaacggcctgagactgcagaccaagaccatcaaggtgagctacgccagacccagcagcgccagcatcagagacgccaacctgtacgtgagcggcctgcccaagaccatgacccagaaggagctggagcagctgttcagccagtacggcagaatcatcaccagcagaatcctggtggaccaggtgaccggcatcagcagaggcgtgggcttcatcagattcgacaagagaatcgaggccgaggaggccatcaagggcctgaacggccagaagccccccggcgccaccgagcccatcaccgtgaagttcgccaacaaccccagccagaagaccaaccaggccatcctgagccagctgtaccagagccccaacagaagataccccggccccctggcccagcaggcccagagattcagactggacaacctgctgaacatggcctacggcgtgaagagattcagccccatgaccatcgacggcatgaccagcctggccggcatcaacatccccggccaccccggcaccggctggtgcatcttcgtgtacaacctggcccccgacgccgacgagagcatcctgtggcagatgttcggccccttcggcgccgtgaccaacgtgaaggtgatcagagacttcaacaccaacaagtgcaagggcttcggcttcgtgaccatgaccaactacgacgaggccgccatggccatcgccagcctgaacggctacagactgggcgacagagtgctgcaggtgagcttcaagaccaacaagacccacaaggcctag

SEQ ID NO: 309290 - DNA, 1720 bp, Artificial Sequence
  derived and/or modified sequence
attgcagacggcaactccaaactaacatggcagtcagactgtgtgatgtggcttctctgcttagaagtggttcgtgggcagcagagccttggaccggggtaattgctgccatggaaacacaactgtctaatgggccaacttgcaataacacagccaatggtccaaccaccataaacaacaactgttcgtcaccagttgactctgggaacacagaagacagcaagaccaacttaatagtcaactaccttcctcagaacatgacacaggaggaactaaagagtctctttgggagcattggtgaaatagagtcctgtaagcttgtaagagacaaaataacagggcagagcttgggatatggctttgtgaactacattgaccccaaggatgcagagaaagctatcaacaccctgaatggattgagacttcaaaccaaaacaataaaagtttcctatgctcgcccaagttcagcttctatcagagatgcaaatttatatgtcagcggacttccaaaaacaatgacccagaaggagttggaacagcttttttcacaatatggacgcattattacttctcgtattcttgtcgaccaggtcactggcatatcaaggggtgtagggtttattcgatttgacaagcgaattgaggcagaagaagctatcaaaggcctaaatggccagaaacctcccggtgccacggagccaatcactgtaaagtttgctaataacccaagccaaaaaaccaatcaggccatcctttcccagctgtaccagtctccaaacagaaggtatccaggaccgctagctcagcaggcacagcgttttaggttggacaatctgctcaatatggcttatggagtaaagaggttttctccaatgaccattgacggaatgaccagtttggctggaattaatatccctgggcaccctggaacagggtggtgtatatttgtgtacaacctggctcctgacgcagatgagagtatcctgtggcaaatgtttgggccttttggagctgtcaccaatgtgaaggtcatccgtgactttaacaccaataaatgcaaaggttttggatttgtgactatgacaaactatgatgaggctgccatggcgatagctagcctcaatggataccgtctgggagacagagtactgcaggtctcctttaagacaaacaaaacgcacaaagcctaatgagctcttgtcctcagtccatttatatatgaaaactatacaacaaaggcaagttaagagaaactttatacattagtaaatgtctttgtaagtcagtgttgagatggggataaaatgactacttagcatcctaagaaatatgtgagattttttattgctagtatttgaattaaaacttcttaaatatcttttatgtttgaatatggacaagaggtacagggtttttacctgtcacattgcattctattgccttctttgaagaaggtggaccttttaaagtgtttcagctaagggaagacatttcttttctttttacataactgccttgaacctgtgagtaaatattgaggctttgtgttgtaattcttcagttggttgtgtcttttttttcccccctttttttcctttttctgattagctttgtgtttggtttacatttaaagcattgctgttatgtctgtttaagaaaagtattttgaagtttacatttttatttatgaagtttaaaacagtatttattttgtaattat

SEQ ID NO: 309291 - protein, 346 aa, Artificial Sequence
  derived and/or modified sequence
METQLSNGPTCNNTANGPTTINNNCSSPVDSGNTEDSKTNLIVNYLPQNMTQEELKSLFGSIGEIESCKLVRDKITGQSLGYGFVNYIDPKDAEKAINTLNGLRLQTKTIKVSYARPSSASIRDANLYVSGLPKTMTQKELEQLFSQYGRIITSRILVDQVTGISRGVGFIRFDKRIEAEEAIKGLNGQKPPGATEPITVKFANNPSQKTNQAILSQLYQSPNRRYPGPLAQQAQRFRFSPMTIDGMTSLAGINIPGHPGTGWCIFVYNLAPDADESILWQMFGPFGAVTNVKVIRDFNTNKCKGFGFVTMTNYDEAAMAIASLNGYRLGDRVLQVSFKTNKTHKA

SEQ ID NO: 309292 - protein, 189 aa, Artificial Sequence
  derived and/or modified sequence
METQLSNGPTCNNTANGPTTINNNCSSPVDSGNTEDSKTNLIVNYLPQNMTQEELKSLFGSIGEIESCKLVRDKITGQSLGYGFVNYIDPKDAEKAINTLNGLRLQTKTIKVSYARPSSASIRDANLYVSGLPKTMTQKELEQLFSQYGRIITSRILVDQVTGISRGVGFIRFDKRIEAEEAIKGLNGQ

SEQ ID NO: 309293 - DNA, 3760 bp, Artificial Sequence
  derived and/or modified sequence
agtccgaactctgggcgggaacactggtgggggcggcggaggttgtgcccgcgaagttcctagagctcagcccgttgcggcgggagtagagagaattgggcgcctcgggaggtggcaccgcccctcccgtgggcacaagcaggttgggggcggcgggagccgagcggggacagtcgcgcctggcagcgtgcacgggcgtggacgtgcccgggtgcggccgcgtgtagcgcaagaaggaaactgttgagacgcaggtaattgctgccatggaaacacaactgtctaatgggccaacttgcaataacacagccaatggtccaaccaccataaacaacaactgttcgtcaccagttgactctgggaacacagaagacagcaagaccaacttaatagtcaactaccttcctcagaacatgacacaggaggaactaaagagtctctttgggagcattggtgaaatagagtcctgtaagcttgtaagagacaaaataacagggcagagcttgggatatggctttgtgaactacattgaccccaaggatgcagagaaagctatcaacaccctgaatggattgagacttcaaaccaaaacaataaaagtttcctatgctcgcccaagttcagcttctatcagagatgcaaatttatatgtcagcggacttccaaaaacaatgacccagaaggagttggaacagcttttttcacaatatggacgcattattacttctcgtattcttgtcgaccaggtcactggcatatcaaggggtgtagggtttattcgatttgacaagcgaattgaggcagaagaagctatcaaaggcctaaatggccagaaacctcccggtgccacggagccaatcactgtaaagtttgctaataacccaagccaaaaaaccaatcaggccatcctttcccagctgtaccagtctccaaacagaaggtatccaggaccgctagctcagcaggcacagcgttttaggttttctccaatgaccattgacggaatgaccagtttggctggaattaatatccctgggcaccctggaacagggtggtgtatatttgtgtacaacctggctcctgacgcagatgagagtatcctgtggcaaatgtttgggccttttggagctgtcaccaatgtgaaggtcatccgtgactttaacaccaataaatgcaaaggttttggatttgtgactatgacaaactatgatgaggctgccatggcgatagctagcctcaatggataccgtctgggagacagagtactgcaggtctcctttaagacaaacaaaacgcacaaagcctaatgagctcttgtcctcagtccatttatatatgaaaactatacaacaaaggcaagttaagagaaactttatacattagtaaatgtctttgtaagtcagtgttgagatggggataaaatgactacttagcatcctaagaaatatgtgagattttttattgctagtatttgaattaaaacttcttaaatatcttttatgtttgaatatggacaagaggtacagggtttttacctgtcacattgcattctattgccttctttgaagaaggtggaccttttaaagtgtttcagctaagggaagacatttcttttctttttacataactgccttgaacctgtgagtaaatattgaggctttgtgttgtaattcttcagttggttgtgtcttttttttcccccctttttttcctttttctgattagctttgtgtttggtttacatttaaagcattgctgttatgtctgtttaagaaaagtattttgaagtttacatttttatttatgaagtttaaaacagtatttattttgtaattatgatttgggttggggaagggggggctacattataaacgcttattgtaagaatactggagaacttttcgtaaagcagtaccttgccaaagagataagagcctctttgatgtgggtttaaaaaaagcatctatttttataaaaaagaaaatttggagaaactttttactggtcctggaacaaatattttgacttgaatactttgagaaatctcttcatatgacacctagtgagcttttaaaatttaccaggaaatttgcagcggttggaaaatttagaaagatttatggtgtagaaaatacttttgagatctttgtatgaaaggagtagaatcaatggggggaaacactgctggtttcatttttgtaatcaccagtggagcgtctgatcatcctggttattatgtgataggtggctcacattgatttgtgattttgaaacaaataaaaaaaatttacaaaagaatatataagagcaggcaagaaatttaaattaccgagagatgggggaaaaaatctgttcttcctaaagaaatcccttcagatagagctcatggtgtttagtgatgtacttgcagtattgtttgaagaattgttttgtcttaaggaaaaaagacgttgcacatgatttgtactgcagcaaatcagcaaaagtgatctgagttggatatatttgaaggtattttgaaagttacgttcaaggctaacacctgagctttgtgtaatgtaaataagaccttgtgtttatgaacctttcagctaatttaattttttttcccttacatgccaagtgatgttcaggttttgaatgtttttgtatcagttttttcctttgtaaatggcattaacattgttacttgaggtcttgcttaatcacttttgttgtcctgaggacttgaatttacagtgcatcagatttgttgcaaattttgtctgtagatagtctagcttcagctgtttatggtgatgctacattttggtttataaatatgtttgtggtataaaaaaatgagtataaccataggttttgaacaaatttccttacatttttcatacaaaaatcataaatatctgtatgctattgaaatttaactttgtatgatgcttaaaaaccactatttggggaaataataaaataagtctttaccatgtatgaaagaaattttaaaaaatacaaaatattttctgattagcatctagcttataataaattttcaaaaaagctgaaggcaaaaatgccttcatcaggatgcactgagaactatatagttacgtcctgctttttgtataaactgagatgctcacatgcttccccttagaacaggcaatgtgctatgcataacatagttgtacattatctttgcggttgctttgagttttattttttattatttaaaattgtagttataaaatttttcagtatagtacagtacatatactgtgaggcgcgtgctaaagtgaataagcgagttttcatgctgacccactcaatgctattcagaaatcaattggcttagcactttctcatatccttaggtgcatttagattgccagagttaaccttctgcgtttaaaaaaagaaaaacactaaaaaataaaatacatgtatatacttaaaaaaaaataataaggtttccctcaagggaaaacagcagctacatgcttctttcctatactactgtagcaaaccaaggcattgatgagagggcatgcaaattgtgcttcactttacagtgttttatcagagcacttaataaaatgtaaggctggtatttatttgaagttgtacagtatgacttaattcacatctgttggaatagaaaatatattctgttgagtatttaagaggctgtacatgttttcttttgtgtttggattctttgtactttttcatgttcagtacatcaataaacaaagttgaagggaaa

SEQ ID NO: 309294 - DNA, 3760 bp, Artificial Sequence
  derived and/or modified sequence
agtccgaactctgggcgggaacactggtgggggcggcggaggttgtgcccgcgaagttcctagagctcagcccgttgcggcgggagtagagagaattgggcgcctcgggaggtggcaccgcccctcccgtgggcacaagcaggttgggggcggcgggagccgagcggggacagtcgcgcctggcagcgtgcacgggcgtggacgtgcccgggtgcggccgcgtgtagcgcaagaaggaaactgttgagacgcagcaggtaattgctgccatggaaacacaactgtctaatgggccaacttgcaataacacagccaatggtccaaccaccataaacaacaactgttcgtcaccagttgactctgggaacacagaagacagcaagaccaacttaatagtcaactaccttcctcagaacatgacacaggaggaactaaagagtctctttgggagcattggtgaaatagagtcctgtaagcttgtaagagacaaaataacagggcagagcttgggatatggctttgtgaactacattgaccccaaggatgcagagaaagctatcaacaccctgaatggattgagacttcaaaccaaaacaataaaagtttcctatgctcgcccaagttcagcttctatcagagatgcaaatttatatgtcagcggacttccaaaaacaatgacccagaaggagttggaacagcttttttcacaatatggacgcattattacttctcgtattcttgtcgaccaggtcactggcatatcaaggggtgtagggtttattcgatttgacaagcgaattgaggcagaagaagctatcaaaggcctaaatggccagaaacctcccggtgccacggagccaatcactgtaaagtttgctaataacccaagccaaaaaaccaatcaggccatcctttcccagctgtaccagtctccaaacagaaggtatccaggaccgctagctcagcaggcacagcgttttaggttttctccaatgaccattgacggaatgaccagtttggctggaattaatatccctgggcaccctggaacagggtggtgtatatttgtgtacaacctggctcctgacgcagatgagagtatcctgtggcaaatgtttgggccttttggagctgtcaccaatgtgaaggtcatccgtgactttaacaccaataaatgcaaaggttttggatttgtgactatgacaaactatgatgaggctgccatggcgatagctagcctcaatggataccgtctgggagacagagtactgcaggtctcctttaagacaaacaaaacgcacaaagcctaatgagctcttgtcctcagtccatttatatatgaaaactatacaacaaaggcaagttaagagaaactttatacattagtaaatgtctttgtaagtcagtgttgagatggggataaaatgactacttagcatcctaagaaatatgtgagattttttattgctagtatttgaattaaaacttcttaaatatcttttatgtttgaatatggacaagaggtacagggtttttacctgtcacattgcattctattgccttctttgaagaaggtggaccttttaaagtgtttcagctaagggaagacatttcttttctttttacataactgccttgaacctgtgagtaaatattgaggctttgtgttgtaattcttcagttggttgtgtcttttttttcccccctttttttcctttttctgattagctttgtgtttggtttacatttaaagcattgctgttatgtctgtttaagaaaagtattttgaagtttacatttttatttatgaagtttaaaacagtatttattttgtaattatgatttgggttggggaagggggggctacattataaacgcttattgtaagaatactggagaacttttcgtaaagcagtaccttgccaaagagataagagcctctttgatgtgggtttaaaaaaagcatctatttttataaaaaagaaaatttggagaaactttttactggtcctggaacaaatattttgacttgaatactttgagaaatctcttcatatgacacctagtgagcttttaaaatttaccaggaaatttgcagcggttggaaaatttagaaagatttatggtgtagaaaatacttttgagatctttgtatgaaaggagtagaatcaatggggggaaacactgctggtttcatttttgtaatcaccagtggagcgtctgatcatcctggttattatgtgataggtggctcacattgatttgtgattttgaaacaaataaaaaaaatttacaaaagaatatataagagcaggcaagaaatttaaattaccgagagatgggggaaaaaatctgttcttcctaaagaaatcccttcagatagagctcatggtgtttagtgatgtacttgcagtattgtttgaagaattgttttgtcttaaggaaaaaagacgttgcacatgatttgtactgcagcaaatcagcaaaagtgatctgagttggatatatttgaaggtattttgaaagttacgttcaaggctaacacctgagctttgtgtaatgtaaataagaccttgtgtttatgaacctttcagctaatttaattttttttcccttacatgccaagtgatgttcaggttttgaatgtttttgtatcagttttttcctttgtaaatggcattaacattgttacttgaggtcttgcttaatcacttttgttgtcctgaggacttgaatttacagtgcatcagatttgttgcaaattttgtctgtagatagtctagcttcagctgtttatggtgatgctacattttggtttataaatatgtttgtggtataaaaaaatgagtataaccataggttttgaacaaatttccttacatttttcatacaaaaatcataaatatctgtatgctattgaaatttaactttgtatgatgcttaaaaaccactatttggggaaataataaaataagtctttaccatgtatgaaagaaattttaaaaaatacaaaatattttctgattagcatctagcttataataaattttcaaaaaagctgaaggcaaaaatgccttcatcaggatgcactgagaactatatagttacgtcctgctttttgtataaactgagatgctcacatgcttccccttagaacaggcaatgtgctatgcataacatagttgtacattatctttgcggttgctttgagttttattttttattatttaaaattgtagttataaaatttttcagtatagtacagtacatatactgtgaggcgcgtgctaaagtgaataagcgagttttcatgctgacccactcaatgctattcagaaatcaattggcttagcactttctcatatccttaggtgcatttagattgccagagttaaccttctgcgtttaaaaaaagaaaaacactaaaaaataaaatacatgtatatacttaaaaaaaaataataaggtttccctcaagggaaaacagcagctacatgcttctttcctatactactgtagcaaaccaaggcattgatgagagggcatgcaaattgtgcttcactttacagtgttttatcagagcacttaataaaatgtaaggctggtatttatttgaagttgtacagtatgacttaattcacatctgttggaatagaaaatatattctgttgagtatttaagaggctgtacatgttttcttttgtgtttggattctttgtactttttcatgttcagtacatcaataaacaaagttgaaggg

SEQ ID NO: 309295 - protein, 90 aa, Artificial Sequence
  derived and/or modified sequence
MTQKELEQLFSQYGRIITSRILVDQVTGISRGVGFIRFDKRIEAEEAIKGLNGQKPPGATEPITVKFANNPSQKTNQAILSQLYQSPNRR

SEQ ID NO: 309296 - DNA, 723 bp, Artificial Sequence
  derived and/or modified sequence
gctttcttcccttgcctttgaagactttctgcaggccctggaattgcctttgttcctctgtctgcccactttgccagtgtgaagcaggttttcatgggattctactggggtaaaccaaaagcagcagaaaaagtgtgaacaggtaattgctgccatggaaacacaactgtctaatgggccaacttgcaataacacagccaatggtccaaccaccataaacaacaactgttcgtcaccagttgactctgggaacacagaagacagcaagaccaacttaatagtcaactaccttcctcagaacatgacacaggaggaactaaagagtctctttgggagcattggtgaaatagagtcctgtaagcttgtaagagacaaaataacagggcagagcttgggatatggctttgtgaactacattgaccccaaggatgcagagaaagctatcaacaccctgaatggattgagacttcaaaccaaaacaataaaagtttcctatgctcgcccaagttcagcttctatcagagatgcaaatttatatgtcagcggacttccaaaaacaatgacccagaaggagttggaacagcttttttcacaatatggacgcattattacttctcgtattcttgtcgaccaggtcactggcatatcaaggggtgtagggtttattcgatttgacaagcgaattgaggcagaagaagctatcaaaggcctaaatggccagaa

SEQ ID NO: 309297 - protein, 136 aa, Artificial Sequence
  derived and/or modified sequence
MRAVENTLHKVRDQISLSWSAASRNDFTLQLPKLHLETFAMEGLKGGPEVVACQAMIKSFMDVYQLASTRIMTLEKEMTSHRSHIAALKSELHTACLRENASLQSDTFIISFRRDGSPCSDSSSIECETFPQVILM

SEQ ID NO: 309298 - DNA, 411 bp, Artificial Sequence
  derived and/or modified sequence
atgagagccgtggagaacaccctgcacaaggtgagagaccagatcagcctgagctggagcgccgccagcagaaacgacttcaccctgcagctgcccaagctgcacctggagaccttcgccatggagggcctgaagggcggccccgaggtggtggcctgccaggccatgatcaagagcttcatggacgtgtaccagctggccagcaccagaatcatgaccctggagaaggagatgaccagccacagaagccacatcgccgccctgaagagcgagctgcacaccgcctgcctgagagagaacgccagcctgcagagcgacaccttcatcatcagcttcagaagagacggcagcccctgcagcgacagcagcagcatcgagtgcgagaccttcccccaggtgatcctgatgtag

SEQ ID NO: 309299 - DNA, 2363 bp, Artificial Sequence
  derived and/or modified sequence
tatgacaggaacttcaggataaactggctgatgttaataaagagttaagtcatttacacactaaatgtgcagaccgagaggctttaataagcactttaaaagtggaactacaaaatgtgctgcactgttgggagaaagaaaaggctcaggcagcccagtctgaaagtgaactgcagaagctttcccaggctttccataaggatgcagaggagaagctaaccttccttcacaccttatatcagcacttggtagcaggctgtgtgctcataaaacaaccagaaggcatgctggataaattctcttggtctgagctttgtgcagtcttacaggagaatgttgatgccctgattgcagacctcaacagggctaatgagaagataaggcatctagagtatatctgtaaaaacaagtctgacacgatgagagagcttcagcagactcaggaagacacctttaccaaagtggcagaacagatcaaagcccaagagagctgctggcacagacaaaagaaggaactagagctgcagtattctgaactcttcctggaggtgcagaagagggcacagaaatttcaagaaattgctgaaaaaaacatggaaaaattgaaccatattgagaagtcacatgaacagttggttcttgaaaattcgcacttcaaaaaactgttatcacagactcaaagggaacagatgtccttgctggcagcctgtgcattaatggctggtgccttatatcccctctatagccgatcatgcgccttgtctacacagagagattttctccaggagcaggtcaacacctttgagttgttcaaactggaaattagaactctagcccaggctttgtcaactgtagaggaaaagaagcaagaggaagccaagatgaaaaagaaaacattcaaaggattgatacgtatatttcggaaaggtgttattgctgttttggcagcaaacagactcaagattttgggccaatcatgtgcctctctttttacctggatggagagtttcaaagaaggcataggcatgttagtgtgcacaggagagccccaagacaagcataaatttccaaaacatcaaaaggagcagttgcgttgtttacaagcgctcagttggctcaccagttctgaccttcttgctgcaataatcagttctatggctgaattacaagacgtcattggtaaagcagatccaaattccagaatttgtggacatttactcataggtgcagccaagaattcttttgcaaaactcatggataaaattagtctggtaatggaatgtatacctctgcacagtagcaggagtattacatatgtagaaaaagattccctggttcagaggctggcccatggacttcataaagtaaacacactggccctgaaatatggtttgcgtggccatgtgcccattacgaaaagcacagcatcgttgcagaagcaaatacttggatttacacaaagactgcatgctgcagaagtggagcgccgctcactacgcttagaggtcacagaattcaaacgaagtgtgaatgaaatgaaaaaggagcttgacaaagcccagggtctgcaaatgcaattaaatgaatttaagcagtctaaattgatcacccatgagaagtttgaaagtgcatgtgaagaactaaataatgcattacttcgggaagagcaggcacaaatgctattgaatgaacaggcacaacaactacaggaattgaattataaacttgaattgcactccagtgaggaagctgacaaaaaccaaactcttggagaagctgttaagagtctctccgaggcaaagatggagctgagaagaaaagatcaatctctgcgtcagctcaatagacatcttacccagctggagcaggacaagcgtcgactggaggagaacatccatgatgcagagagtgccctccgcatggcagccaaagacaaagaatgtgttgctaatcacatgagagcagtagaaaatacgcttcacaaggtcagagatcagatctcgctgtcatggtctgcggcaagtaggaatgacttcaccctacagctacccaaactgcacctggagacctttgcaatggaggggctcaagggcgggccagaggtggtagcatgccaggctatgattaaaagtttcatggatgtctaccagcttgcaagcactagaatcatgacattagagaaggaaatgacatctcatcgaagtcacattgcagccttgaaatcagaacttcacacagcttgtttacgtgaaaatgcaagtttacaatcagatacattcatcatttcatttagaagagatggttcaccctgtagtgattcttcatctatagaatgcgaaacattcccccaggtgattctgatg

SEQ ID NO: 309300 - DNA, 411 bp, Artificial Sequence
  derived and/or modified sequence
atgcgcgctgtggagaacactctccacaaggtgagggaccagatatccttgtcttggtctgcagccagtcgaaacgattttactctccaacttcccaaactccatctcgaaacattcgctatggaaggcttgaaagggggtcctgaagttgtggcatgccaagcgatgatcaagtcattcatggacgtgtaccagctcgcatccacacggattatgaccctcgagaaggagatgacctcgcataggagtcacatcgctgctctcaagtctgagctgcacaccgcgtgtctgcgggaaaacgcgtcgttgcagtccgatacttttatcatctcttttcggcgagatgggagcccatgctctgatagctccagcattgaatgcgagacctttccccaggtaatactaatgtag

SEQ ID NO: 309301 - DNA, 411 bp, Artificial Sequence
  derived and/or modified sequence
atgagagctgtggagaacaccctgcacaaggtgcgggaccagatcagcctgtcctggagcgctgccagcagaaatgacttcaccctgcagctgcccaagctgcacctggagacctttgccatggagggcctgaagggcggccctgaggtggtggcctgccaggccatgatcaagagcttcatggatgtgtaccagctggccagcacccgcatcatgaccctggagaaggagatgaccagccacaggagccacatcgccgccctgaagtctgagctgcacacagcctgcctgagagaaaatgccagcctgcagagcgacaccttcatcatctccttcagaagagatggcagcccctgcagcgacagcagcagcattgaatgtgagaccttcccccaggtgatcctgatgtag

SEQ ID NO: 309302 - DNA, 411 bp, Artificial Sequence
  derived and/or modified sequence
atgcgggccgtggagaacaccctgcacaaggtgcgggaccagatctctctgtcctggagtgccgcgagccgtaacgatttcactctccaactgcccaagctgcatctggagacctttgcaatggaaggccttaagggaggccctgaggtagtagcgtgccaggccatgatcaaatcgtttatggacgtgtatcagctcgcctctactcgcataatgacacttgaaaaagagatgacatcccaccgatctcatatcgctgctctcaaaagcgaactgcataccgcatgccttcgcgaaaacgcttcgttacaatctgacactttcatcatcagtttcagaagagatggctcaccatgtagtgatagctcgtcgatcgagtgcgagacattccctcaggtgattttaatgtag

SEQ ID NO: 309303 - DNA, 411 bp, Artificial Sequence
  derived and/or modified sequence
atgagggccgtagagaataccctccataaggtgagggaccaaatatctctgtcttggtctgcggcttcacggaacgattttactttgcagctgcccaagttgcaccttgagaccttcgccatggaaggcctgaaaggtggccctgaagtagttgcctgtcaagcaatgatcaagagctttatggacgtctaccagctcgcttcaactcggataatgaccctcgagaaggagatgacatctcacagatcacacatagctgctctcaaatctgagcttcatacagcctgtctccgagaaaacgcctccctgcagagtgatacatttattatcagttttcgacgcgacgggtctccctgtagcgattccagcagcattgagtgtgaaacctttccacaggtgatattaatgtag

SEQ ID NO: 309304 - protein, 317 aa, Artificial Sequence
  derived and/or modified sequence
MNLNTSSNTGDTQRLKIASLDVKQILKNETELDITDNLRKKLHWAKKEKLEITTKHNAELASYESQIAKLRSEVEKGEALRQSLEYDLAVARKEAGLGRRAAEERLAEAHRIQEKLCAQNSELQAKTNETEKAFQTSQQKWKEECRRFEHDLEERDNMIQNCNREYDLLMKEKSRLEKTLQEALEKHQREKNEMESHIRETALEEFRLQEEQWEAERRELQFIVQEQDTAVQNMHKKVEKLETEHMDCSDLLRRQTSELEFSTQREERLRKEFEATTLRVRKLEENIEAERAAHLESKFNSEIIQVKCKQIFWPAFS

SEQ ID NO: 309305 - protein, 498 aa, Artificial Sequence
  derived and/or modified sequence
MAGALYPLYSRSCALSTQRDFLQEQVNTFELFKLEIRTLAQALSTVEEKKQEEAKMKKKTFKGLIRIFRKGVIAVLAANRLKILGQSCASLFTWMESFKEGIGMLVCTGEPQDKHKFPKHQKEQLRCLQALSWLTSSDLLAAIISSMAELQDVIGKADPNSRICGHLLIGAAKNSFAKLMDKISLVMECIPLHSSRSITYVEKDSLVQRLAHGLHKVNTLALKYGLRGHVPITKSTASLQKQILGFTQRLHAAEVERRSLRLEVTEFKRSVNEMKKELDKAQGLQMQLNEFKQSKLITHEKFESACEELNNALLREEQAQMLLNEQAQQLQELNYKLELHSSEEADKNQTLGEAVKSLSEAKMELRRKDQSLRQLNRHLTQLEQDKRRLEENIHDAESALRMAAKDKECVANHMRAVENTLHKVRDQISLSWSAASRNDFTLQLPKLHLETFAMEGLKGGPEVVACQVRVRVQWCDHSSLQSQMPGLKQSSCLSLLST

SEQ ID NO: 309306 - protein, 471 aa, Artificial Sequence
  derived and/or modified sequence
  misc_feature (1)..(1): Xaa can be any naturally occurring amino acid
XFELFKLEIRTLAQALSTVEEKKQEEAKMKKKTFKGLIRIFRKGVIAVLAANRLKILGQSCASLFTWMESFKEGIGMLVCTGEPQDKHKFPKHQKEQLRCLQALSWLTSSDLLAAIISSMAELQDVIGKADPNSRICGHLLIGAAKNSFAKLMDKISLVMECIPLHSSRSITYVEKDSLVQRLAHGLHKVNTLALKYGLRGHVPITKSTASLQKQILGFTQRLHAAEVERRSLRLEVTEFKRSVNEMKKELDKAQGLQMQLNEFKQSKLITHEKFESACEELNNALLREEQAQMLLNEQAQQLQELNYKLELHSSEEADKNQTLGEAVKSLSEAKMELRRKDQSLRQLNRHLTQLEQDKRRLEENIHDAESALRMAAKDKECVANHMRAVENTLHKVRDQISLSWSAASRNDFTLQLPKLHLETFAMEGLKGGPEVVACQVRVRVQWCDHSSLQSQMPGLKQSSCLSLLST

SEQ ID NO: 309307 - DNA, 4289 bp, Artificial Sequence
  derived and/or modified sequence
aaaaagtggggccgggcctgagttgggctgacctgtgaaagtctgggaaggtctgcgagagaagcggagtgttttcagctccggaagtggcagttgtaaacttcacctcccgggggctcttccccttctgtacccctttgctgtttgtccccctcctcccgggtcctggagtccgtcgtgttccaacagtttttgctcttattcccgtgggctgcctgggcctcctttcacccgtgagacttggagcggcccctggggtcttgggtgtgcagcacggatcacgcgagacccctgagacctcaaatcatctaacgtgaagccacagacatcttgggcaattttaatcatcaagaaagaaatatgtcattaagaaatagcagggtattttgaaagagttggaaaacatcatgaatttgaatacttcaagtaatactggtgatacccaaaggttgaagattgcctcattggatgtaaaacaaatacttaaaaatgaaacagagttggatattactgataatctcaggaagaaactccattgggctaaaaaagaaaagttagaaataacaaccaaacacaatgcagagctggcaagctatgagagccagattgccaagctacggtccgaggttgaaaagggagaagcattgcgacaaagtctggaatatgacctagctgttgctagaaaggaagctggtcttggaagacgggctgctgaagaaagattagccgaggcacataggatccaagaaaaactctgtgtctcaggtatgtctttatccaaaaaaacagacgaatacaaagccaggaggaagaacctaatgatactgatgttggaggtttcccaataaatgagccatccagatccttctccagcgaagactaaagttgttaacgtccaccttgaagctcagattctaggtgcacagaattcagaacttcaagcaaagacaaatgagactgagaaagcatttcagacttctcagcaaaaatggaaagaagaatgcagaagatttgaacatgatttggaggaaagagacaatatgatccaaaattgcaatcgagaatatgatttacttatgaaagaaaaaagcagactagagaaaactctacaggaagcgttggaaaaacatcaacgggagaagaatgagatggagtctcatatcagggagacagcattggaggagtttagattacaagaagaacaatgggaagcagaaagaagagaattacaatttatagtacaggagcaagatactgctgtgcaaaatatgcataagaaagtagaaaaattagaaacagaacatatggactgctctgaccttttacggcgacaaacaagtgaacttgaatttagcactcaacgagaggaacgccttagaaaagaatttgaggcaactactctaagagtgaggaaattagaagaaaacattgaagcagaaagagcagcgcatttggaatcaaaatttaattctgaaattattcagttacggattcgagaccttgaaggagctttgcaagtagagaaggccagtcaagcagaagctgttgctgatttggaaattatcaagaatgaattcaaagaagttgaaagtgcatatgagcgagaaaagcataatgcacaagagagctttgcaaaactaaatttattagaaaaagagtatttctccaaaaataagaaactaaatgaagacatcgaggaacagaagaaagtaattatagacctttcaaagagactccagtataatgaaaaaagttgcagtgaattacaggaagaactagtaatggctaagaagcaccaggccttcctagtagagacatgtgaaaataacgtgaaagaattggaatcgatcttggacagctttactgtgtcgggccagtggacatcaggcatccacaaggacaaagataaacctcccagcttctctgttgtccttgagagattgaggcgtaccttgacagattaccagaacaagctggaagatgcatctaatgagctaaacagcatgaatgatgttaaggaaaaggcatgtaatgaacttgattctacgaaacagaagatagactctcacactaaaaatataaaggaacttcaggataaactggctgatgttaataaagagttaagtcatttacacactaaatgtgcagaccgagaggctttaataagcactttaaaagtggaactacaaaatgtgctgcactgttgggagaaagaaaaggctcaggcagcccagtctgaaagtgaactgcagaagctttcccaggctttccataaggatgcagaggagaagctaaccttccttcacaccttatatcagcacttggtagcaggctgtgtgctcataaaacaaccagaaggcatgctggataaattctcttggtctgagctttgtgcagtcttacaggagaatgttgatgccctgattgcagacctcaacagggctaatgagaagataaggcatctagagtatatctgtaaaaacaagtctgacacgatgagagagcttcagcagactcaggaagacacctttaccaaagtggcagaacagatcaaagcccaagagagctgctggcacagacaaaagaaggaactagagctgcagtattctgaactcttcctggaggtgcagaagagggcacagaaatttcaagaaattgctgaaaaaaacatggaaaaattgaaccatattgagaagtcacatgaacagttggttcttgaaaattcgcacttcaaaaaactgttatcacagactcaaagggaacagatgtccttgctggcagcctgtgcattaatggctggtgccttatatcccctctatagccgatcatgcgccttgtctacacagagagattttctccaggagcaggtcaacacctttgagttgttcaaactggaaattagaactctagcccaggctttgtcaactgtagaggaaaagaagcaagaggaagccaagatgaaaaagaaaacattcaaaggattgatacgtatatttcggaaaggtgttattgctgttttggcagcaaacagactcaagattttgggccaatcatgtgcctctctttttacctggatggagagtttcaaagaaggcataggcatgttagtgtgcacaggagagccccaagacaagcataaatttccaaaacatcaaaaggagcagttgcgttgtttacaagcgctcagttggctcaccagttctgaccttcttgctgcaataatcagttctatggctgaattacaagacgtcattggtaaagcagatccaaattccagaatttgtggacatttactcataggtgcagccaagaattcttttgcaaaactcatggataaaattagtctggtaatggaatgtatacctctgcacagtagcaggagtattacatatgtagaaaaagattccctggttcagaggctggcccatggacttcataaagtaaacacactggccctgaaatatggtttgcgtggccatgtgcccattacgaaaagcacagcatcgttgcagaagcaaatacttggatttacacaaagactgcatgctgcagaagtggagcgccgctcactacgcttagaggtcacagaattcaaacgaagtgtgaatgaaatgaaaaaggagcttgacaaagcccagggtctgcaaatgcaattaaatgaatttaagcagtctaaattgatcacccatgagaagtttgaaagtgcatgtgaagaactaaataatgcattacttcgggaagagcaggcacaaatgctattgaatgaacaggcacaacaactacaggaattgaattataaacttgaattgcactccagtgaggaagctgacaaaaaccaaactcttggagaagctgttaagagtctctccgaggcaaagatggagctgagaagaaaagatcaatctctgcgtcagctcaatagacatcttacccagctggagcaggacaagcgtcgactggaggagaacatccatgatgcagagagtgccctccgcatggcagccaaagacaaagaatgtgttgctaatcacatgagagcagtagaaaatacgcttcacaaggtcagagatcagatctcgctgtcatggtctgcggcaagtaggaatgacttcaccctacagctacccaaactgcacctggagacctttgcaatggaggggctcaagggcgggccagaggtggtagcatgccaggttagagttagagtgcagtggtgtgatcatagctcactgcagtctcaaatgccagggctcaagcaatcttcctgcctcagcctgctgagtacctag

SEQ ID NO: 309308 - protein, 257 aa, Artificial Sequence
  derived and/or modified sequence
  misc_feature (1)..(1): Xaa can be any naturally occurring amino acid
XHKVNTLALKYGLRGHVPITKSTASLQKQILGFTQRLHAAEVERRSLRLEVTEFKRSVNEMKKELDKAQGLQMQLNEFKQSKLITHEKFESACEELNNALLREEQAQMLLNEQAQQLQELNYKLELHSSEEADKNQTLGEAVKSLSEAKMELRRKDQSLRQLNRHLTQLEQDKRRLEENIHDAESALRMAAKDKECVANHMRAVENTLHKVRDQISLSWSAASRNDFTLQLPKLHLETFAMEGLKGGPEVVACQVRV

SEQ ID NO: 309309 - DNA, 954 bp, Artificial Sequence
  derived and/or modified sequence
atgaacctgaacaccagcagcaacaccggcgacacccagagactgaagatcgccagcctggacgtgaagcagatcctgaagaacgagaccgagctggacatcaccgacaacctgagaaagaagctgcactgggccaagaaggagaagctggagatcaccaccaagcacaacgccgagctggccagctacgagagccagatcgccaagctgagaagcgaggtggagaagggcgaggccctgagacagagcctggagtacgacctggccgtggccagaaaggaggccggcctgggcagaagagccgccgaggagagactggccgaggcccacagaatccaggagaagctgtgcgcccagaacagcgagctgcaggccaagaccaacgagaccgagaaggccttccagaccagccagcagaagtggaaggaggagtgcagaagattcgagcacgacctggaggagagagacaacatgatccagaactgcaacagagagtacgacctgctgatgaaggagaagagcagactggagaagaccctgcaggaggccctggagaagcaccagagagagaagaacgagatggagagccacatcagagagaccgccctggaggagttcagactgcaggaggagcagtgggaggccgagagaagagagctgcagttcatcgtgcaggagcaggacaccgccgtgcagaacatgcacaagaaggtggagaagctggagaccgagcacatggactgcagcgacctgctgagaagacagaccagcgagctggagttcagcacccagagagaggagagactgagaaaggagttcgaggccaccaccctgagagtgagaaagctggaggagaacatcgaggccgagagagccgcccacctggagagcaagttcaacagcgagatcatccaggtgaagtgcaagcagatcttctggcccgccttcagctag

SEQ ID NO: 309310 - DNA, 4017 bp, Artificial Sequence
  derived and/or modified sequence
gtccctcagcgaaggcgcgctgcttggcgggcgggctcttccaatccgagccagcgttctcggaacctcaaatcatctaacgtgaagccacagacatcttgggcaattttaatcatcaagaaagaaatatgtcattaagaaatagcagggtattttgaaagagttggaaaacatcatgaatttgaatacttcaagtaatactggtgatacccaaaggttgaagattgcctcattggatgtaaaacaaatacttaaaaatgaaacagagttggatattactgataatctcaggaagaaactccattgggctaaaaaagaaaagttagaaataacaaccaaacacaatgcagagctggcaagctatgagagccagattgccaagctacggtccgaggttgaaaagggagaagcattgcgacaaagtctggaatatgacctagctgttgctagaaaggaagctggtcttggaagacgggctgctgaagaaagattagccgaggcacataggatccaagaaaaactctgtgcacagaattcagaacttcaagcaaagacaaatgagactgagaaagcatttcagacttctcagcaaaaatggaaagaagaatgcagaagatttgaacatgatttggaggaaagagacaatatgatccaaaattgcaatcgagaatatgatttacttatgaaagaaaaaagcagactagagaaaactctacaggaagcgttggaaaaacatcaacgggagaagaatgagatggagtctcatatcagggagacagcattggaggagtttagattacaagaagaacaatgggaagcagaaagaagagaattacaatttatagtacaggagcaagatactgctgtgcaaaatatgcataagaaagtagaaaaattagaaacagaacatatggactgctctgaccttttacggcgacaaacaagtgaacttgaatttagcactcaacgagaggaacgccttagaaaagaatttgaggcaactactctaagagtgaggaaattagaagaaaacattgaagcagaaagagcagcgcatttggaatcaaaatttaattctgaaattattcaggtaaaatgtaaacaaatattttggcctgcattttcttaatttgtgttataacagctgggaaaaacagcactgtgttcagagaacgaaggtgtgcattgagaatgggtaacatattgttatgacactcattattgtatataaggttaggatacagttgagatatgctaccttagtggaggagttggcacactatagcctacaggccaggtctcacccactgtctgttcttgtgaagttttgtcttgtccatagctacttttgtggcagagtggagtagttgtgacagagaacttacctggcagtctgcaaagaaatttgcagattggagtgttcttttacggctgtgggatggatttctttttgagaacgttgaaaaaatgtgcatgttatttattgagtgcatatcctatgcatatcactgtattaagagctgaaggtgtaaagatgaatgagctccttttgtaacttacattttgttgtcagagatactatatatctatctccagatatatagatgcttacatagaagtacaaaatactgaaatacaatgggaatataataaagaaaaggattaaatctgggaggggaattaaatggaggcctcctaaggaaattatcctttttgctatgctttagagaatgagaaggaatttctaagagaagtgagagcagggcattttattaggggttggcacactactgcccatgggccaagtctgacctgcagcctttttctgtaaagttttattagaagatagccatgcccatttgtttacatattgtttatgggtgcttgtcgagacagaccttatggtccacaaaaactgaaatatttactctgtggccctttacagaaaatgtttactgaccactgttctgaacaactgcttggataaagccactaaataaaatgtacttgtttatttttgaggaatacttgcagtgttgagtggtagagcttagggaaaagtttggagataatggtgggaaggcatgatgaagactaattatggaagtcctttttcgtgctaagaaacttagacttattttgaaagcaatggaaagccactgcagcttttgggacagacagatatgaaatctaagtttaggaaaataactctggtgccatattggtagataaaggaagggagtgaagataggaggctgggtgaagagatgatgaacacctgaatcaagacaacgactgtagcaatggaaaagagggctcctgtggcagaataacagtccctcaaagatgtccacatctgcccttatcctcagaacctgtgaatatgttaccttacatggcaaatgggactttgcagatgtgatttatttgaggatcttgagatgggagtttgtcccagtttatctagttgagactgatgtaatcataagagtccttataacagggaggcaggagggtcacagtcagaggcagagatgtgatgacagaagcagaggtcagagtaggtcaccatgaacccaggaatgtgggtggcctccagaagttagaaaaggcaagacaagatttcttccctagagtctccagaaggaatggagtcttgctgacacgtgactttagccccagaagacccatttcagaattttgacctccacaactgtaagataatacatttatgttgttttaaattgccaatttgtggtaattggtaatagcagtgattggaaaggtacaggggacaaactgagaatgcatgattttaggtaactaatttgcagtgtgaggggagggaaggagcaatagaagagaacaccaaggtttgcagtatgtgtgaaagtgggcagatgcagttgactgtcaaactctgaagtctgaagagagacaatggtaagttttgaacatgttgactttgaggagcagtttaagaggttcatagtgccctttgaggatatggtcatgcaaagttacctgaacaatgtacatttactcttgacatcctgctttttgtgaacagatcctttctttatattctctcaagcaactgccggtagcttatcttggatcagccagtttcccaggtgttaggaaagttaaggaaattacataggaggagatttgttggacctgctactttcttgattttaatattttatagacagttatgacttttcgcttaaatgttttctcagcatttgataatatgctttaaaatctaataaatatggtatttgttatgcttctgttaaagagattaactttaatgaagattgtatacctataatagtatttttgtttgcttaaatctaggaaggtagaaagtatctttatgaacttagattctcagtataaactgttaagatgttcttatttcatgttatttagctggtcagttattacatttgagcactactttgtgaacaaatgtaatagactgtatgaaaataaaatatatgcacttatttccagaagaaaaagtagttttaagcttatttggctttagcaagtttgaaaatcatctcactttatttgtgctcttgaatttcatatcaagtaggatggtgggattgccaaaatcagtaaatgaaaagtagctataagcagatagattaaaactagtttagactaaaaaagttattgccttgatttaggtgtttattatcttttcacccaacctcctatcaccactccgttactttatttgccaatgttagttaccagaattatttttctaaaacttagatttgatatctacatcaaaggctacttatattaaaagctactgctttcaatatgtctaaattacttaatttaatttacatttttaaagacttacacttttttcctatcttgttttaattaatgcaatttatagtgttttaccttattgtttaaagaactcccaatgtaagatacaactgtatttgtaaagatttggtattaaaatttatgtttttacttttg

SEQ ID NO: 309311 - DNA, 954 bp, Artificial Sequence
  derived and/or modified sequence
atgaatttaaacaccagcagtaataccggagatactcaacgactgaagattgcttctctggatgtgaagcagattctgaagaatgaaaccgaactggacatcaccgacaacctccgtaaaaagctgcattgggccaagaaagagaagctggagataaccactaagcacaacgctgaattggcctcgtacgagagccagatagctaagcttagaagcgaagtcgaaaaaggcgaggccctgcggcagagcctggaatatgacttggcagtcgccaggaaggaggctgggctgggccgtcgagccgccgaagaacggctggcagaggcccacaggatacaggaaaagctctgcgcgcaaaattccgagctccaagccaaaaccaacgaaaccgaaaaagcatttcagaccagccagcagaaatggaaggaagagtgtaggcgctttgagcacgacctggaggagcgagataacatgatccaaaactgcaaccgggagtacgacctccttatgaaagagaagtctcgtttggagaagaccctccaagaagctttagagaaacatcagcgggaaaaaaacgagatggagtctcacatcagagagacagccctggaagagtttcggttgcaggaggagcagtgggaagcagaacgccgggaactccaattcatcgtacaggaacaggacacagccgttcagaacatgcataagaaagtcgagaaattagagacggagcatatggattgttctgatcttttgcggcggcagacgagtgagcttgagttctcaacccagagagaggagaggttacgtaaggaatttgaggccacaaccctaagggtacggaaactggaggaaaacatagaagccgagcgcgcagcccaccttgagagtaaattcaactccgagattatccaagtcaagtgcaagcagatattctggcctgcctttagttag

SEQ ID NO: 309312 - DNA, 954 bp, Artificial Sequence
  derived and/or modified sequence
atgaacctgaacaccagcagcaacacaggagacacccagaggctgaagatcgccagcctggatgtgaagcagatcctgaagaatgaaacagagctggacatcacagacaacctgaggaagaagctgcactgggccaagaaggagaagctggagatcaccaccaagcacaatgctgagctggccagctatgagagccagatcgccaagctgcggtctgaggtggagaagggggaggccctgcggcagagcctggagtatgacctggccgtggccaggaaggaggccggcctgggcagaagagctgctgaggagcggctggccgaggcccaccgcatccaggagaagctgtgtgcccagaacagcgagctgcaggccaagaccaatgaaacagagaaggccttccagaccagccagcagaagtggaaggaggagtgccgccgctttgaacatgacctggaggagcgggacaacatgatccagaactgcaaccgggagtatgacctgctgatgaaggagaagagccggctggagaagaccctgcaggaggccctggagaagcaccagcgggagaagaatgagatggagagccacatccgggagacagccctggaggagttccggctgcaggaggagcagtgggaggccgagcggcgggagctgcagttcatcgtgcaggagcaggacacagctgtgcagaacatgcacaagaaggtggagaagctggagacagagcacatggactgcagcgacctgctgcggcggcagaccagcgagctggagttcagcacccagcgggaggagcggctgaggaaggagtttgaggccaccaccctgcgggtgaggaagctggaggagaacattgaagctgagcgggccgcccacctggagagcaagttcaacagcgagatcatccaggtgaagtgcaagcagatcttctggccagccttctcctag

SEQ ID NO: 309313 - DNA, 954 bp, Artificial Sequence
  derived and/or modified sequence
atgaacctgaacaccagcagcaacaccggcgacacccagcggctgaaaatcgctagtctggacgtgaaacagattttgaagaacgaaaccgagcttgatataacagacaacttgcggaaaaaactgcattgggctaagaaagagaagctagaaataaccaccaaacacaacgcggaacttgctagctatgaatcccagatagcaaagttacgctctgaagtcgaaaagggcgaagcccttaggcagtcgcttgaatacgaccttgcagttgcacgaaaagaggccggcctgggtaggcgcgccgccgaggagcgattggctgaggcccatcggattcaggaaaaactgtgcgcgcagaatagtgaacttcaagccaaaaccaacgagactgagaaagccttccagacatctcagcagaagtggaaggaggagtgcaggcgcttcgagcatgacctggaggagcgggataacatgattcaaaactgcaatcgcgagtatgatctgctgatgaaagagaaaagccgcctggagaagactctgcaggaggctttggaaaagcaccaaagggaaaagaatgaaatggagtcccatatcagggaaaccgccctggaggagttccgactgcaggaagaacaatgggaggccgagaggcgcgaattgcagttcatcgtgcaggaacaagacaccgccgtgcagaatatgcacaaaaaggtagaaaaactcgagacagagcacatggattgctcagatttgttgaggcgccaaacttccgagctggagtttagcacccagcgagaggagaggctgcgcaaggaattcgaggccacgacactgagggtgagaaaactggaggagaacatagaggccgagagagccgctcacctcgagtcaaaatttaattcggaaataatacaggtgaaatgcaaacaaatcttctggccagctttctcttag

SEQ ID NO: 309314 - DNA, 954 bp, Artificial Sequence
  derived and/or modified sequence
atgaatctcaataccagcagtaatacaggagatacacagcggctgaaaattgcttcactggacgtgaaacagatcctaaagaatgagactgaactggacattaccgacaatctgagaaagaaactccattgggcgaagaaggaaaagcttgaaattaccaccaagcacaatgccgaactggccagctatgaatcacagatagccaagcttcgatctgaggtcgaaaaaggcgaggctctgaggcagtcactggaatatgatctggccgttgcccgtaaggaagctggcctgggcagacgcgcagctgaggaacggctagccgaggcgcaccggatccaagagaaactgtgcgctcagaatagcgaactgcaggcaaagacgaacgagacggaaaaggccttccagacctctcagcaaaaatggaaagaggaatgtaggcgtttcgaacatgacctcgaggaacgggacaatatgattcaaaattgtaatcgggagtatgaccttctgatgaaagagaagagtcgcttggaaaaaaccttgcaggaagctctagaaaagcatcagagagagaaaaatgaaatggagagccacattagagagaccgcactcgaggagtttcggctccaggaggagcaatgggaggccgagaggagagaactgcagttcatagttcaggaacaagacacggccgtgcaaaacatgcataaaaaagtcgaaaaactggagaccgagcacatggactgctctgatctgctgcgcaggcagacgtctgagcttgagttcagcacgcagagggaggagaggctgagaaaggaatttgaggcgacaacattacgcgtgcggaaactggaggaaaatatcgaagcagagcgtgccgcacacctggagagcaaattcaactccgagattattcaagttaaatgtaagcagattttttggcctgccttttcttag

SEQ ID NO: 309315 - DNA, 1497 bp, Artificial Sequence
  derived and/or modified sequence
atggccggcgccctgtaccccctgtacagcagaagctgcgccctgagcacccagagagacttcctgcaggagcaggtgaacaccttcgagctgttcaagctggagatcagaaccctggcccaggccctgagcaccgtggaggagaagaagcaggaggaggccaagatgaagaagaagaccttcaagggcctgatcagaatcttcagaaagggcgtgatcgccgtgctggccgccaacagactgaagatcctgggccagagctgcgccagcctgttcacctggatggagagcttcaaggagggcatcggcatgctggtgtgcaccggcgagccccaggacaagcacaagttccccaagcaccagaaggagcagctgagatgcctgcaggccctgagctggctgaccagcagcgacctgctggccgccatcatcagcagcatggccgagctgcaggacgtgatcggcaaggccgaccccaacagcagaatctgcggccacctgctgatcggcgccgccaagaacagcttcgccaagctgatggacaagatcagcctggtgatggagtgcatccccctgcacagcagcagaagcatcacctacgtggagaaggacagcctggtgcagagactggcccacggcctgcacaaggtgaacaccctggccctgaagtacggcctgagaggccacgtgcccatcaccaagagcaccgccagcctgcagaagcagatcctgggcttcacccagagactgcacgccgccgaggtggagagaagaagcctgagactggaggtgaccgagttcaagagaagcgtgaacgagatgaagaaggagctggacaaggcccagggcctgcagatgcagctgaacgagttcaagcagagcaagctgatcacccacgagaagttcgagagcgcctgcgaggagctgaacaacgccctgctgagagaggagcaggcccagatgctgctgaacgagcaggcccagcagctgcaggagctgaactacaagctggagctgcacagcagcgaggaggccgacaagaaccagaccctgggcgaggccgtgaagagcctgagcgaggccaagatggagctgagaagaaaggaccagagcctgagacagctgaacagacacctgacccagctggagcaggacaagagaagactggaggagaacatccacgacgccgagagcgccctgagaatggccgccaaggacaaggagtgcgtggccaaccacatgagagccgtggagaacaccctgcacaaggtgagagaccagatcagcctgagctggagcgccgccagcagaaacgacttcaccctgcagctgcccaagctgcacctggagaccttcgccatggagggcctgaagggcggccccgaggtggtggcctgccaggtgagagtgagagtgcagtggtgcgaccacagcagcctgcagagccagatgcccggcctgaagcagagcagctgcctgagcctgctgagcacctag

SEQ ID NO: 309316 - DNA, 774 bp, Artificial Sequence
  derived and/or modified sequence
tgacacaaggtgaacaccctggccctgaagtacggcctgagaggccacgtgcccatcaccaagagcaccgccagcctgcagaagcagatcctgggcttcacccagagactgcacgccgccgaggtggagagaagaagcctgagactggaggtgaccgagttcaagagaagcgtgaacgagatgaagaaggagctggacaaggcccagggcctgcagatgcagctgaacgagttcaagcagagcaagctgatcacccacgagaagttcgagagcgcctgcgaggagctgaacaacgccctgctgagagaggagcaggcccagatgctgctgaacgagcaggcccagcagctgcaggagctgaactacaagctggagctgcacagcagcgaggaggccgacaagaaccagaccctgggcgaggccgtgaagagcctgagcgaggccaagatggagctgagaagaaaggaccagagcctgagacagctgaacagacacctgacccagctggagcaggacaagagaagactggaggagaacatccacgacgccgagagcgccctgagaatggccgccaaggacaaggagtgcgtggccaaccacatgagagccgtggagaacaccctgcacaaggtgagagaccagatcagcctgagctggagcgccgccagcagaaacgacttcaccctgcagctgcccaagctgcacctggagaccttcgccatggagggcctgaagggcggccccgaggtggtggcctgccaggtgagagtgtag

SEQ ID NO: 309317 - DNA, 1416 bp, Artificial Sequence
  derived and/or modified sequence
tgattcgagctgttcaagctggagatcagaaccctggcccaggccctgagcaccgtggaggagaagaagcaggaggaggccaagatgaagaagaagaccttcaagggcctgatcagaatcttcagaaagggcgtgatcgccgtgctggccgccaacagactgaagatcctgggccagagctgcgccagcctgttcacctggatggagagcttcaaggagggcatcggcatgctggtgtgcaccggcgagccccaggacaagcacaagttccccaagcaccagaaggagcagctgagatgcctgcaggccctgagctggctgaccagcagcgacctgctggccgccatcatcagcagcatggccgagctgcaggacgtgatcggcaaggccgaccccaacagcagaatctgcggccacctgctgatcggcgccgccaagaacagcttcgccaagctgatggacaagatcagcctggtgatggagtgcatccccctgcacagcagcagaagcatcacctacgtggagaaggacagcctggtgcagagactggcccacggcctgcacaaggtgaacaccctggccctgaagtacggcctgagaggccacgtgcccatcaccaagagcaccgccagcctgcagaagcagatcctgggcttcacccagagactgcacgccgccgaggtggagagaagaagcctgagactggaggtgaccgagttcaagagaagcgtgaacgagatgaagaaggagctggacaaggcccagggcctgcagatgcagctgaacgagttcaagcagagcaagctgatcacccacgagaagttcgagagcgcctgcgaggagctgaacaacgccctgctgagagaggagcaggcccagatgctgctgaacgagcaggcccagcagctgcaggagctgaactacaagctggagctgcacagcagcgaggaggccgacaagaaccagaccctgggcgaggccgtgaagagcctgagcgaggccaagatggagctgagaagaaaggaccagagcctgagacagctgaacagacacctgacccagctggagcaggacaagagaagactggaggagaacatccacgacgccgagagcgccctgagaatggccgccaaggacaaggagtgcgtggccaaccacatgagagccgtggagaacaccctgcacaaggtgagagaccagatcagcctgagctggagcgccgccagcagaaacgacttcaccctgcagctgcccaagctgcacctggagaccttcgccatggagggcctgaagggcggccccgaggtggtggcctgccaggtgagagtgagagtgcagtggtgcgaccacagcagcctgcagagccagatgcccggcctgaagcagagcagctgcctgagcctgctgagcacctag

SEQ ID NO: 309318 - DNA, 2181 bp, Artificial Sequence
  derived and/or modified sequence
ttcataaagtaaacacactggccctgaaatatggtttgcgtggccatgtgcccattacgaaaagcacagcatcgttgcagaagcaaatacttggatttacacaaagactgcatgctgcagaagtggagcgccgctcactacgcttagaggtcacagaattcaaacgaagtgtgaatgaaatgaaaaaggagcttgacaaagcccagggtctgcaaatgcaattaaatgaatttaagcagtctaaattgatcacccatgagaagtttgaaagtgcatgtgaagaactaaataatgcattacttcgggaagagcaggcacaaatgctattgaatgaacaggcacaacaactacaggaattgaattataaacttgaattgcactccagtgaggaagctgacaaaaaccaaactcttggagaagctgttaagagtctctccgaggcaaagatggagctgagaagaaaagatcaatctctgcgtcagctcaatagacatcttacccagctggagcaggacaagcgtcgactggaggagaacatccatgatgcagagagtgccctccgcatggcagccaaagacaaagaatgtgttgctaatcacatgagagcagtagaaaatacgcttcacaaggtcagagatcagatctcgctgtcatggtctgcggcaagtaggaatgacttcaccctacagctacccaaactgcacctggagacctttgcaatggaggggctcaagggcgggccagaggtggtagcatgccaggttagagtctaaataacattgtttgctactgagacatatagaaaaataaattgcactaactggagagaatgaaagcctcaaagtattgtgaataatttaaaggagatgcaaatagatgtttcttcatttttcttctatcatgtaacagtatactttacaaaatattgtttttttctttaaagcctagaactagcctattaaaataatccagaaaagtgtttttaccaaggaaaaatgtgttttatggcaaagtacagtattaaaagaaaatactttcctatcagcagaggacaataagacactaggctgttacctctttaagcaagtctcaatttgttgcttttattgtttgaaaataagtaattttagaaaaaaaataaaataataaatcactttagttgtaaacatcaaaagagatacctgaaatatctcaatattaattccaaaatatatccaacatttcttatgaagtaatttaatttcagcaaagcttaaacttatctgtgttttctattgaagagtattttaccctttaatatttagttttagtgaacattgtaagatgtgcaaattgggtcatttcatttataaaacttaaaatatcaaatcataagaactcaaataactttaaagtacactaataaacttatttttagaaacattcattttcggatgctgtaggtatccttctattttatgtcactattgtattaatattattgtgatcaattttttccttaaggttatttttcttaatctgacaaaatgaaattcagtgtgtccttttaatgcccaaaaccttcattaaaaaaagaaaactatcaacattatgtaaattataggaagcatgatatttcaaaagagactgtccttgttcaatagcactctattttttagtgtatttaaaaggagaaatatctcttaaaacttagtgtgtctttcacatgttgagatttaaaataatctttttcattttagtttatgaccctgtggaattttaattttatagaaaattaatgtcagtgtgtgtgtggagcaatgttaattttttatatgctccatatcctaatttaatttgttattagtaccaaattaatgctctacaaggaaaaaaatactcattgcttctttcattagattgtccaatatgtctaaaatatatataattataaaagtaagcataaaatatttttcttctctgttatagggtagattgctgtactgttatttaagatgagatttaaaatgtgtattttaaatttgattgtcagtatttatgaattcatcattactatgaatacagtctgatttgagatttttctagtggttgtaaaataatcctttacttggctatttcaattcagaatctcacaaggcttagtatttgtcgtaatttacaagtaaagacttcctcaaaact

SEQ ID NO: 309319 - DNA, 2634 bp, Artificial Sequence
  derived and/or modified sequence
cctttgagttgttcaaactggaaattagaactctagcccaggctttgtcaactgtagaggaaaagaagcaagaggaagccaagatgaaaaagaaaacattcaaaggattgatacgtatatttcggaaaggtgttattgctgttttggcagcaaacagactcaagattttgggccaatcatgtgcctctctttttacctggatggagagtttcaaagaaggcataggcatgttagtgtgcacaggagagccccaagacaagcataaatttccaaaacatcaaaaggagcagttgcgttgtttacaagcgctcagttggctcaccagttctgaccttcttgctgcaataatcagttctatggctgaattacaagacgtcattggtaaagcagatccaaattccagaatttgtggacatttactcataggtgcagccaagaattcttttgcaaaactcatggataaaattagtctggtaatggaatgtatacctctgcacagtagcaggagtattacatatgtagaaaaagattccctggttcagaggctggcccatggacttcataaagtaaacacactggccctgaaatatggtttgcgtggccatgtgcccattacgaaaagcacagcatcgttgcagaagcaaatacttggatttacacaaagactgcatgctgcagaagtggagcgccgctcactacgcttagaggtcacagaattcaaacgaagtgtgaatgaaatgaaaaaggagcttgacaaagcccagggtctgcaaatgcaattaaatgaatttaagcagtctaaattgatcacccatgagaagtttgaaagtgcatgtgaagaactaaataatgcattacttcgggaagagcaggcacaaatgctattgaatgaacaggcacaacaactacaggaattgaattataaacttgaattgcactccagtgaggaagctgacaaaaaccaaactcttggagaagctgttaagagtctctccgaggcaaagatggagctgagaagaaaagatcaatctctgcgtcagctcaatagacatcttacccagctggagcaggacaagcgtcgactggaggagaacatccatgatgcagagagtgccctccgcatggcagccaaagacaaagaatgtgttgctaatcacatgagagcagtagaaaatacgcttcacaaggtcagagatcagatctcgctgtcatggtctgcggcaagtaggaatgacttcaccctacagctacccaaactgcacctggagacctttgcaatggaggggctcaagggcgggccagaggtggtagcatgccaggttagagttagagtgcagtggtgtgatcatagctcactgcagtctcaaatgccagggctcaagcaatcttcctgcctcagcctgctgagtacctaggaccacaggtgcgcaccaccatacccagctacttggacaaaaaacagtgtttgatggactgcctaggtgaagacctggaaaaggaagggttatctacaaatgaactgatgaagttcttcaaattgatgccgcttatataaactgaccccgatttgccctattctgcatgacaacttaagtgacagcagttagaagaaaatacagcaatgaatatgcaacttaaggattaaggaagatgcagtaaatcagtctaaagctaagtacaatgataatttcttgtaataattccacagatgccttacatttgttaaacagactgttattactctcaaatactcaaatatatgttttcattatatacatgtatttgaattgaagaagagaactaaaagttattccaacagagatcctaattcttttccctcttatttaaacttggaattatcaaaatcacagttttaaaaatattttatttaggatatccacatgcaaaagaatgaaattggaccttggtcttacaacatgcacaataatcaactcaaaatggagtacacaatgttagaaagacctaatgccataaaacaaaggaaacaacaaaatggaaaggcaacttgtggaataggaaaaactatttataaactgtatatccagtaaggagtttaatatccaaaatatataaggaactcatacaacacaataacttttttaaaaaatgggcaaaggacctaaaaagacatttttccaaagaacacatgcaagtggccaataagtaaaaaggtgttcaacaccgctaaccattagggaaatgaaaatcaaaaccacaatgagatatcacatcacaactgttaggatggctattaccagaaagtcaaaagacaacaagtgttggcaaggatgtagagaaaagcgaacctttgtgcactattggtggaaatgtaaattggtatagctattatggaaaacagtatggaatttcctcaaaaaataaaaatagaactaccatatgatccagcaatcctacttctgggtatacatcaaaaggaaatgaaaccgttgtcttgaagacatgtctacacttccatgttcattgtagcattattcacaatagccaagatatagaaacaacctaagtgtcctctgatgaatgaatggacagaggaaatgtttatacacacacacacacacacacacacacacacccagaggaaaattcagcttt

SEQ ID NO: 309320 - DNA, 1497 bp, Artificial Sequence
  derived and/or modified sequence
atggctggagccctgtatccgctctactctcgctcgtgtgctttgtccacacagagagacttcctgcaggaacaggttaatactttcgaactctttaaactagagatccggacccttgcacaggcgctttcaacggttgaagaaaaaaagcaggaagaggctaagatgaaaaagaaaacattcaaggggctcattagaatatttagaaaaggcgtgatcgccgtgttagccgccaacaggctaaaaattctaggacagtcctgcgcctctctgtttacctggatggagtcctttaaggagggcatcggcatgcttgtatgcaccggagaaccacaagataagcacaaatttcctaagcatcaaaaagagcagctgaggtgtctccaggctctgtcctggctgacctctagcgacctcttggccgcaatcatatcttctatggccgagctccaagacgttatcggcaaggcagatcccaatagccggatctgcggtcatctcctgatcggtgcagccaagaacagcttcgccaaactaatggataaaatttccctggtcatggaatgcattccactgcactcttccagatctatcacctatgtggaaaaggattccttggtccagagactagcgcacggcctgcacaaggtgaacaccctcgcactgaagtatgggttgcggggacatgttccaatcacgaagtccacggcgagcctccaaaaacagattctgggatttacacagcgcctgcacgctgccgaggtcgagagacgatctctgcgcctcgaagtgacagaattcaaaaggtcagtgaacgaaatgaagaaggagctggacaaggcacaggggctgcagatgcaactgaatgagttcaaacagtcgaagctgataacacatgagaagtttgagtcagcatgtgaggagctcaacaatgccctactccgagaggagcaggctcagatgcttttaaatgagcaagcccaacagcttcaagaactcaactataaactagagctccatagttctgaagaagctgataagaatcagaccttaggagaagctgtcaagtccctgtctgaggccaaaatggaactgcgtcgcaaggaccagtcattgcgacagcttaacagacaccttactcagctggaacaggataaaaggcgcctggaggaaaatatacatgacgccgaaagcgccctgaggatggcagcaaaggacaaggaatgtgttgccaatcacatgcgcgcagtcgagaatactctgcataaggtgagggatcagatttccctgtcctggagcgccgcatcacgcaatgactttactctgcaattgccgaagctgcacctcgaaacatttgcaatggaggggttgaagggaggaccggaagtagttgcgtgccaggtcagggtgagggtgcagtggtgcgatcacagttcactccagtcgcaaatgcctgggttaaaacagtcatcctgtttgtcactcctgagcacatag

SEQ ID NO: 309321 - DNA, 774 bp, Artificial Sequence
  derived and/or modified sequence
tgacacaaagtcaatacattggcactgaagtacgggttgaggggacacgttcccattactaagtctactgctagcctgcagaaacagatcttgggctttacccagcggctgcacgcagccgaggtggagcgccgctctctgcggctggaagtgaccgaatttaagcggtcagtgaacgagatgaagaaagagttagataaggctcaaggactgcaaatgcagcttaacgagtttaagcagagcaagctcatcacgcatgaaaagttcgagtccgcatgcgaggaattaaacaacgcgcttctgcgtgaagaacaggctcaaatgctccttaacgagcaagctcagcagctgcaggagttaaactacaagttagagttacattcatctgaggaggccgacaagaaccagacactgggagaagccgtaaaatctctgagtgaagcgaagatggagctacggcggaaggatcagagcctacggcaactcaaccgccatttgactcagctcgagcaagataagaggagactagaggagaacatccacgacgctgaatccgcgctgcgcatggctgctaaagataaggaatgtgtggccaatcacatgagagcggtagagaatacgctgcataaagtgcgggatcagatctccctatcatggagtgctgcttctcgaaatgatttcactttacaattacccaaattacatctggaaacatttgctatggaggggcttaagggcggccctgaagtggtggcttgccaggtacgtgtgtag

SEQ ID NO: 309322 - DNA, 1416 bp, Artificial Sequence
  derived and/or modified sequence
tgatttgagttatttaagctagaaattcgcactcttgcccaggccctgtcgactgtggaggagaagaaacaggaagaggcaaaaatgaagaaaaagacctttaagggtttgatacggatcttccggaaaggcgtcatcgcggtgctggccgcaaaccggctgaagatcctcggtcagtcctgcgccagtctgtttacctggatggaatcttttaaggagggcattggcatgttggtttgtacgggagagccacaggataagcataaattccctaagcatcagaaagagcagctgcgttgtcttcaagctctaagctggctgacatcaagcgacctgcttgccgctatcataagctccatggctgaacttcaggacgtcataggaaaggcagaccccaacagccggatttgtggccacctccttatcggcgccgctaagaactccttcgccaaactcatggacaagatcagcctcgtcatggaatgcataccactacattcttcccgatctattacttacgtcgagaaggacagcctggttcaacgtttggcacatggactgcataaagtgaatacacttgctctgaaatacggactgcgagggcacgtgcccattacaaaatctacagcatccttacagaagcagatccttggcttcacgcagagactgcatgctgccgaagttgagcgaagaagtttaaggttggaggtgaccgagttcaagaggtcggtgaatgagatgaaaaaagagctggacaaggctcagggattacagatgcagctgaatgaattcaagcagtctaaacttatcacccatgaaaagttcgaatcagcctgcgaggagctgaataatgccctcctccgcgaggagcaggctcagatgctcctgaatgaacaggcccaacaactacaggagctgaattataaactggagcttcattctagcgaagaggccgataaaaaccagacccttggtgaggctgttaagtctctgtctgaagcgaaaatggagctccggcgtaaggaccagtctctgcgacagctgaatagacacttgacccagctggagcaggacaagagacgattggaggagaacatccatgatgcagaaagcgcacttcggatggccgccaaagacaaagaatgtgttgccaatcacatgagggctgtggaaaacactttacacaaggtgagagaccagattagcctgtcttggtctgccgcctctcgaaacgactttactctccagttgccgaaattgcacctagaaacatttgcaatggaggggcttaaggggggccctgaggtcgttgcttgtcaggtccgggtccgcgttcagtggtgcgaccattcctcattacagtctcaaatgcccggattgaagcagtcttcgtgcttaagcctcctgtccacatag

SEQ ID NO: 309323 - DNA, 1497 bp, Artificial Sequence
  derived and/or modified sequence
atggccggggccctgtaccccctgtacagccgcagctgtgccctgagcacccagagggacttcctgcaggagcaggtgaacacctttgagctgttcaagctggagatccgcaccctggcccaggccctgagcacagtggaggagaagaagcaggaggaggccaagatgaagaagaagaccttcaagggcctcatccgcatcttcaggaagggcgtgattgctgtgctggccgccaaccggctgaagatcctgggccagagctgtgccagcctcttcacctggatggagagcttcaaggagggcatcggcatgctggtgtgcaccggggagccccaggacaagcacaagttccccaagcaccagaaggagcagctgcgctgcctgcaggccctgtcctggctgaccagcagtgacctgctggccgccatcatcagctccatggccgagctgcaggacgtcatcggcaaggctgaccccaacagccgcatctgtggccacctgctgattggagctgccaagaacagctttgccaagctgatggacaagatcagcctggtgatggagtgcatccccctgcacagcagccgcagcatcacctacgtggagaaggacagcctggtgcagaggctggcccacggcctgcacaaggtgaacaccctggccctgaagtatggcctgcggggccacgtgcccatcaccaagagcacagccagcctgcagaagcagatcctgggcttcacccagaggctgcacgccgctgaggtggagaggaggagcctgcggctggaggtgacagagttcaagaggtctgtgaatgagatgaagaaggagctggacaaggcccagggcctgcagatgcagctgaatgagttcaagcagagcaagctgatcacccatgagaagtttgagagcgcctgtgaggagctgaacaatgccctgctgcgggaggagcaggcccagatgctgctgaatgagcaggcccagcagctgcaggagctgaactacaagctggagctgcacagcagcgaggaggccgacaagaaccagaccctgggggaggccgtgaagagcctgtctgaggccaagatggagctgcggaggaaggaccagagcctgcggcagctgaacagacacctgacccagctggagcaggacaagaggcggctggaggagaacatccatgatgctgagagcgccctgaggatggccgccaaggacaaggaatgtgtggccaaccacatgagagctgtggagaacaccctgcacaaggtgcgggaccagatcagcctgtcctggagcgctgccagcagaaatgacttcaccctgcagctgcccaagctgcacctggagacctttgccatggagggcctgaagggcggccctgaggtggtggcctgccaggtgcgggtgcgggtgcagtggtgtgaccacagcagcctgcagagccagatgcctggcctgaagcagagcagctgcctgagcctgctgagcacctag

SEQ ID NO: 309324 - DNA, 774 bp, Artificial Sequence
  derived and/or modified sequence
tgacacaaggtgaacaccctggccctgaagtatggcctgcggggccacgtgcccatcaccaagagcacagccagcctgcagaagcagatcctgggcttcacccagaggctgcatgctgctgaggtggagcggcgcagcctgcggctggaggtgacagagttcaagaggtctgtgaatgagatgaagaaggagctggacaaggcccagggcctgcagatgcagctgaatgagttcaagcagagcaagctgatcacccatgagaagtttgaaagtgcctgtgaggagctgaacaatgccctgctgcgggaggagcaggcccagatgctgctgaatgagcaggcccagcagctgcaggagctgaactacaagctggagctgcacagcagcgaggaggccgacaagaaccagaccctgggggaggccgtgaagagcctgtctgaggccaagatggagctgcggaggaaggaccagagcctgcggcagctgaacagacacctgacccagctggagcaggacaagaggcggctggaggagaacatccatgatgctgagagcgccctgaggatggccgccaaggacaaggaatgtgtggccaaccacatgagagctgtggagaacaccctgcacaaggtgcgggaccagatcagcctgtcctggagcgctgccagcagaaatgacttcaccctgcagctgcccaagctgcacctggagacctttgccatggagggcctgaagggcggccctgaggtggtggcctgccaggtgcgggtgtag

SEQ ID NO: 309325 - DNA, 1416 bp, Artificial Sequence
  derived and/or modified sequence
tgatttgagctgttcaagctggagatccgcaccctggcccaggccctgagcacagtggaggagaagaagcaggaggaggccaagatgaagaagaagaccttcaagggcctcatccgcatcttcagaaaaggagtgattgctgtgctggccgccaaccggctgaagatcctgggccagagctgtgccagcctcttcacctggatggagagcttcaaggagggcatcggcatgctggtgtgcacaggagagccccaggacaagcacaagttccccaagcaccagaaggagcagctgcgctgcctgcaggccctgtcctggctgaccagcagtgacctgctggccgccatcatcagctccatggccgagctgcaggatgtgattggcaaggctgaccccaacagccgcatctgtggccacctgctgattggagctgccaagaacagctttgccaagctgatggacaagatcagcctggtgatggagtgcatccccctgcacagcagccgcagcatcacctacgtggagaaggacagcctggtgcagaggctggcccacggcctgcacaaggtgaacaccctggccctgaagtatggcctgcggggccacgtgcccatcaccaagagcacagccagcctgcagaagcagatcctgggcttcacccagaggctgcatgctgctgaggtggagcggcgcagcctgcggctggaggtgacagagttcaagaggtctgtgaatgagatgaagaaggagctggacaaggcccagggcctgcagatgcagctgaatgagttcaagcagagcaagctgatcacccatgagaagtttgaaagtgcctgtgaggagctgaacaatgccctgctgcgggaggagcaggcccagatgctgctgaatgagcaggcccagcagctgcaggagctgaactacaagctggagctgcacagcagcgaggaggccgacaagaaccagaccctgggggaggccgtgaagagcctgtctgaggccaagatggagctgcggaggaaggaccagagcctgcggcagctgaacagacacctgacccagctggagcaggacaagaggcggctggaggagaacatccatgatgctgagagcgccctgaggatggccgccaaggacaaggaatgtgtggccaaccacatgagagctgtggagaacaccctgcacaaggtgcgggaccagatcagcctgtcctggagcgctgccagcagaaatgacttcaccctgcagctgcccaagctgcacctggagacctttgccatggagggcctgaagggcggccctgaggtggtggcctgccaggtgcgggtgcgggtgcagtggtgtgaccacagcagcctgcagagccagatgcctggcctgaagcagagcagctgcctgagcctgctgagcacctag

SEQ ID NO: 309326 - DNA, 1497 bp, Artificial Sequence
  derived and/or modified sequence
atggccggcgccctgtaccccctgtacagccggagctgcgccctgtctacccaacgggactttctccaggaacaggtgaatacatttgaattgtttaagctcgagatccgaactctggctcaagccttgagtactgttgaggaaaaaaaacaggaggaagctaagatgaaaaaaaagacattcaaagggctcattagaatctttaggaaaggtgttatcgctgtgctagctgctaacagacttaaaatcctgggacagtcctgtgcttctctctttacatggatggagtcctttaaggaaggcatcgggatgttagtgtgcaccggagagccacaagacaagcacaagtttccaaagcaccagaaagagcagcttcggtgtctgcaggcactttcatggctgacttcctctgacctgctggctgcaataatttccagcatggccgagctacaggacgtgatcggtaaggccgacccgaattcccggatctgcggacacctcctgatcggcgccgctaaaaatagtttcgctaagctgatggataaaatttccctcgttatggagtgcattcctctgcatagttctaggagtataacttacgttgagaaggattcactggtgcagcgcttagcccatgggctgcataaagtgaatacccttgccttgaaatacggcctgcgcggacatgtgcctattaccaagagtacggcttcactgcaaaaacagatccttgggtttacccagcgtttgcatgccgcggaggtagagaggcgcagcttgcgcctggaggttaccgagttcaagaggtcagtgaacgaaatgaagaaggaactggataaagcccaggggctccagatgcagctgaatgaatttaaacaaagtaagttgatcacacacgaaaaattcgaatccgcttgcgaggagctgaataacgccctgttaagagaggaacaagctcagatgttgttgaacgaacaagctcagcagcttcaggagttgaattataagctggaactgcacagctccgaagaggctgacaagaatcagaccctgggtgaggcagtgaagtcactctccgaagcaaagatggaacttcgcaggaaagaccaatctttgagacagctcaaccggcaccttacgcagttagaacaggacaaacgccgtctggaggagaacatccatgatgcggagtccgcgctacgcatggccgcaaaggacaaggagtgcgtggctaatcacatgcgggctgtggagaacacgctccataaagttagagaccagatttccctgagctggagtgctgcctctaggaatgacttcaccctgcagttgcctaagcttcatctggaaacctttgccatggaaggcctgaaagggggacccgaagtggtagcctgtcaggtgcgtgtcagggtgcaatggtgcgatcactcaagcctacagtctcagatgcccggcctgaaacagtcctcttgcctgagcctgcttagcacttag

SEQ ID NO: 309327 - DNA, 774 bp, Artificial Sequence
  derived and/or modified sequence
tgacacaaggtgaacaccctggccctgaagtacggcctgcggggccatgttcccatcacaaaaagcacagccagtctccagaagcagattctaggcttcacacagcgtctccacgccgccgaggtcgagcggagatctttgcggttagaggtgactgagtttaagcggagtgtgaatgagatgaagaaggaactggataaggcccagggtctgcagatgcagctgaatgagttcaagcagtctaaacttatcacccacgagaagttcgagtctgcctgtgaagagttgaataacgctctgctgagagaagagcaggctcagatgctgctcaacgagcaggctcaacaactacaggaactgaattataagttggagctgcatagttccgaagaagccgataaaaaccagactctgggcgaggccgtcaagtctctgtcagaggctaagatggagctccggcgaaaagatcagtctctccgccaactgaaccggcatctcacccagctggagcaggacaagcggcgattggaggagaacattcatgacgccgaatccgccctcaggatggccgccaaggataaggaatgcgtggcaaatcatatgcgcgcagtcgaaaacaccctgcacaaggtccgggaccaaatatcactgagctggagtgccgcatcccgcaacgacttcaccctgcagctgcccaagctccatctggaaacattcgccatggagggcctgaagggtggccccgaagtcgtagcatgccaggtccgagtgtag

SEQ ID NO: 309328 - DNA, 1416 bp, Artificial Sequence
  derived and/or modified sequence
tgattcgagctgttcaagctggagatccggaccctggcccaggccttgagtacggtggaagagaaaaagcaggaggaggctaagatgaaaaaaaagaccttcaagggcctcattcgaatcttcagaaaaggggttatcgccgtgctggctgctaaccggcttaaaattcttggccagagttgtgcctccctatttacctggatggagagcttcaaagagggtattgggatgcttgtttgcaccggtgagccacaagataaacacaagttccccaaacatcagaaggagcaactgcgatgtcttcaggccttgtcttggctcacatcttctgatttactggcggccattatcagctccatggcggaacttcaagacgttataggcaaagccgatcccaactccagaatttgcggccatttgctgatcggagctgctaagaattcctttgctaagctgatggataagatcagtctggttatggaatgcattcccctccattcctcccgctctataacttacgttgagaaagatagcttggtgcaacggcttgctcatgggcttcataaggtaaataccctcgccctgaaatatggcctgagagggcatgtcccaattacaaagtccacggccagccttcagaaacaaatactgggttttacacagcggctgcacgctgcagaagtggaaaggagatccctacggctcgaggtgacagagtttaagagatccgtaaacgagatgaagaaggagctggataaggcccaggggctgcagatgcagctgaacgagttcaaacagtctaaattaataacacacgaaaagtttgaatctgcgtgtgaagagctcaataacgccctgctacgagaggagcaggcccagatgttgctaaatgaacaggcccaacagctacaggagcttaactataagctggaattgcactcctccgaggaggcggacaagaatcagaccctgggggaagcagtgaagtccctttcggaggccaagatggagctgcgccggaaagatcagtctttgcggcaactgaaccgccatctcacacagctggagcaggataaaaggaggttagaggaaaacatacatgatgctgaatcagcactcagaatggcagcgaaggacaaggagtgcgttgcaaaccatatgagggccgtggaaaatacactgcacaaggtgagagaccaaatctcactgtcatggtccgccgccagcagaaatgactttacattacagctgcctaaattgcacctggagacatttgccatggaggggctgaagggggggcccgaggtagtcgcgtgtcaggtgcgagtgagagtccagtggtgtgatcactcatccctccagagtcagatgccggggttaaaacaatcaagctgcctgagtttattatcaacttag

SEQ ID NO: 309329 - DNA, 1497 bp, Artificial Sequence
  derived and/or modified sequence
atggcgggagccctgtatcctctttattcacgctcttgcgccctgagtactcagcgggacttcctgcaggaacaagtaaacacattcgagctgttcaagctggagattcgcacactcgctcaggccttgtcaactgtggaagagaaaaagcaggaagaggctaaaatgaagaagaagacgttcaaggggcttatccgtattttccggaaaggcgtgatagccgtgttagctgcaaatcgtttaaaaatcctggggcagagttgtgcttccttattcacctggatggagtccttcaaagaaggaatagggatgttagtctgcactggagagccccaggataagcacaaattccctaaacatcagaaggagcagctgagatgtttacaggcattaagctggcttacaagcagcgatctgctggccgcaatcatctccagtatggcagagctgcaagatgtgatcggcaaagctgaccccaatagcagaatctgcggtcatctcctgataggtgctgctaaaaactctttcgcaaaattgatggacaagatctccctggtgatggagtgtatccccctgcacagttctcgatccatcacgtacgttgagaaggatagcctggtccagcgattggctcacgggttacataaggtcaatactcttgccctgaagtacggcttacggggtcatgtgcctatcacaaaatcaaccgcatctcttcaaaaacagatattaggtttcacccagcgtctgcacgccgctgaagtcgagagacggtctctccgactcgaggtgacagaatttaagcggtctgtgaacgaaatgaagaaggagctcgacaaggcccaaggtctgcaaatgcagcttaacgaattcaagcagtctaaactgatcacccacgaaaagttcgaaagcgcatgtgaagaactaaacaatgctttgctaagggaggagcaggcccagatgttacttaacgaacaagctcagcaacttcaggagctgaattataagttggagctgcatagcagcgaggaagcagataagaaccaaactctgggtgaagcagttaaatcactttcagaagctaaaatggagttgcgcagaaaggatcagagcctcaggcaactcaaccgacatctgacacagctcgagcaagacaagcgcagacttgaggaaaatatacatgacgccgaaagtgcgctcagaatggcagccaaggataaagaatgcgttgccaaccatatgagagccgtcgagaataccctgcataaagtccgagatcagatttccctgtcctggtccgccgcatcccggaatgacttcaccctgcaactgcccaaacttcacttagagacatttgccatggagggacttaaaggaggaccggaggttgtagcgtgtcaagtcagggtcagagtccagtggtgcgatcattcctccctgcagagccaaatgccaggactcaagcagtcttcttgcctgtctttactaagcacctag

SEQ ID NO: 309330 - DNA, 774 bp, Artificial Sequence
  derived and/or modified sequence
tgacataaagtgaatacccttgcactgaagtacggcctgcgaggacatgtgcccatcaccaagagtactgcctctttgcagaaacagattcttggcttcacccagaggctgcacgcggcagaggtggagagaagatccctgcgcctggaggtgacagagtttaagaggagcgtgaatgagatgaagaaagagctggacaaggcccaaggactgcagatgcagttgaacgagttcaagcaaagcaaactgatcacgcacgaaaagttcgaatccgcctgtgaagaacttaataatgctctgcttcgggaagaacaagcgcagatgctgttaaatgaacaggcccagcagctgcaggagctgaactataagcttgaactccatagttctgaagaagcggacaagaaccagaccctaggcgaggccgttaaatccctttccgaggcaaaaatggagctgcggaggaaagatcagagcctgcggcagttaaacagacacttgacacagctagagcaggacaaaaggcgcctggaggaaaacattcacgatgctgagtctgctctgcggatggccgctaaggataaggagtgcgtcgccaaccacatgcgcgcagtcgaaaatacactgcataaggtgagagaccagatttctctgtcttggtctgccgctagcagaaacgattttactctgcagctgcctaagcttcatctggaaacattcgccatggagggcttgaaagggggaccggaagtggttgcctgtcaggtaagagtttag

SEQ ID NO: 309331 - DNA, 1416 bp, Artificial Sequence
  derived and/or modified sequence
tagtttgagctcttcaagctcgaaataagaaccctcgctcaggcactgagtaccgtcgaagagaagaaacaggaagaagcgaagatgaagaaaaaaacattcaagggactcatcagaatcttccggaagggagtcatcgccgtcctggcggctaatagattgaagatccttggtcaatcatgcgctagcctgttcacctggatggaatccttcaaagagggaatcggaatgctggtctgtaccggtgagccccaagacaaacacaaatttcccaaacaccagaaggagcagctgcgatgcttgcaagcactctcctggttaacctcttcagatctgcttgccgcaattatcagctctatggccgaactgcaggacgttataggaaaagcggaccccaactcacggatttgtggacacctgttaataggagcagctaagaattctttcgccaagcttatggacaaaatttctttggtgatggaatgcatccctctgcatagcagtaggagcattacatatgttgaaaaggattcactggttcagcgtctcgcacatggcttgcacaaagtcaacacgctcgcccttaagtatggtttacgcggtcatgtgcccattacaaaaagtacagcgtctctgcagaaacagatcctgggctttactcagcgccttcatgccgcagaagtcgagagacgatctctcaggctggaagtgacagaatttaagagaagcgtgaacgagatgaagaaagagcttgataaagcacagggactgcagatgcagttaaacgaatttaagcaatctaagcttatcacccatgaaaaatttgagtctgcgtgcgaggagctgaacaacgccttgttacgtgaggagcaggcacagatgctgctgaacgaacaggctcaacagctgcaggagttaaactataaattggagcttcacagcagcgaagaggccgataaaaaccagacactgggagaggcagttaagagcctctcagaggcaaagatggaactcagacgaaaagatcaaagcctgaggcagctgaataggcatttgactcagctggagcaggataaacgtcgcctcgaagaaaatattcacgacgcagaatctgccctgcgaatggcagcaaaagataaagagtgcgtagctaatcatatgcgagcagtggagaatacactgcataaggtccgcgaccagattagtctgtcttggtccgcagctagccgaaacgacttcaccttacagctgccaaagctgcatcttgagacatttgcaatggaggggctgaaaggagggccagaggtggtcgcttgccaggtgcgagtgagggtgcagtggtgtgaccactccagcctgcagagtcagatgccagggctaaagcaaagttcctgtctgagtctgctgagtacctag

SEQ ID NO: 309332 - DNA, 666 bp, Artificial Sequence
  derived and/or modified sequence
atggctgctgctggccccctgtgcacagagcgggtgtctgtgctgagccagcccaacagcggcgtggaggaccccaccccagctgggggccggggccagggcagaagaagaggccgggaggagctggagagcattggagctggccctggggcctctgtgcgcatcctgcctgccctgcggcccggcctgggcggcgtgtggggcgctggggccgccagcctggtgttccaggccggccctggcagctcctggctgggctggccagacctggacctggccctgtaccggggctgggcctgccgctctgagggcacagccaacgtggccttccctggaacagccagccctggcttcagccgggcccggcagacccgggacctgaggaagccagccctgaagacccccagccacacagccagccagctggccgctgaggccggcaaccccagcggcggctgccccagcatgcgctgccagaggagagtgggcgccctggtgcccacctggaagggcggctggagagatggctggagcggcagcggcggccgggccaaggagcgcatcctggccttctccttccctgctgggggcggcatccggggggagcgggtgcaggccgccagcaacacccgcatctgggaggagcccggcagcacccccaactag

SEQ ID NO: 309333 - DNA, 2778 bp, Artificial Sequence
  derived and/or modified sequence
aatttcccaaatctccctgggccggaggccactgtcttctcttcctcctccaccgagtcgtgctctcgccccaacccgcgcgccagacactgccctaaccatcatggaggtggccgaggtggaaagtcctctgaaccccagctgtaagataatgaccttcagaccctccatggaggagttccgggagttcaacaaataccttgcatacatggagtctaaaggagcccatcgtgcgggtcttgcaaaggtgattcctcctaaggagtggaagccaagacagtgctatgatgacattgataatttgctcattccagcaccaattcagcagatggtcacagggcagtcaggactgttcactcagtacaacatccagaaaaaagcgatgactgtgaaggagttcaggcagctggccaacagtggcaaggtgtggatgaatggaacatagctcgcctcaatacagtcttggatgtggttgaagaagagtgtggcatttctattgagggtgtaaataccccatatctctattttggcatgtggaagaccacgtttgcatggcacaccgaagacatggacctctatagcattaattatctccactttggagagcccaagtcttggtatgctatacctccggagcatggaaaacgacttgaaagactagctcaaggttttttcccaagcagctcccaagggtgtgatgcatttcttcgccacaagatgacattgatttctccatcagtattgaagaaatatggtattccctttgacaagataacccaggaggctggagaattcatgatcactttcccatatggctaccatgctggttttaatcatggtttcaactgtgcagaatctacaaattttgctactgtcagatggattgactatggaaaagttgccaaattgtgcacttgcaggaaagacatggtgaagatttcaatggatatctttgtgaggaaatttcagccagacagatatcagctttggaaacaaggaaaggatatatacaccattgatcacacgaagcctactccagcatccacccctgaagtaaaagcatggctgcagaggaggaggaaagtaagaaaagcatcccgaagcttccagtgtgctaggtctacctctaaaaggcctaaggctgatgaggaagaggaagtgtcagatgaagtcgatggggcagaggtccctaaccccgactcagtcacagatgacctcaaggtcagtgaaaagtcagaagcagcagtgaagctgaggaacacagaagcatcttcagaagaagagtcatctgctagcaggatgcaggtggagcagaatttatcagatcatatcaaactctcaggaaacagctgcttaagtacatctgtaacagaagacataaaaactgaggatgacaaagcttatgcatatagaagtgtaccttctatatccagtgaggctgatgattccattccattgtctagtggctatgagaagcccgagaaatcagacccatccgagctttcatggccaaagtcacctgagtcatgctcatcagtggcagagagtaatggtgtgttaacagagggagaagagagtgatgtggagagccatgggaatggccttgaacctggggaaatcccagcggtccccagtggagagagaaatagcttcaaagtccccagtatagcagagggagagaacaaaacctctaagagttggcgccatccacttagcaggcctccagcaagatctccgatgactcttgtgaagcagcaggcgccaagtgatgaagaattgcctgaggttctgtccattgaggaggaagtggaagaaacagagtcttgggcgaaacctctcatccacctttggcagacgaagtcccctaacttcgcagctgagcaagagtataatgcaacagtggccaggatgaagccacactgtgccatctgcactctgctcatgccgtaccacaagccagatagcagcaatgaagaaaatgatgctagatgggagacaaaattagatgaagtcgttacatcggagggaaagactaagcccctcataccagagatgtgttttatttatagtgaagaaaatatagaatattctccacccaatgccttccttgaagaggatggaacaagtctccttatttcctgtgcaaagtgctgcgtacgggttcatgcaagttgttatggtattccttctcatgagatctgtgatggatggctgtgtgcccggtgcaaaagaaatgcgtggacagcagaatgctgtctctgcaatttgagaggaggtgctcttaagcaaacgaagaacaataaaaatgcatcttctgcagacaccgggttaagagggtctctggagcctgcatccagtgttcctacggtcgctgcccggcctccttccatgtcacttgtgcccatgctgctggggtactgatggagcctgatgactggccttatgtggtgaacattacatgctttcgacataaggtcaaccccaacgtgaagtccaaggcttgcgagaaggtcatttccgtgggtcaaacggtcatcacgaagcatcggaacacccggtattacagttgcagagtgatggctgtgacatcgcagaccttctatgaggtcatgtttgatgatggctcctttagcagagacacatttcctgaggatatcgtgagccgagactgtctgaagctgggcccacctgctgagggagaagtcgtccaagtcaagtggcccgatggcaaactctatggagcaaaatattttggatcaaatattgcccacatgtacc

SEQ ID NO: 309334 - protein, 629 aa, Artificial Sequence
  derived and/or modified sequence
MWKTTFAWHTEDMDLYSINYLHFGEPKSWYAIPPEHGKRLERLAQGFFPSSSQGCDAFLRHKMTLISPSVLKKYGIPFDKITQEAGEFMITFPYGYHAGFNHGFNCAESTNFATVRWIDYGKVAKLCTCRKDMVKISMDIFVRKFQPDRYQLWKQGKDIYTIDHTKPTPASTPEVKAWLQRRRKVRKASRSFQCARSTSKRPKADEEEEVSDEVDGAEVPNPDSVTDDLKVSEKSEAAVKLRNTEASSEEESSASRMQVEQNLSDHIKLSGNSCLSTSVTEDIKTEDDKAYAYRSVPSISSEADDSIPLSSGYEKPEKSDPSELSWPKSPESCSSVAESNGVLTEGEESDVESHGNGLEPGEIPAVPSGERNSFKVPSIAEGENKTSKSWRHPLSRPPARSPMTLVKQQAPSDEELPEVLSIEEEVEETESWAKPLIHLWQTKSPNFAAEQEYNATVARMKPHCAICTLLMPYHKPDSSNEENDARWETKLDEVVTSEGKTKPLIPEMCFIYSEENIEYSPPNAFLEEDGTSLLISCAKCCVRVHASCYGIPSHEICDGWLCARCKRNAWTAECCLCNLRGGALKQTKNNKNASSADTGLRGSLEPASSVPTVAARPPSMSLVPMLLGY

SEQ ID NO: 309335 - DNA, 1890 bp, Artificial Sequence
  derived and/or modified sequence
atgtggaaaaccacattcgcctggcacaccgaggatatggatctctattctataaattacctccattttggcgagcctaaatcttggtacgccattccaccagagcacggaaagcggctcgagcgactagctcaagggttctttcccagttcatcacaggggtgtgacgcttttctccggcacaagatgaccctgatctcgcctagcgtgctgaaaaagtacggaattccctttgataagattacccaggaggccggcgagtttatgattacttttccctacggataccacgctgggtttaaccacggtttcaactgtgccgagagtacaaactttgctacagtgcgctggatcgactatgggaaagtcgctaaattatgcacatgtagaaaagacatggtcaagatctctatggatattttcgtcaggaagtttcagcccgatcgctatcagctgtggaaacagggaaaagatatctacaccatagaccacacaaagcctacgccagccagtactccagaggtcaaagcatggctgcagagacggagaaaagtgagaaaggcatcgcgatcattccagtgcgcaagatctacgtcaaagcggccaaaagctgacgaagaagaggaggtttcggacgaagtggatggggccgaggttcccaacccagatagcgtgacagatgatctgaaagttagtgagaaaagcgaggcagctgtgaagctgagaaataccgaggcatcaagtgaggaagaatccagcgcttcccgcatgcaggtcgaacagaacctctccgatcacataaagttgtcaggcaattcttgtctgtcgaccagtgtcacggaagatatcaaaacggaggatgataaagcctacgcataccgatctgtccccagcattagctctgaagctgacgattccatacccctgtcttccggctacgaaaagcccgaaaaaagtgacccaagcgagttatcatggcctaaatcccctgaaagctgtagcagcgtggctgaatcaaatggggtgctaaccgaaggcgaggagagcgacgtggagtcccacggcaacgggcttgaacccggggagatcccagcagtaccctccggagaacgtaactccttcaaggtgccaagcatcgccgagggggaaaacaaaacttcaaagtcgtggaggcacccgctgagccggcctcctgcccggagtccaatgaccctcgtgaaacaacaggccccttcagacgaggagctgcccgaagttctgagtattgaagaggaggtggaagaaaccgagagctgggctaaacccttgattcacctgtggcaaaccaaatctcccaacttcgctgcggagcaagagtataatgccaccgttgcgcggatgaaaccacattgcgcgatctgcaccctccttatgccctatcataagcctgatagtagcaacgaggagaatgacgcccgttgggagactaaattggacgaggtcgtgacctcagaagggaagacgaaaccactgataccggaaatgtgttttatttacagcgaagagaacattgagtattctcctcccaacgcttttctagaggaggatggcaccagcctgctgatatcctgcgcaaagtgctgcgtacgcgtgcacgccagctgctatggtatccctagccatgagatctgtgatggatggctctgcgcccgttgcaagcggaacgcctggacagcagaatgctgcctgtgtaaccttaggggaggagcgctgaagcaaaccaagaataacaagaacgcttcaagcgctgacactggactgcgcggctccttagagcctgccagttcagtgcccaccgtcgctgcgcggcctccaagcatgagcctcgtgccgatgctgttgggctactag

SEQ ID NO: 309336 - DNA, 1890 bp, Artificial Sequence
  derived and/or modified sequence
atgtggaagaccacctttgcctggcacacagaggacatggacctgtacagcatcaactacctgcactttggagagcccaagtcctggtacgccatccccccagagcacggcaagaggctggagcggctggcccagggcttcttccccagcagcagccagggctgtgatgccttcctgcggcacaagatgaccctcatcagccccagcgtgctgaagaagtatggcatcccctttgacaagatcacccaggaggccggggagttcatgatcaccttcccctacggctaccacgccggcttcaaccacggcttcaactgtgccgagagcaccaactttgccaccgtgcgctggattgattatggcaaggtggccaagctgtgcacctgcaggaaggacatggtgaagatctccatggacatctttgtgaggaagttccagcctgaccgctaccagctgtggaagcagggcaaggacatctacaccatcgaccacaccaagcccaccccagccagcaccccagaggtgaaggcctggctgcagaggaggaggaaggtgaggaaggccagccgctccttccagtgtgcccggagcaccagcaagaggcccaaggcagatgaggaggaggaggtgtctgatgaggtggatggagctgaggtgcccaacccagacagcgtgacagatgacctgaaggtgtctgagaagtctgaggccgctgtgaagctgaggaacacagaggccagcagcgaggaggagagcagcgccagcaggatgcaggtggagcagaacctgagtgaccacatcaagctgagcggcaacagctgcctgagcacctctgtgacagaggacatcaagacagaagatgacaaggcctatgcctacagatctgtgcccagcatcagcagcgaggctgatgacagcatccccctgagcagcggctatgagaagccagagaagagtgaccccagcgagctgtcctggcccaagagccctgagagctgcagctctgtggccgagagcaatggagtgctgacagaaggagaggagagtgatgtggagagccacggcaatggcctggagcccggggagatcccagctgtgcccagcggggagagaaattccttcaaggtgcccagcattgctgaaggagagaacaagaccagcaagtcctggaggcaccccctgagccggcccccagcccggagccccatgaccctggtgaagcagcaggcccccagtgatgaggagctgcctgaggtgctgagcattgaggaggaggtggaggagacagagagctgggccaagcccctcatccacctgtggcagaccaagagccccaactttgctgctgagcaggagtacaatgccaccgtggccaggatgaagccccactgtgccatctgcaccctgctgatgccctaccacaagccagacagcagcaatgaggagaatgatgcccgctgggagaccaagctggatgaggtggtgaccagcgagggcaagaccaagcccctcatccctgagatgtgcttcatctacagtgaagaaaatattgagtacagccccccaaatgccttcctggaggaggatggcaccagcctgctgatcagctgtgccaagtgctgcgtgcgggtgcacgccagctgctacggcatccccagccatgagatctgtgatggctggctgtgtgcccgctgcaagagaaatgcctggacagctgagtgctgcctgtgcaacctgcggggcggggccctgaagcagaccaagaacaacaagaatgccagcagcgctgacaccggcctgcggggcagcctggagcccgccagctctgtgcccaccgtggccgcccggcccccatccatgagcctggtgcccatgctgctgggctactag

SEQ ID NO: 309337 - DNA, 1890 bp, Artificial Sequence
  derived and/or modified sequence
atgtggaagaccaccttcgcctggcacaccgaggacatggacctgtacagcatcaactacttgcacttcggcgaacccaaaagctggtacgccatcccaccggaacatggcaaaaggcttgagcggttggcgcaggggtttttcccttcatcaagccagggttgcgatgcctttctgaggcacaaaatgaccttaatctctccttctgtgcttaaaaagtatggtattccgttcgacaagataactcaggaagccggcgagtttatgatcacctttccgtacggatatcatgccgggttcaatcacgggtttaactgcgccgaaagtaccaattttgcgaccgtgcgttggatagattacggcaaggtggccaagctttgtacctgcaggaaagacatggtgaagatctctatggatatctttgtacggaagttccaacctgataggtatcaactctggaaacaggggaaagacatttatacaatcgatcataccaaacctaccccagcatccacccctgaggtgaaggcctggctgcagcgaaggagaaaggtaaggaaggcatccagatcctttcagtgcgccagaagcactagtaagcgcccaaaagctgacgaggaagaagaggttagcgacgaggtggacggcgcagaggtgccgaatcccgattccgtgacagacgatctaaaggtgtctgagaagagtgaggcagcagtaaagctgagaaatacagaggcgagcagcgaagaagaatcatccgccagccgcatgcaggtcgagcagaacctcagtgatcacatcaaattaagtggcaattcctgcctgtcaactagcgtcaccgaggatataaagactgaggatgataaggcatacgcatataggagcgtgcccagtatctcctcagaggccgatgattccattcccctttcgagtggatatgaaaaacccgagaagtccgacccatctgaactgtcttggcctaagagtccggaatcatgttcatctgtggcggaatccaatggtgtgctaactgaaggggaggagtcagatgtggagtcccacggaaacggactggaaccaggagagattcctgctgtacccagtggagagcgaaatagtttcaaagtgccaagcatcgcagagggtgagaacaagacctctaagagctggcggcacccccttagccggccccccgcaagatctcctatgactcttgtgaaacagcaggctccctcggacgaggaactcccagaggtgttgagtatagaagaagaagtcgaggaaaccgagagttgggctaagcccttaatccatctctggcaaaccaagtcacctaacttcgcggctgagcaggagtacaacgcgaccgtcgcaaggatgaaacctcactgtgcgatttgcactctgctcatgccctatcacaagccagactcttctaatgaggagaacgacgctagatgggagacgaagcttgatgaggttgtaacttcagagggtaagaccaaaccgctaataccagagatgtgctttatctactcggaggagaacatcgagtacagtccgcccaatgcgtttctggaggaggatggaacctccctgctgatttcctgcgcaaagtgttgcgtcagggtgcacgcctcgtgttacggaatcccgtcacatgagatctgcgatggatggctgtgcgccagatgcaaacgaaacgcctggacagccgagtgttgtttgtgtaacctcagggggggagctctgaagcagactaagaacaataagaacgcaagctccgcggacaccgggttgagggggtccttggagcctgccagctccgttccgaccgtcgctgctcgcccaccaagcatgtccctggtcccaatgttgcttgggtattag

SEQ ID NO: 309338 - DNA, 1890 bp, Artificial Sequence
  derived and/or modified sequence
atgtggaaaactacttttgcctggcacacggaagatatggacttatatagtatcaactacctgcattttggtgagccgaagagctggtacgcgataccacccgaacacggtaagcggctcgagagactggcccaaggcttctttccgtcgtccagtcaggggtgcgatgccttcctgagacacaaaatgacactgatcagtcccagcgtgctgaagaaatatggaattccttttgacaagatcacccaggaagccggtgaattcatgatcaccttcccctatggttaccatgcgggttttaatcacggatttaattgcgctgagtctacaaatttcgccacagtgcggtggattgattacggaaaggtcgccaagttgtgcacttgtaggaaggacatggtgaaaatcagtatggatatttttgtgcgcaaatttcagcccgacagataccagctatggaagcagggtaaagacatatacactattgatcatactaaaccaactcctgcatctacgcccgaagtcaaggcctggttgcagcggcgtcgaaaggttcggaaggcttctcgctcgtttcagtgcgcccgtagcacatcaaaaaggccaaaggctgatgaggaggaggaagtgagcgacgaggtcgatggcgctgaagttccaaaccccgattctgtgactgacgaccttaaagtcagtgagaaatctgaagccgcagtgaagctgcggaacactgaggcatcttcggaagaggaaagctcagcaagccgcatgcaggtggaacaaaacctgtctgaccacattaagctgtcaggcaattcctgtctcagcacttccgtcacggaggacatcaagaccgaagatgacaaggcttacgcctaccgttccgtaccaagcatcagtagtgaagctgatgactccattccgctgtcttccggatacgagaaacctgagaagagtgacccaagtgagctgtcatggcccaaaagcccggaatcttgttcctccgtcgccgaaagtaatggcgtgctgaccgagggtgaagaaagtgacgtggaaagtcatggaaacggacttgagcctggagagatcccagccgttcctagcggtgaacgcaactctttcaaagtgccctctatcgccgagggggaaaacaaaaccagcaagtcatggcgtcatcccttatctaggcctcccgctcgctccccaatgacactggtgaagcagcaagctccatcagacgaggagctgccagaggtcctgagtatcgaggaggaggtcgaagagactgaaagttgggccaaaccccttattcatctgtggcagacaaagagcccaaatttcgcagccgagcaggagtacaatgctaccgtggcacgtatgaagccgcactgcgctatttgcaccctcttaatgccctaccacaaaccagactctagcaatgaagaaaacgacgcccgttgggagacgaaactggacgaagtcgtaacctcagagggcaagactaaaccgcttatcccagagatgtgtttcatctattccgaagagaatatcgaatacagtcccccaaacgcttttctagaggaagacggtacttccctactgatctcatgtgctaagtgttgtgtcagagtgcatgcaagttgttacggcatacctagtcatgaaatctgtgatggatggctttgcgcgagatgcaaacggaatgcgtggacagcagagtgctgcctctgtaaccttcgcggaggagctctcaagcagaccaaaaataataagaacgcctcctccgccgacacgggactccgtggaagcttggagccggcttccagtgttccaactgtggccgcacgtcccccaagcatgtcactcgttccaatgctcctggggtactag

SEQ ID NO: 309339 - DNA, 1890 bp, Artificial Sequence
  derived and/or modified sequence
atgtggaagaccaccttcgcctggcacaccgaggacatggacctgtacagcatcaactacctgcacttcggcgagcccaagagctggtacgccatcccccccgagcacggcaagagactggagagactggcccagggcttcttccccagcagcagccagggctgcgacgccttcctgagacacaagatgaccctgatcagccccagcgtgctgaagaagtacggcatccccttcgacaagatcacccaggaggccggcgagttcatgatcaccttcccctacggctaccacgccggcttcaaccacggcttcaactgcgccgagagcaccaacttcgccaccgtgagatggatcgactacggcaaggtggccaagctgtgcacctgcagaaaggacatggtgaagatcagcatggacatcttcgtgagaaagttccagcccgacagataccagctgtggaagcagggcaaggacatctacaccatcgaccacaccaagcccacccccgccagcacccccgaggtgaaggcctggctgcagagaagaagaaaggtgagaaaggccagcagaagcttccagtgcgccagaagcaccagcaagagacccaaggccgacgaggaggaggaggtgagcgacgaggtggacggcgccgaggtgcccaaccccgacagcgtgaccgacgacctgaaggtgagcgagaagagcgaggccgccgtgaagctgagaaacaccgaggccagcagcgaggaggagagcagcgccagcagaatgcaggtggagcagaacctgagcgaccacatcaagctgagcggcaacagctgcctgagcaccagcgtgaccgaggacatcaagaccgaggacgacaaggcctacgcctacagaagcgtgcccagcatcagcagcgaggccgacgacagcatccccctgagcagcggctacgagaagcccgagaagagcgaccccagcgagctgagctggcccaagagccccgagagctgcagcagcgtggccgagagcaacggcgtgctgaccgagggcgaggagagcgacgtggagagccacggcaacggcctggagcccggcgagatccccgccgtgcccagcggcgagagaaacagcttcaaggtgcccagcatcgccgagggcgagaacaagaccagcaagagctggagacaccccctgagcagaccccccgccagaagccccatgaccctggtgaagcagcaggcccccagcgacgaggagctgcccgaggtgctgagcatcgaggaggaggtggaggagaccgagagctgggccaagcccctgatccacctgtggcagaccaagagccccaacttcgccgccgagcaggagtacaacgccaccgtggccagaatgaagccccactgcgccatctgcaccctgctgatgccctaccacaagcccgacagcagcaacgaggagaacgacgccagatgggagaccaagctggacgaggtggtgaccagcgagggcaagaccaagcccctgatccccgagatgtgcttcatctacagcgaggagaacatcgagtacagcccccccaacgccttcctggaggaggacggcaccagcctgctgatcagctgcgccaagtgctgcgtgagagtgcacgccagctgctacggcatccccagccacgagatctgcgacggctggctgtgcgccagatgcaagagaaacgcctggaccgccgagtgctgcctgtgcaacctgagaggcggcgccctgaagcagaccaagaacaacaagaacgccagcagcgccgacaccggcctgagaggcagcctggagcccgccagcagcgtgcccaccgtggccgccagaccccccagcatgagcctggtgcccatgctgctgggctactag

SEQ ID NO: 309340 - protein, 354 aa, Artificial Sequence
  derived and/or modified sequence
PDSSNEENDARWETKLDEVVTSEGKTKPLIPEMCFIYSEENIEYSPPNAFLEEDGTSLLISCAKCCVRVHASCYGIPSHEICDGWLCARCKRNAWTAECCLCNLRGGALKQTKNNKWAHVMCAVAVPEVRFTNVPERTQIDVGRIPLQRLKLKCIFCRHRVKRVSGACIQCSYGRCPASFHVTCAHAAGVLMEPDDWPYVVNITCFRHKVNPNVFTAQSKHSKNESCIATTTSAAAAGATILCELGHKSKACEKVISVGQTVITKHRNTRYYSCRVMAVTSQTFYEVMFDDGSFSRDTFPEDIVSRDCLKLGPPAEGEVVQVKWPDGKLYGAKYFGSNIAHMYQVEFEDGSQIA

SEQ ID NO: 309341 - DNA, 1064 bp, Artificial Sequence
  derived and/or modified sequence
ccagatagcagcaatgaagaaaatgatgctagatgggagacaaaattagatgaagtcgttacatcggagggaaagactaagcccctcataccagagatgtgttttatttatagtgaagaaaatatagaatattctccacccaatgccttccttgaagaggatggaacaagtctccttatttcctgtgcaaagtgctgcgtacgggttcatgcaagttgttatggtattccttctcatgagatctgtgatggatggctgtgtgcccggtgcaaaagaaatgcgtggacagcagaatgctgtctctgcaatttgagaggaggtgctcttaagcaaacgaagaacaataagtgggcccatgtcatgtgcgccgttgcggtcccagaagttcgattcactaatgtcccagaaaggacacaaatagatgtaggcagaatacctttacagaggttaaaattgaaatgcatcttctgcagacaccgggttaagagggtctctggagcctgcatccagtgttcctacggtcgctgcccggcctccttccatgtcacttgtgcccatgctgctggggtactgatggagcctgatgactggccttatgtggtgaacattacatgctttcgacataaggtcaaccccaacgtgttcacagcacagagtaagcactcaaaaaatgaaagttgtattgctactactacttctgctgctgctgctggtgctacaatcttatgtgaactgggccacaagtccaaggcttgcgagaaggtcatttccgtgggtcaaacggtcatcacgaagcatcggaacacccggtattacagttgcagagtgatggctgtgacatcgcagaccttctatgaggtcatgtttgatgatggctcctttagcagagacacatttcctgaggatatcgtgagccgagactgtctgaagctgggcccacctgctgagggagaagtcgtccaagtcaagtggcccgatggcaaactctatggagcaaaatattttggatcaaatattgcccacatgtaccaggttgagtttgaagatggatcccagatagcaat

SEQ ID NO: 309342 - DNA, 1065 bp, Artificial Sequence
  derived and/or modified sequence
ccagactcatccaatgaagagaacgacgcgcggtgggagacaaagctggatgaggttgtcacaagtgaaggcaaaacaaagccattgattcctgagatgtgtttcatttacagtgaggagaacatcgaatacagcccaccaaatgcgtttcttgaagaggatgggacatccttactcatctcatgtgctaagtgttgcgttcgggtgcatgcctcctgctatggcatacccagccacgaaatatgcgatggatggctctgtgcaagatgtaaacgaaacgcttggaccgcagagtgttgcttgtgcaacctacgcggtggggcccttaaacagacaaagaataacaaatgggcccatgtcatgtgtgcagtcgcagtgcccgaagtccgcttcactaacgtcccagagcgcactcaaattgacgtgggccgcatcccactccagcgattgaagttgaagtgtatattttgtcggcaccgggtgaaacgagtctcaggagcctgtatccagtgttcttacgggcgatgtcccgcctcctttcatgtgacttgtgcacatgccgccggagttctcatggagcccgacgattggccttacgtagtgaatatcacgtgtttccggcataaggtgaatccaaacgtgtttacagcccagtcgaagcactctaaaaatgaaagctgcattgccactaccactagcgcagccgcagctggcgcaactattctctgtgaattgggacacaagtctaaggcatgtgaaaaagtgatcagcgtgggacagacggtcatcaccaagcacaggaatacaaggtactattcatgtcgtgttatggccgtgacctcccagaccttttacgaagtgatgttcgatgatggcagcttctcccgcgacacattccccgaggatattgtatcccgagattgcttgaagttgggacctcctgcagaaggcgaggtggtccaggttaaatggcccgatggcaaactctatggcgccaagtacttcggaagtaatattgcccatatgtaccaggtagaatttgaagacggatctcagattgcgtag

SEQ ID NO: 309343 - DNA, 1065 bp, Artificial Sequence
  derived and/or modified sequence
ccagacagcagcaatgaagaaaatgatgcccgctgggagaccaagctggatgaggtggtgaccagcgagggcaagaccaagcccctcatccctgagatgtgcttcatctacagcgaggagaacatcgagtacagccccccaaatgccttcctggaggaggatggcaccagcctgctgatcagctgtgccaagtgctgcgtgcgggtgcacgccagctgctacggcatccccagccatgagatctgtgatggctggctgtgtgcccgctgcaagagaaatgcctggacagctgagtgctgcctgtgcaacctgcggggcggggccctgaagcagaccaagaacaacaagtgggcccacgtgatgtgtgctgtggccgtgcctgaggtgcgcttcaccaacgtgcctgagaggacccagattgatgtgggccgcatccccctgcagaggctgaagctgaagtgcatcttctgccgccaccgggtgaagagggtgtctggggcctgcatccagtgcagctatggccgctgcccagccagcttccacgtgacctgtgcccatgctgctggggtgctgatggagccagatgactggccctacgtggtgaacatcacctgcttccgccacaaggtgaaccccaacgtgttcaccgcccagagcaagcacagcaagaatgaaagctgcatcgccaccaccaccagcgctgctgctgctggggccaccatcctgtgtgagctgggccacaagagcaaggcctgtgagaaggtgatctctgtgggccagaccgtcatcaccaagcacaggaacacccgctactacagctgccgggtgatggctgtgaccagccagaccttctatgaggtgatgtttgatgatggcagcttcagccgggacaccttcccagaagatattgtgtcccgggactgcctgaagctgggccccccagctgagggggaggtggtgcaggtgaagtggccagatggcaagctgtatggagccaagtacttcggcagcaacatcgcccacatgtaccaggtggagtttgaagatggcagccagatcgcctag

SEQ ID NO: 309344 - DNA, 1065 bp, Artificial Sequence
  derived and/or modified sequence
cccgacagcagcaacgaggagaacgacgcccggtgggagaccaagctggatgaggtggtcacatcagaagggaaaacgaagccacttattccggagatgtgcttcatatatagcgaagaaaacattgagtacagcccacctaatgcctttttggaagaagatggtacttcactcctgatttcttgtgccaagtgctgcgtgagggtgcatgccagctgctacggaattccatcccacgagatttgtgacgggtggttgtgcgccagatgcaaacggaatgcctggactgctgagtgctgcttatgtaacctgcgtggaggagctctgaaacaaaccaaaaataacaaatgggctcatgtgatgtgtgccgttgcggttccagaggtgcggtttactaacgtgcccgagcgcactcaaattgatgtgggtagaataccactgcagaggctcaagctgaaatgtattttctgcagacacagagtaaagagggtctccggcgcctgcattcaatgctcctacgggcgctgtcccgctagcttccatgtcacatgcgctcacgccgccggtgtcctcatggagccagacgactggccctatgtggttaacatcacttgctttcgtcacaaagtgaaccctaatgtgtttaccgctcaatcaaagcattccaagaatgaatcctgtattgctactaccaccagcgcagctgccgccggcgctaccatcttatgtgaacttggccacaaatcaaaggcttgcgaaaaagtgatatcagtgggtcagacggttataaccaaacaccgaaacacccggtactacagttgccgcgtgatggcagtgacatcccagaccttctatgaggtgatgttcgacgacgggagcttctctagagacacttttcctgaagacatcgtgtccagggattgtctaaagctcggccccccagctgagggagaagtcgtacaggtgaaatggcccgatggaaaactgtatggcgcgaaatacttcgggagcaatatcgcccatatgtaccaagtcgagtttgaagatggaagccagatcgcttag

SEQ ID NO: 309345 - DNA, 1065 bp, Artificial Sequence
  derived and/or modified sequence
cccgattcttctaatgaggaaaatgacgccagatgggaaacaaagctcgatgaggtggtcacttctgaaggtaaaactaagccacttatccctgaaatgtgctttatatacagcgaggagaatatcgagtacagccctccgaatgccttccttgaggaagatggaacctctctgcttattagttgcgctaaatgttgcgtgcgggttcacgcctcatgctacggcataccttcgcacgagatctgcgacggctggctctgcgcacgatgtaagaggaacgcttggacagccgaatgttgtctgtgtaaccttcgcggtggagccctgaaacaaactaagaacaacaagtgggcacacgtgatgtgtgctgtcgctgtgcccgaggtgcggttcacaaacgtccccgagagaacacagatagatgtgggcaggatcccccttcagcgtttgaagttgaaatgtattttctgtcggcatcgtgtgaaacgcgtgagtggagcctgcatccagtgctcttacggccgatgtccagccagcttccatgttacctgcgcccacgctgcaggtgtgctcatggagcccgacgactggccatacgttgtaaacatcacctgctttcgccacaaagtcaatccaaacgtgttcacagcccagtctaaacactctaaaaatgagtcttgtatcgctacaacaacctccgcagcagccgctggagctactatcctatgcgagctgggccacaagtctaaggcttgcgaaaaggtcatctccgtgggacaaacagtgatcaccaaacatagaaacactaggtactactcctgcagggtcatggccgtgacgtcccagacattctatgaggttatgttcgatgatgggtccttctcacgggacacttttccagaggacatcgtgagtcgagattgtctcaaacttggcccacccgctgaaggagaagtggtccaggtcaaatggcctgacggcaagctgtacggagctaaatatttcggatccaatattgctcacatgtaccaggtggagttcgaggacggcagccagattgcttag

SEQ ID NO: 309346 - DNA, 1065 bp, Artificial Sequence
  derived and/or modified sequence
cccgacagcagcaacgaggagaacgacgccagatgggagaccaagctggacgaggtggtgaccagcgagggcaagaccaagcccctgatccccgagatgtgcttcatctacagcgaggagaacatcgagtacagcccccccaacgccttcctggaggaggacggcaccagcctgctgatcagctgcgccaagtgctgcgtgagagtgcacgccagctgctacggcatccccagccacgagatctgcgacggctggctgtgcgccagatgcaagagaaacgcctggaccgccgagtgctgcctgtgcaacctgagaggcggcgccctgaagcagaccaagaacaacaagtgggcccacgtgatgtgcgccgtggccgtgcccgaggtgagattcaccaacgtgcccgagagaacccagatcgacgtgggcagaatccccctgcagagactgaagctgaagtgcatcttctgcagacacagagtgaagagagtgagcggcgcctgcatccagtgcagctacggcagatgccccgccagcttccacgtgacctgcgcccacgccgccggcgtgctgatggagcccgacgactggccctacgtggtgaacatcacctgcttcagacacaaggtgaaccccaacgtgttcaccgcccagagcaagcacagcaagaacgagagctgcatcgccaccaccaccagcgccgccgccgccggcgccaccatcctgtgcgagctgggccacaagagcaaggcctgcgagaaggtgatcagcgtgggccagaccgtgatcaccaagcacagaaacaccagatactacagctgcagagtgatggccgtgaccagccagaccttctacgaggtgatgttcgacgacggcagcttcagcagagacaccttccccgaggacatcgtgagcagagactgcctgaagctgggcccccccgccgagggcgaggtggtgcaggtgaagtggcccgacggcaagctgtacggcgccaagtacttcggcagcaacatcgcccacatgtaccaggtggagttcgaggacggcagccagatcgcctag

SEQ ID NO: 309347 - protein, 276 aa, Artificial Sequence
  derived and/or modified sequence
MLSACNLLKNTINDPKALTSKDMRFCLNTLQHEWFRVSSQKSAIPAMVGDYIAAFEAISPDVLRYVINLADGNGNTALHYSVSHSNFEIVKLLLDADVCNVDHQNKAGYTPIMLAALAAVEAEKDMRIVEELFGCGDVNAKASQAGQTALMLAVSHGRIDMVKGLLACGADVNIQDDEGSTALMCASEHGHVEIVKLLLAQPGCNGHLEDNDGSTALSIALEAGHKDIAVLLYAHVNFAKAQSPVSVVHLAFVNRLKSTRLVDPLPPGIDGRQILC

SEQ ID NO: 309348 - DNA, 831 bp, Artificial Sequence
  derived and/or modified sequence
atgctgagcgcctgcaacctgctgaagaacaccatcaacgaccccaaggccctgaccagcaaggacatgagattctgcctgaacaccctgcagcacgagtggttcagagtgagcagccagaagagcgccatccccgccatggtgggcgactacatcgccgccttcgaggccatcagccccgacgtgctgagatacgtgatcaacctggccgacggcaacggcaacaccgccctgcactacagcgtgagccacagcaacttcgagatcgtgaagctgctgctggacgccgacgtgtgcaacgtggaccaccagaacaaggccggctacacccccatcatgctggccgccctggccgccgtggaggccgagaaggacatgagaatcgtggaggagctgttcggctgcggcgacgtgaacgccaaggccagccaggccggccagaccgccctgatgctggccgtgagccacggcagaatcgacatggtgaagggcctgctggcctgcggcgccgacgtgaacatccaggacgacgagggcagcaccgccctgatgtgcgccagcgagcacggccacgtggagatcgtgaagctgctgctggcccagcccggctgcaacggccacctggaggacaacgacggcagcaccgccctgagcatcgccctggaggccggccacaaggacatcgccgtgctgctgtacgcccacgtgaacttcgccaaggcccagagccccgtgagcgtggtgcacctggccttcgtgaacagactgaagagcaccagactggtggaccccctgccccccggcatcgacggcagacagatcctgtgctag

SEQ ID NO: 309349 - DNA, 831 bp, Artificial Sequence
  derived and/or modified sequence
atgctcagcgcatgtaacttgctaaaaaacaccatcaacgaccctaaagccctgacctccaaggatatgagattttgtctgaataccctgcagcacgagtggtttcgcgtctcttctcagaaatcagcaatccctgctatggtgggggactacattgcagccttcgaggccattagccctgacgtgctgcgatacgtaatcaacttggcggatggtaacggaaataccgccctgcactactcagtgtcccatagcaacttcgagattgtgaaattgcttctggacgcagatgtttgtaacgttgaccatcagaataaggctggttatacccctatcatgttagccgctcttgccgcagtggaggctgagaaggacatgcggatcgtggaggagttgttcgggtgcggcgacgttaatgccaaggccagccaggcaggacaaacagctttaatgcttgctgtgtcccacggacggattgatatggtcaaggggctgttagcttgtggcgccgacgttaacattcaggatgatgaaggaagcacagcactgatgtgcgcaagcgagcacgggcatgtggagattgttaaactgctgctcgcacagcctggctgtaatgggcacctagaagataacgacgggtccacagcactctcaattgctcttgaggccggccacaaggacatcgcagtgctcctttacgcccacgttaacttcgccaaggcccagagcccggtatccgttgtgcacctcgctttcgtcaaccgactgaaaagtactagactggtcgacccactgcccccaggcatcgatgggcgccagatcttgtgttag

SEQ ID NO: 309350 - DNA, 831 bp, Artificial Sequence
  derived and/or modified sequence
atgctgagcgcctgcaacctgctgaagaacaccatcaatgaccccaaggccctgaccagcaaggacatgaggttctgcctgaacaccctgcagcacgagtggttccgggtgagcagccagaagagcgccatcccagccatggtgggggactacatcgccgcctttgaggccatcagcccagatgtgctgcgctacgtgatcaacctggctgatggaaatggaaacacagccctgcactacagcgtgagccacagcaactttgaaattgtgaagctgctgctggatgctgatgtgtgcaatgtggaccaccagaacaaggccggctacacccccatcatgctggccgccctggccgctgtggaggccgagaaggacatgagaattgtggaggagctgtttggctgtggagatgtgaatgccaaggccagccaggccggccagacagccctgatgctggccgtgagccacggcagaattgacatggtgaagggcctgctggcctgtggggctgatgtgaacatccaggatgatgagggcagcacagccctgatgtgtgccagcgagcacggccacgtggagatcgtgaagctgctgctggcccagcccggctgcaatggccacctggaggacaatgatggcagcacagccctgagcatcgccctggaggccggccacaaggacattgctgtgctgctgtatgcccacgtgaactttgccaaggcccagagccctgtgtctgtggtgcacctggcctttgtgaaccggctgaagagcacccggctggtggaccccctgcccccaggcattgatggccggcagatcctgtgctag

SEQ ID NO: 309351 - DNA, 2268 bp, Artificial Sequence
  derived and/or modified sequence
aggtatgaattaagtgaaaagatgttgtctgcatgcaacttactgaaaaatactataaatgaccccaaagctttgaccagcaaagatatgaggttctgtctgaacaccctccagcacgagtggttccgcgtgtccagtcagaagtcagccattccagccatggtgggggactacatagctgcttttgaggccatttccccagatgtcctccgctatgtcatcaacttggcagacggcaacggcaacacagccctccattacagcgtgtcccactccaacttcgagattgtgaagctgctgttagatgccgatgtgtgtaatgtggatcaccagaacaaggcaggctacacccccatcatgttggcggccctcgccgctgtggaagcagagaaggacatgcggattgtggaagaactcttcggctgtggggatgtgaatgccaaagctagtcaggcgggacagacggccctcatgctggcggtcagtcacggacggatagacatggtgaagggccttctggcctgtggggctgatgtcaacatccaggatgacgagggctccacggccctcatgtgtgccagcgagcacggacacgtggagattgtcaagctgctgctggcccagcccggctgcaacggtcacctagaggacaacgatggcagcactgcgctctcaatcgccctggaagcaggacacaaggacatcgctgttcttctgtatgcccatgtcaactttgcaaaagcccagtctccggtcagtgttgtgcatttggcatttgtaaataggctgaaatccaccagactggtggacccccttcctccaggaattgacgggagacagattttatgttgattcagaaaatggaagttttagtctggagcttaagagttcatcctttccgcctccaccccgcaaaaagcaggagaactaatgttttagcagaggctggaccttgcttgtccttgcaagacatatgctcacagcttcccatagaggttttgattctgtgcagaattatccagatagcagcccctgagcccatggggatatttcgccatggttctggcattgttcctgaagcagatggcaggcagcctgtagtccacagttcactctgagtgggaaggtgacttcccaggacagccggacatagcactgctgagcccagctggccttggagctgtggacacctgttccctgttctcagccagagctctcctggctcgggctcacagctgcttgttgcctgtggtgggccaagatcctatgtcacagggtacacatctgcctgaggtcacttattaacccccagtttttttcctttcctggtctctagggcacccctaggcttggaaggaagacgtctcctggccccacccaccgaggttcatttgattgattgtatgcaaatagccctttatttacatgccactattaagctgctaattgttcctgttggggtgacagatactgaatgtatacgtattgtgcctgagctcaccagcaaacagaagcatcaagcccaggggtaaaggctgaagctttcacagtgcagagactgctagcctgggcacacacacctcctttctggccgtcttctgtgtagggcacactttaacccagtctctgttgctgttgagtctctgctccgttttgtacagtcacagggaattctgatctgaaggggcaccttctgttcactcccacaaagtggtgtctggttctcactgagacgttttaagatttttccacaaatatttatatgtactaaatgtggaaccattagaaagttcttccaaaatctcattccagcatagttttggatttttcttttgtcttattttaaaataaggaagtcgagatgactttgatcattggtaacttgggcctgggccagacaaagtataaaacttacaaaagaatattctcatttggtcttaactaggtagatgtaatatatgactttttataaaaagggtatctatatgaacttgacacagtattttcagcttttgtattccatactaaagccatgaagaactacacgtaacatcatcatttgtattaattgcacaactccaatgctaaaggttggattgtgttagaggaatcggctctgtatttgcctctagagaaacacagtgttctctttgtatttatggattcctttttaccgtgtcacatttactttggtcctctatgtatttaaatgtttgaagtgccttagactcttgccatattttcaaaataaaattccattaagctctt

SEQ ID NO: 309352 - DNA, 831 bp, Artificial Sequence
  derived and/or modified sequence
atgctgagcgcctgcaacctgctgaagaacaccatcaacgaccccaaagcattgacctccaaagacatgaggttctgcctgaatacgcttcagcacgaatggttcagggtttcctctcagaagtctgctatccctgcaatggtaggggactacattgccgccttcgaagcaatctccccagatgtgctgcgttatgtaattaatctggcagatggcaacggcaacactgctctccattacagcgtgtcgcactcaaacttcgagattgtgaagcttctgctggatgccgacgtttgcaacgtggaccatcaaaacaaggccggctatactcctatcatgctagcggcactggccgctgtagaggcggaaaaggacatgcgaattgtagaggagctttttggatgcggtgacgttaatgcaaaagcttcacaggccgggcagacagcgttaatgcttgccgtgtcgcacggcagaatcgatatggttaaggggctcctggcatgtggggccgacgtgaacatacaagacgatgagggctccacagccctaatgtgtgctagtgagcacggccatgttgaaattgttaagttgctcttggcacagcccggatgcaatggccatctggaggacaatgacgggtcgactgcgctgtccatcgccctggaggccggacacaaggatatcgccgtgctgctttatgcccatgttaattttgccaaagcccaatctcctgtgagcgtggtccacctggcctttgttaatcgcttgaagagcactcgcctggtggatccattgccccccggtatagatggtcggcagattctttgctag

SEQ ID NO: 309353 - DNA, 831 bp, Artificial Sequence
  derived and/or modified sequence
atgctctcagcgtgtaatctgctgaagaataccattaatgatcctaaggccctcacatctaaagacatgaggttttgcctgaacactctccagcacgagtggttccgggtcagcagccaaaaaagtgctatcccagctatggttggcgactacatcgccgcatttgaagccattagcccagacgtccttagatacgtgatcaacctagcggatggcaacggcaacacggcgctgcattacagcgtgtctcattctaacttcgaaattgtgaagctccttcttgacgccgatgtgtgtaacgtcgatcaccagaacaaggccggatacaccccgatcatgctggccgcattggccgcagtggaagctgagaaggacatgaggatcgtggaagagctcttcgggtgcggggatgtgaacgctaaagcctcgcaggctggccagacagcactaatgttggctgtgtctcacggcaggatcgacatggtgaaagggctcctggcttgtggagccgatgtaaatatccaggatgacgaaggcagcacagctcttatgtgtgcctccgagcatggacacgtggaaattgtgaaactgttgttagcccagcctggatgcaacggccatctggaggataatgacggctcaacagctctttccatcgcgttggaggctggccacaaggatatcgctgttctcctttacgcccatgtcaacttcgcaaaggcacagtctcctgttagcgtagtgcatcttgcttttgtgaatcggttgaaaagcaccaggttggtggacccactcccacctggcatagacggacggcagattttgtgttag

SEQ ID NO: 309354 - protein, 978 aa, Artificial Sequence
  derived and/or modified sequence
MAHTTKVNGSASGKAGDILSGDQDKEQKDPYFVETPYGYQLDLDFLKYVDDIQKGNTIKRLNIQKRRKPSVPCPEPRTTSGQQGIWTSTESLSSSNSDDNKQCPNFLIARSQVTSTPISKPPPPLETSLPFLTIPENRQLPPPSPQLPKHNLHVTKTLMETRRRLEQERATMQMTPGEFRRPRLASFGGMGTTSSLPSFVGSGNHNPAKHQLQNGYQGNGDYGSYAPAAPTTSSMGSSIRHSPLSSGISTPVTNVSPMHLQHIREQMAIALKRLKELEEQVRTIPVLQVKISVLQEEKRQLVSQLKNQRAASQINVCGVRKRSYSAGNASQLEQLSRARRSGGELYIDYEEEEMETVEQSTQRIKEFRQLTADMQALEQKIQDSSCEASSELRENGECRSVAVGAEENMNDIVVYHRGSRSCKDAAVGTLVEMRNCGVSVTEAMLGVMTEADKEIELQQQTIESLKEKIYRLEVQLRETTHDREMTKLKQELQAAGSRKKVDKATMAQPLVFSKVVEAVVQTRDQMVGSHMDLVDTCVGTSVETNSVGISCQPECKNKVVGPELPMNWWIVKERVEMHDRCAGRSVEMCDKSVSVEVSVCETGSNTEESVNDLTLLKTNLNLKEVRSIGCGDCSVDVTVCSPKECASRGVNTEAVSQVEAAVMAVPRTADQDTSTDLEQVHQFTNTETATLIESCTNTCLSTLDKQTSTQTVETRTVAVGEGRVKDINSSTKTRSIGVGTLLSGHSGFDRPSAVKTKESGVGQININDNYLVGLKMRTIACGPPQLTVGLTASRRSVGVGDDPVGESLENPQPQAPLGMMTGLDHYIERIQKLLAEQQTLLAENYSELAEAFGEPHSQMGSLNSQLISTLSSINSVMKSASTEELRNPDFQKTSLGKITGNYLGYTCKCGGLQSGSPLSSQTSQPEQEVGTSEGKPISSLDAFPTQEGTLSPVNLTDDQIAAGLYGNFSHSQSLASGF

SEQ ID NO: 309355 - protein, 217 aa, Artificial Sequence
  derived and/or modified sequence
MKTAYEEVTTELEEFKEAFAGAVKANNSMSKKLMKSDKKIAVISTKLFTEKQRMKYFLSTLPTRPEPELPCVENLNSIELNRKYIPKTAIRIPTSNPQTSNNCKNFLTEMELDRVEQIITGTKKSFAMLSTCSRLLSFVESTAPRKHRRALPIMRSLVPNRRTTVASTEMSQLLYKGVPFQSRTNRPGGVRSPGLQLEGTSTLQWEQGPIAHPRHRC

SEQ ID NO: 309356 - protein, 205 aa, Artificial Sequence
  derived and/or modified sequence
MKTAYEEVTTELEEFKEAFAGAVKANNSMSKKLMKSDKKIAVISTKLFTEKQRMKYFLSTLPTRPEPELPCVENLNSIELNRKYIPKTAIRIPTSNPQTSNNCKNFLTEMELDRVEQIITGTKKSFAMLSTCSRLLSFVESTAPRKHRRALPIMRSLVPNRRTTVASTESRTNRPGGVRSPGLQLEGTSTLQWEQGPIAHPRHRC

SEQ ID NO: 309357 - DNA, 618 bp, Artificial Sequence
  derived and/or modified sequence
atgaagaccgcctacgaggaggtgaccaccgagctggaggagttcaaggaggccttcgccggcgccgtgaaggccaacaacagcatgagcaagaagctgatgaagagcgacaagaagatcgccgtgatcagcaccaagctgttcaccgagaagcagagaatgaagtacttcctgagcaccctgcccaccagacccgagcccgagctgccctgcgtggagaacctgaacagcatcgagctgaacagaaagtacatccccaagaccgccatcagaatccccaccagcaacccccagaccagcaacaactgcaagaacttcctgaccgagatggagctggacagagtggagcagatcatcaccggcaccaagaagagcttcgccatgctgagcacctgcagcagactgctgagcttcgtggagagcaccgcccccagaaagcacagaagagccctgcccatcatgagaagcctggtgcccaacagaagaaccaccgtggccagcaccgagagcagaaccaacagacccggcggcgtgagaagccccggcctgcagctggagggcaccagcaccctgcagtgggagcagggccccatcgcccaccccagacacagatgctag

SEQ ID NO: 309358 - DNA, 654 bp, Artificial Sequence
  derived and/or modified sequence
atgaagaccgcctacgaggaggtgaccaccgagctggaggagttcaaggaggccttcgccggcgccgtgaaggccaacaacagcatgagcaagaagctgatgaagagcgacaagaagatcgccgtgatcagcaccaagctgttcaccgagaagcagagaatgaagtacttcctgagcaccctgcccaccagacccgagcccgagctgccctgcgtggagaacctgaacagcatcgagctgaacagaaagtacatccccaagaccgccatcagaatccccaccagcaacccccagaccagcaacaactgcaagaacttcctgaccgagatggagctggacagagtggagcagatcatcaccggcaccaagaagagcttcgccatgctgagcacctgcagcagactgctgagcttcgtggagagcaccgcccccagaaagcacagaagagccctgcccatcatgagaagcctggtgcccaacagaagaaccaccgtggccagcaccgagatgagccagctgctgtacaagggcgtgcccttccagagcagaaccaacagacccggcggcgtgagaagccccggcctgcagctggagggcaccagcaccctgcagtgggagcagggccccatcgcccaccccagacacagatgctag

SEQ ID NO: 309359 - DNA, 618 bp, Artificial Sequence
  derived and/or modified sequence
atgaagacagcttacgaagaagtcactaccgagctggaggagtttaaggaagccttcgcaggcgcagttaaagccaacaattccatgagcaagaagctgatgaagtccgataaaaagattgctgtaatctccacgaagttattcactgagaagcaacgtatgaaatactttctgtcaaccctgcccacacggcccgagcccgagctgccatgcgtggagaatcttaatagcatagagctgaacaggaaatacatcccaaagacagctatccgaatacctacgagtaatcctcagacctcaaacaattgtaagaacttcttgacagagatggaacttgatcgggtggagcagattatcaccgggacaaaaaaaagcttcgccatgttgtccacttgctctcggctgctttcatttgtggagtcaactgctccgcgaaaacatagacgcgctctgcccataatgagatcactcgttcctaaccgccggacgacagtagcttctacagagtcaagaacaaacaggccagggggagtaaggtcccctgggcttcagctagaagggacatctaccctgcaatgggaacaggggcccattgcccaccctagacacagatgttag

SEQ ID NO: 309360 - DNA, 654 bp, Artificial Sequence
  derived and/or modified sequence
atgaagacagcctacgaggaagtgaccaccgagctggaggaatttaaggaggcctttgccggcgcagtgaaggcaaataacagtatgtccaaaaaactgatgaagtccgacaagaaaatcgctgtgatatccactaaactgtttaccgagaagcaaagaatgaaatatttccttagtacgttgcccactcggcctgaacccgagttaccctgtgtggaaaacttaaattctatcgagctgaaccggaagtacattcctaagaccgctattaggatcccaacttctaacccccaaacatccaacaactgtaagaatttcctaaccgagatggaactcgaccgagtggagcagattatcacggggacaaaaaagtcattcgcgatgttgagcacctgttcccgactcctgtcctttgttgaaagcacagccccaaggaagcaccgacgggccctgcctatcatgaggtcattggtcccgaaccgcaggactaccgtggcatccaccgagatgagccagctgctgtacaaaggggtgcctttccaaagccgaacaaatcgtcccggaggcgtgaggagccccgggctgcagctggaaggaacaagcacactgcagtgggagcaggggccaatcgcacatccccgccaccgctgttag

SEQ ID NO: 309361 - DNA, 618 bp, Artificial Sequence
  derived and/or modified sequence
atgaagacagcctatgaggaggtgaccacagagctggaggagttcaaggaggcctttgctggagctgtgaaggccaacaacagcatgagcaagaagctgatgaagagtgacaagaagattgctgtgatcagcaccaagctgttcacagagaagcagaggatgaagtacttcctgagcaccctgcccaccaggcctgagcctgagctgccctgtgtggagaacctgaacagcattgagctgaacaggaagtacatccccaagacagccatccgcatccccaccagcaacccccagaccagcaacaactgcaagaacttcctgacagagatggagctggacagagtggagcagatcatcaccggcaccaagaagagctttgccatgctgagcacctgcagccggctgctgagctttgtggagagcacagcccccaggaagcaccggcgggccctgcccatcatgaggagcctggtgcccaacagaaggaccaccgtggccagcacagagagcaggaccaacagacctggaggagtgcgcagccctggcctgcagctggagggcaccagcaccctgcagtgggagcagggccccatcgcccaccccaggcaccgctgctag

SEQ ID NO: 309362 - DNA, 654 bp, Artificial Sequence
  derived and/or modified sequence
atgaagacagcctatgaggaggtgaccacagagctggaggagttcaaggaggcctttgctggagctgtgaaggccaacaacagcatgagcaagaagctgatgaagagtgacaagaagattgctgtgatcagcaccaagctgttcacagagaagcagaggatgaagtacttcctgagcaccctgcccaccaggcctgagcctgagctgccctgtgtggagaacctgaacagcattgagctgaacaggaagtacatccccaagacagccatccgcatccccaccagcaacccccagaccagcaacaactgcaagaacttcctgacagagatggagctggacagagtggagcagatcatcaccggcaccaagaagagctttgccatgctgagcacctgcagccggctgctgagctttgtggagagcacagcccccaggaagcaccggcgggccctgcccatcatgaggagcctggtgcccaacagaaggaccaccgtggccagcacagagatgagccagctgctgtacaagggcgtgcccttccagagcaggaccaacagacctggaggagtgcgcagccctggcctgcagctggagggcaccagcaccctgcagtgggagcagggccccatcgcccaccccaggcaccgctgctag

SEQ ID NO: 309363 - DNA, 2421 bp, Artificial Sequence
  derived and/or modified sequence
ctaaaaaagaaggaactcacacttaaagatgtggaatgtaaattctccaaaatgaaaactgcttatgaagaggttacaactgaattagaagaatttaaggaagcctttgcaggagcagtgaaagctaacaattccatgtcaaaaaaattaatgaaatcggataagaaaatagcagtgatcagcaccaagctctttacggagaaacagcggatgaaatattttctcagcactcttcctacaaggccagaaccagagttaccttgtgttgaaaatcttaatagtatagaactcaacagaaaatatattcccaaaacggccataagaattcctacttcaaacccacagacttcaaataactgcaagaacttcttgactgagatggagctggaccgtgtagaacaaataattacaggaacaaagaaaagttttgctatgttgagcacttgctcccgtctactttcttttgtagaatccactgcaccaaggaagcacaggcgagcccttcccatcatgcgctcactagtccccaacagaagaaccactgtcgcatccactgagagcaggacaaacaggcccggtggtgtcaggagcccaggtctccagctggagggaacgtcaaccctgcagtgggagcaggggcccatcgcacatcctaggcacagatgctaatgcaggcactgcagaccataaaggagaacagcaagaagcccccagcaaacatccacatatggccctggacatcagccacattctgaggaacatgtcatgttctgggagggctaaggcatcaagtaaggcctgtggggctggaggatccaaggcaaggtggggcaatccagagccatgggggcttcccatgggaattgggaggtcccaaggcagagtcagaggttccacaggaggagtcagagagtcaccaagggctctcctggcccagggagcagtcaacaccatggactgaacacttgctgggctccaacccttgggccaggctgcccatgtggggccaggaggcagctcagagtgggaggcagagagagaagtgtgctcagagggcacctgtatctggatgtaatgtggtcctgagactctggctgggaagtgcttccagggtatcatatgtgttatgcagctacttcctctccccagccttaccctgtaggaattctagtgactatgttgccaccatcttggagctccatgccctcatagtgtaatggcaccagcagatctgcctgtgcacagacttcctgtactacctcactcctgaggggagatgcttctgcgggcctgcgacctggtgctcaactttagacaccatcatcctggagcggcactgcaccctcactagccagggtgttgacgtcctcaaggccaaggccacattcaagactttggacttcattgatgcacttgtgccgagcaagcttatctgatcttctgggatctctactaggatgctggcagcccagccagctggtctggccctggacgtgccttcaggggctgggtatgcttcatgacctgtgttttggtgagtggtaagcagcacctgcttctagcttcactgttgggccagatttcatccccaccgtggctcttcattgcggctgctttctgctccctccatggaccctgcgtggaattgccccatgtttctgtttgggcaccactgaggaaggaagcatgaaggacgcacaggtcaggccattctgttgcccacctcgtgctgggtctttactcctgggatggcttcaggggcagctccttttccatgcctccccccacccaacatctctcaggttgctgctcaaaggtcacctcttggaggggtctctccctgtcactgtgtttggaacagctccctcagtttctttctagctcatctcactctggtaatgtctttcattaccaccaccatctgacctggtcttacgacctgttagcttccttcatcagacaagagcaccaggatggcaggggcctcatctgtcctgttcctcctgtggcctgggtcctagcaccatgtctggtacagtgtaggtgctcaagggaagtttactttatagaactgtctacctgggagaggttactgttagtctaagctgcactatttggtaaaccccttgctgttttgcagatcctggttggagtaaaacattccatgggaactcgggctgtgagaaatgtcctaaccacctgactgcagaaacatccttatcacatcctgctgggcaaaggcccaacagcctgacttcaggaacatccttatcatcttctactgagcagcaagctatactgtccagagccctccctcccagcgctatgattaccccagcctgtgagcggcagtgggcactgacactaagctggtttccccctccgcagggttttgctagtaataaacctgtgttgctgttg

SEQ ID NO: 309364 - DNA, 654 bp, Artificial Sequence
  derived and/or modified sequence
atgaaaactgcttatgaagaggttacaactgaattagaagaatttaaggaagcctttgcaggagcagtgaaagctaacaattccatgtcaaaaaaattaatgaaatcggataagaaaatagcagtgatcagcaccaagctctttacggagaaacagcggatgaaatattttctcagcactcttcctacaaggccagaaccagagttaccttgtgttgaaaatcttaatagtatagaactcaacagaaaatatattcccaaaacggccataagaattcctacttcaaacccacagacttcaaataactgcaagaacttcttgactgagatggagctggaccgtgtagaacaaataattacaggaacaaagaaaagttttgctatgttgagcacttgctcccgtctactttcttttgtagaatccactgcaccaaggaagcacaggcgagcccttcccatcatgcgctcactagtccccaacagaagaaccactgtcgcatccactgagatgtctcagctgctctacaagggagtcccatttcagagcaggacaaacaggcccggtggtgtcaggagcccaggtctccagctggagggaacgtcaaccctgcagtgggagcaggggcccatcgcacatcctaggcacagatgctaa

SEQ ID NO: 309365 - DNA, 618 bp, Artificial Sequence
  derived and/or modified sequence
atgaagaccgcctacgaggaggtgaccaccgagctggaggagttcaaagaagcgttcgcaggggctgtgaaggcaaataacagtatgagcaaaaagctgatgaagagcgacaaaaagattgctgtcatttccacaaagctttttacggaaaagcagcgcatgaagtacttcctgtcaactctccctacgagaccagagcccgagctaccttgcgtggaaaacttaaacagcatagagcttaatcgaaaatatattccaaagacagccataagaatccccacctctaatccccagacttccaataattgtaaaaactttctgacagagatggagctggatagggtcgaacagattatcaccgggaccaagaaatcctttgcgatgctgagcacctgttcccgcctactcagctttgtggagtctactgcacctaggaagcatcggcgcgccctgccaattatgcggagcttagtgccaaacagaagaacaaccgtggcgagcacggagtcgcggacgaatagaccagggggcgttcgttccccgggcttgcagcttgaagggacctccaccctccagtgggaacagggacctatcgcacatccaaggcatagatgttag

SEQ ID NO: 309366 - DNA, 654 bp, Artificial Sequence
  derived and/or modified sequence
atgaagaccgcctacgaggaggtgaccaccgagctggaggagttcaaggaggcctttgccggtgctgtgaaggcaaacaactcaatgtcaaaaaagcttatgaagtctgataagaagatcgctgtaatttcaaccaagctgtttaccgagaagcagaggatgaaatattttttgtctactcttcccaccaggccagaaccggagttgccatgtgtagagaaccttaattctattgagttgaataggaaatacattcctaagacggcaatacgcattcctacctctaatccacagacaagtaacaattgcaagaacttccttaccgagatggagctggatagagtagaacaaatcattacaggaaccaagaaatcgttcgcaatgttaagtacctgcagtcgcctacttagcttcgttgaaagcaccgcacctcgcaagcaccgcagagcccttcctataatgaggtctctagtccccaacagacgcactaccgtagcttctacagagatgagccaacttctatacaagggcgtaccatttcagagtcgcactaaccgtccagggggagttcggagccccgggcttcagttggaagggacttctacattgcagtgggaacaggggcccattgcccatccacggcatagatgctag

SEQ ID NO: 309367 - DNA, 618 bp, Artificial Sequence
  derived and/or modified sequence
atgaaaaccgcttatgaagaggtgaccactgagttggaggagtttaaagaagccttcgccggagcggtgaaagccaataattcgatgtctaagaaactgatgaaaagcgataaaaagatcgccgtcatttctaccaaactttttactgagaagcaacgcatgaaatatttcctctcgactctgcccacaaggcccgagcctgagttaccatgtgtggaaaatctgaatagtatagagctgaaccgtaaatatattcccaaaactgcaatcaggatccctacctctaatcctcaaacctcgaataactgtaaaaacttcctcacagagatggaactggaccgcgttgaacagataatcacaggcacaaagaagtcgttcgcgatgctatctacttgtagcaggctcctgagcttcgtagaatcaaccgcccctcgcaagcatcgcagagcattgcccatcatgcgatccctggtaccaaatcgtagaacgaccgtggcctctacagaatcccggaccaaccgccctggcggagtgcgaagcccaggactccagctggagggtactagcacccttcaatgggagcagggcccaattgcccacccccgacatcgctgttag

SEQ ID NO: 309368 - DNA, 654 bp, Artificial Sequence
  derived and/or modified sequence
atgaagaccgcctacgaggaggtgacaactgagctggaggagtttaaggaagcattcgccggagcagtgaaagccaataacagcatgagtaagaaattgatgaagagcgacaagaaaatcgctgtcataagtacaaaactttttactgagaagcagcgcatgaagtactttctcagtacactacctactcggccagagccagagctgccttgtgtcgagaaccttaattctatcgaactcaaccggaaatacatccctaagacagcaatccgcattcctacatctaacccacagactagcaacaattgtaagaactttctcactgagatggagcttgatcgggtggaacagattatcacggggaccaaaaagtcattcgctatgctgtcgacgtgttcccggctcctgagttttgtggaaagcaccgcccctagaaaacatcgcagagcactgcccatcatgaggtcattggttccaaatcgccgtacaacggtggctagcaccgagatgtctcaactgttgtacaaaggggtaccctttcaatcgagaactaataggcccggtggagtacgatcccctgggctgcagctggagggaaccagcacacttcaatgggagcaggggcctatcgcccatcccaggcacaggtgctag

SEQ ID NO: 309369 - DNA, 609 bp, Artificial Sequence
  derived and/or modified sequence
atgtcattccccccattatggcctacccgtcacgtgcctgcgtcgcaccctacctgcccgctcctccctgggccatgctgttgtccacattgcttgtgtgatagtgctccaccttcccttccttgtccaaccctggtccagggggctagtagacctatattaatattgcgagcctttccgggcccttgtcactcggtgccttgccacgacttgaaactgcaggtgggggcgtctccctttcgacatggatgtccaccctccgtcaggtgtccttcacgccttattgctggcgtacccggctgttctgtgctgtcctggtccctgggtcacagtctgtccggtatcgattcccgcgtgggggcaactccaggtctgggccacagcctgtcctgggtgagggccccaccagggcttgggcactccttatccggtgtaggcgccacacccggcctcggtcatttgctgagcggggttggcgcttctcccggggaagatactgagcatgctgccgcactcaccccatgcggtgtcccccccgtgcccggatgtcggagccactctcagcccctgagccatctcgttagcagctctaggtgttgtggaccctag

SEQ ID NO: 309370 - DNA, 849 bp, Artificial Sequence
  derived and/or modified sequence
atggcccttagctgctcttcctggtgtaggtctcctcagtggaagttcgaagcctctaaaagccatgctaaccaccgacctatctgcctatcccccagaatctggccggggtctgcctccgcgaccagcactgtatgttcatcaagtgagtcctttctgcccaggggtccgcctgctgtatcccttttgcttcatggaccgcctactgtatcctttccacccccctggcccacgcaccatgtcttgcccagtcctgtggcccaccctccctgcccttgtctgccgcctgacatgccgcttgagctgcctggaccctgttgttgtccacactgtttgtgtgacagcgccccaccttctctgccatgtcccacacttgtccaaggcgcctctagaccgattctgatcctcagggcgttcccaggtccctgtcacagcgtgccatgtcatgatctaaaactgcaggttggagcatctccctttagacatggttgtccaccttccgtgcgctgcccctcccggctgatcgcaggcgtacctgggtgctcagtcctgagctggtctttgggacactccctgagtggaattgacagcagggtgggcgcaacacccgggcttggccatagcctgtcatgggtgagagccccacccggattgggacattcacttagcggcgtcggagccacaccaggcctgggccatctgctgtccggcgtaggagcatcaccgggagaggatacagagcatgcggcggccctgactccgtgtggtgtcccacctgtgccgggctgtcgaagtcattcccagcccctgtcccatctggtctcatcatcaaggtgctgtggcccctag

SEQ ID NO: 309371 - DNA, 609 bp, Artificial Sequence
  derived and/or modified sequence
atgagcttcccccccctgtggcccacccggcacgtgcccgccagccaccccacgtgcccacttctgcctggcccttgctgctgccctcactgcctgtgcgacagtgctccgccctcactgccttgcccaacactggttcaaggcgcatccagacccatcctcattctacgggccttccctggaccgtgtcactctgtgccgtgtcacgatctcaaactgcaggttggcgcctccccattccgtcatggttgccccccctccgtccggtgccctagccgcttaatcgctggcgttcccgggtgtagtgtgctgtcctggtctctggggcactctctatcaggcattgactcgagagtgggcgccacgccaggtctgggccatagcttgtcatgggttagagcaccacctggtctgggtcatagtttgtccggcgttggggctaccccgggtcttgggcacctactttccggagtcggcgcttctccaggtgaagacactgagcacgctgctgccctgaccccatgcggcgtgcctcctgtgcccggatgccgctcacactctcagccactgtcacatctcgtgtcttcctctcggtgctgcggcccctag

SEQ ID NO: 309372 - DNA, 609 bp, Artificial Sequence
  derived and/or modified sequence
atgagcttcccccccctgtggcccaccagacacgtgcccgccagccaccccacctgccccctgctgcccggcccctgctgctgcccccactgcctgtgcgacagcgccccccccagcctgccctgccccaccctggtgcagggcgccagcagacccatcctgatcctgagagccttccccggcccctgccacagcgtgccctgccacgacctgaagctgcaggtgggcgccagccccttcagacacggctgcccccccagcgtgagatgccccagcagactgatcgccggcgtgcccggctgcagcgtgctgagctggagcctgggccacagcctgagcggcatcgacagcagagtgggcgccacccccggcctgggccacagcctgagctgggtgagagccccccccggcctgggccacagcctgagcggcgtgggcgccacccccggcctgggccacctgctgagcggcgtgggcgccagccccggcgaggacaccgagcacgccgccgccctgaccccctgcggcgtgccccccgtgcccggctgcagaagccacagccagcccctgagccacctggtgagcagcagcagatgctgcggcccctag

SEQ ID NO: 309373 - DNA, 849 bp, Artificial Sequence
  derived and/or modified sequence
atggccctgagctgcagcagctggtgcagaagcccccagtggaagttcgaggccagcaagagccacgccaaccacagacccatctgcctgagccccagaatctggcccggcagcgccagcgccaccagcaccgtgtgcagcagcagcgagagcttcctgcccagaggcccccccgccgtgagcctgctgctgcacggcccccccaccgtgagcttcccccccccctggcccacccaccacgtgctgcccagccccgtggcccaccccccctgcccctgcctgccccccgacatgcccctggagctgcccggcccctgctgctgcccccactgcctgtgcgacagcgccccccccagcctgccctgccccaccctggtgcagggcgccagcagacccatcctgatcctgagagccttccccggcccctgccacagcgtgccctgccacgacctgaagctgcaggtgggcgccagccccttcagacacggctgcccccccagcgtgagatgccccagcagactgatcgccggcgtgcccggctgcagcgtgctgagctggagcctgggccacagcctgagcggcatcgacagcagagtgggcgccacccccggcctgggccacagcctgagctgggtgagagccccccccggcctgggccacagcctgagcggcgtgggcgccacccccggcctgggccacctgctgagcggcgtgggcgccagccccggcgaggacaccgagcacgccgccgccctgaccccctgcggcgtgccccccgtgcccggctgcagaagccacagccagcccctgagccacctggtgagcagcagcagatgctgcggcccctag

SEQ ID NO: 309374 - protein, 956 aa, Artificial Sequence
  derived and/or modified sequence
MEAGGLPLELWRMILAYLHLPDLGRCSLVCRAWYELILSLDSTRWRQLCLGCTECRHPNWPNQPDVEPESWREAFKQHYLASKTWTKNALDLESSICFSLFRRRRERRTLSVGPGREFDSLGSALAMASLYDRIVLFPGVYEEQGEIILKVPVEIVGQGKLGEVALLASIDQHCSTTRLCNLVFTPAWFSPIMYKTTSGHVQFDNCNFENGHIQVHGPGTCQVKFCTFKNTHIFLHNVPLCVLENCEFVGSENNSVTVEGHPSADKNWAYKYLLGLIKSSPTFLPTEDSDFLMSLDLESRDQAWSPKTCDIVIEGSQSPTSPASSSPKPGSKAGSQEAEVGSDGERVAQTPDSSDGGLSPSGEDEDEDQLMYRLSYQVQGPRPVLGGSFLGPPLPGASIQLPSCLVLNSLQQELQKDKEAMALANSVQGCLIRKCLFRDGKGGVFVCSHGRAKMEGNIFRNLTYAVRCIHNSKIIMLRNDIYRCRASGIFLRLEGGGLIAGNNIYHNAEAGVDIRKKSNPLILCNQIHHGLRSGIVVLGNGKGIIRNNQIFSNKEAGIYILYHGNPVVSGNHIFKGRAAGIAVNENGKGLITENVIRENQWGGVDIRRGGIPVLRSNLICFGYSDGVVVGDEGKGLIEGNTIYANKGCGVWMMSSSLPHVTSNHVSYNGLYGVAVFSQKDGSSELPRGHRAQENFSEDGDAILWETELEKEDDPLRRPITIALVESNSINHNGASGLYVQSSEALHVITNVIHANGDRGITVAQSSQPTRVANNSISCNRQSGVKVEAQCKVELRGNGIYDNRGHGIITKGDSTIVIENDIIGNRGSGLQLLPRSDTKVIKNRIHSFRAYGIAVRGRAKALVQENIIFQGKTSKTIFQQISNNRECIMQNNKFLVFKKKSDTWRLVNPPARPHLENSLRRPSAAHNGQKVTAMATRITARVEGGYHSNRSVFCTIL

SEQ ID NO: 309375 - protein, 71 aa, Artificial Sequence
  derived and/or modified sequence
MEAGGLPLELWRMILAYLHLPDLGRCSLVCRAWYELILSLDSTRWRQLCLGCTECRHPNWPNQPDVEPESW

SEQ ID NO: 309376 - DNA, 4575 bp, Artificial Sequence
  derived and/or modified sequence
gcggccgcggcccggactccgcggtgggcgagcgccctgtgaggtgaccatggaggctggtggcctccccttggagctgtggcgcatgatcttagcctacttgcaccttcccgacctgggccgctgcagcctggtatgcagggcctggtatgaactgatcctcagtctcgacagcacccgctggcggcagctgtgtctgggttgcaccgagtgccgccatcccaattggcccaaccagccagatgtggagcctgagtcttggagagaagccttcaagcagcattaccttgcatccaagacatggaccaagaatgccttggacttggagtcttccatctgcttttctctattccgccggaggagggaacgacgtaccctgagtgttgggccaggccgtgagtttgacagcctgggcagtgccttggccatggccagcctgtatgaccgaattgtgctcttcccaggtgtgtacgaagagcaaggtgaaatcatcttgaaggtgcctgtggagattgtagggcaggggaagttgggtgaagtggccctgctggccagcattgatcagcactgctcaaccacacgcctgtgcaacctcgtcttcacgccagcctggttctcacccatcatgtataagacaacatcaggtcacgtccagtttgacaactgcaactttgagaacgggcacatccaggtccatggcccgggtacttgccaagtgaagttctgtaccttcaaaaacacccatatcttcctgcacaacgtgcccctgtgtgtcctggaaaactgtgaatttgtgggcagtgaaaacaactctgtgactgttgagggtcacccatctgcagataagaactgggcctacaagtatctactagggcttatcaagtcctcacccacttttctccccacagaggactctgactttttaatgtccctggacctagagagccgggaccaggcctggagcccaaagacctgtgacattgttatcgagggcagccagagccctaccagcccagcctctagctccccaaagccaggctccaaggctggctcacaggaggcagaggtgggtagtgatggtgaaagggtggcccagaccccggacagcagcgatggaggcctgagtcccagcggtgaggatgaagatgaggaccagctgatgtacagactatcctaccaagtgcagggcccacgccctgtattggggggctcatttctgggcccacctctaccaggagcatccattcagctgcccagctgcctagtgctgaactcactgcagcaggagctgcagaaggataaggaggccatggcactggccaactccgtgcagggctgcctcatccgcaagtgcctcttccgggacgggaagggaggcgtcttcgtctgctcccacggcagagccaagatggaaggaaacatcttccggaacctgacttacgcagtgcggtgtatacataatagcaagatcatcatgctcaggaacgacatttaccgctgccgagcgtcaggcatctttcttcgcttggagggcggtggcttgattgccggcaacaacatttaccacaatgcagaggctggtgtagacatccggaaaaagtccaacccactcatactgtgtaaccagatccaccatggccttcgctctggcattgtcgtccttggcaatgggaaaggcatcatccggaacaatcaaatcttttccaataaggaggctggcatttacatcctgtaccacggaaaccccgttgtgagcgggaaccacatcttcaagggccgtgctgccggcatagcagtgaatgagaacggcaaaggcctcatcacagaaaatgtcatccgtgagaatcagtggggaggtgtggacatccgccgtggagggatccccgttctcaggagtaacctcatctgctttggctattcagatggtgtggttgtgggagacgaaggcaaaggcctcatagaaggaaataccatctacgctaacaagggctgtggtgtgtggatgatgtcgtccagcctcccccatgtcaccagcaaccacgtcagctacaatggcctgtatggagtggcagtatttagccagaaggatggctccagcgagttacctcgaggccacagggctcaagagaacttcagcgaggatggggacgccatcctctgggagacagagctggagaaggaggacgacccactgcgccggcccatcaccatagctcttgttgagtctaacagtattaatcacaatggagcctcaggactctatgtccagagcagcgaggcactgcatgtcatcaccaatgtgatccacgcgaatggggacagaggcattactgtggcccagagcagccaacccacccgagtggccaacaacagcatctcctgcaaccggcaaagtggggtcaaggttgaggcccagtgcaaagtggagctccggggcaatggtatctatgacaacagaggccacggcattatcaccaagggcgacagcaccatcgtcattgaaaacgatatcattggcaaccggggcagcgggctgcagctgctgcccaggtccgacactaaagtaataaagaaccggatccactcgttccgggcctacggcatcgccgtgcggggccgtgccaaggccctggtgcaggaaaacatcatcttccagggcaaaaccagtaagaccatctttcagcagatctcaaacaaccgagaatgcatcatgcaaaacaacaagttcctggtcttcaagaaaaagtctgatacgtggcgcctggtgaacccaccagcacggccccaccttgaaaattctctcagacgtccctcggcagcccacaatgggcagaaggtgacagccatggcaacgaggatcacagcccgggtggaaggtggttaccacagcaaccgcagtgtcttctgcaccatcctgtgaggacacagacctgcttcagggccaagcctggatgggtgctcagaggagctaaggtggaaatactgcctgaaaagactccgcccctccccctccccctcgaacaaatgggtcccgggcctccaaaacacggtacctccagaacacttcagctccacagcccatagcaagaagaaagtgggcaatgtttttcagggagaagggatagaagctggtgggtttccagtcactcgaagtctataaagattgtgaagagcgggggaagctcaaatgctgaagcttttggtcaggattttctctgagttctaaggaactgtgttttacacacaccaaacccagactcttctcaggaaagagcagatttacttctgatggcgggaagtgattctagtgaggtggagagagacaactgctccagaattttcccctttgctagagctgtctccctctcaatccctccagggaccccaccacaccctcccagctgtctctggaggctggaggagttgagtttggttgacttgaggacttggacatggacctgggaggaaggaaggacctgggagcaacaggagaccccatggaaaggctgccccagggatgacaagagggacatgctgaaacaggtggggctgcagcgtgcaggcagatgctaggctgggtgggcagggatgcacaaggctctactccatccccagagagctcccaaatgcagaaggattcaaaccccatgtgagcgtgcccacaccagccgcccctcctgagcatcagcctgttcagatgagggtacctgggcctctcgttcgcatctgtgttctcatggatgagcgctggtctttactgaccctcccaagcctccccactctgtgccttggctcatgctctttcctcctcccggcatgcccttctcccccatctccgtgtcctcgttcctcaaggtttagccgagacactgccacctccacatagctctccctgccctctttccccctctgggcctcagtggcctttctctgctccctctcagggtactgagcactttctgccttgtcctggagctatctgggtccattgcctgaccccccactcacctgtgtgctccccgtaggtagggccacttctgactgtgtgtccccagatccagcctggggttggggtaggattagtggcctgagtgaggagaggaaggccagctcccagaggactttactgaaccgtactgtgaatatgtccaagtcccaaagccaggtgaggtcagaccccactgcctgaggaagagggctggatgcagggccagctcaacctgaacaatcccctcccactcggcctttcctgtggggccttcaccagcctgctggggtcactgtcgtgcacttggctgcgtggctggttctattggccctaggtgctgctctgttgggtgggatgggagggggtagagggagccaggagcactgggttctccctgagaacactgggcacaagagtactggcctcttctatccctggcactgtcctttgcacttgtttggtggccccaatgtgagtcgctgtaaaaaatgctgccgttactattttctaagaaatgacttttctgtgaaccaacagtaacaaaaacctcagtaaccaaaataaagttctatattttaaaaaaggca

SEQ ID NO: 309377 - DNA, 1514 bp, Artificial Sequence
  derived and/or modified sequence
cacgatatgaagagcctggttacagtttcgactcctctctgcaagtgaataggcccagaaagatcatcatgctcaggaacgacatttaccgctgccgagcgtcaggcatctttcttcgcttggagggcggtggcttgattgccggcaacaacatttaccacaatgcagaggctggtgtagacatccggaaaaagtccaacccactcatactgtgtaaccagatccaccatggccttcgctctggcattgtcgtccttggcaatgggaaaggcatcatccggaacaatcaaatcttttccaataaggaggctggcatttacatcctgtaccacggaaaccccgttgtgagcgggaaccacatcttcaagggccgtgctgccggcatagcagtgaatgagaacggcaaaggcctcatcacagaaaatgtcatccgtgagaatcagtggggaggtgtggacatccgccgtggagggatccccgttctcaggagtaacctcatctgctttggctattcagatggtgtggttgtgggagacgaaggcaaaggcctcatagaaggaaataccatctacgctaacaagggctgtggtgtgtggatgatgtcgtccagcctcccccatgtcaccagcaaccacgtcagctacaatggcctgtatggagtggcagtatttagccagaaggatggctccagcgagttacctcgaggccacagggctcaagagaacttcagcgaggatggggacgccatcctctgggagacagagctggagaaggaggacgacccactgcgccggcccatcaccatagctcttgttgagtctaacagtattaatcacaatggagcctcaggactctatgtccagagcagcgaggcactgcatgtcatcaccaatgtgatccacgcgaatggggacagaggcattactgtggcccagagcagccaacccacccgagtggccaacaacagcatctcctgcaaccggcaaagtggggtcaaggttgaggcccagtgcaaagtggagctccggggcaatggtatctatgacaacagaggccacggcattatcaccaagggcgacagcaccatcgtcattgaaaacgatatcattggcaaccggggcagcgggctgcagctgctgcccaggtccgacactaaagtaataaagaaccggatccactcgttccgggcctacggcatcgccgtgcggggccgtgccaaggccctggtgcaggaaaacatcatcttccagggcaaaaccagtaagaccatctttcagcagatctcaaacaaccgagaatgcatcatgcaaaacaacaagttcctggtcttcaagaaaaagtctgatacgtggcgcctggtgaacccaccagcacggccccaccttgaaaattctctcagacgtccctcggcagcccacaatgggcagaaggtgacagccatggcaacgaggatcacagcccgggtggaaggtggttaccacagcaaccgcagtgtcttctgcaccatcctgtga

SEQ ID NO: 309378 - DNA, 2871 bp, Artificial Sequence
  derived and/or modified sequence
atggaggctggcgggctgcctctggagctctggaggatgattctggcatatctgcatctgccagacctggggcgatgttcactcgtgtgccgggcctggtacgaactgattctgagtttagactctaccagatggaggcagttgtgtctgggatgcactgaatgccgacacccaaattggccaaaccagcctgatgtagagcctgagtcttggcgggaagcctttaagcagcactacctggcatcaaagacttggaccaaaaacgcactggaccttgagagctcaatatgtttcagcctctttagaagacggagagagagacggacgctctccgttggtcccggtcgtgagtttgactcactgggtagtgcactggcaatggccagtctctatgaccgtattgtactattccctggcgtttatgaagagcagggggagataatccttaaggtaccagttgagattgtgggtcaaggcaaactcggcgaggtggcattgctggcaagtattgatcagcattgctccaccacacgcctgtgtaacttggtattcactccagcatggttctctccaatcatgtacaaaaccacaagcggccatgtgcagtttgacaactgcaactttgagaatggccacattcaagtgcacggccccggcacttgtcaggtgaagttttgcaccttcaagaatacccacatcttcctgcacaacgtcccactgtgtgtactcgaaaattgcgaattcgttggcagcgagaacaactccgtgactgttgagggccatccatctgcagacaaaaattgggcctacaaatatttgctcgggctcatcaaaagttcgccaactttcctgcccactgaggactctgacttcctgatgagcctggacctcgagagtcgcgatcaagcatggtctcctaagacttgtgatatcgtcattgaaggctcccagtccccaacaagccccgccagcagctcacccaagccaggcagcaaagctggatcccaggaggccgaagtgggctccgatggggagcgcgtggcacaaacacccgacagtagcgatggaggtctgtcaccaagtggggaggacgaggacgaggaccaactaatgtaccgtttgtcctatcaggttcaggggccccgacctgttctcggcggttcgttcctgggccccccactcccaggcgccagcatccagttaccatcttgcctagtcctgaattccctgcagcaagagctccagaaggataaggaggcaatggcgcttgccaacagtgtgcagggctgcttgatccgcaagtgcctgtttagagatgggaagggaggggtgtttgtctgttctcacggcagagcaaagatggagggaaacatatttcgcaatctgacctacgccgtgcggtgcatccacaacagcaaaattatcatgcttcgcaacgatatctacagatgccgagccagcgggatatttttgcgcctggagggcggcggtttgattgcagggaacaacatctatcataacgcggaagccggagtagacatccggaaaaaatcaaaccccttaattctttgtaatcagatccaccacgggttgcgaagtggcattgtggttctgggtaacggaaaaggcatcattcggaataaccagatttttagcaacaaagaggcagggatctacatcttataccacggcaaccctgttgtgtctgggaaccacatattcaagggccgcgctgccggcatagccgttaatgagaacgggaagggccttatcaccgaaaatgtgatcagggagaatcagtgggggggggtggatattcgccgaggaggtatacctgtgctgaggtctaatctgatctgcttcggatattctgacggcgtggtcgtcggggatgaggggaaagggctcatagagggaaataccatctacgcaaataaaggatgcggcgtgtggatgatgtcatccagtcttccacacgttactagcaaccacgtttcatataacggcctttatggggtcgcggtcttttcccagaaggacggcagcagcgaactgcccaggggacacagggctcaggagaatttctccgaagacggggacgccatattgtgggagacggaactcgagaaggaagacgacccactaagaaggccaataactattgccctcgtcgagagcaattccataaatcataatggggcctccgggctgtatgtgcagtcctctgaggccttgcatgtgatcactaacgtcatccatgctaacggcgacagaggcattaccgtggcccagtctagtcagcccaccagggtggctaacaacagcatcagttgtaacaggcagtccggggtaaaggtggaggcccaatgtaaggtggaactccggggcaatggaatctatgacaatagggggcacggaattataacaaaaggggattcaactattgtgatcgagaacgatatcattggtaacagagggtccggactccaattgctgccgagatctgacaccaaggtgataaagaaccgaattcattcattcagggcttatggcatcgccgttcggggcagggcaaaagccctcgttcaagagaacattatttttcaagggaaaacgagcaaaactatatttcagcagatctctaacaatcgggaatgcattatgcagaataacaagtttctagttttcaagaagaaatcagatacatggcgactcgtaaatccccccgctcgaccgcacctggagaatagtttacggcggcccagcgctgcacacaacggtcaaaaggtgacagcgatggctaccagaatcacggcgcgggtagaaggggggtaccacagcaatcggtcagtcttttgcactatactttag

SEQ ID NO: 309379 - DNA, 2871 bp, Artificial Sequence
  derived and/or modified sequence
atggaggccggcggcctgcccctggagctgtggaggatgatcctggcctacctgcacctgcctgacctgggccgctgcagcctggtgtgccgggcctggtatgagctgatcctgagcctggacagcacccgctggaggcagctgtgcctgggctgcacagagtgccgccaccccaactggcccaaccagccagatgtggagcctgagagctggagggaggccttcaagcagcactacctggccagcaagacctggaccaagaatgccctggacctggagagcagcatctgcttcagcctcttcagaagaagaagagaaagaaggaccctgtctgtgggccctggccgggagtttgacagcctgggcagcgccctggccatggccagcctgtatgaccgcatcgtgctcttccctggggtgtatgaggagcagggcgagatcatcctgaaggtgcctgtggagatcgtgggccagggcaagctgggggaggtggccctgctggccagcattgaccagcactgcagcaccacccggctgtgcaacctggtgttcaccccagcctggttcagccccatcatgtacaagaccaccagcggccacgtgcagtttgacaactgcaactttgaaaatggccacatccaggtgcacggccctggcacctgccaggtgaagttctgcaccttcaagaacacccacatcttcctgcacaacgtgcccctgtgtgtgctggagaactgtgaatttgtgggcagcgagaacaacagcgtgacagtggagggccaccccagcgctgacaagaactgggcctacaagtacctgctgggcctcatcaagagcagccccaccttcctgcccacagaagattctgacttcctgatgagcctggacctggagagccgggaccaggcctggagccccaagacctgtgacatcgtgattgagggcagccagagccccaccagccctgccagcagcagccccaagccaggcagcaaggccggcagccaggaggccgaggtgggcagtgatggagagcgggtggcccagaccccagacagcagtgatggcggcctgagccccagcggagaagatgaagatgaggaccagctgatgtaccgcctgagctaccaggtgcagggccccaggcctgtgctgggcggcagcttcctgggcccccccctgcccggggccagcatccagctgcccagctgcctggtgctgaacagcctgcagcaggagctgcagaaggacaaggaggccatggccctggccaacagcgtgcagggctgcctgatcaggaagtgcctcttcagagatggaaaaggaggagtgtttgtgtgcagccacggccgggccaagatggagggcaacatcttcaggaacctgacctatgctgtgcgctgcatccacaacagcaagatcatcatgctgagaaatgacatctaccgctgccgggccagcggcatcttcctgcggctggagggcggcggcctgattgctggcaacaacatctaccacaatgctgaggccggcgtggacatcaggaagaagagcaaccccctcatcctgtgcaaccagatccaccacggcctgcggtctggaattgtggtgctgggcaatggcaagggcatcatccggaacaaccagatcttcagcaacaaggaggccggcatctacatcctgtaccacggcaaccctgtggtgtctggcaaccacatcttcaagggccgggctgctggcattgctgtgaatgaaaatggcaagggcctcatcacagaaaatgtcatccgggagaaccagtggggcggcgtggacatcagaagaggaggcatccctgtgctgcggagcaacctgatctgcttcggctacagtgatggagtggtggtgggagatgagggcaagggcctgattgagggcaacaccatctatgccaacaagggctgcggcgtgtggatgatgagcagcagcctgccccacgtgaccagcaaccacgtgtcctacaacggcctgtatggagtggccgtgttcagccagaaggatggcagcagcgagctgccccggggccaccgggcccaggagaacttctctgaagatggagatgccatcctgtgggagacagagctggagaaggaggatgaccccctgcggcggcccatcaccatcgccctggtggagagcaacagcatcaaccacaacggggccagcggcctgtatgtgcagagcagcgaggccctgcacgtgatcaccaacgtcatccacgccaatggagaccggggcatcaccgtggcccagagcagccagcccaccagggtggccaacaacagcatcagctgcaaccggcagagcggcgtgaaggtggaggcccagtgcaaggtggagctgcggggaaatggcatctatgacaacagaggacatggcatcatcaccaagggggacagcaccatcgtgattgaaaatgacatcatcggcaacagaggcagcggcctgcagctgctgcccaggagtgacaccaaggtgatcaagaaccgcatccacagcttccgggcctacggcattgctgtgcggggccgggccaaggccctggtgcaggagaacatcatcttccagggcaagaccagcaagaccatcttccagcagatcagcaacaaccgggagtgcatcatgcagaacaacaagttcctggtgttcaagaagaagagtgacacctggaggctggtgaaccccccagcccggccccacctggagaacagcctgcggcggcccagcgctgcccacaacggccagaaggtgacagccatggccacccgcatcacagcccgggtggagggcggctaccacagcaacagaagtgtcttctgcaccatcctgtag

SEQ ID NO: 309380 - DNA, 2871 bp, Artificial Sequence
  derived and/or modified sequence
atggaggccggcggcctgcccctggagctgtggcggatgatcctggcctatcttcatctgccagatctgggccgttgcagcctcgtgtgcagagcttggtatgagttgattctgtcccttgacagtaccaggtggcggcagctgtgtcttggctgcactgagtgtagacaccccaattggcccaaccagcctgacgtggaacccgagagttggagggaagccttcaaacagcactacctcgcctcgaagacctggaccaagaacgctttggacctagagtcctcaatttgtttctccctgttccgccgccgaagagagagacgtaccctgagcgtaggtcccggacgagaattcgatagtttgggaagtgcgctggccatggcttctttgtatgaccgcatcgtcttgttcccgggcgtctacgaagagcagggagaaatcattttgaaggtgcccgtggagattgttggccaaggaaagctgggcgaggtggccttactggcatctatagatcaacactgtagcactactagactttgtaatctggtgtttacgccagcctggttctctcctattatgtacaagaccacctcaggacacgtgcagtttgacaactgtaactttgaaaacggtcacattcaagttcatggacctggcacctgccaggtcaaattttgtaccttcaaaaatacacacatcttcctccataatgtccctctgtgcgtccttgagaactgtgagttcgtgggaagcgagaataacagcgtgacggttgagggacaccctagtgctgacaagaactgggcctacaagtacctgctcggcctcatcaaatctagtcctacattccttcctactgaggactcagactttctaatgagcctggacctcgaatcaagagatcaggcatggtcaccaaagacctgtgatatcgtcatcgagggatcccagtctccaacaagtccagctagctccagccctaagcctgggagcaaggctgggtctcaggaagcagaagtgggcagtgatggggagcgtgtcgcccaaacaccagactcctcagatggcggcctgtctccctcaggcgaagacgaggatgaggaccagctgatgtaccggttgtcctaccaagtccagggtcctagacctgttctcggaggctcgttcctcggcccacccctgccaggtgcctcaatacaattaccgtcctgtctcgtgctgaacagtctgcaacaagagttgcagaaggacaaggaagcaatggctctggccaacagtgtgcagggctgtctgatacggaaatgtctcttccgcgatggcaaggggggggtttttgtctgtagtcatggcagagccaaaatggaggggaacatttttcggaatcttacatacgctgttcgctgtatacacaacagtaagattataatgcttaggaatgatatttacaggtgcagggcctccggcatattcctgcgactggagggcggcggcctcatagccgggaacaatatatatcacaatgccgaagcaggtgtggatattcggaagaaatcaaacccactgatcttgtgcaatcagattcaccacgggttgcgctccgggatcgttgtgcttggtaatggcaaagggattatcagaaataaccaaattttctcgaataaagaggctggcatctatatcctttatcacggaaacccggttgtaagcggtaatcacatctttaaaggtagggccgctggcatcgcggttaatgagaatgggaaagggttaatcaccgaaaacgtgatccgcgagaaccagtggggcggggtggacatccgcaggggcggtatccctgtcctgaggtctaacctgatctgtttcggctactctgatggggtagtcgtgggcgatgagggtaagggacttatcgagggaaatacaatctacgcgaacaagggatgtggcgtgtggatgatgtcatcctcccttccacacgttactagcaatcacgtgtcctataatgggctgtatggggtcgctgttttctctcagaaggatggcagtagtgaactaccgagaggtcatagagctcaggagaatttcagcgaggacggcgatgcaatcctctgggaaacagagctggagaaggaggacgatcccctacgccggcctattacgatagctctagttgaatccaatagtatcaaccacaacggtgcctcgggcctgtacgtccagagcagcgaggcactccacgtgatcaccaacgtgatccacgctaacggcgatcgcggtattaccgtggcccagagtagccagccaaccagggttgcaaataacagcatatcttgtaaccgccagtccggcgtcaaagtagaagcccaatgcaaggttgaactgcgtggaaatggcatctacgacaaccgggggcacgggatcattaccaaaggtgactccactatagtaatcgaaaatgacattattggtaatcgtggatctggtttgcaactgttgcctcgcagcgatactaaagtgattaagaaccgcatccactcgtttagggcctatggtatcgctgtccgcggcagagctaaagccctcgtgcaggaaaacattatatttcaaggcaagaccagtaagaccatttttcagcaaatttctaacaacagagaatgtataatgcaaaataacaagttcctcgtgttcaaaaaaaagtctgatacttggagactggtgaaccctccagctcgcccccacctggagaactccctgagaaggccttctgctgcgcataacggccagaaagtcacggcaatggcaacgagaataacggctagagtggagggcggataccacagtaatagatccgtgttttgcactattctctag

SEQ ID NO: 309381 - DNA, 2871 bp, Artificial Sequence
  derived and/or modified sequence
atggaggccggagggctgccattggagctctggcggatgattctggcctacttacacttacccgatctgggcagatgctccctggtgtgcagggcttggtatgagctgatcctctcccttgattcaacccgctggcgccagctgtgcttgggctgcactgagtgccggcaccctaattggcctaatcagcccgacgttgagcctgagagttggcgcgaagctttcaaacagcactatctggcatctaagacctggacaaaaaacgcgcttgacctcgagtcgagcatttgcttttcattgttccgcagaagacgggagcggagaacgctgtccgtgggccctgggagagaattcgactccctcggcagtgcattggctatggccagtttgtatgataggattgtgctgttccccggagtgtacgaggagcagggggagatcatcctgaaagtgcctgtggaaattgtgggacaaggaaagttgggagaagtggcactcctcgcctctatagatcagcactgttctacgacacgcctgtgcaatcttgtgtttactcctgcgtggttctcccctatcatgtataagacaacatcaggccacgtccaattcgacaactgcaatttcgagaacggtcatatccaggtgcatggcccagggacctgccaagttaaattttgtacctttaaaaacactcacattttcctgcataatgtgccactgtgtgtgctggaaaattgtgagtttgttggatcagagaataatagcgtgacagttgaggggcaccccagcgcagataagaactgggcatacaaatacctcctcggcctcatcaaatcatcaccgactttcctccctacagaagattcagacttcttgatgtcgctggatttagaatcccgagaccaggcctggtctcccaaaacgtgcgatattgtaattgagggatctcagtcgcctacctcaccagctagtagcagccccaagccaggctccaaggcgggatctcaagaggctgaagttggatctgatggggagagagtggcccagacaccagactcaagcgatggtgggctatctcccagtggagaggacgaagatgaagatcaattaatgtacaggctgtcataccaggttcagggtcctagacccgtgttgggaggttccttcctcggcccaccgctgcctggcgctagcattcagctgccttcttgtctggttcttaattcgcttcagcaggaacttcagaaagacaaagaagctatggccttggcaaatagtgttcaggggtgcttgatcaggaagtgcctcttccgtgacgggaaaggtggtgtgtttgtctgtagccatgggagggcaaaaatggagggaaatatcttcagaaacctgacatacgcggttcgctgcatccacaactccaaaatcattatgttgcgaaatgatatctataggtgcagagcctcaggcatctttcttcgcttagaggggggtggcttaatcgctggaaataacatctatcataatgccgaagcaggtgtcgacattcggaaaaaatcaaacccactgatcttgtgcaaccagattcatcatggcttaaggtccggcattgttgtactaggtaacggaaaaggtattatcaggaataaccaaatcttctcaaacaaggaggctggaatctacattctctatcatgggaaccccgtagtgtccgggaaccacatcttcaagggaagagctgccggaatagctgtgaacgagaatgggaagggcctcatcaccgagaacgtaatacgtgagaatcaatgggggggtgtcgacatccgaagaggcggaatcccagtcctgagaagcaacttaatttgcttcgggtattctgacggtgtggtggtgggcgatgagggaaagggactgattgaaggaaatacaatttatgcaaacaagggttgtggtgtgtggatgatgagctcctctctcccacatgttacctccaaccacgtgtcctataatggcctgtacggagtcgctgtgttcagccagaaagatgggagtagtgagctgccgaggggacaccgggctcaagaaaacttctcggaagacggagatgctatcctctgggagactgaattggaaaaggaggatgaccctttgaggcgcccaattactattgcgctggttgaatcaaattccatcaaccataatggcgcaagtggtctatatgtacagtcaagcgaggcgctccatgtaattactaacgttattcacgcaaacggtgacagagggatcacagtggcccaaagcagtcagccaaccagagtcgcaaacaattcaatctcttgtaaccgacagagcggtgtgaaggtggaagcccagtgcaaagtggaactgcgcggaaacggtatttacgataatagaggccacggaattattactaaaggtgacagcacaatagtgattgagaacgatattattggtaaccgtggctctggtcttcagctcctccctagaagcgacaccaaagtaatcaaaaacaggatccattctttccgtgcctacggaatcgcagttcgcggtagagctaaagctctcgtgcaggagaacattattttccaggggaagacctctaagaccatcttccagcaaattagcaataacagggagtgcatcatgcagaataacaaattcctcgtttttaagaaaaagtccgacacctggcgtctggtcaatcctcccgcaagaccccatctggagaactcactgcgcaggccttccgccgctcataatggacagaaggtcactgccatggctaccagaatcactgcgagagtggaaggtgggtatcacagtaacagatctgtgttttgcacaatcctgtag

SEQ ID NO: 309382 - DNA, 2871 bp, Artificial Sequence
  derived and/or modified sequence
atggaggccggcggcctgcccctggagctgtggagaatgatcctggcctacctgcacctgcccgacctgggcagatgcagcctggtgtgcagagcctggtacgagctgatcctgagcctggacagcaccagatggagacagctgtgcctgggctgcaccgagtgcagacaccccaactggcccaaccagcccgacgtggagcccgagagctggagagaggccttcaagcagcactacctggccagcaagacctggaccaagaacgccctggacctggagagcagcatctgcttcagcctgttcagaagaagaagagagagaagaaccctgagcgtgggccccggcagagagttcgacagcctgggcagcgccctggccatggccagcctgtacgacagaatcgtgctgttccccggcgtgtacgaggagcagggcgagatcatcctgaaggtgcccgtggagatcgtgggccagggcaagctgggcgaggtggccctgctggccagcatcgaccagcactgcagcaccaccagactgtgcaacctggtgttcacccccgcctggttcagccccatcatgtacaagaccaccagcggccacgtgcagttcgacaactgcaacttcgagaacggccacatccaggtgcacggccccggcacctgccaggtgaagttctgcaccttcaagaacacccacatcttcctgcacaacgtgcccctgtgcgtgctggagaactgcgagttcgtgggcagcgagaacaacagcgtgaccgtggagggccaccccagcgccgacaagaactgggcctacaagtacctgctgggcctgatcaagagcagccccaccttcctgcccaccgaggacagcgacttcctgatgagcctggacctggagagcagagaccaggcctggagccccaagacctgcgacatcgtgatcgagggcagccagagccccaccagccccgccagcagcagccccaagcccggcagcaaggccggcagccaggaggccgaggtgggcagcgacggcgagagagtggcccagacccccgacagcagcgacggcggcctgagccccagcggcgaggacgaggacgaggaccagctgatgtacagactgagctaccaggtgcagggccccagacccgtgctgggcggcagcttcctgggcccccccctgcccggcgccagcatccagctgcccagctgcctggtgctgaacagcctgcagcaggagctgcagaaggacaaggaggccatggccctggccaacagcgtgcagggctgcctgatcagaaagtgcctgttcagagacggcaagggcggcgtgttcgtgtgcagccacggcagagccaagatggagggcaacatcttcagaaacctgacctacgccgtgagatgcatccacaacagcaagatcatcatgctgagaaacgacatctacagatgcagagccagcggcatcttcctgagactggagggcggcggcctgatcgccggcaacaacatctaccacaacgccgaggccggcgtggacatcagaaagaagagcaaccccctgatcctgtgcaaccagatccaccacggcctgagaagcggcatcgtggtgctgggcaacggcaagggcatcatcagaaacaaccagatcttcagcaacaaggaggccggcatctacatcctgtaccacggcaaccccgtggtgagcggcaaccacatcttcaagggcagagccgccggcatcgccgtgaacgagaacggcaagggcctgatcaccgagaacgtgatcagagagaaccagtggggcggcgtggacatcagaagaggcggcatccccgtgctgagaagcaacctgatctgcttcggctacagcgacggcgtggtggtgggcgacgagggcaagggcctgatcgagggcaacaccatctacgccaacaagggctgcggcgtgtggatgatgagcagcagcctgccccacgtgaccagcaaccacgtgagctacaacggcctgtacggcgtggccgtgttcagccagaaggacggcagcagcgagctgcccagaggccacagagcccaggagaacttcagcgaggacggcgacgccatcctgtgggagaccgagctggagaaggaggacgaccccctgagaagacccatcaccatcgccctggtggagagcaacagcatcaaccacaacggcgccagcggcctgtacgtgcagagcagcgaggccctgcacgtgatcaccaacgtgatccacgccaacggcgacagaggcatcaccgtggcccagagcagccagcccaccagagtggccaacaacagcatcagctgcaacagacagagcggcgtgaaggtggaggcccagtgcaaggtggagctgagaggcaacggcatctacgacaacagaggccacggcatcatcaccaagggcgacagcaccatcgtgatcgagaacgacatcatcggcaacagaggcagcggcctgcagctgctgcccagaagcgacaccaaggtgatcaagaacagaatccacagcttcagagcctacggcatcgccgtgagaggcagagccaaggccctggtgcaggagaacatcatcttccagggcaagaccagcaagaccatcttccagcagatcagcaacaacagagagtgcatcatgcagaacaacaagttcctggtgttcaagaagaagagcgacacctggagactggtgaacccccccgccagaccccacctggagaacagcctgagaagacccagcgccgcccacaacggccagaaggtgaccgccatggccaccagaatcaccgccagagtggagggcggctaccacagcaacagaagcgtgttctgcaccatcctgtag

SEQ ID NO: 309383 - protein, 194 aa, Artificial Sequence
  derived and/or modified sequence
MDQNLNFFSVSSDGRIVSWTLVKRKLVHIDVIKLKVEGSTTEVPEGLQLHPVGCGTAFDFHKEIDYMFLVGTEEGKIYKCSKSYSSQFLDTYDAHNMSVDTVSWNPYHTKVFMSCSSDWTVKIWDHTIKTPMFIYDLNSAVGDVAWAPYSSTVFAAVTTDGKEKKGQEVQKGPAVEIAKLDKLLNLVREVKIKT

SEQ ID NO: 309384 - protein, 142 aa, Artificial Sequence
  derived and/or modified sequence
  misc_feature (1)..(1): Xaa can be any naturally occurring amino acid
XCGTAFDFHKEIDYMFLVGTEEGKIYKCSKSYSSQFLDTYDAHNMSVDTVSWNPYHTKVFMSCSSDWTVKIWDHTIKTPMFIYDLNSAVGDVAWAPYSSTVFAAVTTDGKEKKGQEVQKGPAVEIAKLDKLLNLVREVKIKT

SEQ ID NO: 309385 - protein, 168 aa, Artificial Sequence
  derived and/or modified sequence
MIPASAKAPHKQPHKQSISIGRGTRKRDEDSGTEVGEGTDEWAQSKATVRPPDQLELTDAELKEEFTRILTANNPHAPQNIVRYSFKKQWSLGFIPKLKRKIPVNYWGQDEGEISNETVRVIYSLGIFIMKIVTILLNINIEHLLCVRHCVNRLFLLFLILIIIMQIR

SEQ ID NO: 309386 - DNA, 870 bp, Artificial Sequence
  derived and/or modified sequence
atgatccccgcgagcgccaaggcccctcataagcagcctcacaagcaggacgaggacagcggaacagaagttggggaaggaacagacgagtgggcgcagtcaaaggccactgtcaggccacctgatcaactcgagctgaccgacgctgagcttaaagaagaattcacgagaattttgactgcgaacaatccacacgccccacagaacatcgtgcgttactcttttaaagaagggacatataagcctattgggttcgtaaaccagctggccgtacactatacccaggttgggaacctgatccccaaagacagcgatgaaggaagacgacaacattacagggatgagctggttgctggcagtcaggagtcagtcaaggtcatcagtgaaacgggtaatctggaggaggatgaagagccgaaagagctggagactgaaccggggagccagactgatgtcccggccgccggtgccgctgaaaaagtcacagaggaggagcttatgacccctaagcaaccaaaggaaaggaaacttaccaaccagtttaacttctctgagcgtgcctcccagacttacaataacccagtcagggaccgggagtgtcaaacagaacctccaccaaggactaacttttcagccacagctaaccaatgggaaatctacgacgcatacgtggaagaactcgagaaacaggagaaaactaaagaaaaagaaaaggctaagacccccgtcgctaaaaagagcggcaaaatggccatgcgcaaactcactagtatggaaagtcagaccgacgacttgatcaaactgtcacaggccgccaaaatcatggaacgaatggtcaaccagaatacttacgacgacatcgcacagtag

SEQ ID NO: 309387 - DNA, 870 bp, Artificial Sequence
  derived and/or modified sequence
atgattccagcaagtgctaaagcacctcacaagcagccccacaaacaagacgaggactccggcactgaggtgggtgaagggacagatgaatgggctcagagcaaagcaaccgtgcgcccccccgaccagcttgagttgacggatgccgagctgaaagaggagtttacgagaatcctcactgccaacaacccacacgccccccagaatatagtacgctacagtttcaaagaggggacatacaaaccgattggctttgtcaatcaactggccgttcactatacccaagtcggaaaccttatcccaaaagatagtgacgaaggccgtcgtcagcattaccgagacgagctcgtggctggttcccaggagagtgtaaaagtcatttcagagaccggcaacctcgaggaagatgaggagcctaaagaactcgagaccgaacctgggtcccagacagatgtacctgcagctggtgccgcagagaaggtaactgaagaggagctgatgacccccaagcagcctaaggaacgtaaactaactaaccagtttaatttcagtgaacgggctagccaaacatataacaaccccgtgagagatagggagtgtcagaccgagcctccccccaggaccaatttttctgctactgcgaatcagtgggaaatttacgacgcatatgtcgaagaactagaaaagcaggaaaagacgaaggaaaaggagaaagcgaagacacccgtggctaagaaaagcggaaaaatggccatgcgcaaattgacctccatggagagtcagacagatgatctgatcaagctttctcaggcagcaaagattatggagagaatggtaaatcaaaacacttacgatgacatcgcgcagtag

SEQ ID NO: 309388 - DNA, 507 bp, Artificial Sequence
  derived and/or modified sequence
atgattcctgcgtctgccaaggctccacataagcagccgcataagcagtcaatttctataggccgtggcacaagaaagcgtgacgaggactctggcactgaagtgggagagggcaccgatgagtgggcacaaagcaaagccacagtgaggcctcccgaccagctagaactgacagatgctgagctcaaggaggagtttacccggatcctcaccgcgaataacccacacgcaccacagaacatagtgcggtatagctttaagaaacagtggtccctcggtttcatccctaaactaaagaggaaaattccagtaaattactggggccaggatgaaggcgagatctccaacgagactgttagagtaatctacagtcttggaatctttatcatgaagattgtgacaatccttctgaatatcaacattgaacatctgctctgcgtgagacactgtgtgaacaggctgtttctcctgtttctgatccttattataataatgcaaatcaggtag

SEQ ID NO: 309389 - DNA, 870 bp, Artificial Sequence
  derived and/or modified sequence
atgatcccagccagcgccaaggccccccacaagcagccccacaagcaggatgaggacagcggcacagaggtgggggagggcacagatgagtgggcccagagcaaggccaccgtgcggcccccagaccagctggagctgacagatgctgagctgaaggaggagttcacccgcatcctgacagccaacaacccccacgccccccagaacatcgtgcgctacagcttcaaggagggcacctacaagcccatcggctttgtgaaccagctggccgtgcactacacccaggtgggcaacctgatccccaaggacagtgatgagggccggcggcagcactacagagatgagctggtggccggcagccaggagagcgtgaaggtgatcagcgagaccggcaacctggaggaggatgaggagcccaaggagctggagacagagcccggcagccagacagatgtgcctgctgctggagctgctgagaaggtgacagaggaggagctgatgacccccaagcagcccaaggagaggaagctgaccaaccagttcaacttcagcgagcgggccagccagacctacaacaaccctgtgcgggaccgggagtgccagacagagcccccacccaggaccaacttcagcgccacagccaaccagtgggagatctatgatgcctacgtggaggagctggagaagcaggagaagaccaaggagaaggagaaggccaagacccctgtggccaagaagagcggcaagatggccatgaggaagctgacctccatggagagccagacagatgacctgatcaagctgagccaggccgccaagatcatggagaggatggtgaaccagaacacctatgatgacatcgcccagtag

SEQ ID NO: 309390 - DNA, 507 bp, Artificial Sequence
  derived and/or modified sequence
atgatcccagccagcgccaaggccccccacaagcagccccacaagcagagcatcagcatcggccggggcaccaggaagagagatgaagattctggaacagaggtgggggagggcacagatgagtgggcccagagcaaggccaccgtgcggcccccagaccagctggagctgacagatgctgagctgaaggaggagttcacccgcatcctgacagccaacaacccccacgccccccagaacatcgtgcgctacagcttcaagaagcagtggagcctgggcttcatccccaagctgaagaggaagatccctgtgaactactggggccaggatgaaggagagatcagcaatgagaccgtgcgggtcatctacagcctgggcatcttcatcatgaagatcgtgaccatcctgctgaacatcaacatcgagcacctgctgtgtgtgcgccactgtgtgaacagactcttcctgctcttcctgatcctgatcatcatcatgcagatcagatag

SEQ ID NO: 309391 - DNA, 870 bp, Artificial Sequence
  derived and/or modified sequence
atgatccccgccagcgccaaggccccccacaagcagccccacaagcaggacgaagatagtgggaccgaggtgggggagggcacagatgaatgggctcagagtaaagccaccgtgcggcccccggaccaactggagcttacggacgctgagcttaaggaagagttcaccaggattctgactgcaaacaacccccatgctcctcagaatatcgtgaggtattcctttaaggaagggacatacaaacccataggtttcgttaaccagttggcggtgcactacactcaagtcggtaatttgattcctaaggatagcgacgagggccgcagacagcattaccgggatgaactggttgccggctctcaggaatccgtgaaggtgatctccgagaccggaaatcttgaagaagatgaagaacctaaagagctcgagacagaacccggatcccagacggacgtacccgctgccggagccgccgaaaaggtgaccgaagaggagttaatgacgcccaaacagcccaaagaacgcaagctaactaatcagttcaatttctcagaacgcgctagtcaaacatacaataaccccgtaagagaccgcgagtgccagacagagccgccccctcgtacaaactttagtgcaactgccaatcagtgggaaatctacgatgcctatgtggaagagctagaaaaacaggaaaaaaccaaagagaaagagaaggctaaaacacctgtggcaaagaagtccggcaaaatggcgatgagaaaactcacgtcgatggaatcccagactgacgaccttataaaactctcccaggcagcaaagattatggaaagaatggtcaatcagaatacctatgacgatatcgctcagtag

SEQ ID NO: 309392 - DNA, 870 bp, Artificial Sequence
  derived and/or modified sequence
atgatccccgccagcgccaaggccccccacaagcagccccacaagcaggatgaagacagcgggactgaggtaggcgaaggaactgacgagtgggcgcagtccaaagccacagtgcggccccctgaccagctggaactcaccgacgcagaactaaaggaggaatttactcgcatcctgaccgcgaataacccacatgctccacaaaacattgtgcggtactcattcaaggaaggaacctacaaacctattggcttcgtgaaccagctggccgtgcattatactcaggtcggaaaccttattcccaaggacagcgatgaggggcggcgccagcattatcgcgacgagctggttgccgggtcacaggagagtgtgaaagtaattagcgaaacagggaacctagaagaagatgaggaacccaaggagctggaaactgagccgggatcacagactgatgttcccgccgcaggcgccgctgagaaagtcaccgaagaggagctgatgacccctaaacagcccaaagagcggaagttgaccaaccagttcaatttctccgagcgcgccagccagacctataacaatccggtcagagatcgggaatgtcagaccgagccacctcctaggaccaacttctccgccacagctaaccagtgggaaatttacgatgcctacgtggaggaacttgaaaagcaggagaagactaaggagaaagagaaggccaagactccagttgccaaaaagtcagggaagatggccatgagaaagctgactagcatggagagccagactgacgacctgatcaagcttagtcaggcagccaaaatcatggagcggatggtgaaccaaaatacatacgatgatatagcccagtag

SEQ ID NO: 309393 - DNA, 507 bp, Artificial Sequence
  derived and/or modified sequence
atgatccccgccagcgccaaggccccccacaagcagccccacaagcagagcataagcattggccgcggaacgcgcaagagggacgaggactcagggaccgaagtgggagaagggaccgatgaatgggctcaatccaaggccacggtgcgcccccctgatcaactcgaactcactgatgccgaattgaaggaggaattcacgaggattctgactgcaaataacccacatgccccacagaacatcgtccgctattccttcaagaagcagtggtcactgggatttatcccgaagctgaaaagaaagatccccgtcaattactgggggcaggatgaaggggagatctcaaatgagaccgttcgcgttatctatagcctggggatctttattatgaaaattgtcaccatactgttgaacatcaatatagagcacctcctatgcgtgcgacattgcgtcaatcgcttattcctcctgttcctcatcctgataatcatcatgcagatccgctag

SEQ ID NO: 309394 - DNA, 870 bp, Artificial Sequence
  derived and/or modified sequence
atgatccccgcatctgccaaggcaccgcacaaacagccccacaagcaggatgaggatagcggaacagaggtgggggaagggaccgatgaatgggcacagtccaaggccactgttcgacctcctgaccagcttgagttgacagacgcagagctcaaggaggagttcacacggatactaactgctaacaacccgcacgccccacagaatatcgttcgatattcattcaaagaaggcacttataaacctatcggctttgtgaaccagcttgccgttcattatacacaggttggcaatctgattcctaaagattctgacgaaggacggagacaacattatagagatgagctggtggctgggtcccaagagtcagtaaaggtgattagcgagaccggcaatctggaagaagatgaagaacccaaggagttggaaaccgaacctggatcacagaccgatgtccctgccgcaggcgctgctgagaaggtgactgaagaagagctaatgacgccgaagcagccaaaagagcggaaacttaccaaccaattcaatttctcagaaagagcttctcagacgtacaataatcccgtgcgcgatcgcgagtgccaaacagagcccccacccagaacaaatttcagtgccacagcgaaccagtgggaaatttacgatgcatacgtggaggaattggagaagcaggagaagaccaaagaaaaagagaaagccaagaccccggtcgctaagaagtcaggaaaaatggcgatgaggaaactgacttccatggaaagtcagaccgatgatctgattaagctctcccaggccgcaaagatcatggaacgtatggtgaaccagaatacctatgacgatatagcacagtag

SEQ ID NO: 309395 - DNA, 870 bp, Artificial Sequence
  derived and/or modified sequence
atgatccctgcttccgccaaagccccacataaacagcctcacaaacaggacgaggacagcgggacggaggtcggcgaggggactgatgaatgggcccagtccaaagccacagtgagaccgcctgatcaattagaactgacagacgccgagcttaaggaggagttcacacggatcctgaccgccaacaacccacacgcccctcagaacatcgtgcgatatagcttcaaggaaggcacatataagccgatcgggtttgtgaaccagttggccgttcactatactcaggtgggcaatctgatccccaaagattccgatgagggcaggaggcagcattatcgggacgagctggtggcaggatctcaggagtcagtcaaggttatcagtgagaccggaaacctcgaggaagacgaggagcccaaagagctcgaaaccgaacctggatcccagacagacgtccctgctgccggtgctgccgaaaaagtgacagaggaagagctcatgaccccgaagcagccaaaagaacgtaaactaactaatcaatttaacttctctgaacgtgcatcccaaacttataataaccccgtcagagatcgtgaatgccagacagaacccccaccaaggacaaactttagtgccacagcgaaccagtgggagatctacgacgcctatgtagaggagctggagaagcaggaaaagactaaggagaaagaaaaggcgaaaacaccggtagcaaagaaaagtggcaagatggctatgcgcaaactgacttctatggagtcccagaccgacgatctgattaagctgtcccaggccgctaaaatcatggaaaggatggttaatcagaatacttatgacgacatagcccagtag

SEQ ID NO: 309396 - DNA, 507 bp, Artificial Sequence
  derived and/or modified sequence
atgattcccgcaagcgccaaagcgccacataagcagccccataagcaaagtattagtatcgggagggggacccgtaagagggacgaagattcaggcactgaagtgggcgaaggcaccgatgagtgggcccaaagcaaggccaccgtcaggcccccagaccagctggaattaacagatgccgaactcaaagaggagtttactcggatactcaccgccaataaccctcacgctcctcagaacattgtgcgctatagcttcaagaagcagtggtccctcggcttcatcccaaagcttaagcggaaaatcccggtgaattattggggccaggatgaaggagaaatcagtaatgaaacggtccgtgtgatctactcactggggattttcattatgaaaatcgtgaccatcctcctgaacataaatatcgaacaccttttgtgcgtgcgccactgtgtgaatcgactgtttctgttgttcctgattttgattataatcatgcaaattcggtag

SEQ ID NO: 309397 - DNA, 870 bp, Artificial Sequence
  derived and/or modified sequence
atgatccccgccagcgccaaggccccccacaagcagccccacaagcaggacgaggacagcggcaccgaggtgggcgagggcaccgacgagtgggcccagagcaaggccaccgtgagaccccccgaccagctggagctgaccgacgccgagctgaaggaggagttcaccagaatcctgaccgccaacaacccccacgccccccagaacatcgtgagatacagcttcaaggagggcacctacaagcccatcggcttcgtgaaccagctggccgtgcactacacccaggtgggcaacctgatccccaaggacagcgacgagggcagaagacagcactacagagacgagctggtggccggcagccaggagagcgtgaaggtgatcagcgagaccggcaacctggaggaggacgaggagcccaaggagctggagaccgagcccggcagccagaccgacgtgcccgccgccggcgccgccgagaaggtgaccgaggaggagctgatgacccccaagcagcccaaggagagaaagctgaccaaccagttcaacttcagcgagagagccagccagacctacaacaaccccgtgagagacagagagtgccagaccgagcccccccccagaaccaacttcagcgccaccgccaaccagtgggagatctacgacgcctacgtggaggagctggagaagcaggagaagaccaaggagaaggagaaggccaagacccccgtggccaagaagagcggcaagatggccatgagaaagctgaccagcatggagagccagaccgacgacctgatcaagctgagccaggccgccaagatcatggagagaatggtgaaccagaacacctacgacgacatcgcccagtag

SEQ ID NO: 309398 - DNA, 507 bp, Artificial Sequence
  derived and/or modified sequence
atgatccccgccagcgccaaggccccccacaagcagccccacaagcagagcatcagcatcggcagaggcaccagaaagagagacgaggacagcggcaccgaggtgggcgagggcaccgacgagtgggcccagagcaaggccaccgtgagaccccccgaccagctggagctgaccgacgccgagctgaaggaggagttcaccagaatcctgaccgccaacaacccccacgccccccagaacatcgtgagatacagcttcaagaagcagtggagcctgggcttcatccccaagctgaagagaaagatccccgtgaactactggggccaggacgagggcgagatcagcaacgagaccgtgagagtgatctacagcctgggcatcttcatcatgaagatcgtgaccatcctgctgaacatcaacatcgagcacctgctgtgcgtgagacactgcgtgaacagactgttcctgctgttcctgatcctgatcatcatcatgcagatcagatag

SEQ ID NO: 309399 - DNA, 1039 bp, Artificial Sequence
  derived and/or modified sequence
attctatcctgcaagggcacggggacccacaacgacggctgtccctaaagaaccgttgcgactggtaactgaagtggaagagagtccagatttcttgtgtgtggtcaaggagacggacaaactttttgtcttcagacgagggagcgttttgtaggctctccaggggttgagatgattcctgcttctgcgaaggctccccataaacagcctcataagcaggatgaagattcagggactgaagtgggagaaggcacagatgaatgggcccaatccaaagccacagttagaccccctgaccagctggagttgaccgatgcggagttaaaggaggagttcactcggattttgacagccaacaacccacacgcaccccagaacattgtcaggtacagcttcaaagaaggcacatataagcctattggctttgtgaaccaactggcagttcactacacccaggttgggaacctgatccccaaagactcagatgaaggacggcggcagcattaccgcgatgaattagtggcaggttctcaggagtctgtcaaggtgatttcagaaacaggaaacctcgaagaagacgaagagcccaaggagttagaaactgagcctgggagtcaaacagatgtgcctgcagctggggcagctgaaaaagtgactgaagaagaattgatgactcctaagcagcccaaggagagaaagctcactaaccagttcaacttcagtgagagggcctcacagacctacaacaaccctgtccgggatcgagaatgccagacggagcctcctcccaggacaaacttttcagccacagccaatcagtgggagatctatgatgcctatgtagaggaacttgagaagcaggaaaagaccaaagagaaggagaaggcaaagaccccagtggctaaaaaatcagggaagatggccatgaggaagctgacatctatggagtctcagactgatgatctcatcaaattgtcccaagctgctaagatcatggagcggatggtcaaccagaatacatatgatgacattgctcaag

SEQ ID NO: 309400 - DNA, 1325 bp, Artificial Sequence
  derived and/or modified sequence
gttgcgactggtaactgaagtggaagagagtccagatttcttgtgtgtggtcaaggagacggacaaactttttgtcttcagacgagggagcgttttgtaggctctccaggggttgagatgattcctgcttctgcgaaggctccccataaacagcctcataagcagagcatcagcataggcagaggaaccaggaagagagatgaagattcagggactgaagtgggagaaggcacagatgaatgggcccaatccaaagccacagttagaccccctgaccagctggagttgaccgatgcggagttaaaggaggagttcactcggattttgacagccaacaacccacacgcaccccagaacattgtcaggtacagcttcaaaaagcaatggagtctgggtttcattcctaaactgaagaggaagatcccagtcaactactggggacaagatgaaggtgaaatctcaaatgaaactgtaagggtaatttattccttgggaatcttcatcatgaaaatagttactattttattgaacattaatattgagcatttattatgtgtcagacactgtgttaataggttgtttttattatttttaatacttataattatcatgcaaattagatagtattagccttcttttatagatgaagaacttagggcttagagtggttaagcccaaagtcatgaagataagaagcagcagaataaagattcaaacccaactctgcctgcctccaaagaccatgctcttaaccactgcactgacttgtcttcccatacatctgagttactgaaagaagaagggctctgtggtgacttttaaatacagagcttcccaacctgtgtgatggcgatccttccagccctccaggggcagggagatctgtgcaactggaccccatgaactggtttcctctactgtgagtttaccgtagtgtgccatacaaacatagtttctatatggcttgaaaagggtttgcatatctgttttaaaagaaggaagagatctccggtctctaagtcaattttagtggttgcaagggtgctgatcaatgaggaggctatctgcaggaaccagactacaagctctgtgaaataagggattgtgtctactttttctcagctttatatcccaggcacctggaaaatacttggcacattgaggctgttcaaaaattatttcaagaatggatgaacaaaatgacctgggctgtaagcctaatcctgcttctcatttgctgtgtgacccggacaaatgccaacccatatcttttctggaattccatggtcctcttgtatggaactaggggattggggttgtctctg

SEQ ID NO: 309401 - protein, 140 aa, Artificial Sequence
  derived and/or modified sequence
MCLFRQYATCFNSGIYLIWTLLVVVGIGSVYFHATLSFLGQMLDELAVLWVLMCALAMWFPRRYLPKIFRNDRGRFKVVVSVLSAVTTCLAFVKPAINNISLMTLGVPCTALLIAELKRHERNQRRRHRKGGQQGGGDKV

SEQ ID NO: 309402 - DNA, 423 bp, Artificial Sequence
  derived and/or modified sequence
atgtgtcttttcaggcagtacgcaacctgtttcaatagcggcatttaccttatttggacactcctcgtcgtagtagggattggctccgtgtacttccatgctacgttgtcctttctgggccagatgttggatgagttagcagtgctatgggtgctcatgtgcgctctggctatgtggtttccgagacgatatctgccgaaaatttttcgtaacgataggggtagatttaaagtggtggtgtccgtgttatcggccgtgacaacttgcctggcgttcgtgaagccagctatcaacaacatatcattaatgaccctcggcgtcccgtgcacggctctcctcatcgcagaacttaagcgccacgagcgcaatcagagacgcaggcaccggaaaggcggacaacagggggggggagataaggtctag

SEQ ID NO: 309403 - DNA, 423 bp, Artificial Sequence
  derived and/or modified sequence
atgtgcctcttccggcagtatgccacctgcttcaacagcggcatctacctgatctggaccctgctggtggtggtgggcatcggctctgtgtacttccacgccaccctgtccttcctgggccagatgctggatgagctggccgtgctgtgggtgctgatgtgtgccctggccatgtggttcccccggcgctacctgcccaagatcttcagaaatgaccggggccgcttcaaggtggtggtgtctgtgctgtctgctgtgaccacctgcctggcctttgtgaagccagccatcaacaacatcagcctgatgaccctgggcgtgccctgcacagccctgctgattgctgagctgaagagacatgagaggaaccagaggcggcggcacaggaagggcggccagcagggcggcggggacaaggtgtag

SEQ ID NO: 309404 - DNA, 728 bp, Artificial Sequence
  derived and/or modified sequence
gcggagcgcgggaggccagttgggaggcgcacatccggcggttacccggtgcttcataaagccgctttcgccgctggctgtcgccgcgttttgcctccgcagcagctctgggctcttctcagctgcgcgagcagctgctccaatgccccggagtggccatgggcgccccgcactggtgggaccagctgcaggctggtagctcggaggtggactggtgcgaggacaactacaccatcgtgcctgctatcgccgagttctacaacacgatcagcaatgtcttatttttcattttaccgcccatctgcatgtgcttgtttcgtcagtatgcaacatgcttcaacagtggcatctacttaatctggactcttttggttgtagtgggaattggatccgtctacttccatgcaacccttagtttcttgggtcagatgcttgatgaacttgcagtcctttgggttctgatgtgtgctttggccatgtggttccccagaaggtatctaccaaagatctttcggaatgaccggggtaggttcaaggtggtggtcagtgtcctgtctgcggttacgacgtgcctggcatttgtcaagcctgccatcaacaacatctctctgatgaccctgggagttccttgcactgcactgctcatcgcagagctaaagaggcatgagaggaaccagcgaaggagacacaggaaaggtggccagcaaggaggtggagacaaggtctga

SEQ ID NO: 309405 - DNA, 423 bp, Artificial Sequence
  derived and/or modified sequence
atgtgcctgttccggcagtacgccacctgcttcaacagcggcatctaccttatctggacgctgctggttgtggtggggattggctctgtttacttccacgcaactctatcatttctggggcagatgctagacgagttggccgtgctctgggtgcttatgtgtgctcttgccatgtggtttcctaggaggtacctcccaaagatttttagaaacgaccgcggtagattcaaagtagttgtcagcgtgctcagcgcagttaccacatgtctggcttttgtgaaacccgccattaacaacattagcctgatgacactcggtgtgccctgtacagccctgctcattgcagagctcaagagacatgagcgcaaccaaagacggcgacaccgaaaagggggtcaacagggtggcggggataaggtgtag

SEQ ID NO: 309406 - DNA, 423 bp, Artificial Sequence
  derived and/or modified sequence
atgtgcctgtttagacagtatgctacgtgtttcaactctggtatttacttaatctggacattgctggtggttgtgggcattggatcagtgtacttccacgcaacgctttccttcctgggccagatgctggacgagcttgcagtcctatgggtgctcatgtgcgctcttgcaatgtggttcccccgacggtacttaccaaagattttccggaacgaccggggacgcttcaaagtggttgtgtctgtgctgtctgctgtgaccacatgtctagcttttgtgaagcccgctatcaataacatcagtctcatgactctgggcgttccttgcactgcattgctcatcgcagaactgaagcggcacgagagaaaccagcgtcgacgccaccgtaagggcggtcagcaggggggtggagataaagtatag

SEQ ID NO: 309407 - DNA, 423 bp, Artificial Sequence
  derived and/or modified sequence
atgtgcctgttcagacagtacgccacctgcttcaacagcggcatctacctgatctggaccctgctggtggtggtgggcatcggcagcgtgtacttccacgccaccctgagcttcctgggccagatgctggacgagctggccgtgctgtgggtgctgatgtgcgccctggccatgtggttccccagaagatacctgcccaagatcttcagaaacgacagaggcagattcaaggtggtggtgagcgtgctgagcgccgtgaccacctgcctggccttcgtgaagcccgccatcaacaacatcagcctgatgaccctgggcgtgccctgcaccgccctgctgatcgccgagctgaagagacacgagagaaaccagagaagaagacacagaaagggcggccagcagggcggcggcgacaaggtgtag

SEQ ID NO: 309408 - protein, 1368 aa, Artificial Sequence
  derived and/or modified sequence
MASWLYECLCEAELAQYYSHFTALGLQKIDELAKITMKDYSKLGVHDMNDRKRLFQLIKIIKIMQEEDKAVSIPERHLQTSSLRIKSQELRSGPRRQLNFDSPADNKDRNASNDGFEMCSLSDFSANEQKSTYLKVLEHMLPDDSQYHTKTGILNATAGDSYVQTEISTSLFSPNYLSAILGDCDIPIIQRISHVSGYNYGIPHSCIRQNTSEKQNPWTEMEKIRVCVRKRPLGMREVRRGEINIITVEDKETLLVHEKKEAVDLTQYILQHVFYFDEVFGEACTNQDVYMKTTHPLIQHIFNGGNATCFAYGQTGAGKTYTMIGTHENPGLYALAAKDIFRQLEVSQPRKHLFVWISFYEIYCGQLYDLLNRRKRLFAREDSKHMVQIVGLQELQVDSVELLLEVILKGSKERSTGATGVNADSSRSHAVIQIQIKDSAKRTFGRISFIDLAGSERAADARDSDRQTKMEGAEINQSLLALKECIRALDQEHTHTPFRQSKLTQVLKDSFIGNAKTCMIANISPSHVATEHTLNTLRYADRVKELKKGIKCCTSVTSRNRTSGNSSPKRIQSSPGALSEDKCSPKKVKLGFQQSLTVAAPGSTRGKVHPLTSHPPNIPFTSAPKVSGKRGGSRGSPSQEWVIHASPVKGTVRSGHVAKKKPEESAPLCSEKNRMGNKTVLGWESRASGPGEGLVRGKLSTKCKKVQTVQPVQKQLVSRVELSFGNAHHRAEYSQDSQRGTPARPASEAWTNIPPHQKEREEHLRFYHQQFQQPPLLQQKLKYQPLKRSLRQYRPPEGQLTNETPPLFHSYSENHDGAQVEELDDSDFSEDSFSHISSQRATKQRNTLENSEDSFFLHQTWGQGPEKQVAERQQSLFSSPRTGDKKDLTKSWVDSRDPINHRRAALDHSCSPSKGPVDWSRENSTSSGPSPRDSLAEKPYCSQVDFIYRQERGGGSSFDLRKDASQSEVSGENEGNLPSPEEDGFTISLSHVAVPGSPDQRDTVTTPLREVSADGPIQVTSTVKNGHAVPGEDPRGQLGTHAEYASGLMSPLTMSLLENPDNEGSPPSEQLVQDGATHSLVAESTGGPVVSHTVPSGDQEAALPVSSATRHLWLSSSPPDNKPGGDLPALSPSPIRQHPADKLPSREADLGEACQSRETVLFSHEHMGSEQYDADAEETGLDGSWGFPGKPFTTIHMGVPHSGPTLTPRTGSSDVADQLWAQERKHPTRLGWQEFGLSTDPIKLPCNSENVTWLKPRPISRCLARPSSPLVPSCSPKTAGTLRQPTLEQAQQVVIRAHQEQLDEMAELGFKEETLMSQLASNDFEDFVTQLDEIMVLKSKCIQSLRSQLQLYLTCHGPTAAPEGTVPS

SEQ ID NO: 309409 - protein, 1158 aa, Artificial Sequence
  derived and/or modified sequence
MASWLYECLCEAELAQYYSHFTALGLQKIDELAKITMKDYSKLGVHDMNDRKRLFQLIKIIKIMQEEDKAVSIPERHLQTSSLRIKSQELRSGPRRQLNFDSPADNKDRNASNDGFEMCSLSDFSANEQKSTYLKVLEHMLPDDSQYHTKTGILNATAGDSYVQTEISTSLFSPNYLSAILGDCDIPIIQRISHVSGYNYGIPHSCIRQNTSEKQNPWTEMEKIRVCVRKRPLGMREVRRGEINIITVEDKETLLVHEKKEAVDLTQYILQHVFYFDEVFGEACTNQDVYMKTTHPLIQHIFNGGNATCFAYGQTGAGKTYTMIGTHENPGLYALAAKDIFRQLEVSQPRKHLFVWISFYEIYCGQLYDLLNRRKRLFAREDSKHMVQIVGLQELQVDSVELLLEVILKGSKERSTGATGVNADSSRSHAVIQIQIKDSAKRTFGRISFIDLAGSERAADARDSDRQTKMEGAEINQSLLALKECIRALDQEHTHTPFRQSKLTQVLKDSFIGNAKTCMIANISPSHVATEHTLNTLRYADRVKELKKGIKCCTSVTSRNRTSGNSSPKRIQSSPGALSEDKCSPKKVKLGFQQSLTVAAPGSTRGKVHPLTSHPPNIPFTSAPKVSGKRGGSRGSPSQEWVIHASPVKGTVRSGHVAKKKPEESAPLCSEKNRMGNKTVLGWESRASGPGEGLVRGKLSTKCKKVQTVQPVQKQLVSRVELSFGNAHHRAEYSQDSQRGTPARPASEAWTNIPPHQKEREEHLRFYHQQFQQPPLLQQKLKYQPLKRSLRQYRPPEGQLTNETPPLFHSYSENHDGAQVEELDDSDFSEDSFSHISSQRATKQRNTLENSEDSFFLHQTWGQGPEKQVAERQQSLFSSPRTGDKKDLTKSWVDSRDPINHRRAALDHSCSPSKGPVDWSRENSTSSGPSPRDSLAEKPYCSQVDFIYRQERGGGSSFDLRKDASQSEVSGENEGNLPSPEEDGFTISLSHVAVPGSPDQRDTVTTPLREVSADGPIQVTSTVKNGHAVPGEDPRGQLGTHAEYASGLMSPLTMSLLENPDNEGSPPSEQLVQDGATHSLVAESTGGPVVSHTVPSGDQEAALPVSSATRHLWLSSSPPDNKPGGDLPALGPGEKTSYKAWLAGVWFVHRPHQVALQQ

SEQ ID NO: 309410 - DNA, 6226 bp, Artificial Sequence
  derived and/or modified sequence
gacgggactgttaggttgcgggctttggggctcactcccgacggcattgtcttctcctcttctcagacagggcagaccgaggagtttggaccgagagtttatagaaacctattcaccaaaatggcatcctggttatatgaatgtctttgtgaagctgaacttgcacagtattattctcatttcactgcccttggccttcagaaaatagatgaattagccaagattacaatgaaggactactccaaattaggagtccatgacatgaacgaccgcaaacgtctcttccaacttatcaaaattattaagattatgcaagaagaagataaagcagtcagtatcccagagcgtcatcttcagacaagcagcctgcgcatcaaatctcaggaattaagatctggccctcgcagacagctgaattttgattctcctgctgacaataaagacagaaatgccagcaatgatgggtttgaaatgtgcagtttatcagatttctctgcaaatgaacagaagtccacttacctaaaagtgctagaacacatgctaccagatgattcccagtaccatacaaaaacaggaattctgaatgccacagctggtgattcctatgtgcaaacagaaatcagcacttcactcttttcaccaaattacctttctgcaatactgggggattgtgatattcccattattcaaagaatctctcatgtttcagggtataactatggaatccctcattcttgtatcagacagaacacttcagagaaacagaatccttggactgagatggagaaaatcagagtttgtgttcgaaaacgccccctgggcatgagggaggtacgtcgtggagaaattaatattattactgtagaagacaaagaaactctacttgtgcatgagaagaaagaagcagttgacctcactcaatatattctgcagcatgttttttattttgatgaagtctttggtgaggcgtgcaccaatcaggatgtatacatgaagactactcacccacttattcagcatattttcaatggaggcaatgccacttgctttgcttatggacagacaggtgctggaaagacctacaccatgataggaactcatgagaacccaggattgtatgctctagctgccaaagatatcttcaggcaactagaagtgtcccagccaagaaagcacctctttgtgtggatcagcttctatgaaatttactgtggacagctttatgacctcctaaatagaagaaaaaggctctttgcaagagaagatagcaagcacatggtgcagatagtgggactgcaagagcttcaggtggacagtgtggagctcctcttagaggtgatcttaaagggcagcaaggagcgcagcactggggccactggagttaatgcagactcctcccgctcccatgccgtcatccaaattcagatcaaagattcagccaagaggacatttggcaggatctcttttattgacttggctggcagtgaaagagcagcagatgcaagggactcagatagacagacaaagatggaaggtgcagaaataaatcagagtctactggctctgaaggaatgtatccgagcactggatcaggaacacacccatactcccttcaggcaaagcaaactaactcaggtcctgaaggactctttcatcggcaatgccaaaacctgcatgatcgccaacatctcaccaagccacgtggccactgaacacactctcaacaccttgcgctatgctgaccgggtcaaagaactaaagaaaggcattaagtgttgcacttcagttaccagtcgaaatcggacatctggaaactcctctccaaaacgaattcagagctcccctggggctttgtcagaggacaaatgttctcccaaaaaagtcaagctgggatttcagcagtcactcacagtggcagcccctggttccacgagagggaaggtccatcctctgaccagccacccacccaacattccttttacttctgcacctaaggtctctggtaaaaggggtggctccagagggagtccttcacaagagtgggtcattcatgctagccctgtgaaaggaactgtgcgctctggacatgtggccaaaaaaaagccagaagagtcagcaccattgtgctctgagaaaaatcgaatgggcaacaaaactgtccttgggtgggaaagcagggcctcaggcccaggagaaggcctagtgcgtggtaagctgtccaccaagtgcaagaaagtgcagacagtgcagccagtacagaagcagcttgtgtctcgagttgagctctcctttggcaacgcccaccacagggctgagtacagtcaagacagccagaggggcacgcctgctaggcctgcctctgaagcttggacaaacatcccgccacatcagaaggagagggaggaacatctgcgtttctatcaccagcagttccaacagccacctctcctccaacagaagttaaaataccaaccactgaaaaggtctttacgccagtacaggcccccagagggtcagctcacgaatgagactccgcctctgttccactcttactctgaaaaccatgatggagcccaagtagaggaacttgatgacagtgatttcagtgaagattctttttcacacatctctagtcagagggccacaaagcaaaggaacaccctggagaatagcgaagactcattcttcctgcaccagacgtggggacagggtcctgagaagcaggtggcagaaagacagcagagtctgttttctagccccaggacaggtgacaagaaagatctaactaaaagctgggtggactccagggaccccataaaccacagaagagcagcactcgatcacagctgcagcccaagtaaggggcccgtggactggagcagagagaactctacttcctcagggccttctcccagagacagcctggcagagaagccatactgttcacaggtagatttcatatatagacaggaaagaggtggaggctcttcctttgatctcagaaaggatgcctcccaaagtgaggtttctggggagaatgagggcaacttgccatccccagaggaagatggtttcactatctcattgtcccacgttgcagttcctggatccccagaccaaagagacacagtcaccacacctctgagagaagtcagtgcagacggcccaatccaggtgaccagcactgtgaaaaacggtcatgctgtcccaggagaggatcctagggggcagttaggcacgcatgctgaatatgcttctggactcatgtctcccctcaccatgtccctcctggagaacccagacaacgaagggtctcctccctcggagcagctggtccaggatggggctacgcacagtctagtggcagagagcacagggggcccagttgtgagccacacagtgccatctggtgatcaagaggcagccttgccagtgtcttcagcaactaggcacctgtggctgtcctcatctccccctgataataagcctggtggtgatcttccagctctgtccccatcacccatccgtcagcacccagctgacaagctgcccagcagggaggcagacctaggagaggcctgccagagcagagagactgtacttttctcccacgaacacatgggtagtgagcagtatgatgctgatgcagaggagacggggctggatggctcctggggtttcccaggaaagcccttcaccaccatacatatgggggtaccccattctggacctacactcaccccacgaacaggaagtagtgatgtggctgaccagctctgggcccaggagagaaaacatcctacaaggcttggttggcaggagtttggtttgtccacagaccccatcaagttgccctgcaacagtgaaaatgtcacatggctcaaacccaggccgatctcaaggtgcttagcaaggccaagttctcccttggttcccagctgctctcccaagactgcagggacactccgtcagcccaccctggagcaagcgcagcaggtggtcatccgagcacaccaggaacagctggatgaaatggctgagctcggcttcaaggaggagacgctgatgagccagctggcttctaatgattttgaagattttgtgacccagctggatgaaatcatggttctgaaatccaagtgtatccagagtctgaggagccagctgcagctctatctcacctgccacgggcccaccgcagcccctgagggaacagtgccgtcttagagccagaccctgtgccgagatggtgggggccctgcaggagtctgtgctgggctctcaggctggaggagcctctgccaggtcctccctgcacacaccagaacccacacgctggtcctgcctatgctagcgtcaccccagccccacgtggcttcagataggtcccagcttctccctcagggacaggcccctgtccctcagttccatgcacaggagtgcctccaagggtgggccaggccgaagaacctaatgcctttcccttgtgcctagagaatatgattaactaaccccttgcctgtgggaatatatttgggtctaataaccctgaagtttctaagtttggggatcagaggatggggtggtcagtggtagcctagaggtcagaggtcacaagacagagaagacaacatgctgagaccagaggcttcaccagctgaattctgtgcctaacttagaagactaaacactggcccaaacttaaccattggtgctagggggacaggggtggggtgagctctgccccatcagcccttggagattgatttggggatttagaggcgtttttgaaaatgtaaatagcataaaccttgacttgatgtgtcactgacagcagcagatgtgagacaggccttatatttacagctcccttcccttcctgcaatccagtgttgaggcagaagagggtgcctgtgtcacacatcaatttttctcctgacttttgctcgggtgaaaggcctctgtacaatgcccgatactctcatgcttccatggcagctcctggctcctatctgggacacctcactacccagccccctcatggaatagtccatctcctagcctggccttcatccagttcaccctgcccagccaccctgcctctcaggggtctgtgttgggaaccttggcagttgaacagagtgctctgttcaacagtctgaggcctctgaaacagaattcacacacaaaccttcagccaagttctgcctgctgtgtatctttttagcaggaagcagctcaggacagggaagacaaagtagcctccaggtgccaattactttaaagccactctgggtcaaatggagattcatgagtcacggccttggcccgaacgcccattactatgtgagcctttatttccttcagataaaggataactttttacggttttaaaaggagggcttaattaaaaggccaagaagagggttaaatggctctcttgagacactagcagcctggtccagtcaccctttgtcagcctgacagtgcctcatctgaccgccagggggcatccttattggtgcttcccggctgcagggcactgcggcccctccctcacatgatcactaaaaaccttcaaagacccagtctagccaaaagctcaagtgggacaatggcacagtattaaggtcaaggacaaaaacttacttactttaggaatgaaccctattctatcatcatatacaacagcaccactgagagctggtgaaacagtttaaatcccatcctctgcttgtggcaaatgatgcataaatgcctgctgctcacagtaaaagggcttcttcctcttttactgggtgatccccctgaaggcccagcctatcccaactccacagtcaggaaggcctacgtccttggtccacagacggagctgggccaggtttaaaagactcagtctaggcttgcctttgcaaaccaaaaacgaggacaggtctgaagtgggaagaaagctccgaaatagaaaacggttaggtcctattctatccccagcaaatctaagcaagaaatctctttatacaccacatggcccccccactcccataaaacagccttggtaataaagaagttatcacaccaagacataccttttagatttttattagtagttctctctgaagaatcaaaatagttagttagcaaattattttagattcaagactgtatatcctttgtatttagatctttaatgatgtacaacataatacaaaacaaaccagagagactg

SEQ ID NO: 309411 - DNA, 6295 bp, Artificial Sequence
  derived and/or modified sequence
cccctgttcattattcatgggaaacagttgtgcagcatgccttgacattaagttgagcatctaaaattagtcctgctacaatcagttgttgggaacaaggtttcaatagttgtggcatgtgttaagtagacattgcaaggttggaaggaactccctagaaataaagtttatagaaacctattcaccaaaatggcatcctggttatatgaatgtctttgtgaagctgaacttgcacagtattattctcatttcactgcccttggccttcagaaaatagatgaattagccaagattacaatgaaggactactccaaattaggagtccatgacatgaacgaccgcaaacgtctcttccaacttatcaaaattattaagattatgcaagaagaagataaagcagtcagtatcccagagcgtcatcttcagacaagcagcctgcgcatcaaatctcaggaattaagatctggccctcgcagacagctgaattttgattctcctgctgacaataaagacagaaatgccagcaatgatgggtttgaaatgtgcagtttatcagatttctctgcaaatgaacagaagtccacttacctaaaagtgctagaacacatgctaccagatgattcccagtaccatacaaaaacaggaattctgaatgccacagctggtgattcctatgtgcaaacagaaatcagcacttcactcttttcaccaaattacctttctgcaatactgggggattgtgatattcccattattcaaagaatctctcatgtttcagggtataactatggaatccctcattcttgtatcagacagaacacttcagagaaacagaatccttggactgagatggagaaaatcagagtttgtgttcgaaaacgccccctgggcatgagggaggtacgtcgtggagaaattaatattattactgtagaagacaaagaaactctacttgtgcatgagaagaaagaagcagttgacctcactcaatatattctgcagcatgttttttattttgatgaagtctttggtgaggcgtgcaccaatcaggatgtatacatgaagactactcacccacttattcagcatattttcaatggaggcaatgccacttgctttgcttatggacagacaggtgctggaaagacctacaccatgataggaactcatgagaacccaggattgtatgctctagctgccaaagatatcttcaggcaactagaagtgtcccagccaagaaagcacctctttgtgtggatcagcttctatgaaatttactgtggacagctttatgacctcctaaatagaagaaaaaggctctttgcaagagaagatagcaagcacatggtgcagatagtgggactgcaagagcttcaggtggacagtgtggagctcctcttagaggtgatcttaaagggcagcaaggagcgcagcactggggccactggagttaatgcagactcctcccgctcccatgccgtcatccaaattcagatcaaagattcagccaagaggacatttggcaggatctcttttattgacttggctggcagtgaaagagcagcagatgcaagggactcagatagacagacaaagatggaaggtgcagaaataaatcagagtctactggctctgaaggaatgtatccgagcactggatcaggaacacacccatactcccttcaggcaaagcaaactaactcaggtcctgaaggactctttcatcggcaatgccaaaacctgcatgatcgccaacatctcaccaagccacgtggccactgaacacactctcaacaccttgcgctatgctgaccgggtcaaagaactaaagaaaggcattaagtgttgcacttcagttaccagtcgaaatcggacatctggaaactcctctccaaaacgaattcagagctcccctggggctttgtcagaggacaaatgttctcccaaaaaagtcaagctgggatttcagcagtcactcacagtggcagcccctggttccacgagagggaaggtccatcctctgaccagccacccacccaacattccttttacttctgcacctaaggtctctggtaaaaggggtggctccagagggagtccttcacaagagtgggtcattcatgctagccctgtgaaaggaactgtgcgctctggacatgtggccaaaaaaaagccagaagagtcagcaccattgtgctctgagaaaaatcgaatgggcaacaaaactgtccttgggtgggaaagcagggcctcaggcccaggagaaggcctagtgcgtggtaagctgtccaccaagtgcaagaaagtgcagacagtgcagccagtacagaagcagcttgtgtctcgagttgagctctcctttggcaacgcccaccacagggctgagtacagtcaagacagccagaggggcacgcctgctaggcctgcctctgaagcttggacaaacatcccgccacatcagaaggagagggaggaacatctgcgtttctatcaccagcagttccaacagccacctctcctccaacagaagttaaaataccaaccactgaaaaggtctttacgccagtacaggcccccagagggtcagctcacgaatgagactccgcctctgttccactcttactctgaaaaccatgatggagcccaagtagaggaacttgatgacagtgatttcagtgaagattctttttcacacatctctagtcagagggccacaaagcaaaggaacaccctggagaatagcgaagactcattcttcctgcaccagacgtggggacagggtcctgagaagcaggtggcagaaagacagcagagtctgttttctagccccaggacaggtgacaagaaagatctaactaaaagctgggtggactccagggaccccataaaccacagaagagcagcactcgatcacagctgcagcccaagtaaggggcccgtggactggagcagagagaactctacttcctcagggccttctcccagagacagcctggcagagaagccatactgttcacaggtagatttcatatatagacaggaaagaggtggaggctcttcctttgatctcagaaaggatgcctcccaaagtgaggtttctggggagaatgagggcaacttgccatccccagaggaagatggtttcactatctcattgtcccacgttgcagttcctggatccccagaccaaagagacacagtcaccacacctctgagagaagtcagtgcagacggcccaatccaggtgaccagcactgtgaaaaacggtcatgctgtcccaggagaggatcctagggggcagttaggcacgcatgctgaatatgcttctggactcatgtctcccctcaccatgtccctcctggagaacccagacaacgaagggtctcctccctcggagcagctggtccaggatggggctacgcacagtctagtggcagagagcacagggggcccagttgtgagccacacagtgccatctggtgatcaagaggcagccttgccagtgtcttcagcaactaggcacctgtggctgtcctcatctccccctgataataagcctggtggtgatcttccagctctgtccccatcacccatccgtcagcacccagctgacaagctgcccagcagggaggcagacctaggagaggcctgccagagcagagagactgtacttttctcccacgaacacatgggtagtgagcagtatgatgctgatgcagaggagacggggctggatggctcctggggtttcccaggaaagcccttcaccaccatacatatgggggtaccccattctggacctacactcaccccacgaacaggaagtagtgatgtggctgaccagctctgggcccaggagagaaaacatcctacaaggcttggttggcaggagtttggtttgtccacagaccccatcaagttgccctgcaacagtgaaaatgtcacatggctcaaacccaggccgatctcaaggtgcttagcaaggccaagttctcccttggttcccagctgctctcccaagactgcagggacactccgtcagcccaccctggagcaagcgcagcaggtggtcatccgagcacaccaggaacagctggatgaaatggctgagctcggcttcaaggaggagacgctgatgagccagctggcttctaatgattttgaagattttgtgacccagctggatgaaatcatggttctgaaatccaagtgtatccagagtctgaggagccagctgcagctctatctcacctgccacgggcccaccgcagcccctgagggaacagtgccgtcttagagccagaccctgtgccgagatggtgggggccctgcaggagtctgtgctgggctctcaggctggaggagcctctgccaggtcctccctgcacacaccagaacccacacgctggtcctgcctatgctagcgtcaccccagccccacgtggcttcagataggtcccagcttctccctcagggacaggcccctgtccctcagttccatgcacaggagtgcctccaagggtgggccaggccgaagaacctaatgcctttcccttgtgcctagagaatatgattaactaaccccttgcctgtgggaatatatttgggtctaataaccctgaagtttctaagtttggggatcagaggatggggtggtcagtggtagcctagaggtcagaggtcacaagacagagaagacaacatgctgagaccagaggcttcaccagctgaattctgtgcctaacttagaagactaaacactggcccaaacttaaccattggtgctagggggacaggggtggggtgagctctgccccatcagcccttggagattgatttggggatttagaggcgtttttgaaaatgtaaatagcataaaccttgacttgatgtgtcactgacagcagcagatgtgagacaggccttatatttacagctcccttcccttcctgcaatccagtgttgaggcagaagagggtgcctgtgtcacacatcaatttttctcctgacttttgctcgggtgaaaggcctctgtacaatgcccgatactctcatgcttccatggcagctcctggctcctatctgggacacctcactacccagccccctcatggaatagtccatctcctagcctggccttcatccagttcaccctgcccagccaccctgcctctcaggggtctgtgttgggaaccttggcagttgaacagagtgctctgttcaacagtctgaggcctctgaaacagaattcacacacaaaccttcagccaagttctgcctgctgtgtatctttttagcaggaagcagctcaggacagggaagacaaagtagcctccaggtgccaattactttaaagccactctgggtcaaatggagattcatgagtcacggccttggcccgaacgcccattactatgtgagcctttatttccttcagataaaggataactttttacggttttaaaaggagggcttaattaaaaggccaagaagagggttaaatggctctcttgagacactagcagcctggtccagtcaccctttgtcagcctgacagtgcctcatctgaccgccagggggcatccttattggtgcttcccggctgcagggcactgcggcccctccctcacatgatcactaaaaaccttcaaagacccagtctagccaaaagctcaagtgggacaatggcacagtattaaggtcaaggacaaaaacttacttactttaggaatgaaccctattctatcatcatatacaacagcaccactgagagctggtgaaacagtttaaatcccatcctctgcttgtggcaaatgatgcataaatgcctgctgctcacagtaaaagggcttcttcctcttttactgggtgatccccctgaaggcccagcctatcccaactccacagtcaggaaggcctacgtccttggtccacagacggagctgggccaggtttaaaagactcagtctaggcttgcctttgcaaaccaaaaacgaggacaggtctgaagtgggaagaaagctccgaaatagaaaacggttaggtcctattctatccccagcaaatctaagcaagaaatctctttatacaccacatggcccccccactcccataaaacagccttggtaataaagaagttatcacaccaagacataccttttagatttttattagtagttctctctgaagaatcaaaatagttagttagcaaattattttagattcaagactgtatatcctttgtatttagatctttaatgatgtacaacataatacaaaacaaaccagagagactg

SEQ ID NO: 309412 - DNA, 3597 bp, Artificial Sequence
  derived and/or modified sequence
gacgggactgttaggttgcgggctttggggctcactcccgacggcattgtcttctcctcttctcagacagggcagaccgaggagtttggaccgagagtttatagaaacctattcaccaaaatggcatcctggttatatgaatgtctttgtgaagctgaacttgcacagtattattctcatttcactgcccttggccttcagaaaatagatgaattagccaagattacaatgaaggactactccaaattaggagtccatgacatgaacgaccgcaaacgtctcttccaacttatcaaaattattaagattatgcaagaagaagataaagcagtcagtatcccagagcgtcatcttcagacaagcagcctgcgcatcaaatctcaggaattaagatctggccctcgcagacagctgaattttgattctcctgctgacaataaagacagaaatgccagcaatgatgggtttgaaatgtgcagtttatcagatttctctgcaaatgaacagaagtccacttacctaaaagtgctagaacacatgctaccagatgattcccagtaccatacaaaaacaggaattctgaatgccacagctggtgattcctatgtgcaaacagaaatcagcacttcactcttttcaccaaattacctttctgcaatactgggggattgtgatattcccattattcaaagaatctctcatgtttcagggtataactatggaatccctcattcttgtatcagacagaacacttcagagaaacagaatccttggactgagatggagaaaatcagagtttgtgttcgaaaacgccccctgggcatgagggaggtacgtcgtggagaaattaatattattactgtagaagacaaagaaactctacttgtgcatgagaagaaagaagcagttgacctcactcaatatattctgcagcatgttttttattttgatgaagtctttggtgaggcgtgcaccaatcaggatgtatacatgaagactactcacccacttattcagcatattttcaatggaggcaatgccacttgctttgcttatggacagacaggtgctggaaagacctacaccatgataggaactcatgagaacccaggattgtatgctctagctgccaaagatatcttcaggcaactagaagtgtcccagccaagaaagcacctctttgtgtggatcagcttctatgaaatttactgtggacagctttatgacctcctaaatagaagaaaaaggctctttgcaagagaagatagcaagcacatggtgcagatagtgggactgcaagagcttcaggtggacagtgtggagctcctcttagaggtgatcttaaagggcagcaaggagcgcagcactggggccactggagttaatgcagactcctcccgctcccatgccgtcatccaaattcagatcaaagattcagccaagaggacatttggcaggatctcttttattgacttggctggcagtgaaagagcagcagatgcaagggactcagatagacagacaaagatggaaggtgcagaaataaatcagagtctactggctctgaaggaatgtatccgagcactggatcaggaacacacccatactcccttcaggcaaagcaaactaactcaggtcctgaaggactctttcatcggcaatgccaaaacctgcatgatcgccaacatctcaccaagccacgtggccactgaacacactctcaacaccttgcgctatgctgaccgggtcaaagaactaaagaaaggcattaagtgttgcacttcagttaccagtcgaaatcggacatctggaaactcctctccaaaacgaattcagagctcccctggggctttgtcagaggacaaatgttctcccaaaaaagtcaagctgggatttcagcagtcactcacagtggcagcccctggttccacgagagggaaggtccatcctctgaccagccacccacccaacattccttttacttctgcacctaaggtctctggtaaaaggggtggctccagagggagtccttcacaagagtgggtcattcatgctagccctgtgaaaggaactgtgcgctctggacatgtggccaaaaaaaagccagaagagtcagcaccattgtgctctgagaaaaatcgaatgggcaacaaaactgtccttgggtgggaaagcagggcctcaggcccaggagaaggcctagtgcgtggtaagctgtccaccaagtgcaagaaagtgcagacagtgcagccagtacagaagcagcttgtgtctcgagttgagctctcctttggcaacgcccaccacagggctgagtacagtcaagacagccagaggggcacgcctgctaggcctgcctctgaagcttggacaaacatcccgccacatcagaaggagagggaggaacatctgcgtttctatcaccagcagttccaacagccacctctcctccaacagaagttaaaataccaaccactgaaaaggtctttacgccagtacaggcccccagagggtcagctcacgaatgagactccgcctctgttccactcttactctgaaaaccatgatggagcccaagtagaggaacttgatgacagtgatttcagtgaagattctttttcacacatctctagtcagagggccacaaagcaaaggaacaccctggagaatagcgaagactcattcttcctgcaccagacgtggggacagggtcctgagaagcaggtggcagaaagacagcagagtctgttttctagccccaggacaggtgacaagaaagatctaactaaaagctgggtggactccagggaccccataaaccacagaagagcagcactcgatcacagctgcagcccaagtaaggggcccgtggactggagcagagagaactctacttcctcagggccttctcccagagacagcctggcagagaagccatactgttcacaggtagatttcatatatagacaggaaagaggtggaggctcttcctttgatctcagaaaggatgcctcccaaagtgaggtttctggggagaatgagggcaacttgccatccccagaggaagatggtttcactatctcattgtcccacgttgcagttcctggatccccagaccaaagagacacagtcaccacacctctgagagaagtcagtgcagacggcccaatccaggtgaccagcactgtgaaaaacggtcatgctgtcccaggagaggatcctagggggcagttaggcacgcatgctgaatatgcttctggactcatgtctcccctcaccatgtccctcctggagaacccagacaacgaagggtctcctccctcggagcagctggtccaggatggggctacgcacagtctagtggcagagagcacagggggcccagttgtgagccacacagtgccatctggtgatcaagaggcagccttgccagtgtcttcagcaactaggcacctgtggctgtcctcatctccccctgataataagcctggtggtgatcttccagctctgggcccaggagagaaaacatcctacaaggcttggttggcaggagtttggtttgtccacagaccccatcaagttgccctgcaacagtga

SEQ ID NO: 309413 - DNA, 629 bp, Artificial Sequence
  derived and/or modified sequence
ctcttctacacggccattctccacttttcgggtggacagctgatggtgaccggtcccgtcgctacagctggcatttttgccacctaccttcctgatcacatgacattgtggcggggcttcctgaatgaggcgtggctgaccgggatgctccagctgtgtctcttcgccatcacggaccaggagaacaacccagcactgccaggaacagaggcgctggtgataggcatcctcgtggtcatcatcggggtgtcccttggcatgaacacaggatatgccatcaacccgtcccgggacctgcccccccgcatcttcaccttcattgctggttggggcaaacaggtcttcaggtggcatcatctacctggtcttcattggctccaccatcccacgggagcccctgaaattggaggattctgtggcgtatgaagaccacgggataaccgtattgcccaagatgggatctcatgaacccacgatctctcccctcacccccgtctctgtgagccctgccaacagatcttcagtccaccctgccccacccttacatgaatccatggccctagagcacttctaagcagagattatttgtgatcccatccattccccaataaagcaaggcttgtccgaca

SEQ ID NO: 309414 - DNA, 513 bp, Artificial Sequence
  derived and/or modified sequence
atgaacgccgctgtcacctttgccaactgtgccctgggaagggtcccgtggcgcaagttccccgtctatgtgctgggacagttccttgggtcgtttctcgctgcagccacgatttactctctgttctataccgcaatcctccactttagcggcggtcagctcatggttaccgggccggtggccaccgccggtatcttcgccacataccttccagatcacatgaccctgtggcgaggcttcctgaatgaggcctggctaactggcatgctacagctatgcctgtttgccataacagaccaggaaaataatccagctctgcccggaactgaagcactggtgattggaattcttgtggtaatcataggcgtctccctcgggatgaatacaggctacgccataaacccttcgcgcgacctccctcccaggatctttacgttcatcgcaggctgggggaagcaggtcttctcgaatggagaaaattggtggtgggttcccgtggtggcacccttgtag

SEQ ID NO: 309415 - DNA, 513 bp, Artificial Sequence
  derived and/or modified sequence
atgaatgctgctgtgacctttgccaactgtgccctgggccgggtgccctggaggaagtttcctgtgtatgtgctgggccagttcctgggcagcttcctggccgccgccaccatctacagcctcttctacacagccatcctgcacttcagcggcggccagctgatggtgactggacctgtggccacagctggcatctttgccacctacctgcctgaccacatgaccctgtggaggggcttcctgaatgaggcctggctgaccggcatgctgcagctgtgcctgtttgccatcacagaccaggagaacaacccagccctgcctggaacagaggccctggtgattggcatcctggtggtgatcattggagtgtccctgggcatgaacacaggctacgccatcaaccccagccgggacctgcccccacgcatcttcaccttcatcgccggctggggcaagcaggtgttcagcaatggagagaactggtggtgggtgcctgtggtggcccccctgtag

SEQ ID NO: 309416 - DNA, 513 bp, Artificial Sequence
  derived and/or modified sequence
atgaacgccgccgtgaccttcgccaactgcgccctgggccgggtgccatggaggaagttccccgtgtacgtgttggggcaatttcttggatctttcctggccgcagccaccatctactccctgttttatacagctatactccatttttctggcggccagctcatggttactggacccgtggctaccgccggcatcttcgcaacttatctccctgatcacatgactctctggcggggctttctcaatgaggcgtggttgactggtatgctgcagctatgtctttttgccataactgaccaggagaataatccagctctgccaggaaccgaagctctggtgattggcattctggtggtcataatcggagtatcgctcggcatgaatactggctacgccattaacccaagccgcgatctgcccccgcggattttcacatttattgctggttggggcaaacaggtttttagtaacggggagaactggtggtgggttcccgtggtagcaccactttag

SEQ ID NO: 309417 - DNA, 513 bp, Artificial Sequence
  derived and/or modified sequence
atgaatgccgcagtgactttcgcgaattgcgcccttggcagagtgccctggagaaagtttcctgtatatgttctgggccaatttctgggatctttcttggcagcagctactatctatagcctgttctacactgccatcctgcacttctctgggggacagctgatggtgacggggccagtggcaacagccggtattttcgcaacttatctgccggatcatatgacgctgtggaggggtttcttgaacgaagcctggctcactggcatgcttcagctttgtctgttcgctattaccgatcaagaaaacaatcctgccctgcctggtactgaggcactggttattggcatcctggtggtgattataggtgtgagccttggtatgaataccggatatgctatcaatccgagccgggatctaccccctcgcattttcacattcatcgcgggatgggggaaacaggtcttttcaaacggggaaaactggtggtgggtccctgtggtggccccactctag

SEQ ID NO: 309418 - DNA, 675 bp, Artificial Sequence
  derived and/or modified sequence
gagtctcctttctgtccatgggctcgggccactgtcttaggtccacccgtggctccaaaatggtctcctggtccgtgatagcaaagatccaggaaatactgcagaggaagatggtgcgagagttcctggccgagttcatgagcacatatgtcatgatggagcccacatgaacgcagctgtgacctttgctaactgtgcgctgggccgcgtgccctggaggaagtttccggtctatgtgctggggcagttcctgggctccttcctggcggctgccaccatctacagtctcttctacacggccattctccacttttcgggtggacagctgatggtgaccggtcccgtcgctacagctggcatttttgccacctaccttcctgatcacatgacattgtggcggggcttcctgaatgaggcgtggctgaccgggatgctccagctgtgtctcttcgccatcacggaccaggagaacaacccagcactgccaggaacagaggcgctggtgataggcatcctcgtggtcatcatcggggtgtcccttggcatgaacacaggatatgccatcaacccgtcccgggacctgcccccccgcatcttcaccttcattgctggttggggcaaacaggtcttcagcaatggggagaactggtggtgggtgccagtggtggcaccact

SEQ ID NO: 309419 - DNA, 513 bp, Artificial Sequence
  derived and/or modified sequence
atgaacgccgccgtgaccttcgccaactgcgccctgggcagagtgccctggagaaagttccccgtgtacgtgctgggccagttcctgggcagcttcctggccgccgccaccatctacagcctgttctacaccgccatcctgcacttcagcggcggccagctgatggtgaccggccccgtggccaccgccggcatcttcgccacctacctgcccgaccacatgaccctgtggagaggcttcctgaacgaggcctggctgaccggcatgctgcagctgtgcctgttcgccatcaccgaccaggagaacaaccccgccctgcccggcaccgaggccctggtgatcggcatcctggtggtgatcatcggcgtgagcctgggcatgaacaccggctacgccatcaaccccagcagagacctgccccccagaatcttcaccttcatcgccggctggggcaagcaggtgttcagcaacggcgagaactggtggtgggtgcccgtggtggcccccctgtag

SEQ ID NO: 309420 - protein, 216 aa, Artificial Sequence
  derived and/or modified sequence
MVLNKKYGSYLGVNLGFGFGVTMGVHVAGRISGAHMNAAVTFANCALGRVPWRKFPVYVLGQFLGSFLAAATIYSLFYTAILHFSGGQLMVTGPVATAGIFATYLPDHMTLWRGFLNEAWLTGMLQLCLFAITDQENNPALPGTEALVIGILVVIIGVSLGMNTGYAINPSRDLPPRIFTFIAGWGKQVFRWHHLPGLHWLHHPTGAPEIGGFCGV

SEQ ID NO: 309421 - protein, 141 aa, Artificial Sequence
  derived and/or modified sequence
LFYTAILHFSGGQLMVTGPVATAGIFATYLPDHMTLWRGFLNEAWLTGMLQLCLFAITDQENNPALPGTEALVIGILVVIIGVSLGMNTGYAINPSRDLPPRIFTFIAGWGKQVFRWHHLPGLHWLHHPTGAPEIGGFCGV

SEQ ID NO: 309422 - protein, 302 aa, Artificial Sequence
  derived and/or modified sequence
MFAWEIRDRLLAERVCDNDTVPSVSSINRIIRTKVQQPPNQPVPASSHSIVSTGSVTQVSSVSTDSAGSSYSISGILGITSPSADTNKRKRDEGIQESPVPNGHSLPGRDFLRKQMRGDLFTQQQLEVLDRVFERQHYSDIFTTTEPIKPEQWCPVLMRQYLVQPQAVLFQTTEYSAMASLAGGLDDMKANLASPTPADIGSSVPGPQSYPIVTGRDLASTTLPGYPPHVPPAGQGSYSAPTLTGMVPGSEFSGSPYSHPQYSSYNDSWRFPNPGLLGSPYYYSAAARGAAPPAAATAYDRH

SEQ ID NO: 309423 - protein, 307 aa, Artificial Sequence
  derived and/or modified sequence
MDLEKNYPTPRTSRTGHGGVNQLGGVFVNGRPLPDVVRQRIVELAHQGVRPCDISRQLRVSHGCVSKILGRYYETGSIKPGVIGGSKPKVATPKVVEKIAEYKRQNPTMFAWEIRDRLLAERVCDNDTVPSVSSINRIIRTKVQQPPNQPVPASSHSIVSTGSVTQVSSVSTDSAGSSYSISGILGITSPSADTNKRKRDEGIQESPVPNGHSLPGRDFLRKQMRGDLFTQQQLEVLDRVFERQHYSDIFTTTEPIKPEQWCPVLMRQYLVQPQAVLFQAVTWRARPSPGTLHTSPPLDRAATQHRR

SEQ ID NO: 309424 - DNA, 924 bp, Artificial Sequence
  derived and/or modified sequence
atggacctggagaagaactaccccacccccagaaccagcagaaccggccacggcggcgtgaaccagctgggcggcgtgttcgtgaacggcagacccctgcccgacgtggtgagacagagaatcgtggagctggcccaccagggcgtgagaccctgcgacatcagcagacagctgagagtgagccacggctgcgtgagcaagatcctgggcagatactacgagaccggcagcatcaagcccggcgtgatcggcggcagcaagcccaaggtggccacccccaaggtggtggagaagatcgccgagtacaagagacagaaccccaccatgttcgcctgggagatcagagacagactgctggccgagagagtgtgcgacaacgacaccgtgcccagcgtgagcagcatcaacagaatcatcagaaccaaggtgcagcagccccccaaccagcccgtgcccgccagcagccacagcatcgtgagcaccggcagcgtgacccaggtgagcagcgtgagcaccgacagcgccggcagcagctacagcatcagcggcatcctgggcatcaccagccccagcgccgacaccaacaagagaaagagagacgagggcatccaggagagccccgtgcccaacggccacagcctgcccggcagagacttcctgagaaagcagatgagaggcgacctgttcacccagcagcagctggaggtgctggacagagtgttcgagagacagcactacagcgacatcttcaccaccaccgagcccatcaagcccgagcagtggtgccccgtgctgatgagacagtacctggtgcagccccaggccgtgctgttccaggccgtgacctggagagccagacccagccccggcaccctgcacaccagcccccccctggacagagccgccacccagcacagaagatag

SEQ ID NO: 309425 - DNA, 924 bp, Artificial Sequence
  derived and/or modified sequence
atggatctggaaaagaattacccaactccacgaactagccgaaccgggcatggaggggtgaaccaactcgggggcgtgttcgtaaacggtcgccccctgccagacgtagtgcgtcagaggatagtggagctggcacatcagggcgtgagaccctgcgacatcagtcgacagcttcgcgtgtcacacggctgcgtgtctaagatcctgggccggtattacgagacgggctctatcaaacctggagtcatcggtggatcaaagcctaaagtggctacccccaaagtggtagaaaagattgccgaatataagaggcagaatcctacaatgttcgcctgggagattagagatcgactgctggccgagcgcgtgtgcgacaacgacactgttcccagtgtgtcctctataaacagaattatccggaccaaggtgcaacagccacccaaccagccggtccccgccagctcacatagtatagtcagtacaggcagtgtgacccaggtctcgtcagtgtccaccgattccgccggtagcagttacagcatttccggaatactggggattacttcaccaagtgccgacacaaacaaaagaaagcgggacgaaggtattcaagaaagtccagtccccaatggccacagtctgcctgggagggatttcctgagaaaacagatgcggggcgacctgttcacccagcaacaactggaagtgttggatagagtttttgagcgtcagcactactccgacatctttacgaccaccgaaccgataaagcccgagcaatggtgccctgtgctgatgcgccagtacttagtccagccacaggcagttcttttccaggccgtcacatggagagcccggccctcccccgggacacttcacaccagtcccccattggatcgggccgccacacagcaccgcaggtag

SEQ ID NO: 309426 - DNA, 924 bp, Artificial Sequence
  derived and/or modified sequence
atggacctggagaagaactaccccacccccaggaccagcaggactggacatggaggagtgaaccagctgggcggcgtgtttgtgaatggccggcccctgcctgatgtggtgcggcagagaattgtggagctggcccaccagggcgtgcggccctgtgacatcagccggcagctgcgggtgagccacggctgtgtgtccaagatcctgggccgctactatgaaacaggcagcatcaagccaggagtgattggaggcagcaagcccaaggtggccacccccaaggtggtggagaagattgctgagtacaagaggcagaaccccaccatgtttgcctgggagatccgggaccggctgctggccgagcgggtgtgtgacaatgacacagtgcccagcgtgagcagcatcaaccgcatcatccgcaccaaggtgcagcagccccccaaccagcctgtgcctgccagcagccacagcatcgtgtccactggatctgtgacccaggtgtcctctgtgtccacagacagcgctggcagcagctacagcatcagcggcatcctgggcatcaccagccccagcgctgacaccaacaagaggaagagagatgagggcatccaggagagccctgtgcccaacggccacagcctgcccggccgggacttcctgaggaagcagatgagaggagacctcttcacccagcagcagctggaggtgctggacagagtgtttgagcggcagcactacagcgacatcttcaccaccacagagcccatcaagccagagcagtggtgccctgtgctgatgaggcagtacctggtgcagccccaggccgtgctcttccaggccgtgacctggagggcccggcccagccctggcaccctgcacaccagcccccccctggacagagctgccacccagcacagaagatag

SEQ ID NO: 309427 - DNA, 924 bp, Artificial Sequence
  derived and/or modified sequence
atggacctggagaagaactaccccaccccccggaccagccggaccggtcacggaggagttaaccagttgggcggtgttttcgtcaacggacggcccttgcccgatgtggtacggcagcgcatcgtggaactggcccaccaaggagttcggccctgcgacatttctagacagctgagagtgtctcacggttgcgttagcaagattcttggaagatactatgagacaggctcaatcaagccgggtgtcatcgggggctcaaaacccaaagtcgctacccccaaagttgtggagaagatagcagagtacaaacggcagaacccaaccatgtttgcctgggagattcgggatagattgctcgcagagagggtttgcgacaacgacacagtcccgagcgtctcctccatcaacaggatcattcggaccaaagtacaacaacctcccaaccagcccgtgccggcgtcgtctcatagcatcgtcagcactgggtcagtcacacaggtcagcagtgtgtcaacagatagcgccggaagtagctactcgatctccgggatccttggcatcacaagtccaagcgcagatacaaacaagaggaaaagagatgagggtatccaagaatcaccagtcccaaacggacacagcctgcctggccgggatttcctgagaaagcagatgcgcggcgacctatttactcaacaacaactcgaagtgctcgacagagtgttcgagagacaacactatagcgatatcttcactaccaccgaaccaatcaagcccgaacagtggtgccccgtcctcatgcggcaataccttgtgcagccacaggcagtactgtttcaggccgtgacctggagggcacggccttctcccggcaccctgcacacctcgcctccactggaccgggccgccacccagcacagacgttag

SEQ ID NO: 309428 - DNA, 3699 bp, Artificial Sequence
  derived and/or modified sequence
agcactgctgctctcccggcttcccgctctactccggccgggccgggtccgccacgtctggcgcgctgagcaggcccggccgcgcagcgcctaccctttcctcgctccgggccggcagtgtggggcggcgcgctgggggcgcggcgtgtctggggacatcttgtgatgttggcgagaacaggacatgatctcacatggcgagaagctctttagttccttaatcatttcacggtgccttcggacgctttttttccacctaaaacgtttagtttcagctcagtgatcagctaccccagctcggcgggggagcggaaggcttgaattattccgacctgtgagcggcccctggcaccaaaaaaaaaaaaaaaaaaaaaaaaaaaagaaaaaaaaaggcacaaaaaagtggaaacttttccctgtccattccatcaagtcctgaaaaatcaaaatggatttagagaaaaattatccgactcctcggaccagcaggacaggacatggaggagtgaatcagcttgggggggtttttgtgaatggacggccactcccggatgtagtccgccagaggatagtggaacttgctcatcaaggtgtcaggccctgcgacatctccaggcagcttcgggtcagccatggttgtgtcagcaaaattcttggcaggtattatgagacaggaagcatcaagcctggggtaattggaggatccaaaccaaaggtcgccacacccaaagtggtggaaaaaatcgctgaatataaacgccaaaatcccaccatgtttgcctgggagatcagggaccggctgctggcagagcgggtgtgtgacaatgacaccgtgcctagcgtcagttccatcaacaggatcatccggacaaaagtacagcagccacccaaccaaccagtcccagcttccagtcacagcatagtgtccactggctccgtgacgcaggtgtcctcggtgagcacggattcggccggctcgtcgtactccatcagcggcatcctgggcatcacgtcccccagcgccgacaccaacaagcgcaagagagacgaaggtattcaggagtctccggtgccgaacggccactcgcttccgggcagagacttcctccggaagcagatgcggggagacttgttcacacagcagcagctggaggtgctggaccgcgtgtttgagaggcagcactactcagacatcttcaccaccacagagcccatcaagcccgagcagtggtgccccgtgctgatgagacaatacttggtgcagccccaggcagtccttttccagaccacagagtattcagccatggcctcgctggctggtgggctggacgacatgaaggccaatctggccagccccacccctgctgacatcgggagcagtgtgccaggcccgcagtcctaccccattgtgacaggccgtgacttggcgagcacgaccctccccgggtaccctccacacgtcccccccgctggacagggcagctactcagcaccgacgctgacagggatggtgcctgggagtgagttttccgggagtccctacagccaccctcagtattcctcgtacaacgactcctggaggttccccaacccggggctgcttggctccccctactattatagcgctgccgcccgaggagccgccccacctgcagccgccactgcctatgaccgtcactgacccttggagccaggcgggcaccaaacactgatggcacctattgagggtgacagccacccagccctcctgaagatagccagagagcccatgagaccgtcccccagcatcccccacttgcctgaagctcccctcttcctctcttcctccagggactctggggccctttggtggggccgttggacttctggatgcttgtctatttctaaaagccaatctatgagcttctcccgatggccactgggtctctgcaaaccaatagactgtcctgcaaataaccgcagccccagcccagcctgcctgtcctccagctgtctgactatccatccatcataaccaccccagcctgggaaggagagcttgcttttgttgcttcagcagcacccatgtaaataccttcttgcttttctgtgggcctgaaggtccgactgagaagactgctccacccatgatgcatctcgcactcttggtgcatcaccggacatcttagacctatggcagagcatcctctctgccctgggtgaccctggcaggtgcgctcagagctgtcctcaagatggaggatgctgcccttgggccccagcctcctgctcatccctccttctttagtatctttacgaggagtctcactgggctggttgtgctgcaggctccccctgaggcccctctccaagaggagcacactttggggagatgtcctggtttcctgcctccatttctctgggaccgatgcagtatcagcagctcttttccagatcaaagaactcaaagaaaactgtctgggagattcctcagctacttttccgaagcagaatgtcatccgaggtattgattacattgtggactttgaatgtgagggctggatgggacgcaggagatcatctgatcccagccaaggaggggcctgaggctctccctactccctcagcccctggaacggtgttttctgaggcatgcccaggttcaggtcacttcggacacctgccatggacacttcacccaccctccaggaccccagcaagtggattctgggcaagcctgttccggtgatgtagacaataattaacacagaggactttcccccacacccagatcacaaacagcctacagccagaacttctgagcatcctctcggggcagaccctccccgtcctcgtggagcttagcaggcagctgggcatggaggtgctggggctggggcagatgcctaatttcgcacaatgcatgcccacctgttgatctaaggggccgcgatggtcagggccacggccaagggccacgggaacttggagagggagcttggagaactcactgtgggctagggtggtcagaggaagccagcagggaagatctgggggacagaggaaggcctcctgagggaggggcaggagagcagtgaggagctgctgtgtgacctgggagtgattttgacatgggggtgccaggtgccatcatctctttacctggggccttaattccttgcatagtctctcttgtcaagtcagaacagccaggtagagcccttgtccaaacctgggctgaatgacagtgatgagagggggcttggccttcttaggtgacaatgtcccccatatctgtatgtcaccaggatggcagagagccagggcagagagagactggacttgggatcagcaggccaggcaggtcttgtcctggtcctggccacatgtctttgctgtgggacctcagacaaaaccctgcacctctttgagccttggctgccttggtgcagcagggtcatctgtagggccaccccacagctctttccttcccctcctctctccagggagccggggctgtgagaggatcatctggggcaggccctccacttccaagcaagcagatgggggtgggcacctgaggcccaataatatttggaccaagtgggaaacaagaacactcggaggggcgggaatcagaagagcctggaaaaagacctagcccaacttcccttgtgggaaactgaggcccagcttggggaaggccaggaccatgcaggg

SEQ ID NO: 309429 - DNA, 1112 bp, Artificial Sequence
  derived and/or modified sequence
atggatttagagaaaaattatccgactcctcggaccagcaggacaggacatggaggagtgaatcagcttgggggggtttttgtgaatggacggccactcccggatgtagtccgccagaggatagtggaacttgctcatcaaggtgtcaggccctgcgacatctccaggcagcttcgggtcagccatggttgtgtcagcaaaattcttggcaggtattatgagacaggaagcatcaagcctggggtaattggaggatccaaaccaaaggtcgccacacccaaagtggtggaaaaaatcgctgaatataaacgccaaaatcccaccatgtttgcctgggagatcagggaccggctgctggcagagcgggtgtgtgacaatgacaccgtgcctagcgtcagttccatcaacaggatcatccggacaaaagtacagcagccacccaaccaaccagtcccagcttccagtcacagcatagtgtccactggctccgtgacgcaggtgtcctcggtgagcacggattcggccggctcgtcgtactccatcagcggcatcctgggcatcacgtcccccagcgccgacaccaacaagcgcaagagagacgaaggtattcaggagtctccggtgccgaacggccactcgcttccgggcagagacttcctccggaagcagatgcggggagacttgttcacacagcagcagctggaggtgctggaccgcgtgtttgagaggcagcactactcagacatcttcaccaccacagagcccatcaagcccgagcagtggtgccccgtgctgatgagacaatacttggtgcagccccaggcagtccttttccaggccgtgacttggcgagcacgaccctccccgggtaccctccacacgtcccccccgctggacagggcagctactcagcaccgacgctgacagggatggtgcctgggagtgagttttccgggagtccctacagccaccctcagtattcctcgtacaacgactcctggaggttccccaacccggggctgcttggctccccctactattatagcgctgccgcccgaggagccgccccacctgcagccgccactgcctatgaccgtcactgacccttggag

SEQ ID NO: 309430 - DNA, 924 bp, Artificial Sequence
  derived and/or modified sequence
atggacctagaaaagaattaccctacacccagaaccagtcggaccgggcatggcggtgtaaatcagctggggggtgtgtttgtcaacgggcgacccctgcctgacgtggtgaggcagcgtattgtggaacttgcccaccagggagtgcgtccatgcgacatttctcgccaactgagagttagccacggctgcgtctctaagatcctggggcgatactatgagactggaagcatcaagcccggtgtgattgggggatctaagccaaaggtggctaccccaaaagtagtggagaaaatcgcggagtacaagcggcagaacccgaccatgttcgcttgggaaatacgcgatcgattactggcagaaagagtgtgtgacaacgatacggtgccctccgtgtcatctatcaaccgaatcattagaaccaaggtccagcaacctcccaatcagccagtacctgcttcatcccattcaatagtaagcaccggttcagtcacgcaggtctccagtgtgagcacagacagcgccggtagcagctactccatcagtggtatcttgggtatcacttccccttctgctgacacaaataagaggaagcgggacgagggaatccaagagagccccgttcccaacggccactccctgcctggacgagattttctgcggaaacaaatgaggggggatctgtttacccagcagcagctggaggttctggacagggtgttcgagcgacagcactactcagacatttttaccacaactgaacctataaaacccgaacagtggtgcccagttctcatgcgacagtatctggtgcagccacaggctgtgttattccaggccgtcacatggcgagcacgccctagtcccggaactcttcatacaagccccccactcgatcgtgctgcaactcagcacagacggtag

SEQ ID NO: 309431 - DNA, 909 bp, Artificial Sequence
  derived and/or modified sequence
atgttcgcctgggagatcagagacagactgctggccgagagagtgtgcgacaacgacaccgtgcccagcgtgagcagcatcaacagaatcatcagaaccaaggtgcagcagccccccaaccagcccgtgcccgccagcagccacagcatcgtgagcaccggcagcgtgacccaggtgagcagcgtgagcaccgacagcgccggcagcagctacagcatcagcggcatcctgggcatcaccagccccagcgccgacaccaacaagagaaagagagacgagggcatccaggagagccccgtgcccaacggccacagcctgcccggcagagacttcctgagaaagcagatgagaggcgacctgttcacccagcagcagctggaggtgctggacagagtgttcgagagacagcactacagcgacatcttcaccaccaccgagcccatcaagcccgagcagtggtgccccgtgctgatgagacagtacctggtgcagccccaggccgtgctgttccagaccaccgagtacagcgccatggccagcctggccggcggcctggacgacatgaaggccaacctggccagccccacccccgccgacatcggcagcagcgtgcccggcccccagagctaccccatcgtgaccggcagagacctggccagcaccaccctgcccggctaccccccccacgtgccccccgccggccagggcagctacagcgcccccaccctgaccggcatggtgcccggcagcgagttcagcggcagcccctacagccacccccagtacagcagctacaacgacagctggagattccccaaccccggcctgctgggcagcccctactactacagcgccgccgccagaggcgccgccccccccgccgccgccaccgcctacgacagacactag

SEQ ID NO: 309432 - DNA, 909 bp, Artificial Sequence
  derived and/or modified sequence
atgttcgcatgggagattcgagacagattacttgccgagagggtgtgcgacaacgatactgtcccgtcagtatcaagcatcaaccggataatcagaactaaggtccagcagccaccaaatcagcccgtgcctgcttcctcccattcaattgtgagcactgggtcggtgacccaggtgagttcggtgagcaccgactccgctggcagcagctactctattagcggaatcctcggtataacatctccgtctgccgatacaaataagcgcaagcgagatgaaggcatacaggaaagcccagttccaaacggacattccctgcctgggagggattttctgaggaaacaaatgaggggtgatctctttacacagcagcagctggaggttttggatagagtgttcgaacgccagcactattctgacatctttacgacgacagagcccataaagccagaacagtggtgtcccgtgttgatgaggcaatacctggttcaacctcaagccgtgctgtttcagactaccgagtattcagccatggcctccttggcaggagggctggacgatatgaaggcaaacctagcgtcccctactccagcagacatcgggagtagcgtcccaggacctcagagttacccgatcgtcacgggcagggatctcgcttctaccacactccccgggtacccccctcacgtacccccggccgggcagggctcctatagcgcacccaccttgactggcatggtgccagggtccgagttctctgggagcccctactctcacccccagtacagcagttacaatgacagttggagattccccaaccccggcttgctgggctctccgtactattactctgctgcggcaaggggcgccgcaccaccagccgccgcaacagcctacgatcggcattag

SEQ ID NO: 309433 - DNA, 909 bp, Artificial Sequence
  derived and/or modified sequence
atgtttgcctgggagatccgggaccggctgctggccgagcgggtgtgtgacaatgacacagtgcccagcgtgagcagcatcaaccgcatcatccgcaccaaggtgcagcagccccccaaccagcctgtgcctgccagcagccacagcatcgtgtccactggatctgtgacccaggtgtcctctgtgtccacagacagcgctggcagcagctacagcatcagcggcatcctgggcatcaccagccccagcgctgacaccaacaagaggaagagagatgagggcatccaggagagccctgtgcccaacggccacagcctgcccggccgggacttcctgaggaagcagatgagaggagacctcttcacccagcagcagctggaggtgctggacagagtgtttgagcggcagcactacagcgacatcttcaccaccacagagcccatcaagccagagcagtggtgccctgtgctgatgaggcagtacctggtgcagccccaggccgtgctcttccagaccacagagtacagcgccatggccagcctggccggcggcctggatgacatgaaggccaacctggccagccccaccccagctgacatcggcagctctgtgcccggcccccagagctaccccatcgtgacaggccgggacctggccagcaccaccctgcccggctacccacctcatgtgcccccagctggccagggcagctacagcgcccccaccctgaccggcatggtgcccggcagcgagttcagcggcagcccctacagccacccccagtacagcagctacaatgacagctggaggttccccaaccctggcctgctgggcagcccctactactacagcgctgctgcccggggggccgcccccccagctgctgccacagcctatgacagacactag

SEQ ID NO: 309434 - DNA, 909 bp, Artificial Sequence
  derived and/or modified sequence
atgttcgcctgggagatccgggaccggctgctggccgagcgggtgtgcgacaacgatactgtgccgtccgtgtccagtatcaaccggattattaggacaaaggtccagcagccacccaaccaaccggttcccgcctcaagccatagcatagtctctacaggaagcgtgacacaggttagttcagtgagcactgacagcgccggcagttcatattctatctcaggcatcctgggcattaccagcccaagcgcagacaccaacaagaggaaacgggatgaaggtattcaggaatctccagttcctaatggtcattccctgccaggcagagactttctgcgcaaacaaatgagaggagacctcttcactcagcaacagctggaggtgcttgaccgagtgttcgaaaggcagcattactcagacatcttcaccactacagagcctattaagccagagcagtggtgtcccgtgctgatgaggcagtacttggtgcaacctcaagccgtcctgttccaaaccaccgaatactcggccatggcttcactggcaggcggcctggacgatatgaaggcaaatctcgctagccctacaccggcagacatcggctcgtcggtgcctggaccccaatcctatcccatagtaaccggcagggacctggcgtccactacactgcccggctatccccctcacgttcctcccgcagggcagggcagttacagcgctccgacacttacaggtatggtgcctggatccgagttcagtgggtctccttattcacatccacagtatagttcgtataatgatagttggagatttcctaaccccggactgctcggctccccttactattattcagctgccgcccgcggcgctgcaccacccgcagcggctaccgcctacgatcgccactag

SEQ ID NO: 309435 - DNA, 909 bp, Artificial Sequence
  derived and/or modified sequence
atgttcgcttgggagatacgcgaccggcttctggcggagcgagtctgcgataacgacaccgtcccatcggtgagtagcattaaccggattatccgtaccaaggtgcaacaaccacctaatcagcctgtgcccgcatcaagccacagtattgtctccaccggcagcgtcacacaggtgtccagtgtttccacagactctgccggaagttcctatagcattagcggaatcctcgggatcacgtccccaagtgctgacacgaacaagcgcaagcgcgatgaaggcatccaggaatcaccggtgccaaatggacactcgctccccggacgagatttcttgaggaaacaaatgagaggcgacttgtttacccagcagcaactggaagtgttggacagagtttttgaaaggcagcactactcagacatcttcaccacgaccgaaccaatcaaaccagaacagtggtgtcctgttcttatgcgccagtatttagtgcagccacaagctgttctgtttcagaccaccgaatactctgcgatggcatcactggctggtggactagatgatatgaaggcaaatctcgcgagtccgacccctgccgacattggctcttctgtacctggaccccagagttaccctattgtgactgggagggatttagcttccaccaccttacccggataccctcctcacgtgccgccagctgggcagggcagttattccgcccctacactgaccggtatggttcccggatctgagttcagtggttctccttacagccacccacaatactcgtcttacaatgactcctggagattccccaatcctggcctcctcggcagcccttactactacagtgctgctgctcgaggggctgccccaccagctgccgctaccgcctatgatcgtcactag

SEQ ID NO: 309436 - protein, 338 aa, Artificial Sequence
  derived and/or modified sequence
MNMPQSLGNQPLPPEPPSLGTPAEGPGTTSPPEHCWPVRPTLRNELDTFSVHFYIFFGPSVALPPERPAVFAMRLLPVLDSGGVLSLELQLNASSVRQENVTVFGCLTHEVPLSLGDAAVTCSKESLAGFLLSVSATTRVARLRIPFPQTGTWFLALRSLCGVGPRFVRCRNATAEVRMRTFLSPCVDDCGPYGQCKLLRTHNYLYAACECKAGWRGWGCTDSADALTYGFQLLSTLLLCLSNLMFLPPVVLAIRSRYVLEAAVYTFTMFFSTVCGGVCILSLGACAWWWVTVCISTTFSEGLGMSVPSLCLLQTETAVLPKLSCIDNGHFCKTHWSK

SEQ ID NO: 309437 - DNA, 3713 bp, Artificial Sequence
  derived and/or modified sequence
gccccgcttcccacatcggccccagcccctgcctgggtccccatccaggacccccttccagtctctgcccctggcctggcccccatcccggcctcggccctcgttccaccccctgtcacaaatcccagcccaggccctgtcccagccccattcccagtgtttgcttaaggccctggctcaaccccgtcccttgctgcagtccccatcacagcccttccttccatcccactccctgcccttgttcaagccccagtgtccagcccagcccaacccattatctcagcctttgccctcatctctgtgtttacccaagtctctccctctagtcccccctatctctcatactctgcccctctcccagcctagactcaagtctgggtttcagctgccgccagccctattgctgctgttgctgttctctgtccttggcccaggggctggaggccttttcctgactgattactccacctgctcaccccgcaagctgagtcctttccgctcctttgccagcaccgagctcttccacttccatgttcctgaggacacattcctggctgtttggaacctcatcatcttcaaggagcaagggggaacttttggggaccactgcccagaccaaagtgtgactgtgtatttccggtccggggcaccccctgtcatcaatcccctgcatacacacttcccaggggacacagctgtgcctggggttttctcactgaccctcagctggacactgcccaaccgcacctcaggcatctttaacgtcagcagccccttacctggggactggttcttggctgcccaccttccccaggcccacggccacatctctgtcaagggtctccaggatgagtgtcagtacctccttcagccgcagctgattgtccggcgtttgctggacgtcgctgtgctggttcctggccggccctcagagcaaaccctctccccacacaatcgctcagccctgtacaaggtctttgtgcccagcttcacttacagggtttcagcacagctggtgtgtgtggggggccgtggggtatctgcctgccccctgtcactgcgtctgcgtcccaaagccccacccctgcacaactcaagctctgtggcctgtggaggtgcctcaggatgccagctggagctggcactgcccccctgggggcactgggtctacgtgcgtgtggaaacatcatcccggggccctggtaggaccatccgcttccagctgtgtgtgcggttgcaagagtgcccacagcccggcctgctccgagccctggtccctggagctgccatgaacatgccccagtccctgggcaaccagccactgcccccagaaccgccatcccttggaacccctgcggaggggcctgggaccacgtccccacccgagcactgctggccagtgcgcccgactctgcgcaacgagctggacaccttctctgtccacttctacatcttctttggcccaagtgtggcccttccccctgagcgcccagccgtgttcgccatgaggctgttgccagtgctggacagtggaggcgtcctcagcctggagctccagctcaatgcgagctccgtgcgccaggaaaacgtgacggtgtttggatgcttgactcacgaggtgcccttgagcctgggggatgcagcagtgacctgttccaaagagtccctggccggcttcctcctctctgtcagtgccaccaccagggttgccaggctgcgaatcccattcccgcagacggggacctggttcctggccctccgctccctgtgcggggtggggcctcggttcgtgcggtgccgcaacgcgacggccgaggtgcggatgcgcaccttcctgtccccatgcgtggacgactgcgggccctacggccagtgcaagctgctgcgcacacacaattatctgtacgcagcctgcgagtgcaaggccgggtggagaggctggggctgcaccgacagtgcagatgcgctcacctatggattccagctgctgtccacactcctgctctgcctgagcaacctcatgtttctgccacctgtggtcctggccattcggagtcgatatgtgctggaagctgcagtctacaccttcaccatgttcttctccacgttctatcatgcctgtgaccagccaggcatcgtggttttctgcatcatggactacgatgtgctgcagttctgtgatttcctgggctccttaatgtccgtgtgggtcactgtcattgccatggctcgtttacagcccgtggtcaagcaggtgctgtatttgctgggagctatgctgctgtccatggctctgcagcttgaccgacatggactctggaacctgcttggacccagtctcttcgccctggggatcttggccacagcctggacagtacgcagcgtccgccgccggcactgctacccacccacgtggcgccgctggcttttctacttgtgccctggcagccttattgcaggcagtgccgtcctgctttatgcttttgtggagacccgggacaactacttctacattcacagcatttggcatatgctcattgcgggcagtgtgggcttcctgctgccccctcgtgccaagactgaccacggggtcccatctggagcccgggcccggggctgtggttaccagctatgcatcaacgagcaggaggagctgggcctcgtgggcccaggaggggccactgtcagcagcatctgtgccagctgagaggggctttgggcctggccctgaggggatatgaatgcttcctagagttctttctgggggtgtggagccctcttagaaggagacaggctgtatttcttgaggacatggagtctttctcaaggacacaaaactcttccagggacctggagcccttcccaggacatggagaacttcctgagggcctggagtccccctgcatcatggagtccttcttaaggactggagcctatgcaggcacagagtccctcaggaccaaggagtccctcctgcaggtgtggagcctttcctgggatgcagagccttcccaagacatggattccttcccagggagacaaagccctgtcaggagcacagcatctttccagaggaggtggagtctatcttggggaaaccaaatttccagattttcccagaggctcagcaactctggcctcaggcttccttcccagaggcagcgtctgggctgtgctgtgctgtggaggagggattgcaggatggatggagctgggactggggctgtctgggtggctggtatcctcgtttgatacaggtggagtctgtgtgtctccagtgattgattggttcagaatggttctgtgatgccttttttccccctggggtcaggggtgtggggaagtggggaaagagggcccctcagggaatcagcagggctgatgggagctactgccggaggcttttgtcacaccctgtacacagtctgatcccgctcatctgggccctgcattcatttctaaacagtttctaatgcctattccccaattcctattgagcccgatttgcagtatctgaggggtgtgtgtgtgtgtgtgtgtgtttatgtatgtatacgtatgctgagatgatttaaatcagtgagacagactttccttatgatgcccacacccaacacagaaggaagccgaggtcccaggaaattggaatagcaggtacacgtctcaggtgtgcaagaaatatcacaagaatgtaacttctgttttgagccccc

SEQ ID NO: 309438 - DNA, 3441 bp, Artificial Sequence
  derived and/or modified sequence
cgacgtcaagtcgaggccgccgccgcggggcctggttatcgccggttcagcgcagcccggagtcgcccaggcctgaactcctacccagcctagactcaagtctgggtttcagctgccgccagccctattgctgctgttgctgttctctgtccttggcccaggggctggaggccttttcctgactgattactccacctgctcaccccgcaagctgagtcctttccgctcctttgccagcaccgagctcttccacttccatgttcctgaggacacattcctggctgtttggaacctcatcatcttcaaggagcaagggggaacttttggggaccactgcccagaccaaagtgtgactgtgtatttccggtccggggcaccccctgtcatcaatcccctgcatacacacttcccaggggacacagctgtgcctggggttttctcactgaccctcagctggacactgcccaaccgcacctcaggcatctttaacgtcagcagccccttacctggggactggttcttggctgcccaccttccccaggcccacggccacatctctgtcaagggtctccaggatgagtgtcagtacctccttcagccgcagctgattgtccggcgtttgctggacgtcgctgtgctggttcctggccggccctcagagcaaaccctctccccacacaatcgctcagccctgtacaaggtctttgtgcccagcttcacttacagggtttcagcacagctggtgtgtgtggggggccgtggggtatctgcctgccccctgtcactgcgtctgcgtcccaaagccccacccctgcacaactcaagctctgtggcctgtggaggtgcctcaggatgccagctggagctggcactgcccccctgggggcactgggtctacgtgcgtgtggaaacatcatcccggggccctggtaggaccatccgcttccagctgtgtgtgcggttgcaagagtgcccacagcccggcctgctccgagccctggtccctggagctgccatgaacatgccccagtccctgggcaaccagccactgcccccagaaccgccatcccttggaacccctgcggaggggcctgggaccacgtccccacccgagcactgctggccagtgcgcccgactctgcgcaacgagctggacaccttctctgtccacttctacatcttctttggcccaagtgtggcccttccccctgagcgcccagccgtgttcgccatgaggctgttgccagtgctggacagtggaggcgtcctcagcctggagctccagctcaatgcgagctccgtgcgccaggaaaacgtgacggtgtttggatgcttgactcacgaggtgcccttgagcctgggggatgcagcagtgacctgttccaaagagtccctggccggcttcctcctctctgtcagtgccaccaccagggttgccaggctgcgaatcccattcccgcagacggggacctggttcctggccctccgctccctgtgcggggtggggcctcggttcgtgcggtgccgcaacgcgacggccgaggtgcggatgcgcaccttcctgtccccatgcgtggacgactgcgggccctacggccagtgcaagctgctgcgcacacacaattatctgtacgcagcctgcgagtgcaaggccgggtggagaggctggggctgcaccgacagtgcagatgcgctcacctatggattccagctgctgtccacactcctgctctgcctgagcaacctcatgtttctgccacctgtggtcctggccattcggagtcgatatgtgctggaagctgcagtctacaccttcaccatgttcttctccacgttctatcatgcctgtgaccagccaggcatcgtggttttctgcatcatggactacgatgtgctgcagttctgtgatttcctgggctccttaatgtccgtgtgggtcactgtcattgccatggctcgtttacagcccgtggtcaagcaggtgctgtatttgctgggagctatgctgctgtccatggctctgcagcttgaccgacatggactctggaacctgcttggacccagtctcttcgccctggggatcttggccacagcctggacagtacgcagcgtccgccgccggcactgctacccacccacgtggcgccgctggcttttctacttgtgccctggcagccttattgcaggcagtgccgtcctgctttatgcttttgtggagacccgggacaactacttctacattcacagcatttggcatatgctcattgcgggcagtgtgggcttcctgctgccccctcgtgccaagactgaccacggggtcccatctggagcccgggcccggggctgtggttaccagctatgcatcaacgagcaggaggagctgggcctcgtgggcccaggaggggccactgtcagcagcatctgtgccagctgagaggggctttgggcctggccctgaggggatatgaatgcttcctagagttctttctgggggtgtggagccctcttagaaggagacaggctgtatttcttgaggacatggagtctttctcaaggacacaaaactcttccagggacctggagcccttcccaggacatggagaacttcctgagggcctggagtccccctgcatcatggagtccttcttaaggactggagcctatgcaggcacagagtccctcaggaccaaggagtccctcctgcaggtgtggagcctttcctgggatgcagagccttcccaagacatggattccttcccagggagacaaagccctgtcaggagcacagcatctttccagaggaggtggagtctatcttggggaaaccaaatttccagattttcccagaggctcagcaactctggcctcaggcttccttcccagaggcagcgtctgggctgtgctgtgctgtggaggagggattgcaggatggatggagctgggactggggctgtctgggtggctggtatcctcgtttgatacaggtggagtctgtgtgtctccagtgattgattggttcagaatggttctgtgatgccttttttccccctggggtcaggggtgtggggaagtggggaaagagggcccctcagggaatcagcagggctgatgggagctactgccggaggcttttgtcacaccctgtacacagtctgatcccgctcatctgggccctgcattcatttctaaacagtttctaatgcctattccccaattcctattgagcccgatttgcagtatctgaggggtgtgtgtgtgtgtgtgtgtgtttatgtatgtatacgtatgctgagatgatttaaatcagtgagacagactttccttatgatgcccacacccaacacagaaggaagccgaggtcccaggaaattggaatagcaggtacacgtctcaggtgtgcaagaaatatcacaagaatgtaacttctgttttgagccccca

SEQ ID NO: 309439 - DNA, 2473 bp, Artificial Sequence
  derived and/or modified sequence
ttgcatcacgttgggggagaacgggacggaatgaattctctgacctccgagccgcttctggcaagtgcagaagagaggttaacactagtgctcattaggaggccagaagcctgaggagggcagagcactggctccaagaagagaaagctcatttcctgcagggggcatcgggccagctgggctgcaggcagtggaaagaaggcggcagccgctgcactgaccctgtcccgacctcggcgccccggcctgcgcagggcgggaatcagcaccagctcgttctccggagccaccagttcgacctcaccacacagccccggagcttgtgcctcggaggggcagaggccacaggcaggagctctgcgcggctctgcgcgccttcgggaccccctggccccggatggcttcggagcccgcaggaccccctactcgctcccgcgccacttctcacctgccccccgcgcacccccgtggccgccacggctctgcgcgccgcgcgcaacccagcagccagcaccacggctgccgccatcttccctgagccgcgggaacctctcacccgggtcagcactcggctccgcggccggccgtgggtggggactccgggcgcggggaagcggggtagtggcggccgggcgagccctgctaccccattggagcgcgcctctgagcacgattcaccccattgcctctgcagccactttggaggcgggctcttttcatctcattggctgcttctaccaacgcgaggacaattttccattccattggtttcgtcttctagtccgtgtgaacgttcttttcccattggatccccttactagtttctctgtgagagaaacttccactccattggaaggattaatggagcctggagagacggggtttcaccgtgttagccaggatggtctcgatctcctgacctcgtgatcctcctgcctcggcctcccaaggtgctgggattacagggtctccaggatgagtgtcagtacctccttcagccgcagctgattgtccggcgtttgctggacgtcgctgtgctggttcctggccggccctcagagcaaaccctctccccacacaatcgctcagccctgtacaaggtctttgtgcccagcttcacttacagggtttcagcacagctggtgtgtgtggggggccgtggggtatctgcctgccccctgtcactgcgtctgcgtcccaaagccccacccctgcacaactcaagctctgtggcctgtggaggtgcctcaggatgccagctggagctggcactgcccccctgggggcactgggtctacgtgcgtgtggaaacatcatcccggggccctggtaggaccatccgcttccagctgtgtgtgcggttgcaagagtgcccacagcccggcctgctccgagccctggtccctggagctgccatgaacatgccccagtccctgggcaaccagccactgcccccagaaccgccatcccttggaacccctgcggaggggcctgggaccacgtccccacccgagcactgctggccagtgcgcccgactctgcgcaacgagctggacaccttctctgtccacttctacatcttctttggcccaagtgtggcccttccccctgagcgcccagccgtgttcgccatgaggctgttgccagtgctggacagtggaggcgtcctcagcctggagctccagctcaatgcgagctccgtgcgccaggaaaacgtgacggtgtttggatgcttgactcacgaggtgcccttgagcctgggggatgcagcagtgacctgttccaaagagtccctggccggcttcctcctctctgtcagtgccaccaccagggttgccaggctgcgaatcccattcccgcagacggggacctggttcctggccctccgctccctgtgcggggtggggcctcggttcgtgcggtgccgcaacgcgacggccgaggtgcggatgcgcaccttcctgtccccatgcgtggacgactgcgggccctacggccagtgcaagctgctgcgcacacacaattatctgtacgcagcctgcgagtgcaaggccgggtggagaggctggggctgcaccgacagtgcagatgcgctcacctatggattccagctgctgtccacactcctgctctgcctgagcaacctcatgtttctgccacctgtggtcctggccattcggagtcgatatgtgctggaagctgcagtctacaccttcaccatgttcttctccacggtatgcggtggtgtctgcatcttatcactgggtgcttgtgcatggtggtgggtcacagtctgtatttccaccacgttctccgagggtttgggaatgtctgtgccttcactgtgtcttctacagacagagacagcagtgcttcccaaactgtcatgcatagataatggtcatttttgtaagacacattggagtaaatgaacaaaactgtttgcaacttaataaagtaagtttgggcctcc

SEQ ID NO: 309440 - DNA, 2150 bp, Artificial Sequence
  derived and/or modified sequence
acgccgacgtcaagtcgaggccgccgccgcggggcctggttatcgccggttcagcgcagcccggagtcgcccaggcctgaactcctacccaggtccccggcccccgccccgggcccgcgaggacaccggaggccaccccccgggggtggggagcggagccgcggcctagactcaagtctgggtttcagctgccgccagccctattgctgctgttgctgttctctgtccttggcccaggggctggaggccttttcctgactgattactccacctgctcaccccgcaagctgagtcctttccgctcctttgccagcaccgagctcttccacttccatgttcctgaggacacattcctggctgtttggaacctcatcatcttcaaggagcaagggggaacttttggggaccactgcccagaccaaagtgtgactgtgtatttccggtccggggcaccccctgtcatcaatcccctgcatacacacttcccaggggacacagctgtgcctggggttttctcactgaccctcagctggacactgcccaaccgcacctcaggcatctttaacgtcagcagccccttacctggggactggttcttggctgcccaccttccccaggcccacggccacatctctgtcaagggtctccaggatgagtgtcagtacctccttcagccgcagctgattgtccggcgtttgctggacgtcgctgtgctggttcctggccggccctcagagcaaaccctctccccacacaatcgctcagccctgtacaaggtctttgtgcccagcttcacttacagggtttcagcacagctggtgtgtgtggggggccgtggggtatctgcctgccccctgtcactgcgtctgcgtcccaaagccccacccctgcacaactcaagctctgtggcctgtggaggtgcctcaggatgccagctggagctggcactgcccccctgggggcactgggtctacgtgcgtgtggaaacatcatcccggggccctggtaggaccatccgcttccagctgtgtgtgcggttgcaagagtgcccacagcccggcctgctccgagccctggtccctggagctgccatgaacatgccccagtccctgggcaaccagccactgcccccagaaccgccatcccttggaacccctgcggaggggcctgggaccacgtccccacccgagcactgctggccagtgcgcccgactctgcgcaacgagctggacaccttctctgtccacttctacatcttctttggcccaagtgtggcccttccccctgagcgcccagccgtgttcgccatgaggctgttgccagtgctggacagtggaggcgtcctcagcctggagctccagctcaatgcgagctccgtgcgccaggaaaacgtgacggtgtttggatgcttgactcacgaggtgcccttgagcctgggggatgcagcagtgacctgttccaaagagtccctggccggcttcctcctctctgtcagtgccaccaccagggttgccaggctgcgaatcccattcccgcagacggggacctggttcctggccctccgctccctgtgcggggtggggcctcggttcgtgcggtgccgcaacgcgacggccgaggtgcggatgcgcaccttcctgtccccatgcgtggacgactgcgggccctacggccagtgcaagctgctgcgcacacacaattatctgtacgcagcctgcgagtgcaaggccgggtggagaggctggggctgcaccgacagtgcagatgcgctcacctatggattccagctgctgtccacactcctgctctgcctgagcaacctcatgtttctgccacctgtggtcctggccattcggagtcgatatgtgctggaagctgcagtctacaccttcaccatgttcttctccacggtatgcggtggtgtctgcatcttatcactgggtgcttgtgcatggtggtgggtcacagtctgtatttccaccacgttctccgagggtttgggaatgtctgtgccttcactgtgtcttctacagacagagacagcagtgcttcccaaactgtcatgcatagataatggtcatttttgtaagacacattggagtaaatgaacaaaactgtttgcaacttaataaagtaagtttgggcctcca

SEQ ID NO: 309441 - protein, 401 aa, Artificial Sequence
  derived and/or modified sequence
MAHLGPTPPPHSLNYKSEDRLSEQDWPAYFKVPCCGVDTSQIESEEAEVDVRERETQRDREPKRARDLTLRDSCTDNSMQFGTRTTTAEPGFMGTWQNADTNLLFRMSQQVPLACTGRVLGADFCPNLEEPYHRLEVQAIRCTLVNCTCECFQPGKINLRTCDQCKHGWVAHALDKLSTQHLYHPTQVEIVQSNVVFDISSLMLYGTQAVPVRLKILLDRLFSVLKQEEVLHILHGLGWTLRDYVRGYILQDAAGKVLDRWAIMSREEEIITLQQFLRFGETKSIVELMAIQEKEGQAVAVPSSKTDSDIRTFIESNNRTRSPSLLAHLENSNPSSIHHFENIPNSLAFLLPFQYINPVSAPLLGLPPNGLLLEQPGLRLREPSLSTQNEYNESSESEVSP

SEQ ID NO: 309442 - protein, 101 aa, Artificial Sequence
  derived and/or modified sequence
MCRLLVPLACTGRVLGADFCPNLEEPYHRLEVQAIRCTLVNCTCECFQPGKINLRTCDQCKHGWVAHALDKLSTQHLYHPTQVEIVQSNVVFDISSLMLYG

SEQ ID NO: 309443 - protein, 410 aa, Artificial Sequence
  derived and/or modified sequence
MAHLGPTPPPHSLNYKSEDRLSEQDWPAYFKVPCCGVDTSQIESEEAEVDVRERETQRDREPKRARDLTLRDSCTDNSMQFGTRTTTAEPGFMGTWQNADTNLLFRMSQQAGLKLLTSGDPPVLDFQSAGITGVSHCTRLKVAMISKAIRCTLVNCTCECFQPGKINLRTCDQCKHGWVAHALDKLSTQHLYHPTQVEIVQSNVVFDISSLMLYGTQAVPVRLKILLDRLFSVLKQEEVLHILHGLGWTLRDYVRGYILQDAAGKVLDRWAIMSREEEIITLQQFLRFGETKSIVELMAIQEKEGQAVAVPSSKTDSDIRTFIESNNRTRSPSLLAHLENSNPSSIHHFENIPNSLAFLLPFQYINPVSAPLLGLPPNGLLLEQPGLRLREPSLSTQNEYNESSESEVSP

SEQ ID NO: 309444 - DNA, 3814 bp, Artificial Sequence
  derived and/or modified sequence
acttgacaaccagcatgccgagatggcacaccttgggcccaccccacctccacatagccttaattacaaatcagaggacaggcttagtgagcaagactggccagcatatttcaaggtcccatgttgtggggttgatacatctcaaattgagtcagaagaggcagaagtggatgtgagagaaagagagacacagagagacagagagccaaagagggcaagagacttgactttaagagactcctgtactgacaactccatgcagttcggaaccagaacgactacggctgaaccagggttcatggggacatggcaaaacgctgatactaacctcttattcagaatgtcccaacaggttccattggcatgtactggcagagtgctgggggcagacttctgcccaaacctggaggagccataccacaggctggaagtccaggccatccgttgcacactggtaaactgcacatgtgaatgttttcagccagggaagattaacctgaggacttgtgatcagtgtaaacatggctgggtggcacatgccttggataagctcagcacgcagcacctgtaccaccccacccaagtggagattgtgcagtccaacgtcgtgtttgacatcagcagcctgatgctctatgggacacaagcagtgcctgtgcggctaaagatcctgctggaccgtctcttcagcgtcctgaagcaagaggaggtactgcacatactgcacggccttggctggactctgcgggactatgtccgaggatacatccttcaggatgctgctggcaaggtgctggaccgctgggccatcatgtctcgagaagaggaaatcatcacccttcagcagtttctgcggtttggagaaaccaaatccattgtggagctgatggcaattcaggagaaagaagggcaggccgtggctgtaccatcttcaaagacagactcagatataaggactttcattgagagcaataatcgcaccaggagtcccagcctccttgctcacttagagaacagcaatccttccagcattcatcacttcgaaaacatcccaaacagccttgcatttctgcttccattccagtacataaaccctgtctcagcaccactgctagggttgcctccaaatgggctactgttagagcaaccagggttgaggctgcgggaacccagcctttcaactcagaatgaatataatgagagcagcgaatccgaagtttctcccacaccttataagaatgatcaaacacccaatagaaatgccctgaccagcattactaatgtggagcccaaaaccgagccagcctgtgtctctcccattcagaattctgccccagtcagtgatctaaccaaaactgaacacccaaaaagctcattccggattcatcggatgagaaggatggggtcagcctctaggaaaggaagagtgttctgtaatgcatgtgggaagacattctatgacaaaggtactctcaaaattcattacaatgctgttcacctgaagatcaaacatcgatgcaccattgaaggttgcaacatggtctttagctccctccgaagtcgtaatcgccacagtgcaaaccccaatcctcgccttcacatgcctatgctaaggaataaccgagataaagatttaattcgggccacctcaggagctgccacccctgtcatagcaagtacaaaatcaaatctggcactcacaagccctggccgacccccaatgggttttaccactccccctctagaccctgtcttgcaaaatcctctccctagccagctagtattttctgggctaaagactgtacaaccagttcctccattttatagaagtttactcactccaggggaaatggtgagtcctccaacctccctcccaaccagtcccatcattccaaccagtggtaccatagagcagcaccccccgccaccctctgagccagtagtgccagcagtgatgatggccacccatgagcccagtgctgacctggcacccaagaaaaagcccaggaagtcaagcatgcctgtgaagattgagaaggaaattattgataccgccgatgagtttgatgatgaagatgatgaccccaatgatggtggagctgtggtcaatgacatgagccatgacaatcattgtcactcccaagaggagatgagcccaggcatgtctgtgaaggacttttctaagcataacaggacccggtgcatttcaaggactgaaataaggagggccgacagcatgacttctgaagaccaagaacctgagcgggactatgagaacgagtctgagtcttcggagcccaaactgggcgaggaatccatggaaggggatgagcacattcacagcgaagtgagtgaaaaagtcctgatgaatagtgagaggcctgatgagaaccacagtgagccctctcaccaggacgtcatcaaggtgaaggaagaatttacagaccccacttacgacatgttttacatgagccagtatggactgtacaatggtgggggtgccagcatggccgccttgcatgagagctttacatcgtctctgaattatggcagccctcaaaagttctccccagaaggtgacctatgttctagcccagaccccaaaatctgttatgtgtgcaagaagagtttcaaaagctcctacagtgtgaaacttcactacaggaacgttcacttgaaagagatgcacgtctgcacagtggctggttgcaatgctgcattcccctctcgccgaagccgagacagacacagtgccaacataaacctacatcgtaaactgttgaccaaagaactcgatgacatgggcctggactcgtcgcagccctcccttagcaaggacctccgcgatgaatttttggtgaagatatatggtgcccagcaccccatggggctcgatgtcagggaagacgcctcctctcccgcagggactgaagactcccacctgaacgggtatgggagaggcatggcagaggactacatggtccttgacttgagcaccacctccagcctccagtccagcagcagtatccattcctccagagaatccgacgcaggcagcgatgaggggattcttctcgatgacattgacggggcgagtgacagtggggagtcggcacacaaggccgaggcccctgccctccctggcagcctaggggctgaagtttcaggatctcttatgttcagcagcttgtctgggagcaatggtgggatcatgtgcaacatttgccacaaaatgtacagcaacaaggggaccctgagagtgcactacaaaactgtgcatttgagagaaatgcacaagtgcaaagtcccaggttgcaatatgatgttttcctctgtacgaagccgaaatcggcacagtcagaaccctaatctccacaaaaacattcccttcacttcagtagattagtctcagaatggacactacaaatgccagctctcaccagatggcctacgtgtttgaactgccatagtcagtgtgcgcttatgtacttggggtgtgtgtgtgtgtgtgtgtgtgtgtgcatttatgtatgctctgtggctacatatacacacacgtatttccttgagataaacaagataaacactaggtgcttttgaatttttttcacttccctttatagttttgggaaaggagtgggatctttgatttcagggtgaaaacagagtacccctttaaacacacacacacacacatgcacatacacacacacacacacacacacacacagtgtgcaactagccccagttttgacagaataattcttggtcttccccaaagagacaatttgttgtacccatgactgttgcctgc

SEQ ID NO: 309445 - DNA, 2712 bp, Artificial Sequence
  derived and/or modified sequence
atggcccatctgggacccactccccccccacactctctgaactacaagagtgaggatcgccttagcgagcaggactggcccgcttacttcaaggtcccctgctgcggtgtggatacctcgcaaattgagagtgaggaggccgaagtagacgtaagagaacgagagactcagcgcgatagagaaccgaagcgtgccagggatctcaccttaagggatagttgcactgacaatagtatgcaattcggaactcgaaccacaactgccgaaccggggttcatggggacatggcagaacgcggacaccaaccttctgttcaggatgagccaacaggccatccgatgtaccctcgtgaattgcacttgtgagtgctttcagcctgggaagataaatctcaggacctgcgaccaatgtaagcatggttgggtggcccacgcgctggataaactctcaacacagcacctctaccacccaactcaggtcgagatcgtgcagtccaacgtcgtatttgatattagctccttgatgctgtacgggactcaggctgtgcccgtacggttgaagatattactggatcggctgttcagcgtccttaaacaggaggaggtgctgcacatcctgcatggcctgggctggactttaagggactatgtccgggggtacattctgcaggacgccgccggaaaggtcctggacagatgggcaataatgagtcgcgaggaagaaattataacactgcagcaatttctgcgtttcggggagacaaaaagtattgtggagctcatggcaatccaggagaaagaaggacaggccgttgctgtcccctcgtcaaaaacagacagcgatataagaaccttcatcgagtctaataaccggactcgctcgccaagtctcctggcacacctggaaaattcgaacccgtccagcatccaccacttcgaaaacatcccgaattccctcgccttcctgctcccctttcaatacatcaatcctgttagcgccccgctcttaggcctgccacccaacgggcttctactggaacagccgggactgaggctgcgagagcctagccttagtacccaaaacgagtataacgagtcatccgagtcagaggtctccccaactccttataaaaatgaccagacacctaaccgcaacgctctcaccagcattaccaacgtggagcccaaaacagagcctgcttgtgtgtcccccatccagaactcggctccagttagtgatctgaccaagacagaacaccctaagagttccttccggatccaccggatgcgtcggatggggtcagcctcaaggaaggggagggtgttctgtaatgcctgtgggaaaaccttttacgacaaaggaacattgaagatacactacaatgcagtgcacttgaaaataaagcatcggtgtaccatcgaagggtgcaatatggttttctccagtctaagatcaagaaaccgacactccgcaaacccaaatccccgcctgcacatgcctatgctgcgcaacaacagggataaggatttgatccgcgccacctctggcgctgccacaccagtgatagctagcacaaagtctaatctcgcactgacctcgccaggcagacctccaatgggctttaccactcccccacttgatccggttcttcagaatcccctgccgagccagctggtttttagcggactcaaaaccgtgcagccagtgcctcccttttatcggtccctgctcactcccggggagatggtgagcccacccacgagcttgccgacctctcctattatccccacctctggcaccatcgaacagcaccctccccctccctccgaaccagttgtgccagctgtcatgatggccacccacgagccttctgccgatctggcacctaaaaaaaagccacgcaagagctccatgcctgtgaaaatcgaaaaagaaatcattgataccgcagatgagtttgatgatgaggatgacgatcccaatgatggcggcgctgtggttaatgacatgagtcatgacaaccactgccactcacaggaggaaatgagtcctggcatgtccgtgaaagactttagcaagcacaatcgtaccagatgtatctcccgcactgagattagacgcgcagattccatgacgagcgaagaccaggagcctgagagagactacgaaaatgaaagcgagtcctcggaaccaaagctaggagaagagtctatggaaggagacgagcacatccacagtgaagtgtccgaaaaagttctaatgaacagcgagcgacccgatgaaaatcatagcgagcctagccatcaggacgttatcaaggttaaagaggaattcaccgaccccacctacgatatgttctacatgtctcagtatggcctgtacaacgggggcggtgcctctatggcagcacttcacgaatcctttacaagctcactgaactacggtagtcctcaaaagtttagcccagagggcgacctatgcagcagtcccgacccaaaaatctgttatgtgtgcaagaaatcattcaaatcatcttactccgtcaaactccactatcggaatgtacatttgaaagaaatgcacgtgtgcaccgtggccggatgtaatgccgcatttccctcacgacgaagccgggacaggaaccgaaatctgcggatggagcggactataggcccggggcatagggattctttacacctgcgaagcacctag

SEQ ID NO: 309446 - DNA, 2712 bp, Artificial Sequence
  derived and/or modified sequence
atggcccacctgggccccaccccaccaccccacagcctgaactacaagtctgaggaccggctgtctgagcaggactggccagcctacttcaaggtgccctgctgcggcgtggacaccagccagatcgagagcgaggaggccgaggtggatgtgcgggagcgggagacccagagggaccgggagcccaagagggcccgggacctgaccctgcgggacagctgcacagacaacagcatgcagtttggcaccaggaccaccacagctgagcccggcttcatgggcacctggcagaatgctgacaccaacctgctcttcaggatgagccagcaggccatccgctgcaccctggtgaactgcacctgtgagtgcttccagcccgggaagatcaacctgcggacctgtgaccagtgcaagcacggctgggtggcccacgccctggacaagctgagcacccagcacctgtaccaccccacccaggtggagatcgtgcagagcaatgtggtgtttgacatcagcagcctgatgctgtatggcacccaggccgtgcctgtgcggctgaagatcctgctggacaggctcttctctgtgctgaagcaggaggaggtgctgcacatcctgcacggcctgggctggaccctgcgggactatgtgcggggctacatcctgcaggatgctgctgggaaggtgctggaccgctgggccatcatgagccgggaggaggagatcatcaccctgcagcagttcctgcgctttggagagaccaagagcatcgtggagctgatggccatccaggagaaggagggccaggccgtggccgtgcccagcagcaagacagacagcgacatccgcaccttcatcgagagcaacaacagaaccaggagccccagcctgctggcccacctggagaacagcaaccccagcagcatccaccactttgagaacatccccaacagcctggccttcctgctgcccttccagtacatcaaccctgtgtctgcccccctgctgggcctgcccccaaatggcctgctgctggagcagcccggcctgcggctgcgggagcccagcctgagcacccagaatgagtacaatgaatcttctgagagcgaggtgagccccaccccctacaagaatgaccagacccccaacagaaatgccctgaccagcatcaccaacgtggagcccaagacagagcccgcctgtgtgagccccatccagaacagcgcccctgtgtctgacctgaccaagacagagcaccccaagagcagcttccgcatccacaggatgaggaggatgggcagcgccagcaggaagggccgggtcttctgcaatgcctgtgggaagaccttctatgacaagggcaccctgaagatccactacaatgctgtgcacctgaagatcaagcaccgctgcaccatcgagggctgcaacatggtgttcagcagcctgcggagcaggaacagacacagcgccaaccccaacccccggctgcacatgcccatgctgaggaacaacagagacaaggacctgatccgggccaccagcggggccgccacccctgtgattgccagcaccaagagcaacctggccctgaccagccctggccggccccccatgggcttcaccaccccacccctggaccctgtgctgcagaaccccctgcccagccagctggtgttttctggcctgaagacagtgcagcctgtgccccccttctaccgcagcctgctgaccccaggagagatggtgtccccacccaccagcctgcccaccagccccatcatccccaccagcggcaccatcgagcagcaccccccacctccttctgagcctgtggtgcctgctgtgatgatggccacccatgagcccagcgctgacctggcccccaagaagaagcccaggaagagctccatgcctgtgaagattgagaaggagatcatcgacacagcagatgaatttgatgatgaagatgatgaccccaatgatggcggcgctgtggtgaatgacatgagccatgacaaccactgccacagccaggaggagatgagccctggcatgtctgtgaaggacttcagcaagcacaacagaacccgctgcatcagcaggacagagatccggcgggctgacagcatgaccagcgaggaccaggagcctgagcgggactatgaaaatgaaagtgagagcagcgagcccaagctgggggaggagagcatggagggagatgagcacatccacagcgaggtgtctgagaaggtgctgatgaacagcgagaggccagatgagaaccacagcgagcccagccaccaggacgtcatcaaggtgaaggaggagttcacagaccccacctatgacatgttctacatgagccagtatggcctgtacaatggaggaggagcctccatggccgccctgcacgagagcttcaccagcagcctgaactacggcagcccccagaagttcagccctgagggggacctgtgcagcagcccagaccccaagatctgctacgtgtgcaagaagagcttcaagagcagctacagcgtgaagctgcactacagaaatgtgcacctgaaggagatgcacgtgtgcaccgtggccggctgcaatgctgccttccccagcagaagaagccgggacaggaacagaaacctgaggatggagaggaccatcggccctggccaccgggacagcctgcacctgcggagcacctag

SEQ ID NO: 309447 - DNA, 2712 bp, Artificial Sequence
  derived and/or modified sequence
atggcccacctgggccccaccccccccccccacagcctgaactacaagtccgaagatcgcctgtccgaacaagattggccagcttattttaaggtaccatgttgtggcgttgataccagtcagatcgagtctgaggaagccgaagttgacgttagagaacgagagacccaacgcgatcgcgagccaaagcgtgccagggacctgaccctgagggattcatgtaccgacaactctatgcaatttggcacaaggaccaccacagccgaacccggattcatggggacctggcagaacgccgataccaacttgctattccggatgtctcagcaggccatacgttgtaccctcgtgaattgcacttgtgaatgcttccagccaggcaaaataaatctccgcacatgtgatcaatgcaaacacggctgggtggcacacgctttggataaactgtcaacccagcacctgtatcacccaacacaagtagaaattgtacagtctaacgttgtcttcgatataagctccctcatgctctatggaacccaggcagtgcctgtgcgtcttaaaatcttgctggatcgcctgttttcagtgctgaagcaggaagaagtgttacatatactgcacggcctgggctggaccttgcgtgactatgtccgtggttatattctgcaggacgcagcgggtaaagtgctggaccggtgggccatcatgagcagggaagaggaaatcattactctgcagcagtttctgaggtttggcgaaaccaagtctatagtggagctgatggctatccaggaaaaggaagggcaggctgtggcagtccctagctctaagactgattcagatatcaggaccttcattgaaagcaacaaccgtacgcggtctcctagcctgttggcgcatctggaaaattctaatccatcctccatccaccactttgagaatatcccaaactcactggcctttctgctccccttccagtacattaacccggtatccgccccactgctgggtctcccgcctaacggtctgttacttgagcagcccggtctcaggctgcgagaacctagtctgtcaactcagaatgaatacaacgaatcttctgaaagtgaagtcagcccgaccccttataaaaacgatcagacccccaataggaatgcacttaccagtatcaccaatgtggaacccaaaactgaacccgcctgtgtctctcccattcagaactctgcaccagtcagtgatcttacaaaaactgagcatcccaaatcctcttttagaattcatcggatgaggagaatgggttctgcctcaaggaagggacgcgtattctgtaatgcttgtgggaagacgttttatgataaagggacacttaagatccactacaacgccgtgcacctgaaaatcaagcacagatgcacaattgaaggatgcaatatggttttctctagcctcaggagcagaaaccgccactccgcgaatccaaaccccagattgcatatgccaatgctgaggaataatcgggataaggacctgattcgggcaacatccggcgcagcaactcccgtgatagcctcaaccaagtccaatctggccttaacaagtcctgggcgcccgcccatgggcttcactacccctcctcttgaccccgtactccagaaccctctgccctcccagctggttttctcagggctgaaaaccgtgcagccggtaccgcccttttaccgttctctgctgactcctggcgagatggtgagtccgccaacaagcctcccgacatctccgataatacctacctcgggcacaatagagcagcaccctccccccccaagcgaacccgtcgtgcccgccgtgatgatggcaacacacgagccttccgccgatcttgctcccaagaagaaacctcgaaagtcttcaatgcctgtgaagatcgagaaggagattattgacacagctgacgaattcgatgatgaggacgacgatccaaatgacggaggggcggtggttaacgacatgagtcacgacaaccactgccatagccaagaggagatgtctcccggaatgtctgtgaaagatttttctaaacacaatcggacaagatgtatctccaggacggagattagacgcgctgacagcatgacaagcgaggatcaagaacctgagcgggattacgagaatgagagcgagtcatccgagcccaagcttggagaagagagcatggagggggacgagcacattcactctgaagtgtccgagaaagtcttaatgaactcagaacgccccgacgaaaatcacagtgagccgtcacatcaagatgtcatcaaggtgaaggaagagttcacagaccctacttacgacatgttctacatgtcccagtacggcctgtacaacggcggcggggcaagtatggccgcactgcatgaaagcttcaccagctccctgaattatggatccccacagaaatttagccctgaaggtgacctctgcagcagccctgacccaaagatttgttacgtttgcaagaaatccttcaaatcttcttatagtgtaaaattacactaccgcaacgtgcacttaaaggaaatgcatgtttgcactgtggctggatgcaacgctgcgtttccatcgcgccggagtcgggaccgaaataggaacctacgaatggagaggaccattgggcccggtcaccgtgactcattacaccttaggtctacatag

SEQ ID NO: 309448 - DNA, 2712 bp, Artificial Sequence
  derived and/or modified sequence
atggcacatctggggccaacaccaccgccacatagccttaattataagagcgaagataggctttcagagcaggactggcccgcttactttaaggttccatgctgcggcgtggatacttcccagatcgagtcagaagaagcggaagtagacgtgcgagagcgtgaaacacagcgagatagggagcctaagcgcgcaagggaccttactctgagggactcctgcacggacaactctatgcagttcggcacaaggacgaccacagctgaaccaggattcatgggcacttggcagaacgccgatacgaatttgctctttcgtatgagccagcaagcaattcgctgtaccctggtaaactgcacgtgcgagtgcttccaacccggaaagattaatttacgtacctgtgatcagtgcaagcacggttgggtagctcacgcacttgataaactgtccacacagcacctgtatcaccccactcaggtagagatcgtccagtcaaacgtcgtgttcgacatcagctcacttatgctgtatggtacacaggcggtacccgtgcgcctgaagatcctgttggaccggctgtttagcgtcctgaaacaggaagaagtcctccatattctccatggactaggatggactttgcgtgactacgtaagaggttacattctgcaggacgctgccggtaaagtgctcgatcggtgggctattatgagtagggaagaggagatcataacactacaacagttccttcgttttggagagactaagagtattgtggagctgatggccatccaggaaaaagaagggcaggccgtcgccgtgcctagctcgaagaccgattccgatattcgaacgttcatagagtcgaataatcgtacacgctccccctccctgctggcccatctagagaattccaatccttcatctattcaccactttgaaaacatccctaatagtcttgcctttctgctgccattccagtatataaatcctgtgtctgcaccccttctgggtctgcctccaaacggccttctgttggagcaacccggactgcgccttcgagagccctccctttctacacaaaacgaatataacgaatcttctgagtcagaagtgagccctaccccttataaaaacgatcagacccctaaccgaaacgcactgaccagcataactaacgtcgaaccgaagactgagccagcctgcgttagcccaatccaaaactcggcccctgtgtctgaccttaccaagaccgagcatcccaaatcaagttttagaattcatcggatgcggcgaatgggttccgcatctcggaagggcagggtcttctgtaacgcctgtggcaagacattttacgacaagggcactctcaagatacattacaatgcggtgcatcttaaaataaagcatagatgcacaattgagggatgtaacatggttttctcatcgctgcggagcaggaatagacacagcgcaaaccccaacccacgtctgcacatgcctatgcttagaaacaaccgtgataaggatttgattcgcgcaacgagcggtgccgctacaccggttatagcaagcaccaagtcaaacctcgccctgacctctccaggaaggcctcccatgggattcacgacacctcccctggaccccgtcctgcagaacccgctgccttctcagcttgtgttcagtgggctgaagaccgtccagcctgtaccccctttttatcgttcgctgctcacaccaggagagatggtgtccccacccacgtctctgccgacctcacccatcattccaaccagtggcacaatcgaacagcatccaccgcctccatctgagccggtcgttcctgctgtgatgatggcaacccacgaaccaagcgctgatctggcccctaaaaaaaaacctaggaaaagcagcatgccagtgaagatagagaaagaaatcattgacacagcagatgaatttgacgacgaagacgatgacccaaacgatgggggtgcggtagtgaacgacatgagtcacgataaccactgccactctcaggaagaaatgtctcctgggatgagtgtcaaggattttagcaagcacaacagaacaaggtgtatctctcgaactgagatccgccgtgccgactccatgacgagcgaagaccaagagccagaacgtgattatgaaaatgaaagtgagagttccgaacctaaactgggtgaagagagcatggaaggagatgaacacatacattcagaggtgagcgagaaagtgctcatgaatagcgagcggccagacgaaaaccacagcgaaccgtcccaccaggatgtgattaaggtaaaggaagagtttacggatcctacatacgacatgttttacatgtcccagtatggcttgtataatggaggaggtgcctctatggccgctctgcatgagtccttcacgtcctcactgaactatggatcaccacagaaattctcccccgaaggggacctatgctcttcgcccgatccaaaaatttgctatgtatgcaaaaagagcttcaagtccagctattcagtgaaactccattaccgcaatgtgcatctgaaagaaatgcatgtctgtaccgtggctggatgcaacgcggctttcccgtcccgccgatcgagagatagaaacagaaatttgcggatggaacggactatcggccctggtcaccgggatagtctacaccttagaagtacttag

SEQ ID NO: 309449 - DNA, 2849 bp, Artificial Sequence
  derived and/or modified sequence
gaggcccggaggaactcggagggggagggagagaaaggccgagacggagggagccagcggcggccgaggggctggtccaggcgcggccgctaagaggagaccaagaggcgggggctgcacttgacaaccagcatgccgagatggcacaccttgggcccaccccacctccacatagccttaattacaaatcagaggacaggcttagtgagcaagactggccagcatatttcaaggtcccatgttgtggggttgatacatctcaaattgagtcagaagaggcagaagtggatgtgagagaaagagagacacagagagacagagagccaaagagggcaagagacttgactttaagagactcctgtactgacaactccatgcagttcggaaccagaacgactacggctgaaccagggttcatggggacatggcaaaacgctgatactaacctcttattcagaatgtcccaacaggccatccgttgcacactggtaaactgcacatgtgaatgttttcagccagggaagattaacctgaggacttgtgatcagtgtaaacatggctgggtggcacatgccttggataagctcagcacgcagcacctgtaccaccccacccaagtggagattgtgcagtccaacgtcgtgtttgacatcagcagcctgatgctctatgggacacaagcagtgcctgtgcggctaaagatcctgctggaccgtctcttcagcgtcctgaagcaagaggaggtactgcacatactgcacggccttggctggactctgcgggactatgtccgaggatacatccttcaggatgctgctggcaaggtgctggaccgctgggccatcatgtctcgagaagaggaaatcatcacccttcagcagtttctgcggtttggagaaaccaaatccattgtggagctgatggcaattcaggagaaagaagggcaggccgtggctgtaccatcttcaaagacagactcagatataaggactttcattgagagcaataatcgcaccaggagtcccagcctccttgctcacttagagaacagcaatccttccagcattcatcacttcgaaaacatcccaaacagccttgcatttctgcttccattccagtacataaaccctgtctcagcaccactgctagggttgcctccaaatgggctactgttagagcaaccagggttgaggctgcgggaacccagcctttcaactcagaatgaatataatgagagcagcgaatccgaagtttctcccacaccttataagaatgatcaaacacccaatagaaatgccctgaccagcattactaatgtggagcccaaaaccgagccagcctgtgtctctcccattcagaattctgccccagtcagtgatctaaccaaaactgaacacccaaaaagctcattccggattcatcggatgagaaggatggggtcagcctctaggaaaggaagagtgttctgtaatgcatgtgggaagacattctatgacaaaggtactctcaaaattcattacaatgctgttcacctgaagatcaaacatcgatgcaccattgaaggttgcaacatggtctttagctccctccgaagtcgtaatcgccacagtgcaaaccccaatcctcgccttcacatgcctatgctaaggaataaccgagataaagatttaattcgggccacctcaggagctgccacccctgtcatagcaagtacaaaatcaaatctggcactcacaagccctggccgacccccaatgggttttaccactccccctctagaccctgtcttgcaaaatcctctccctagccagctagtattttctgggctaaagactgtacaaccagttcctccattttatagaagtttactcactccaggggaaatggtgagtcctccaacctccctcccaaccagtcccatcattccaaccagtggtaccatagagcagcaccccccgccaccctctgagccagtagtgccagcagtgatgatggccacccatgagcccagtgctgacctggcacccaagaaaaagcccaggaagtcaagcatgcctgtgaagattgagaaggaaattattgataccgccgatgagtttgatgatgaagatgatgaccccaatgatggtggagctgtggtcaatgacatgagccatgacaatcattgtcactcccaagaggagatgagcccaggcatgtctgtgaaggacttttctaagcataacaggacccggtgcatttcaaggactgaaataaggagggccgacagcatgacttctgaagaccaagaacctgagcgggactatgagaacgagtctgagtcttcggagcccaaactgggcgaggaatccatggaaggggatgagcacattcacagcgaagtgagtgaaaaagtcctgatgaatagtgagaggcctgatgagaaccacagtgagccctctcaccaggacgtcatcaaggtgaaggaagaatttacagaccccacttacgacatgttttacatgagccagtatggactgtacaatggtgggggtgccagcatggccgccttgcatgagagctttacatcgtctctgaattatggcagccctcaaaagttctccccagaaggtgacctatgttctagcccagaccccaaaatctgttatgtgtgcaagaagagtttcaaaagctcctacagtgtgaaacttcactacaggaacgttcacttgaaagagatgcacgtctgcacagtggctggttgcaatgctgcattcccctctcgccgaagccgagacagaaacagaaatttacggatggaaagaaccataggtccaggacatcgagacagcctgcatctccgtagcaca

SEQ ID NO: 309450 - DNA, 2712 bp, Artificial Sequence
  derived and/or modified sequence
atggcccacctgggccccaccccccccccccacagcctgaactacaagagcgaggacagactgagcgagcaggactggcccgcctacttcaaggtgccctgctgcggcgtggacaccagccagatcgagagcgaggaggccgaggtggacgtgagagagagagagacccagagagacagagagcccaagagagccagagacctgaccctgagagacagctgcaccgacaacagcatgcagttcggcaccagaaccaccaccgccgagcccggcttcatgggcacctggcagaacgccgacaccaacctgctgttcagaatgagccagcaggccatcagatgcaccctggtgaactgcacctgcgagtgcttccagcccggcaagatcaacctgagaacctgcgaccagtgcaagcacggctgggtggcccacgccctggacaagctgagcacccagcacctgtaccaccccacccaggtggagatcgtgcagagcaacgtggtgttcgacatcagcagcctgatgctgtacggcacccaggccgtgcccgtgagactgaagatcctgctggacagactgttcagcgtgctgaagcaggaggaggtgctgcacatcctgcacggcctgggctggaccctgagagactacgtgagaggctacatcctgcaggacgccgccggcaaggtgctggacagatgggccatcatgagcagagaggaggagatcatcaccctgcagcagttcctgagattcggcgagaccaagagcatcgtggagctgatggccatccaggagaaggagggccaggccgtggccgtgcccagcagcaagaccgacagcgacatcagaaccttcatcgagagcaacaacagaaccagaagccccagcctgctggcccacctggagaacagcaaccccagcagcatccaccacttcgagaacatccccaacagcctggccttcctgctgcccttccagtacatcaaccccgtgagcgcccccctgctgggcctgccccccaacggcctgctgctggagcagcccggcctgagactgagagagcccagcctgagcacccagaacgagtacaacgagagcagcgagagcgaggtgagccccaccccctacaagaacgaccagacccccaacagaaacgccctgaccagcatcaccaacgtggagcccaagaccgagcccgcctgcgtgagccccatccagaacagcgcccccgtgagcgacctgaccaagaccgagcaccccaagagcagcttcagaatccacagaatgagaagaatgggcagcgccagcagaaagggcagagtgttctgcaacgcctgcggcaagaccttctacgacaagggcaccctgaagatccactacaacgccgtgcacctgaagatcaagcacagatgcaccatcgagggctgcaacatggtgttcagcagcctgagaagcagaaacagacacagcgccaaccccaaccccagactgcacatgcccatgctgagaaacaacagagacaaggacctgatcagagccaccagcggcgccgccacccccgtgatcgccagcaccaagagcaacctggccctgaccagccccggcagaccccccatgggcttcaccaccccccccctggaccccgtgctgcagaaccccctgcccagccagctggtgttcagcggcctgaagaccgtgcagcccgtgccccccttctacagaagcctgctgacccccggcgagatggtgagcccccccaccagcctgcccaccagccccatcatccccaccagcggcaccatcgagcagcacccccccccccccagcgagcccgtggtgcccgccgtgatgatggccacccacgagcccagcgccgacctggcccccaagaagaagcccagaaagagcagcatgcccgtgaagatcgagaaggagatcatcgacaccgccgacgagttcgacgacgaggacgacgaccccaacgacggcggcgccgtggtgaacgacatgagccacgacaaccactgccacagccaggaggagatgagccccggcatgagcgtgaaggacttcagcaagcacaacagaaccagatgcatcagcagaaccgagatcagaagagccgacagcatgaccagcgaggaccaggagcccgagagagactacgagaacgagagcgagagcagcgagcccaagctgggcgaggagagcatggagggcgacgagcacatccacagcgaggtgagcgagaaggtgctgatgaacagcgagagacccgacgagaaccacagcgagcccagccaccaggacgtgatcaaggtgaaggaggagttcaccgaccccacctacgacatgttctacatgagccagtacggcctgtacaacggcggcggcgccagcatggccgccctgcacgagagcttcaccagcagcctgaactacggcagcccccagaagttcagccccgagggcgacctgtgcagcagccccgaccccaagatctgctacgtgtgcaagaagagcttcaagagcagctacagcgtgaagctgcactacagaaacgtgcacctgaaggagatgcacgtgtgcaccgtggccggctgcaacgccgccttccccagcagaagaagcagagacagaaacagaaacctgagaatggagagaaccatcggccccggccacagagacagcctgcacctgagaagcacctag

SEQ ID NO: 309451 - protein, 649 aa, Artificial Sequence
  derived and/or modified sequence
MLYGTQAVPVRLKILLDRLFSVLKQEEVLHILHGLGWTLRDYVRGYILQDAAGKVLDRWAIMSREEEIITLQQFLRFGETKSIVELMAIQEKEGQAVAVPSSKTDSDIRTFIESNNRTRSPSLLAHLENSNPSSIHHFENIPNSLAFLLPFQYINPVSAPLLGLPPNGLLLEQPGLRLREPSLSTQNEYNESSESEVSPTPYKNDQTPNRNALTSITNVEPKTEPACVSPIQNSAPVSDLTKTEHPKSSFRIHRMRRMGSASRKGRVFCNACGKTFYDKGTLKIHYNAVHLKIKHRCTIEGCNMVFSSLRSRNRHSANPNPRLHMPMLRNNRDKDLIRATSGAATPVIASTKSNLALTSPGRPPMGFTTPPLDPVLQNPLPSQLVFSGLKTVQPVPPFYRSLLTPGEMVSPPTSLPTSPIIPTSGTIEQHPPPPSEPVVPAVMMATHEPSADLAPKKKPRKSSMPVKIEKEIIDTADEFDDEDDDPNDGGAVVNDMSHDNHCHSQEEMSPGMSVKDFSKHNRTRCISRTEIRRADSMTSEDQEPERDYENESESSEPKLGEESMEGDEHIHSEVSEKVLMNSERPDENHSEPSHQDVIKVKEEFTDPTYDMFYMSQYGLYNGGGASMAALHESFTSSLNYGSPQVLPRR

SEQ ID NO: 309452 - protein, 327 aa, Artificial Sequence
  derived and/or modified sequence
PSEPVVPAVMMATHEPSADLAPKKKPRKSSMPVKIEKEIIDTADEFDDEDDDPNDGGAVVNDMSHDNHCHSQEEMSPGMSVKDFSKHNRTRCISRTEIRRADSMTSEDQEPERDYENESESSEPKLGEESMEGDEHIHSEVSEKVLMNSERPDENHSEPSHQDVIKVKEEFTDPTYDMFYMSQYGLYNGGGASMAALHESFTSSLNYGSPQKFSPEGDLCSSPDPKICYVCKKSFKSSYSVKLHYRNVHLKEMHVCTVAGCNAAFPSRRSRDRNRNLRMERTIGPGHRDSLHLRRGNSNRPGTCCLHTGDSLEESVIVRISCKRLES

SEQ ID NO: 309453 - DNA, 1206 bp, Artificial Sequence
  derived and/or modified sequence
atggcacatttgggacctaccccacccccacactcgctgaattacaaaagcgaggatcgcctttcagagcaggattggcccgcatactttaaagtcccctgttgcggagttgataccagccagattgaatcagaggaagccgaggtagatgtacgggaaagagaaacccaaagagatagggagcccaagagagcacgagacctcaccctgagagactcctgtactgacaatagcatgcagttcggaacaagaacaaccactgcagagccaggattcatgggcacctggcaaaacgccgacacgaacctcttattccgcatgtcacagcaggtaccactcgcctgcaccggtagggtgctgggggcggatttctgccctaatctcgaggaaccataccataggttggaggtccaggcaatccgctgcacactagtgaattgcacttgtgaatgtttccaaccggggaagatcaacctgcgaacttgtgatcagtgtaagcatggctgggttgctcatgctctggacaaacttagcacacagcacctgtatcacccaacgcaggtggagatcgtgcagagcaatgttgtgtttgatatatcctcgctgatgctgtacggaacccaagctgtccccgtgagacttaagattctgcttgatagacttttttccgtactcaagcaggaagaagtactgcacattctgcatggcctgggttggacattgcgcgactatgtccgcggctacatcttacaggacgccgccggtaaagtgcttgaccgttgggccatcatgagcagagaggaagagatcattaccctgcagcagttcttacgctttggggagactaaaagtatcgttgagctcatggctattcaggagaaggaggggcaggcagttgctgttccttcctcgaagacagactccgatattaggacttttatagaaagcaataacagaaccagatcaccaagtctcctcgctcatttagagaactcaaacccgtcctccattcaccactttgaaaatattcctaactccctggctttcctcctgccattccaatacatcaacccagttagtgcaccgctcctcgggctgccacctaatggacttctcctcgagcagccgggactgcgtctgcgcgagccatcactctccacccagaatgagtataacgaatcctccgaatctgaggtgtcaccttag

SEQ ID NO: 309454 - DNA, 306 bp, Artificial Sequence
  derived and/or modified sequence
atgtgtagacttcttgttcctctggcctgcaccggccgagtgctcggcgccgacttctgtccgaatcttgaagagccatatcatagattagaggtccaggctatcagatgtacactagtcaattgtacctgtgagtgtttccagcccggaaagatcaatctgaggacttgtgatcagtgcaagcacggctgggtcgcccacgcgttagataagctgtctacccagcacctttatcatcccacacaggtagagatcgtacagagtaatgtcgtttttgacatcagttcgctgatgttgtacggctag

SEQ ID NO: 309455 - DNA, 1233 bp, Artificial Sequence
  derived and/or modified sequence
atggctcatctcgggcctaccccacctccacactctctcaattataagtccgaagatagactatcagaacaggattggcctgcttactttaaggtcccatgctgtggggtggacaccagccagatcgaatcggaagaggctgaggtggacgtgagagagcgtgaaacgcagcgggatcgagaaccgaaaagagcacgagacctgacactgcgtgatagctgcactgacaatagtatgcagtttggcacacggacgaccacagcagaaccgggcttcatgggcacttggcaaaatgctgacaccaacctcttgtttcggatgagccagcaggccggcttgaagctcctaacaagtggagacccacctgtgctggatttccagtccgccggcattactggcgtgtctcactgcacacgcctgaaagtggcaatgatatccaaggcgatccgttgcacccttgtaaactgcacatgtgagtgcttccaacccggaaagattaacctacgtacttgtgaccagtgtaaacacggctgggttgcccatgctctcgataagttgagcacgcagcacttgtaccatccaacccaggtcgaaatcgtgcaaagcaacgtggtctttgatattagctcccttatgctgtacggaactcaggcggtgccagtccggctgaaaattctgctcgaccgcctatttagcgttctgaagcaggaggaggtcttacatattctacatggtctggggtggaccctaagggactacgtcaggggttatattctgcaagacgcagcgggcaaagttctggaccgctgggccattatgtcacgcgaagaagagataataaccctgcaacagtttctgagattcggagaaaccaaatctatcgttgagctgatggccattcaggaaaaggagggacaggctgtggctgtaccctcttccaagactgacagcgacattcggactttcatcgagtcaaataaccgcacaagatccccctctctactcgctcacttggagaacagtaatcccagcagcattcaccatttcgagaacatacctaactccctggcatttctcctacccttccagtacattaatcctgtctccgccccactgctgggcctccctcccaatggactgctcttagagcaacccgggctgaggctacgtgaaccctccctgtctacccagaatgagtacaacgaaagcagtgagagcgaggtatcaccatag

SEQ ID NO: 309456 - DNA, 1206 bp, Artificial Sequence
  derived and/or modified sequence
atggcccacctgggccccaccccaccaccccacagcctgaactacaagtctgaggaccggctgtctgagcaggactggccagcctacttcaaggtgccctgctgcggcgtggacaccagccagatcgagagcgaggaggccgaggtggatgtgcgggagcgggagacccagagggaccgggagcccaagagggcccgggacctgaccctgcgggacagctgcacagacaacagcatgcagtttggcaccaggaccaccacagctgagcccggcttcatgggcacctggcagaatgctgacaccaacctgctcttcaggatgagccagcaggtgcccctggcctgcaccggccgggtgctgggcgctgacttctgccccaacctggaggagccctaccaccggctggaggtgcaggccatccgctgcaccctggtgaactgcacctgtgagtgcttccagcccgggaagatcaacctgcggacctgtgaccagtgcaagcacggctgggtggcccacgccctggacaagctgagcacccagcacctgtaccaccccacccaggtggagatcgtgcagagcaatgtggtgtttgacatcagcagcctgatgctgtatggcacccaggccgtgcctgtgcggctgaagatcctgctggacaggctcttctctgtgctgaagcaggaggaggtgctgcacatcctgcacggcctgggctggaccctgcgggactatgtgcggggctacatcctgcaggatgctgctgggaaggtgctggaccgctgggccatcatgagccgggaggaggagatcatcaccctgcagcagttcctgcgctttggagagaccaagagcatcgtggagctgatggccatccaggagaaggagggccaggccgtggccgtgcccagcagcaagacagacagcgacatccgcaccttcatcgagagcaacaacagaaccaggagccccagcctgctggcccacctggagaacagcaaccccagcagcatccaccactttgagaacatccccaacagcctggccttcctgctgcccttccagtacatcaaccctgtgtctgcccccctgctgggcctgcccccaaatggcctgctgctggagcagcccggcctgcggctgcgggagcccagcctgagcacccagaatgagtacaatgaatcttctgagagcgaggtgagcccctag

SEQ ID NO: 309457 - DNA, 306 bp, Artificial Sequence
  derived and/or modified sequence
atgtgccgcctgctggtgcccctggcctgcaccggccgggtgctgggcgctgacttctgccccaacctggaggagccctaccaccggctggaggtgcaggccatccgctgcaccctggtgaactgcacctgtgagtgcttccagcccgggaagatcaacctgcggacctgtgaccagtgcaagcacggctgggtggcccacgccctggacaagctgagcacccagcacctgtaccaccccacccaggtggagatcgtgcagagcaatgtggtgtttgacatcagcagcctgatgctgtatggatag

SEQ ID NO: 309458 - DNA, 1233 bp, Artificial Sequence
  derived and/or modified sequence
atggcccacctgggccccaccccaccaccccacagcctgaactacaagtctgaggaccggctgtctgagcaggactggccagcctacttcaaggtgccctgctgcggcgtggacaccagccagatcgagagcgaggaggccgaggtggatgtgcgggagcgggagacccagagggaccgggagcccaagagggcccgggacctgaccctgcgggacagctgcacagacaacagcatgcagtttggcaccaggaccaccacagctgagcccggcttcatgggcacctggcagaatgctgacaccaacctgctcttcaggatgagccagcaggccggcctgaagctgctgaccagcggggacccccctgtgctggacttccagagcgctggcatcaccggggtgagccactgcacccggctgaaggtggccatgatcagcaaggccatccgctgcaccctggtgaactgcacctgtgagtgcttccagcccgggaagatcaacctgcggacctgtgaccagtgcaagcacggctgggtggcccacgccctggacaagctgagcacccagcacctgtaccaccccacccaggtggagatcgtgcagagcaatgtggtgtttgacatcagcagcctgatgctgtatggcacccaggccgtgcctgtgcggctgaagatcctgctggacaggctcttctctgtgctgaagcaggaggaggtgctgcacatcctgcacggcctgggctggaccctgcgggactatgtgcggggctacatcctgcaggatgctgctgggaaggtgctggaccgctgggccatcatgagccgggaggaggagatcatcaccctgcagcagttcctgcgctttggagagaccaagagcatcgtggagctgatggccatccaggagaaggagggccaggccgtggccgtgcccagcagcaagacagacagcgacatccgcaccttcatcgagagcaacaacagaaccaggagccccagcctgctggcccacctggagaacagcaaccccagcagcatccaccactttgagaacatccccaacagcctggccttcctgctgcccttccagtacatcaaccctgtgtctgcccccctgctgggcctgccccccaacggcctgctgctggagcagcccggcctgcggctgcgggagcccagcctgagcacccagaatgagtacaatgaaagcagcgagagcgaggtgagcccctag

SEQ ID NO: 309459 - DNA, 1206 bp, Artificial Sequence
  derived and/or modified sequence
atggcccacctgggccccaccccccccccccacagcctgaactacaagtcagaagaccgactgagtgaacaggactggccagcctatttcaaagtgccctgctgcggtgtagatacatcacagatagagagcgaagaggcagaggtcgacgtccgggagcgagaaactcagcgcgacagggagcccaaaagggctcgggacctgactttgagagactcgtgcaccgacaacagcatgcagtttggaacacgcaccaccaccgcagagcctggattcatgggcacctggcagaatgcagacaccaatctgctcttcagaatgagccagcaggtgcccctggcgtgcacgggaagggtgcttggcgctgacttttgtcccaacctggaagagccttaccatcgcctggaagtccaggcaatacggtgcactcttgtcaattgcacatgcgaatgtttccagccgggtaaaatcaacctccgtacctgcgaccagtgcaagcacgggtgggtggcacatgcattggacaagctgtctactcaacatctgtaccacccgacccaggtcgaaatagtccaaagcaacgtcgtgttcgacatatcatcactgatgctgtacgggactcaggccgttcccgtacgcctgaagatccttctagacaggctgtttagtgttctgaagcaggaggaggtcctgcatatcctacacgggctggggtggacactgagagattatgtgcgtgggtatatccttcaggatgccgcaggtaaagtgcttgaccggtgggccatcatgtcacgggaggaggaaattataactctgcagcaattcttaagattcggggagaccaagtcaatcgttgagctcatggccatacaggagaaagagggccaggccgttgccgtacctagcagcaaaaccgactccgacattagaacgttcattgagagtaacaacagaacaaggagtccctcgctcttagcacatttagagaacagtaacccttccagcattcaccacttcgaaaatatccccaattccctggcctttctcctgcccttccagtatatcaatccagtatcagctccactgttaggcctcccccctaatggactgttgctggaacaaccaggacttcgactccgggagcctagtctctccacccaaaacgaatataatgaaagctcagaatccgaagtttccccatag

SEQ ID NO: 309460 - DNA, 306 bp, Artificial Sequence
  derived and/or modified sequence
atgtgccggctgctggtgcccctggcctgcaccggccgggtgctgggtgctgatttttgcccgaacctggaggaaccctatcatcgactcgaggtgcaggcaatcaggtgtaccttggtgaactgtacttgcgagtgctttcagcccggcaagattaatctgcggacatgtgatcagtgcaaacacggatgggtagcccacgcgctcgacaaattgtccactcaacatctctatcatcccacgcaggtcgagatcgtccagtctaatgtcgtgttcgatattagctccctcatgctgtatgggtag

SEQ ID NO: 309461 - DNA, 1233 bp, Artificial Sequence
  derived and/or modified sequence
atggcccacctgggccccaccccccccccccacagcctgaactacaagagtgaggatagactgtcagaacaagattggccggcttactttaaggttccttgctgtggcgtggacactagccagattgaatccgaagaggcagaagtagacgtcagagaaagggaaactcagcgggatcgagagccaaagcgagcgagagatctcacccttagggactcttgcactgacaattcgatgcagttcggcacgagaactactacggccgagccaggcttcatggggacctggcagaacgcggacaccaacctgctatttagaatgtcacagcaagccggcttgaagctgctgaccagcggggatcctcccgtgttagactttcagagcgcggggatcaccggtgtgagccactgtacgaggctgaaggtggccatgattagcaaagccattagatgtaccctggttaattgcacatgcgagtgttttcaacctggtaaaattaatctccgtacttgtgaccagtgcaaacatggctgggttgctcacgccttggacaagctttccactcagcatttataccaccctacccaggtcgaaatcgtccagtctaacgtggtatttgacatttctagtctcatgctgtacggaacccaggctgttccagtaagactcaagatattacttgatcggctgttctccgtgctgaagcaggaagaggttctccacattctacatggcctcggatggaccttgagagactatgtgcgcgggtatatcctgcaggacgcggctggcaaagtgctcgacagatgggccatcatgtccagggaagaagagattatcaccctgcaacagtttctgagattcggcgaaacaaagtcgatcgtggagcttatggcaatccaagagaaagaaggacaggccgtagccgttccatccagcaaaacggactcagacatcaggacttttattgaatctaataaccggactcgctctccctcgctcctcgctcatctggagaacagcaatccctcctcaatacaccattttgagaacatccctaacagccttgcctttctccttccattccagtatatcaaccccgtctccgcgcctctcttggggctcccacccaatgggctacttcttgaacagcctgggttgcggctccgcgagcccagcctttccacgcaaaacgagtataacgagagtagcgaatctgaagtcagtccttag

SEQ ID NO: 309462 - DNA, 1206 bp, Artificial Sequence
  derived and/or modified sequence
atggctcacttgggaccaacgcctcctccccattccttgaattacaaatctgaggatagattgtcagaacaggactggccggcatattttaaggttccgtgttgtggcgtcgatactagccagattgaatctgaggaagccgaggtggacgtgagagagcgcgaaactcagagggaccgcgagcccaagagggctagggatttgaccttacgcgatagttgtacagacaattcaatgcagtttgggacgcggacaaccacagcagagccgggttttatgggaacatggcagaacgcagataccaacttattgtttcgcatgtcacagcaggtcccactagcttgcacagggagagtgctgggcgctgacttctgcccaaacttggaagagccttatcatagactagaagtgcaggctatcagatgtaccttggtgaactgcacctgcgaatgctttcagcctgggaaaattaatctgagaacttgtgatcagtgcaaacatgggtgggttgcccatgccctggataagcttagcacacagcatctgtaccacccaacacaggtcgagatcgttcagtctaacgtggtctttgatatcagcagtctgatgctatacgggactcaggcagtgcctgtaaggctgaagatactgctggaccgactgttcagcgtgctcaaacaggaggaggtgctgcacatcctacacggcctgggctggacactgcgggattatgtgcgaggttatatcctgcaagatgccgctgggaaagtcctagatcggtgggcaattatgagcagggaggaagagattatcacattgcaacagttcttgagattcggggagaccaaaagtatcgttgaactaatggccatccaagagaaggagggacaggcagtagcagtacccagcagtaagactgacagtgacattcgaacgttcatcgaatccaataataggacaagatctcccagcttgctggcacaccttgagaattcgaatcctagcagcatccatcatttcgaaaatattcccaattccctggccttcctgcttccgtttcagtacatcaatcctgtgagtgctccgctgttaggtttgcctcccaacgggctgctactagagcagcctggccttcgcctccgcgaaccgagcctaagcacgcagaacgagtataatgagagctcagaatcggaagtatcaccctag

SEQ ID NO: 309463 - DNA, 306 bp, Artificial Sequence
  derived and/or modified sequence
atgtgtagattgctggtgccactcgcttgtaccggacgcgttctgggagcagatttctgccccaacctggaggagccctaccatcgcctggaggttcaagctattaggtgtactctggtgaattgtacctgcgaatgcttccagcctggaaaaatcaacctgagaacctgcgatcagtgtaagcacggatgggtggcccatgccctggacaaactgtccacccagcacttgtaccatcctacccaggtggaaatcgtccagtctaatgttgtctttgacatcagttctcttatgctctacgggtag

SEQ ID NO: 309464 - DNA, 1233 bp, Artificial Sequence
  derived and/or modified sequence
atggcgcatctgggaccgacaccccctcctcactcactcaattacaagagtgaggatcgactttcagaacaagattggccagcctattttaaggtcccgtgttgcggagtggacacctcacagatcgaaagcgaggaggcagaagtggacgtgcgggagcgggagacacaaagggacagggaaccaaagagagcccgtgacctcacccttcgtgattcctgcacagacaattccatgcagttcggcaccaggaccaccaccgccgaacctggattcatgggcacatggcagaacgccgacacaaacctgctctttcgcatgagtcaacaggccggactgaaactgctcacctcaggggatccgcctgtgctcgactttcagtccgcaggtatcaccggcgttagccattgtacaagactgaaggttgcaatgatcagtaaggctattagatgtacgttggtaaactgcacgtgcgagtgctttcagccaggcaaaatcaacctgcggacttgcgaccagtgcaagcacggctgggtcgcccacgcactggacaagctgtccactcagcacttgtatcacccgacgcaggtggagattgtgcagtccaatgtcgtgtttgatatcagcagtctgatgttgtatgggacacaggcagtgcccgtgcggctgaagatccttttggatagactatttagtgtgctgaaacaagaggaagtgctgcatattttacacggcctcggatggaccctgcgggactatgtccggggatacatcctgcaggacgctgcgggaaaagtgctggatcggtgggccattatgtcaagggaggaagagatcatcactctgcagcaatttctgcggttcggtgagactaagtcgatagtggaactgatggccatccaggagaaggaaggtcaagcagtggccgttccttcctccaagacggacagcgacattcgcaccttcattgagtccaataaccggacaaggtcacctagtctgctggcccaccttgaaaacagcaacccctcaagcatccaccatttcgagaacatccccaattctctcgcattcctgctaccctttcagtacattaaccccgtgagtgcacccctgttggggttaccaccgaatggacttctgcttgaacagcctggcctgaggctcagggagccttctttatcgactcagaatgaatataacgaatccagtgagagtgaggtaagcccgtag

SEQ ID NO: 309465 - DNA, 361 bp, Artificial Sequence
  derived and/or modified sequence
ggacttttttgttgcattatttaggttgccacatatagtggggatgacagtttgtagatgtgcaggttactggttccattggcatgtactggcagagtgctgggggcagacttctgcccaaacctggaggagccataccacaggctggaagtccaggccatccgttgcacactggtaaactgcacatgtgaatgttttcagccagggaagattaacctgaggacttgtgatcagtgtaaacatggctgggtggcacatgccttggataagctcagcacgcagcacctgtaccaccccacccaagtggagattgtgcagtccaacgtcgtgtttgacatcagcagcctgatgctctatggga

SEQ ID NO: 309466 - DNA, 1206 bp, Artificial Sequence
  derived and/or modified sequence
atggcccacctgggccccaccccccccccccacagcctgaactacaagagcgaggacagactgagcgagcaggactggcccgcctacttcaaggtgccctgctgcggcgtggacaccagccagatcgagagcgaggaggccgaggtggacgtgagagagagagagacccagagagacagagagcccaagagagccagagacctgaccctgagagacagctgcaccgacaacagcatgcagttcggcaccagaaccaccaccgccgagcccggcttcatgggcacctggcagaacgccgacaccaacctgctgttcagaatgagccagcaggtgcccctggcctgcaccggcagagtgctgggcgccgacttctgccccaacctggaggagccctaccacagactggaggtgcaggccatcagatgcaccctggtgaactgcacctgcgagtgcttccagcccggcaagatcaacctgagaacctgcgaccagtgcaagcacggctgggtggcccacgccctggacaagctgagcacccagcacctgtaccaccccacccaggtggagatcgtgcagagcaacgtggtgttcgacatcagcagcctgatgctgtacggcacccaggccgtgcccgtgagactgaagatcctgctggacagactgttcagcgtgctgaagcaggaggaggtgctgcacatcctgcacggcctgggctggaccctgagagactacgtgagaggctacatcctgcaggacgccgccggcaaggtgctggacagatgggccatcatgagcagagaggaggagatcatcaccctgcagcagttcctgagattcggcgagaccaagagcatcgtggagctgatggccatccaggagaaggagggccaggccgtggccgtgcccagcagcaagaccgacagcgacatcagaaccttcatcgagagcaacaacagaaccagaagccccagcctgctggcccacctggagaacagcaaccccagcagcatccaccacttcgagaacatccccaacagcctggccttcctgctgcccttccagtacatcaaccccgtgagcgcccccctgctgggcctgccccccaacggcctgctgctggagcagcccggcctgagactgagagagcccagcctgagcacccagaacgagtacaacgagagcagcgagagcgaggtgagcccctag

SEQ ID NO: 309467 - DNA, 306 bp, Artificial Sequence
  derived and/or modified sequence
atgtgcagactgctggtgcccctggcctgcaccggcagagtgctgggcgccgacttctgccccaacctggaggagccctaccacagactggaggtgcaggccatcagatgcaccctggtgaactgcacctgcgagtgcttccagcccggcaagatcaacctgagaacctgcgaccagtgcaagcacggctgggtggcccacgccctggacaagctgagcacccagcacctgtaccaccccacccaggtggagatcgtgcagagcaacgtggtgttcgacatcagcagcctgatgctgtacggctag

SEQ ID NO: 309468 - DNA, 1233 bp, Artificial Sequence
  derived and/or modified sequence
atggcccacctgggccccaccccccccccccacagcctgaactacaagagcgaggacagactgagcgagcaggactggcccgcctacttcaaggtgccctgctgcggcgtggacaccagccagatcgagagcgaggaggccgaggtggacgtgagagagagagagacccagagagacagagagcccaagagagccagagacctgaccctgagagacagctgcaccgacaacagcatgcagttcggcaccagaaccaccaccgccgagcccggcttcatgggcacctggcagaacgccgacaccaacctgctgttcagaatgagccagcaggccggcctgaagctgctgaccagcggcgacccccccgtgctggacttccagagcgccggcatcaccggcgtgagccactgcaccagactgaaggtggccatgatcagcaaggccatcagatgcaccctggtgaactgcacctgcgagtgcttccagcccggcaagatcaacctgagaacctgcgaccagtgcaagcacggctgggtggcccacgccctggacaagctgagcacccagcacctgtaccaccccacccaggtggagatcgtgcagagcaacgtggtgttcgacatcagcagcctgatgctgtacggcacccaggccgtgcccgtgagactgaagatcctgctggacagactgttcagcgtgctgaagcaggaggaggtgctgcacatcctgcacggcctgggctggaccctgagagactacgtgagaggctacatcctgcaggacgccgccggcaaggtgctggacagatgggccatcatgagcagagaggaggagatcatcaccctgcagcagttcctgagattcggcgagaccaagagcatcgtggagctgatggccatccaggagaaggagggccaggccgtggccgtgcccagcagcaagaccgacagcgacatcagaaccttcatcgagagcaacaacagaaccagaagccccagcctgctggcccacctggagaacagcaaccccagcagcatccaccacttcgagaacatccccaacagcctggccttcctgctgcccttccagtacatcaaccccgtgagcgcccccctgctgggcctgccccccaacggcctgctgctggagcagcccggcctgagactgagagagcccagcctgagcacccagaacgagtacaacgagagcagcgagagcgaggtgagcccctag

SEQ ID NO: 309469 - DNA, 984 bp, Artificial Sequence
  derived and/or modified sequence
ccatcagaacccgtggtgcctgccgtgatgatggccacccacgagccttccgcagacctggctcccaaaaagaaaccccgaaaatcaagcatgcccgtgaaaattgagaaggagatcatagataccgctgacgaattcgacgacgaggatgatgaccccaatgacggaggagccgtcgttaacgatatgtcgcacgacaatcactgccacagccaggaggaaatgagccctggtatgtcagttaaggatttttctaaacacaaccgaacaagatgcatttcccgcaccgaaatccgccgggctgactctatgacctccgaggatcaagagcctgagcgagactatgagaacgagtccgaaagtagtgaaccaaaattaggagaagagtctatggaaggggacgaacatatacattcagaagtgtcagaaaaagtcctcatgaatagcgagcgacccgacgagaaccactccgagcccagccaccaggacgtgatcaaagtgaaagaggaatttactgatcccacgtatgatatgttctacatgtcccagtatggcctttataacggggggggcgcttctatggccgcactccacgaatctttcacaagtagcctgaattacgggagtccacagaagttctctccagagggtgacctgtgttcatctccggaccctaaaatttgctatgtctgtaagaaaagcttcaagagcagttattcggtaaaactgcattaccgcaatgtgcacctgaaggaaatgcacgtgtgcactgttgctggctgtaatgccgcgtttccttcaagacggagcagggaccgtaatagaaacctgagaatggaaagaacaatcggtcccggacacagagatagtttgcacctgcggaggggtaattctaaccgcccaggcacatgttgtttgcataccggggacagcctcgaggaaagcgtcattgtccgcattagttgtaagcggctcgagagctag

SEQ ID NO: 309470 - DNA, 984 bp, Artificial Sequence
  derived and/or modified sequence
cccagcgagcctgtggtgcctgctgtgatgatggccacccatgagcccagcgctgacctggcccccaagaagaagcccaggaagagctccatgcctgtgaagattgagaaggagatcatcgacacagcagatgaatttgatgatgaagatgatgaccccaatgatggaggagctgtggtgaatgacatgagccatgacaaccactgccacagccaggaggagatgagccctggcatgtctgtgaaggacttcagcaagcacaacagaacccgctgcatcagcaggacagagatcagaagagctgacagcatgaccagcgaggaccaggagcctgagcgggactatgaaaatgaaagtgagagcagcgagcccaagctgggggaggagagcatggagggagatgagcacatccacagcgaggtgtctgagaaggtgctgatgaacagcgagaggccagatgagaaccacagcgagcccagccaccaggatgtgatcaaggtgaaggaggagttcacagaccccacctatgacatgttctacatgagccagtatggcctgtacaacggcggcggggcctccatggccgccctgcacgagagcttcaccagcagcctgaactacggcagcccccagaagttcagccctgagggggacctgtgcagcagcccagaccccaagatctgctacgtgtgcaagaagagcttcaagagcagctacagcgtgaagctgcactacagaaatgtgcacctgaaggagatgcacgtgtgcaccgtggccggctgcaatgctgccttccccagccgccgcagccgggacaggaacagaaacctgaggatggagaggaccatcggccctggccaccgggacagcctgcacctgcggcggggcaacagcaacagacctggcacctgctgcctgcacactggagacagcctggaggagagcgtgattgtgcgcatcagctgcaagaggctggagagctag

SEQ ID NO: 309471 - DNA, 984 bp, Artificial Sequence
  derived and/or modified sequence
cccagcgagcccgtggtgcccgccgtgatgatggccacccacgagccaagcgccgacctggccccaaagaagaaaccaaggaagtcttccatgcccgttaagatcgaaaaagaaataatagacaccgccgatgagttcgacgatgaagatgatgatcccaacgacgggggggctgtggtcaacgacatgagccacgataaccactgtcatagtcaggaggagatgtcccctggtatgtctgtgaaggatttttctaagcataaccgcacacgctgtatcagtcggactgaaatccggcgagcagactctatgactagcgaggatcaggagcctgagagggactatgagaatgagtccgaatctagcgaaccaaaactaggggaggagagcatggagggcgatgaacacatccactcggaggtgtctgagaaggtgttgatgaacagcgagcgcccagatgagaatcactcagaaccttctcaccaggatgtaatcaaagtgaaagaggagttcaccgaccccacatatgatatgttttacatgagtcagtacggtctgtacaatgggggcggcgccagcatggctgcgctgcatgaatcctttaccagctcactgaactacgggagcccccagaagttctcccccgagggagatctgtgcagtagtcctgatcctaagatatgctacgtgtgcaaaaaatcgtttaaatcatcatacagcgtgaagctgcattacagaaatgtgcacttaaaagagatgcatgtctgtacagtggctggctgtaacgccgctttcccttccaggcggagccgagatagaaaccggaacctccgtatggagcgtacaataggcccagggcatagagacagtctgcacttgagacgtggaaattcaaacaggccgggtacgtgttgcctgcacactggggattcactggaagagagtgtgatagtacgaatcagttgtaaaaggcttgaatcttag

SEQ ID NO: 309472 - DNA, 984 bp, Artificial Sequence
  derived and/or modified sequence
ccatctgaacctgttgtgccagcggtgatgatggctacccatgagcccagcgcagatctcgcacccaaaaagaaacccaggaagtcctctatgccagttaaaatcgaaaaagaaattattgacacagcagatgagttcgatgacgaagacgatgatccgaacgatggtggagccgtggtgaacgatatgtcccacgacaatcattgccatagtcaggaagagatgtcacctggcatgtccgtcaaagactttagcaaacacaatcgaacgaggtgcatctctcggaccgaaatccgcagggccgattcaatgaccagcgaagatcaagagcctgaacgggattatgagaatgagtcagaatcatctgagccgaagctcggcgaagagagtatggaaggtgacgagcacatccacagcgaggtctctgagaaagtgttgatgaattcagaacggccagacgaaaaccatagtgagccgagtcaccaggacgtaattaaggttaaggaggaattcaccgaccctacctacgacatgttctatatgtcacagtatggactatacaatgggggaggtgcctctatggctgccttgcatgaatcttttacttctagcctcaactacggatcccctcagaaattctcacctgaaggggatttatgttcatccccagatccaaagatatgctacgtctgcaagaagagcttcaagtcatcttactctgtaaagctccactatcggaacgtgcacttgaaagaaatgcatgtgtgcacagtcgccggatgcaacgccgcttttccttctcgtcgctctcgtgaccgcaatcgtaacttaaggatggaacggaccattggccctggacaccgggactcacttcacttgcgaagaggcaacagtaatcgacctggcacttgttgtcttcatacgggcgactcacttgaggaaagtgtgatcgttagaatcagttgcaagcgactggaaagctag

SEQ ID NO: 309473 - DNA, 2106 bp, Artificial Sequence
  derived and/or modified sequence
ccctctgagccagtagtgccagcagtgatgatggccacccatgagcccagtgctgacctggcacccaagaaaaagcccaggaagtcaagcatgcctgtgaagattgagaaggaaattattgataccgccgatgagtttgatgatgaagatgatgaccccaatgatggtggagctgtggtcaatgacatgagccatgacaatcattgtcactcccaagaggagatgagcccaggcatgtctgtgaaggacttttctaagcataacaggacccggtgcatttcaaggactgaaataaggagggccgacagcatgacttctgaagaccaagaacctgagcgggactatgagaacgagtctgagtcttcggagcccaaactgggcgaggaatccatggaaggggatgagcacattcacagcgaagtgagtgaaaaagtcctgatgaatagtgagaggcctgatgagaaccacagtgagccctctcaccaggacgtcatcaaggtgaaggaagaatttacagaccccacttacgacatgttttacatgagccagtatggactgtacaatggtgggggtgccagcatggccgccttgcatgagagctttacatcgtctctgaattatggcagccctcaaaagttctccccagaaggtgacctatgttctagcccagaccccaaaatctgttatgtgtgcaagaagagtttcaaaagctcctacagtgtgaaacttcactacaggaacgttcacttgaaagagatgcacgtctgcacagtggctggttgcaatgctgcattcccctctcgccgaagccgagacagaaacagaaatttacggatggaaagaaccataggtccaggacatcgagacagcctgcatctccgaagaggaaattctaaccggcctggaacctgctgtcttcatacgggagattctcttgaagagagcgtgatagtcagaattagctgcaaaagattagaaagctgatcttattgtcacaagacacagtgccaacataaacctacatcgtaaactgttgaccaaagaactcgatgacatgggcctggactcgtcgcagccctcccttagcaaggacctccgcgatgaatttttggtgaagatatatggtgcccagcaccccatggggctcgatgtcagggaagacgcctcctctcccgcagggactgaagactcccacctgaacgggtatgggagaggcatggcagaggactacatggtccttgacttgagcaccacctccagcctccagtccagcagcagtatccattcctccagagaatccgacgcaggcagcgatgaggggattcttctcgatgacattgacggggcgagtgacagtggggagtcggcacacaaggccgaggcccctgccctccctggcagcctaggggctgaagtttcaggatctcttatgttcagcagcttgtctgggagcaatggtgggatcatgtgcaacatttgccacaaaatgtacagcaacaaggggaccctgagagtgcactacaaaactgtgcatttgagagaaatgcacaagtgcaaagtcccaggttgcaatatgatgttttcctctgtacgaagccgaaatcggcacagtcagaaccctaatctccacaaaaacattcccttcacttcagtagattagtctcagaatggacactacaaatgccagctctcaccagatggcctacgtgtttgaactgccatagtcagtgtgcgcttatgtacttggggtgtgtgtgtgtgtgtgtgtgtgtgtgcatttatgtatgctctgtggctacatatacacacacgtatttccttgagataaacaagataaacactaggtgcttttgaatttttttcacttccctttatagttttgggaaaggagtgggatctttgatttcagggtgaaaacagagtacccctttaaacacacacacacacacatgcacatacacacacacacacacacacacacacagtgtgcaactagccccagttttgacagaataattcttggtcttccccaaagagacaatttgttgtacccatgactgttgcctgcaaaaataaaagggaaaaaaaagaaaaaagaaacaaaaa

SEQ ID NO: 309474 - DNA, 984 bp, Artificial Sequence
  derived and/or modified sequence
cccagcgagcccgtggtgcccgccgtgatgatggccacccacgagcccagcgccgacctggcccccaagaagaagcccagaaagagcagcatgcccgtgaagatcgagaaggagatcatcgacaccgccgacgagttcgacgacgaggacgacgaccccaacgacggcggcgccgtggtgaacgacatgagccacgacaaccactgccacagccaggaggagatgagccccggcatgagcgtgaaggacttcagcaagcacaacagaaccagatgcatcagcagaaccgagatcagaagagccgacagcatgaccagcgaggaccaggagcccgagagagactacgagaacgagagcgagagcagcgagcccaagctgggcgaggagagcatggagggcgacgagcacatccacagcgaggtgagcgagaaggtgctgatgaacagcgagagacccgacgagaaccacagcgagcccagccaccaggacgtgatcaaggtgaaggaggagttcaccgaccccacctacgacatgttctacatgagccagtacggcctgtacaacggcggcggcgccagcatggccgccctgcacgagagcttcaccagcagcctgaactacggcagcccccagaagttcagccccgagggcgacctgtgcagcagccccgaccccaagatctgctacgtgtgcaagaagagcttcaagagcagctacagcgtgaagctgcactacagaaacgtgcacctgaaggagatgcacgtgtgcaccgtggccggctgcaacgccgccttccccagcagaagaagcagagacagaaacagaaacctgagaatggagagaaccatcggccccggccacagagacagcctgcacctgagaagaggcaacagcaacagacccggcacctgctgcctgcacaccggcgacagcctggaggagagcgtgatcgtgagaatcagctgcaagagactggagagctag

SEQ ID NO: 309475 - protein, 1405 aa, Artificial Sequence
  derived and/or modified sequence
MAARSPPSPHPSPPARQLGPRSPRVGRGAEVHAMRSEASGFAGAAREVVADESDKIWVGEEGSGGRRGPGGAAPAHAPLLSAPMGSRRLEGISVEEAMVTRTQLLEEELSSLKEELALCQADKEFVWSLWKRLQVTNPDLTQVVSLVVEREKQKSEAKDRKVLEILQVKDAKIQEFEQRESVLKQEINDLVKRKIAVDEENAFLRKEFSDLEKKFKDKSQEIKDTKECVQNKEEQNRLVIKNLEEENKKLSTRCTDLLNDLEKLRKQEAHLRKEKYSTDAKIKTFEDNLIEARKEVEVSQSKYNALSLQLSNKQTELIQKDMDITLVRQELQELQNLYKQNSTHTAQQAELIQQLQVLNMDTQKVLRNQEDVHTAESISYQKLYNELHICFETTKSNEAMLRQSVTNLQDQLLQKEQENAKLKEKLQESQGAPLPLPQESDPDYSAQVPHRPSLSSLETLMVSQKSEIEYLQEKLKIANEKLSENISANKGFSRKSIMTSAEGKHKEPPVKRSRSLSPKSSFTDSEELQKLRKAERKIENLEKALQLKSQENDELRDAHEKRKERLQMLQTNYRAVKEQLKQWEEGSGMTEIRKIKRADPQQLRQEDSDAVWNELAYFKRENQELMIQKMNLEEELDELKVHISIDKAAIQELNRCVAERREEQLFRSGEDDEVKRSTPEKNGKEMLEQTLQKVTELENRLKSFEKRSRKLKEGNKKLMKENDFLKSLLKQQQEDTETREKELEQIIKGSKDVEKENTELQVKISELETEVTSLRRQVAEANALRNENEELINPMEKSHQSADRAKSEMATMKVRSGRYDCKTTMTKVKFKAAKKNCSVGRHHTVLNHSIKVMSNVFENLSKDGWEDVSESSSDSEAQTSQTLGTIIVETSQKISPTEDGKDQKESDPTEDSQTQGKEIVQTYLNIDGKTPKDYFHDKNAKKPTFQKKNCKMQKSSHTAVPTRVNREKYKNITAQKSSSNIILLRERIISLQQQNSVLQNAKKTAELSVKEYKEVNEKLLHQQQVSDQRFQTSRQTIKKLNLDLAGLRKEKEDLLKKLESSSEITSLAEENSQVTFPRIQVTSLSPSRSMDLEMKQLQYKLKNATNELTKQSSNVKTLKFELLAKEEHIKEMHEKISRMERDITMKRHLIEDLKFRQKVNLESNKSFSEMLQNLDKKVKTLTEECSNKKVSIDSLKQRLNVAVKEKSQYEQMYQKSKEELEKKDLKLTLLVSRISETESAMAEIETAASKQLQELALQSEQVLEGAQKTLLLANEKVEEFTTFVKALAKELQNDVHVVRRQIRELKKMKKNRDACKTSTHKAQTLAASILNISRSDLEEILDTEDQVEIEKTKIDAENDKEWMLYIQKLLEGQSLALSPRLKCNGAIVAHQNLRLPDSSSSASAS

SEQ ID NO: 309476 - DNA, 4218 bp, Artificial Sequence
  derived and/or modified sequence
atggccgcccgctctcccccctctcctcatccctcccctcccgcccggcaactaggaccacggagtccacgggtgggacggggcgccgaggtgcacgccatgagatcggaagctagcggctttgccggcgctgctagagaagtggttgccgacgaaagcgacaaaatttgggtaggcgaggaaggtagcggcggcagacggggtccgggcggagctgctcctgctcacgcccctctgttgtcagcacccatgggatctcggcgtcttgaaggcatatcggtggaagaggcaatggtgacccgcactcaactccttgaggaggagttatccagcttaaaggaagagttagcactttgccaggctgataaagaatttgtgtggagtctctggaagcgcctgcaggtgactaacccggacttaacccaagttgtaagcttggtcgtagagcgcgagaagcagaaatccgaagccaaagacagaaaggttctcgagattttgcaagtaaaagatgccaagattcaggaattcgaacagcgcgagagcgtcctgaaacaggaaatcaatgaccttgtcaagcggaagattgccgttgacgaggaaaatgcattccttcgcaaagagttttccgacctggagaagaagttcaaggacaagtctcaggagataaaagacactaaggaatgtgtccaaaataaagaggagcagaaccgtcttgtgattaagaacttggaagaagaaaacaaaaaactgtcaacacgttgtaccgacttactcaacgatttggaaaagctgaggaagcaggaagcccatctgcgcaaggagaaatatagcactgacgcaaaaattaaaaccttcgaggataatctcatagaggccagaaaagaagtagaggtctcccaatcaaagtacaacgcactgtctctacaattatcaaacaaacagaccgagctgattcaaaaagatatggacatcacactagttcgccaggaacttcaggagcttcaaaacctctataagcagaacagtacccacacagcacagcaggcagaactgatccagcagttgcaggtacttaatatggatactcaaaaggttctgcgtaatcaggaggacgtgcatacagctgagagcatcagctatcagaagctctataatgagctacatatctgcttcgaaacgaccaagagcaacgaggctatgctgagacagtccgtgaccaatcttcaggatcagctgctccagaaggaacaggagaatgcgaaactcaaagagaagctgcaggagtcacagggtgctcccctgcccctcccgcaggagtccgatcccgattattctgcacaggttccgcaccgccccagcctgtcgagtctcgaaactctgatggtcagccagaaatctgagattgaatacctccaggagaagcttaaaatagccaacgaaaagctgagtgagaacataagtgccaacaaaggtttctccaggaagtccattatgacatctgccgagggcaaacacaaggagccccccgtaaagaggagccggtcgctgtctcctaaatccagttttaccgactctgaggagctccagaagttgcgtaaagcagaacgcaagattgaaaatttggaaaaggcactccaactgaaatcccaggaaaacgatgagctcagggatgcacatgaaaagaggaaagaacgactgcagatgttgcagactaactaccgggccgtgaaggagcagcttaaacagtgggaggagggttctgggatgaccgaaatccgcaagattaaacgggccgacccccagcaactccgccaggaggattccgatgcagtctggaatgagctggcctatttcaaacgcgaaaatcaggaactgatgattcaaaagatgaacctggaggaagagcttgatgaattaaaagtgcacattagcatcgacaaagcagccattcaggagctcaatcggtgtgtcgccgagaggcgagaggagcagctctttcgaagtggtgaggacgacgaggttaagagaagcacacccgaaaaaaacggaaaggaaatgctcgagcaaaccctccagaaagtgaccgagctggaaaacagactgaaaagcttcgagaagcgaagccgtaagctgaaggagggcaacaaaaagctgatgaaggagaatgattttctgaaaagtttgcttaagcaacaacaggaagatacagaaactagggagaaagaattagaacagataatcaaagggagtaaggacgtggagaaggaaaacacggaactgcaggtgaagatcagcgagctcgagacagaggttacatccctgcggcgccaagtagctgaggctaacgccctcaggaacgaaaatgaggagcttatcaacccaatggagaagtctcatcagagcgcagaccgggccaagagcgaaatggcaacaatgaaagtgagaagcggtagatacgactgcaagaccacgatgaccaaggtaaagttcaaagctgctaaaaaaaattgtagcgtcggcaggcaccacacagtgttaaatcactcaatcaaggtgatgtcaaatgtgtttgaaaacttgtcaaaggacggatgggaggacgtttcagagagctcttcagactccgaagctcagacatcccagaccctaggtactatcatagttgaaacatcacagaagatcagtcccacagaagacggtaaggaccaaaaggagtcggatcctacagaagatagccagacacaggggaaggagattgtgcagacatatttgaacatcgatggcaagactcccaaggactactttcacgataaaaatgccaagaaaccgacgttccagaagaagaattgtaagatgcaaaaaagctcacacacagccgttccaactcgagtgaatcgggagaagtataaaaacattactgcacagaagagctcctcaaatatcatcctcctgcgagaaaggatcatctccctgcaacaacagaacagtgtcctacaaaacgccaaaaaaacagccgaactcagtgtgaaggagtataaagaggttaacgagaaactgctccaccagcagcaggtgagcgatcagagattccagacaagtagacaaactatcaagaagctaaatttggatctcgccggactccgtaaggaaaaggaggacctgctgaagaaattagaatccagtagcgaaatcacgagtctggcggaggagaactctcaggtgacatttccaagaatccaggtaacctctcttagccccagccgctctatggatctagagatgaaacagctgcagtataaactgaagaatgctaccaatgagctgaccaagcagtcatccaacgtgaaaactcttaaattcgaattattggccaaggaggaacatatcaaggaaatgcacgaaaaaatttccagaatggagcgggatattaccatgaagaggcaccttatcgaagaccttaagtttcgccaaaaagtcaacctggagtcaaataagtcctttagtgaaatgctccaaaatctcgacaagaaggttaagacactcacggaggagtgctccaataaaaaagtgtctattgactcgttaaagcagcgactgaacgttgcggtgaaagagaagtcccagtatgagcagatgtaccagaaaagcaaagaagagctcgagaagaaggatctgaagttgacactactggtcagccgcatctctgaaactgaaagtgctatggccgagattgaaacggcagcttcgaagcaattgcaggaactggcccttcagagcgaacaggtgctggaaggcgcccagaaaaccttactcctcgctaacgaaaaagtggaggagtttactacttttgttaaggcccttgccaaggagctgcagaacgacgtgcatgtggtaagaaggcaaattagggagctcaaaaagatgaagaaaaaccgggacgcctgtaagacatccacccacaaggctcagaccttggctgccagcatcctgaacattagccgatccgacctggaggaaatcctcgacactgaagatcaagtggaaatagagaagactaaaatcgacgctgagaacgacaaggagtggatgttgtatatccaaaagttgctagaaggacagagtctggcactgagccctcggctgaagtgtaacggcgcaattgtagctcaccagaacctacggttgcccgactctagttccagtgccagcgcctcatag

SEQ ID NO: 309477 - DNA, 4218 bp, Artificial Sequence
  derived and/or modified sequence
atggccgcccggagcccccccagcccccaccccagccccccagcccggcagctgggccccaggagcccccgggtgggcagaggagctgaggtgcacgccatgaggtctgaggccagcggctttgctggggccgcccgggaggtggtggctgatgaaagtgacaagatctgggtgggggaggagggcagcggcggccggcggggccctggaggagctgccccagcccacgcccccctgctgagcgcccccatgggcagccggcggctggagggcatctctgtggaggaggccatggtgaccaggacccagctgctggaggaggagctgagcagcctgaaggaggagctggccctgtgccaggccgacaaggagtttgtgtggagcctgtggaagaggctgcaggtgaccaacccagacctgacccaggtggtgtccctggtggtggagcgggagaagcagaagtctgaggccaaggacaggaaggtgctggagatcctgcaggtgaaggatgccaagatccaggagtttgagcagcgggagagcgtgctgaagcaggagatcaatgacctggtgaagaggaagattgctgtggatgaggagaatgccttcctgaggaaggagttcagtgacctggagaagaagttcaaggacaagagccaggagatcaaggacaccaaggaatgtgtgcagaacaaggaggagcagaaccggctggtgatcaagaacctggaggaggagaacaagaagctgagcacccgctgcacagacctgctgaatgacctggagaagctgaggaagcaggaggcccacctgaggaaggagaagtacagcacagatgccaagatcaagacctttgaggacaacctgattgaggccaggaaggaggtggaggtgtcccagagcaagtacaatgccctgagcctgcagctgagcaacaagcagacagagctgatccagaaggacatggacatcaccctggtgcggcaggagctgcaggagctgcagaacctgtacaagcagaacagcacccacacagcccagcaggccgagctgatccagcagctgcaggtgctgaacatggacacccagaaggtgctgaggaaccaggaggatgtgcacacagctgagagcatctcctaccagaagctgtacaatgagctgcacatctgctttgagaccaccaagagcaatgaggccatgctgcggcagagcgtgaccaacctgcaggaccagctgctgcagaaggagcaggagaatgccaagctgaaggagaagctgcaggagagccagggcgcccccctgcccctgccccaggagagtgaccctgactacagcgcccaggtgccccaccggcccagcctgagcagcctggagaccctgatggtgtcccagaagtcagaaattgagtacctgcaggagaagctgaagatcgccaatgagaagctgtctgagaacatcagcgccaacaagggcttcagcaggaagagcatcatgaccagcgctgagggcaagcacaaggagccccctgtgaagaggagccgcagcctgagccccaagagcagcttcacagattctgaggagctgcagaagctgaggaaggccgagaggaagattgagaacctggagaaggccctgcagctgaagagccaggagaatgatgagctgagagatgcccacgagaagaggaaggagcggctgcagatgctgcagaccaactacagagctgtgaaggagcagctgaagcagtgggaggagggcagcggcatgacagagatcaggaagatcaagagagctgacccccagcagctgcggcaggaggacagtgatgctgtgtggaatgagctggcctacttcaagcgggagaaccaggagctgatgatccagaagatgaacctggaggaggagctggatgagctgaaggtgcacatcagcattgacaaggccgccatccaggagctgaacagatgtgtggccgagcggcgggaggagcagctgttccgcagcggggaggatgatgaggtgaagaggagcaccccagagaagaatggcaaggagatgctggagcagaccctgcagaaggtgacagagctggagaaccggctgaagagctttgagaagaggagcaggaagctgaaggagggcaacaagaagctgatgaaggaaaatgacttcctgaagagcctgctgaagcagcagcaggaggacacagagacccgggagaaggagctggagcagatcatcaagggcagcaaggatgtggagaaggagaacacagagctgcaggtgaagatcagcgagctggagacagaggtgaccagcctgcggcggcaggtggccgaggccaatgccctgagaaatgaaaatgaggagctgatcaaccccatggagaagagccaccagagcgctgaccgggccaagtctgagatggccaccatgaaggtgcgcagcggccgctatgactgcaagaccaccatgaccaaggtgaagttcaaggccgccaagaagaactgcagcgtgggccgccaccacacagtgctgaaccacagcatcaaggtgatgagcaatgtgtttgagaacctgagcaaggatggctgggaggatgtgtctgagagcagcagtgacagcgaggcccagaccagccagaccctgggcaccatcatcgtggagaccagccagaagatcagccccacagaagatggcaaggaccagaaggagagtgaccccacagaggacagccagacccagggcaaggagatcgtgcagacctacctgaacattgatggcaagacccccaaggactacttccatgacaagaatgccaagaagcccaccttccagaagaagaactgcaagatgcagaagagcagccacacagctgtgcccaccagggtgaaccgggagaagtacaagaacatcacagcccagaagagcagcagcaacatcatcctgctgcgggagcgcatcatcagcctgcagcagcagaacagcgtgctgcagaatgccaagaagacagctgagctgtctgtgaaggagtacaaggaggtgaatgagaagctgctgcaccagcagcaggtgtctgaccagcgcttccagaccagccggcagaccatcaagaagctgaacctggacctggccggcctgaggaaggagaaggaggacctgctgaagaagctggagagcagcagcgagatcaccagcctggccgaggagaacagccaggtgaccttcccccgcatccaggtgaccagcctgagccccagccgctccatggacctggagatgaagcagctgcagtacaagctgaagaatgccaccaatgagctgaccaagcagagcagcaatgtgaagaccctgaagtttgagctgctggccaaggaggagcacatcaaggagatgcatgagaagatcagcaggatggagcgggacatcaccatgaagaggcacctgattgaggacctgaagttccggcagaaggtgaacctggagagcaacaagagcttcagcgagatgctgcagaacctggacaagaaggtgaagaccctgacagaggagtgcagcaacaagaaggtgtccattgacagcctgaagcagaggctgaatgtggccgtgaaggagaagagccagtatgagcagatgtaccagaagagcaaggaggagctggagaagaaggacctgaagctgaccctgctggtgagccgcatcagcgagacagaaagtgccatggccgagattgaaacagctgccagcaagcagctgcaggagctggccctgcagagcgagcaggtgctggagggcgcccagaagaccctgctgctggccaatgagaaggtggaggagttcaccacctttgtgaaggccctggccaaggagctgcagaatgatgtgcacgtggtgcggcggcagatccgggagctgaagaagatgaagaagaacagagatgcctgcaagaccagcacccacaaggcccagaccctggccgccagcatcctgaacatcagcagaagtgacctggaggagatcctggacacagaggaccaggtggagattgagaagaccaagattgatgctgaaaatgacaaggagtggatgctgtacatccagaagctgctggagggccagagcctggccctgagcccccggctgaagtgcaatggagccatcgtggcccaccagaacctgcggctgcctgacagcagcagcagcgccagcgccagctag

SEQ ID NO: 309478 - DNA, 4218 bp, Artificial Sequence
  derived and/or modified sequence
atggccgcccggagcccccccagcccccaccccagcccccccgcccggcagcttggtccccgctccccacgggtggggcgtggcgcggaagtgcacgctatgcgttcagaggcttctggctttgcaggcgcagccagagaggtggttgctgacgaatcggataagatatgggtgggagaggaggggagtggtggcagacgtggccctggcggagccgcacccgctcatgcccccttacttagcgcccccatggggagccgccgcctggagggcattagtgtcgaggaagcgatggtgactcgcactcagcttctcgaagaggaactgagctcactcaaggaagaactagccctgtgtcaggctgacaaggagttcgtgtggagtctctggaagaggttgcaagtgactaacccagatcttacccaagtagtctctctagtcgtagagagagagaagcagaagtccgaagcaaaggaccggaaagtcttagaaatactgcaggttaaggatgccaagatccaggagtttgaacagagagaatccgttctgaagcaagagatcaatgatcttgtgaagcgaaaaatcgctgtcgacgaagagaatgcttttctccggaaggagttcagcgaccttgagaaaaagttcaaagataagtcacaagaaatcaaagacacaaaggaatgcgtccaaaacaaggaggagcagaaccggctggtcattaaaaatctggaagaggagaataaaaagctctcgacccgatgtactgatctgctcaatgatctggaaaagttgagaaagcaggaggcccacctgaggaaggagaagtacagtactgatgcaaagattaagacattcgaggataacctaattgaagctcggaaggaggtggaagtttctcagagcaagtataacgccctgtcattgcaactgtccaataaacagaccgaattgatccaaaaagatatggacattactctcgtaagacaagaactccaggagctacagaatttatataagcagaactcaacgcacactgctcagcaggctgagctaatccaacagctgcaggtgttgaacatggatactcagaaagtgctgagaaatcaggaggacgtccacacagccgaatctatctcctaccagaagctgtacaacgaactccatatctgtttcgagactacaaaaagtaatgaagccatgctgagacaatcagtgactaacctacaggaccagctactccagaaggagcaggagaatgcaaagttaaaagagaaactgcaggagagtcagggggctccactgccactgcctcaagagagcgaccccgattactctgctcaagtccctcacagaccttctctatcttcactggagacattgatggtgagtcagaagagcgagatagaatatcttcaggaaaagctcaagatcgcgaacgaaaaattgagcgaaaatataagtgccaataaaggtttttctagaaagtcgataatgacatctgcagagggcaagcacaaggagcctccagtaaagagaagtcgctcgctgagcccaaagagcagtttcacagatagtgaggagctccagaaattacgcaaggccgagcgtaagattgagaatctggagaaggccctgcagttgaaatctcaggaaaacgacgagctgcgcgatgctcatgagaaaaggaaggaacgcttacagatgctccagaccaactatcgtgctgtgaaggagcaactgaaacagtgggaggagggctccggtatgacagagatcaggaaaataaagcgggcagaccctcagcaacttagacaggaagatagtgacgcagtctggaatgagcttgcctatttcaaaagggagaaccaggagctcatgatccaaaagatgaatcttgaggaagaactagacgagctcaaggtgcacatctctattgataaggccgcaatccaggaactgaataggtgtgtggctgagcgtcgcgaagagcagctgtttagatctggcgaagacgatgaggtaaagaggtcaaccccggaaaaaaatggcaaagagatgcttgagcagacgctgcaaaaagtcactgagttagagaaccgcctaaagtccttcgagaaaaggtccaggaaactgaaggaaggtaacaaaaaactgatgaaggaaaacgattttcttaagagcctgcttaaacagcagcaggaggacaccgagacccgggagaaagagcttgagcagatcattaagggatccaaggatgtcgagaaggaaaacactgagcttcaggttaagatttccgaattggaaaccgaagtcacgagcttgaggcgtcaagtcgctgaagccaacgccctccggaacgaaaacgaggaactcatcaatccaatggagaaatctcaccaatctgctgacagagccaagtcagaaatggctactatgaaagtcagatctggacggtatgactgcaaaacaactatgaccaaggttaagttcaaggctgcgaaaaaaaactgttccgtcggccggcaccacacagtgctgaaccacagtattaaagtgatgagcaatgtctttgaaaacctctctaaagacggatgggaggacgtgagcgaaagctcctctgacagtgaggcccagacatcgcagaccctgggcacaattatcgttgagactagtcagaagatttccccgacggaggatggaaaggaccagaaagagtccgacccaactgaggattcacagacccagggcaaagaaatcgttcaaacatacctgaatattgatgggaaaactcccaaggactattttcatgacaaaaacgccaagaaaccaacttttcagaaaaaaaactgcaagatgcagaaaagtagccataccgctgtgcccacccgggtcaacagggagaaatacaaaaacattacagcccagaaatcaagcagtaacattattctgttacgagaaaggattatatctcttcaacaacagaattctgtgttgcagaatgctaagaagacagctgagttgtccgtgaaggagtataaggaggtgaacgaaaaactcttgcatcagcagcaggtgtccgaccagcgctttcagacatctaggcagactattaaaaaactgaatcttgacctggctggcctgcgtaaggagaaggaggacctgttaaaaaaattggaaagcagtagtgagataacctcgctggccgaagagaacagccaagtgacattcccaagaatacaggttactagccttagccctagccgaagtatggatttggagatgaaacaactgcagtataaattgaaaaacgccacaaatgaacttacgaagcagtcctctaacgtgaaaaccctcaagtttgaacttcttgcaaaagaggaacatattaaggagatgcatgagaagatctcacggatggagagggatatcaccatgaagagacatttgattgaagatctgaagtttcggcagaaagtgaacctggaaagcaacaaatcatttagcgagatgctgcaaaatctggacaagaaagtcaagacactgaccgaagagtgtagcaacaaaaaagttagtatcgattcccttaaacagagattgaacgttgccgtcaaagaaaaatcccaatacgaacagatgtaccaaaaatccaaagaggaactcgagaagaaagatctgaagctgactttgcttgtctccagaatttccgaaaccgaaagcgctatggcggagattgagaccgcagccagtaaacagcttcaggagctggcgcttcagtcggagcaagtcttagagggcgcacagaaaacgctgctcctcgccaacgaaaaggtggaagagttcaccacattcgtcaaggcactggctaaagaactgcaaaatgatgttcacgttgtgcggaggcagataagagagctaaagaagatgaaaaaaaaccgcgatgcatgcaagactagcacacataaagcacagacacttgccgcttccattctgaatataagtcgcagcgatctggaagagattctcgacaccgaggatcaggtggagattgaaaaaaccaagatcgacgctgaaaatgacaaggaatggatgctctatatccagaagttacttgagggacaatccctggccctaagtccaagattgaagtgcaacggtgctattgtcgcccaccagaaccttcggctgccggactcctctagcagcgccagtgcttcatag

SEQ ID NO: 309479 - DNA, 4218 bp, Artificial Sequence
  derived and/or modified sequence
atggcagccagaagcccacccagcccacacccttcgcctccagcaaggcagcttgggccaaggagtcccagagtgggcaggggagccgaagttcacgctatgcgctccgaggcatccggtttcgccggagcagccagggaggtggtcgctgacgagtccgacaagatttgggtgggagaggaggggagcggcggaagaaggggaccaggtggagccgcacccgctcacgcgcctctgttgtcagccccaatgggtagccgacggctcgagggcatatcagtggaagaggcaatggtgacacggacccagttgctggaggaggagttgtccagcctcaaggaggagcttgcactatgccaggccgacaaagaattcgtctggtccctgtggaagagattacaagttactaatcccgaccttacacaggtagttagtttagtggtggagagggaaaaacagaagagtgaggccaaggatcggaaggtcctggagattcttcaggtgaaggatgctaagattcaggagttcgaacagcgcgaatctgtcctgaaacaggagataaatgacctcgttaagcggaaaattgccgtggacgaggaaaacgccttcctccgcaaagagttctctgacttggaaaagaagtttaaagataagagccaggaaataaaagacacgaaggagtgtgttcaaaacaaggaagaacaaaacagactcgtcataaaaaatctagaggaagaaaacaagaagctcagcacccgctgtaccgacctgcttaatgacctcgaaaagttgagaaagcaggaggctcacctgcgaaaagaaaaatacagtactgacgccaagataaagactttcgaggacaacctgatcgaagccagaaaggaggtggaagtgtctcagtctaaatacaatgccctgagtcttcagctcagcaacaaacaaacagaactgatccagaaagacatggacatcactcttgtcagacaggagttgcaagagttgcaaaacctgtacaagcaaaattccacacataccgcgcagcaggctgagctgatccaacaattacaagtgctcaatatggacacccaaaaagtacttagaaaccaagaagacgtgcacacagcagagtcgatctcctaccagaagttgtataatgagctgcacatctgcttcgaaaccactaagtccaacgaggccatgctcagacagtcggtgactaacctgcaggatcagctgcttcagaaggaacaggaaaatgctaaactgaaagagaaacttcaggaatcgcagggagcgccactgcctttgccccaagaatccgacccggattactcagcccaggtgccacaccggcctagcctctccagccttgaaacattgatggttagtcagaagtctgaaatcgagtacctgcaggagaaactgaagattgccaacgaaaagctgtccgagaatatcagcgccaataaagggttttctcggaagagtatcatgaccagcgcagagggtaagcacaaagagccaccagtcaaaagatcaaggtctctgtctccgaaatctagttttacggactctgaggagctgcaaaagctcagaaaggcagaaaggaaaatcgagaacttagaaaaagccctccaactgaaatcacaggagaacgacgaactgagggatgcccatgaaaagcgcaaggagcgcctgcaaatgctgcagacaaattaccgggcagtgaaggaacagctgaagcagtgggaagaagggtccggcatgacagagatacggaagatcaagcgcgcagatccacagcagctcaggcaagaggacagtgacgcagtgtggaacgagttagcatacttcaagcgcgagaaccaagagctcatgatccagaaaatgaacctggaagaggaactggacgaactcaaggtgcacatctccatcgacaaagccgctattcaagaactgaaccggtgtgtcgctgagagaagagaggagcagctttttcgcagcggagaagacgacgaggtgaaacggagtacaccagagaagaacgggaaggagatgctggaacagaccctgcaaaaagtgaccgagctagagaatcgcctgaagagtttcgagaagcgttcccgcaagctcaaggagggaaataagaagctgatgaaggagaacgactttttaaagagtctgttaaagcaacagcaagaggatactgaaacccgcgagaaggagctggagcagatcattaaggggtccaaggacgttgagaaggagaacacagaacttcaggtgaaaatttctgaactggaaacagaggtgactagtctgcgccgacaggtcgctgaggcgaatgcattacggaatgagaatgaggagctaattaatcctatggaaaaaagtcatcagtctgcagaccgtgccaagtctgaaatggcaaccatgaaggttaggtcgggtcgctacgattgcaagactacaatgacaaaagtcaagttcaaggctgctaagaagaattgtagtgtggggcgacatcatacagtgctgaaccattccatcaaagtgatgtccaacgtgtttgaaaacctgtcaaaggacggctgggaagatgtcagtgagagtagctctgatagcgaggcgcaaacaagccagactctcggtaccatcatcgtggaaacgtctcagaaaatcagccccacagaggacggaaaagaccaaaaggagagcgacccgaccgaagacagccaaactcaaggaaaggaaatcgttcaaacctatttaaacatcgatggcaagactcccaaggactattttcacgataagaatgcaaaaaagcctacctttcaaaaaaagaattgcaagatgcagaagagctctcacacggctgtaccaacgcgagtcaatcgggagaaatataagaatattactgctcagaaaagctcttccaatattatcttgttaagagagaggatcatatctctccaacagcagaactcagtgttgcagaatgccaaaaagacagctgagctctcagtaaaagagtacaaggaggtgaatgaaaaactcctccatcaacagcaagtaagcgaccagaggttccagacttcgaggcagacaatcaaaaaactgaatctagacctggctggcctgcgaaaggagaaagaggacctcttaaagaaactggagtccagttccgagattacctccttggctgaagagaacagtcaggtaacattcccaagaatccaggtgacatcgctgtcaccttctcggtcaatggacctggagatgaagcagctgcagtacaagctcaagaatgccaccaatgaactcacaaaacagtcgagtaatgtgaaaaccctcaagtttgagctgttggccaaggaggaacatatcaaagaaatgcacgaaaagatctctcggatggaaagggacataacaatgaaaagacacctcatcgaggatctgaaattcaggcagaaagtcaatcttgagtctaataaatcttttagcgagatgttgcaaaacttggataagaaggttaaaacactgaccgaagagtgcagcaacaagaaagtatccatcgactctttaaagcaaaggctgaatgtggccgtgaaagagaagtcccagtacgagcagatgtatcagaaaagcaaagaagaactcgaaaaaaaagatctaaaactgacgcttttggtgtctaggatctctgagacggagtctgccatggcagagatcgagaccgccgcaagcaaacaactgcaggagttggccttacagagcgaacaggttctggaaggagcacagaagaccctcctactggctaatgagaaggtagaggaattcacaactttcgttaaagcgcttgcaaaagaactgcaaaacgatgtccatgtggtgaggcgccagatcagggagctgaaaaaaatgaagaagaatcgcgatgcttgtaagacctcaacacataaggctcagacattggccgcttctatcttgaacatctccaggtcagatctcgaagaaattctcgacacagaggatcaagtcgagatcgaaaagacaaaaattgacgcagaaaacgacaaggagtggatgctctatattcagaaactcttggagggtcaatctctcgccctgtctccaagattaaagtgtaatggagccattgtggcacaccagaacctgcggctgccagattcttcctcctcagccagcgcctcttag

SEQ ID NO: 309480 - DNA, 4248 bp, Artificial Sequence
  derived and/or modified sequence
agggaacttgacccgttagcagccgcagccatggcggcgcgttcgcctccctcaccgcacccttcgcccccagcgcgacagctgggccccaggtccccacgtgttgggcggggagctgaagtacacgcaatgcgcagcgaggcctcgggttttgccggcgcagcgcgggaggtggtcgcggacgaaagtgataaaatctgggtgggtgaagaagggtcagggggccggcgagggcctgggggggcagctccggctcatgctcccctcctcagcgcgcccatggggtccagacggctagagggcatctcggtagaggaggcgatggtgacccggacgcagctgctggaggaagagctgagcagcctaaaggaggagttggccctgtgtcaggctgataaagaatttgtatggtctttgtggaaacgtctccaggttacaaacccagatctcacacaagtggtcagtttggttgtggaaagagaaaaacagaaatctgaagctaaagacagaaaagttctagaaattctgcaagtcaaggatgccaaaatacaagaatttgaacagagagagtcagtactgaaacaggaaataaatgaccttgtaaaacggaaaattgcagtagatgaagaaaatgctttcttaaggaaagaattcagtgacttggagaagaaatttaaagataaaagtcaagaaattaaggacactaaggagtgtgtacagaacaaagaagagcaaaacagactagttataaaaaatctggaggaggaaaacaagaaattaagtacccgctgcactgacctgctaaatgacctggagaaattgaggaagcaggaagcacatttgagaaaagaaaaatatagcactgatgcaaaaataaagacctttgaagacaatttaattgaagcaaggaaagaagttgaagtatcacagagtaaatacaatgctctatcattacagttgagtaataaacagactgaacttatccagaaggatatggatattaccctggtcaggcaagaactgcaggagctgcagaatctttacaaacagaacagtacacatacagcccagcaagcagagctgatccagcagcttcaggttctcaatatggacacacaaaaagtactgagaaatcaggaagatgttcacacagctgaaagtatatcatatcaaaaactttacaatgagttacatatttgttttgaaaccacaaaatcaaatgaagctatgctccggcaaagtgttactaatcttcaggatcagctattacaaaaagagcaagaaaatgctaagttaaaagaaaaacttcaggaatcacagggagcacctcttcctttacctcaagaaagtgatccagactactcagcacaggtacctcatcgcccatccttatcaagcttagaaacgttaatggtttcacagaagtctgaaattgagtatttacaggagaaactaaagatagcaaatgaaaaactgtcagaaaacatatctgccaacaagggtttctcccgaaagagcatcatgacaagtgctgaaggaaaacataaggaaccacctgtgaaacgttcaaggtctttgtccccaaagagctctttcacagactcagaagagctacagaagctgagaaaagctgaaagaaagattgaaaacttagagaaggcactacaactaaagagccaagaaaatgatgagctaagagatgcccatgaaaaacgcaaggaacggctacagatgttacagaccaactacagagcagtaaaagagcaattaaaacagtgggaagaaggcagtggcatgactgaaatcaggaaaataaagagagcagatccccaacaacttcgacaagaagattctgacgctgtgtggaatgaactggcatatttcaaaagggaaaaccaggagctaatgattcaaaagatgaatcttgaagaagaattagatgaacttaaagtacatatatctattgataaggcagcaatacaagaattgaatagatgtgtggcagagagaagagaagaacagctctttagatctggtgaagatgatgaggtcaagaggagtactccagagaagaatggaaaagaaatgttggagcagacattacagaaggtcactgagttggaaaatcggctgaaatcttttgagaaaaggtcgagaaaattaaaagaagggaataaaaaattaatgaaagaaaatgattttctgaaatccctcttaaaacagcaacaagaagatacagagaccagagaaaaagagctagaacagataataaaggggagtaaagatgtagaaaaagaaaatactgaacttcaagtaaaaatcagtgagctggagacagaagtcacttccctgaggagacaagtggcagaagctaatgcattgagaaatgaaaatgaagagctgatcaacccaatggagaaatcacaccagtcagcagacagagctaaatccgagatggccaccatgaaagtgagatctggacgatatgattgtaagacaactatgaccaaggttaaatttaaagctgcgaagaaaaattgctctgtgggtcgtcaccacactgttctcaatcattccatcaaggttatgagcaatgtgtttgagaacctcagcaaggacggctgggaggatgtgagtgaaagcagcagtgattctgaagcacagacctctcaaactttgggaacaattattgtagaaacatcccagaaaataagtcctacggaagatggaaaagaccagaaagaaagtgatccaacagaagacagccaaacacaaggaaaagaaatagtacagacatatttaaatatagatggcaagaccccaaaggactattttcatgataagaatgccaaaaaaccaacttttcaaaagaagaattgcaagatgcaaaagagttcacatacagcagttcctactagagtcaacagagaaaagtacaaaaatataactgcccagaaatcaagtagcaatattattttattacgagaacggattatatccttgcaacaacaaaacagtgtacttcagaatgccaagaaaacagcagaattgtctgttaaagaatataaagaagttaatgaaaagctcctccatcaacagcaagtatccgatcaacgatttcagacaagcaggcagacaataaagaagctaaatttggatttggctgggcttcggaaagaaaaagaagatttactaaagaaattggagtcctcatctgaaatcacaagtttggcagaagaaaattcccaggtaacatttccacggatacaagttacatcacttagtccttcaaggagcatggatttggaaatgaagcaattgcagtataaactaaagaatgctactaatgaactcactaaacagtcatcaaatgtgaagactttgaaatttgaactcctagcaaaagaagaacacataaaggaaatgcatgaaaagatatctcgaatggagagggatataactatgaaaagacatttgatagaggacttgaaatttcgacagaaagtaaatttggaaagtaacaagagttttagtgaaatgttacaaaatcttgataaaaaggtaaagacattaactgaagaatgttccaacaagaaggtatcaattgattcactaaagcaaagacttaacgttgctgtaaaagaaaagtcacagtatgaacagatgtatcagaaatctaaagaggagttagaaaaaaaggatctcaagcttactctcctagtatcaagaataagtgagactgaatctgcaatggcagaaattgaaacagcagcatctaagcagcttcaagaattagcattgcaaagtgaacaggtcctagaaggtgcacagaagacattgctgttagccaatgaaaaagtagaagagttcaccacatttgtgaaggctttggccaaagagttgcaaaatgatgtccatgtggtaaggcgacaaataagagagcttaaaaaaatgaagaaaaacagggacgcctgtaaaacctcaacccataaagcccagaccttggcagcttctatcctgaacatttcacggtcagatttagaggaaatattagacacagaagatcaagtggaaattgaaaaaacaaaaattgatgctgaaaatgacaaggaatggatgttgtacattcagaaacttcttgaaggacagagtcttgctctgtctcccaggctgaagtgcaatggcgcaatcgtggctcaccaaaacctccgcctgccagactcgagcagttctgcctcagcctcctga

SEQ ID NO: 309481 - DNA, 4218 bp, Artificial Sequence
  derived and/or modified sequence
atggccgccagaagcccccccagcccccaccccagcccccccgccagacagctgggccccagaagccccagagtgggcagaggcgccgaggtgcacgccatgagaagcgaggccagcggcttcgccggcgccgccagagaggtggtggccgacgagagcgacaagatctgggtgggcgaggagggcagcggcggcagaagaggccccggcggcgccgcccccgcccacgcccccctgctgagcgcccccatgggcagcagaagactggagggcatcagcgtggaggaggccatggtgaccagaacccagctgctggaggaggagctgagcagcctgaaggaggagctggccctgtgccaggccgacaaggagttcgtgtggagcctgtggaagagactgcaggtgaccaaccccgacctgacccaggtggtgagcctggtggtggagagagagaagcagaagagcgaggccaaggacagaaaggtgctggagatcctgcaggtgaaggacgccaagatccaggagttcgagcagagagagagcgtgctgaagcaggagatcaacgacctggtgaagagaaagatcgccgtggacgaggagaacgccttcctgagaaaggagttcagcgacctggagaagaagttcaaggacaagagccaggagatcaaggacaccaaggagtgcgtgcagaacaaggaggagcagaacagactggtgatcaagaacctggaggaggagaacaagaagctgagcaccagatgcaccgacctgctgaacgacctggagaagctgagaaagcaggaggcccacctgagaaaggagaagtacagcaccgacgccaagatcaagaccttcgaggacaacctgatcgaggccagaaaggaggtggaggtgagccagagcaagtacaacgccctgagcctgcagctgagcaacaagcagaccgagctgatccagaaggacatggacatcaccctggtgagacaggagctgcaggagctgcagaacctgtacaagcagaacagcacccacaccgcccagcaggccgagctgatccagcagctgcaggtgctgaacatggacacccagaaggtgctgagaaaccaggaggacgtgcacaccgccgagagcatcagctaccagaagctgtacaacgagctgcacatctgcttcgagaccaccaagagcaacgaggccatgctgagacagagcgtgaccaacctgcaggaccagctgctgcagaaggagcaggagaacgccaagctgaaggagaagctgcaggagagccagggcgcccccctgcccctgccccaggagagcgaccccgactacagcgcccaggtgccccacagacccagcctgagcagcctggagaccctgatggtgagccagaagagcgagatcgagtacctgcaggagaagctgaagatcgccaacgagaagctgagcgagaacatcagcgccaacaagggcttcagcagaaagagcatcatgaccagcgccgagggcaagcacaaggagccccccgtgaagagaagcagaagcctgagccccaagagcagcttcaccgacagcgaggagctgcagaagctgagaaaggccgagagaaagatcgagaacctggagaaggccctgcagctgaagagccaggagaacgacgagctgagagacgcccacgagaagagaaaggagagactgcagatgctgcagaccaactacagagccgtgaaggagcagctgaagcagtgggaggagggcagcggcatgaccgagatcagaaagatcaagagagccgacccccagcagctgagacaggaggacagcgacgccgtgtggaacgagctggcctacttcaagagagagaaccaggagctgatgatccagaagatgaacctggaggaggagctggacgagctgaaggtgcacatcagcatcgacaaggccgccatccaggagctgaacagatgcgtggccgagagaagagaggagcagctgttcagaagcggcgaggacgacgaggtgaagagaagcacccccgagaagaacggcaaggagatgctggagcagaccctgcagaaggtgaccgagctggagaacagactgaagagcttcgagaagagaagcagaaagctgaaggagggcaacaagaagctgatgaaggagaacgacttcctgaagagcctgctgaagcagcagcaggaggacaccgagaccagagagaaggagctggagcagatcatcaagggcagcaaggacgtggagaaggagaacaccgagctgcaggtgaagatcagcgagctggagaccgaggtgaccagcctgagaagacaggtggccgaggccaacgccctgagaaacgagaacgaggagctgatcaaccccatggagaagagccaccagagcgccgacagagccaagagcgagatggccaccatgaaggtgagaagcggcagatacgactgcaagaccaccatgaccaaggtgaagttcaaggccgccaagaagaactgcagcgtgggcagacaccacaccgtgctgaaccacagcatcaaggtgatgagcaacgtgttcgagaacctgagcaaggacggctgggaggacgtgagcgagagcagcagcgacagcgaggcccagaccagccagaccctgggcaccatcatcgtggagaccagccagaagatcagccccaccgaggacggcaaggaccagaaggagagcgaccccaccgaggacagccagacccagggcaaggagatcgtgcagacctacctgaacatcgacggcaagacccccaaggactacttccacgacaagaacgccaagaagcccaccttccagaagaagaactgcaagatgcagaagagcagccacaccgccgtgcccaccagagtgaacagagagaagtacaagaacatcaccgcccagaagagcagcagcaacatcatcctgctgagagagagaatcatcagcctgcagcagcagaacagcgtgctgcagaacgccaagaagaccgccgagctgagcgtgaaggagtacaaggaggtgaacgagaagctgctgcaccagcagcaggtgagcgaccagagattccagaccagcagacagaccatcaagaagctgaacctggacctggccggcctgagaaaggagaaggaggacctgctgaagaagctggagagcagcagcgagatcaccagcctggccgaggagaacagccaggtgaccttccccagaatccaggtgaccagcctgagccccagcagaagcatggacctggagatgaagcagctgcagtacaagctgaagaacgccaccaacgagctgaccaagcagagcagcaacgtgaagaccctgaagttcgagctgctggccaaggaggagcacatcaaggagatgcacgagaagatcagcagaatggagagagacatcaccatgaagagacacctgatcgaggacctgaagttcagacagaaggtgaacctggagagcaacaagagcttcagcgagatgctgcagaacctggacaagaaggtgaagaccctgaccgaggagtgcagcaacaagaaggtgagcatcgacagcctgaagcagagactgaacgtggccgtgaaggagaagagccagtacgagcagatgtaccagaagagcaaggaggagctggagaagaaggacctgaagctgaccctgctggtgagcagaatcagcgagaccgagagcgccatggccgagatcgagaccgccgccagcaagcagctgcaggagctggccctgcagagcgagcaggtgctggagggcgcccagaagaccctgctgctggccaacgagaaggtggaggagttcaccaccttcgtgaaggccctggccaaggagctgcagaacgacgtgcacgtggtgagaagacagatcagagagctgaagaagatgaagaagaacagagacgcctgcaagaccagcacccacaaggcccagaccctggccgccagcatcctgaacatcagcagaagcgacctggaggagatcctggacaccgaggaccaggtggagatcgagaagaccaagatcgacgccgagaacgacaaggagtggatgctgtacatccagaagctgctggagggccagagcctggccctgagccccagactgaagtgcaacggcgccatcgtggcccaccagaacctgagactgcccgacagcagcagcagcgccagcgccagctag

SEQ ID NO: 309482 - DNA, 1672 bp, Artificial Sequence
  derived and/or modified sequence
taggctgtgatggaatctgaaatgaagtttgacaaggaccatgatggactcattgaaaatggaggctatgcagaccagacctatgatggatgggtgaccacaggccccaggttagcgggtaggggtttccaggaggcctgaggtgagaaactgggcaacaagggattgtagggctcaagaaagaatgactcattgtctattacacggcatgggagcagctggagctgccagtctgacccccaaacccatgtccctgatcagtgcttactgtggagggctgtggctggcagctgtggctgtgatggtccagatggctgctctgtgtggggcacaggacatccaggataagttttcttctatcctcagccggggccaagaagcctatgagagactgctgtggaatggtgagttcggggagcctaagtagtcttaaggcagctgagaggacaccaggagccttatttttctcttcctcgactccaggccgctattacaactatgacagcagctctcggcctcagtctcgtagtgttatgtctgaccagtgtgctggacagtggttcctgaaggcctgtggcctaggagaaggagacactgaggtgtttcctacccaacatgtggtccgtgctctccaaactatctttgagctgaacgtccaggcctttgcaggaggggccatgggggctgtgaatgggatgcagccccatggtgtccctgataaatccagtgtgcagtctgatgaagtctgggtgggtgtggtctacgggctggcagctaccatgatccaagaggtaatgcactccttttcccatctctccaccatctgtatcctggcccagaaaacttcctcaaccaccaaatttcttcaaggcataacccaatgccatcttgtccgtctataaagcctcccatttttccctggtatgcattccagctcctgccttcaggcttctgtctgtgggtcatagttatctcctccacttgctgggagctccttgaaggcaaagactctactgcctccatctatccagtggaagtggctcttcagagggtgccaagttagtatgtatgactgtcatctctcccaacagggcctgacttgggagggcttccagacagctgaaggctgctaccgtaccgtgtgggagcgcctgggtctggccttccagaccccagaggcatactgccagcagcgagtgttccgctcactggcctacatgcggccactgagcatatgggccatgcagctagccctgcaacagcagcagcacaaaaaggcctcctggccaaaagtcaaacagggcacaggactaaggacagggcctatgtttggaccaaaggaagccatggcaaacctgagcccagagtgagccgtctgaactgtgggagggaagtgctaacagcccagcctccagcctggcctttcctccttcccctctgaacctcctgcaaccctgagccatcaggacaatcataccccttcccttctctccacccaattgtgccagtaaatgggggttgagggtgacctaggcagcattagaatcacttatttatttctttcctcacctgttccctgactgcgtgaaatgttcagggaggtcagttgatttccccaggtacattcatggtgtgacagacacatgggtacaaataaaagacccagaaagcc

SEQ ID NO: 309483 - protein, 172 aa, Artificial Sequence
  derived and/or modified sequence
MRDCCGMVSSGSLSSLKAAERTPGALFFSSSTPGRYYNYDSSSRPQSRSVMSDQCAGQWFLKACGLGEGDTEVFPTQHVVRALQTIFELNVQAFAGGAMGAVNGMQPHGVPDKSSVQSDEVWVGVVYGLAATMIQEVMHSFSHLSTICILAQKTSSTTKFLQGITQCHLVRL

SEQ ID NO: 309484 - protein, 877 aa, Artificial Sequence
  derived and/or modified sequence
MGTQDPGNMGTGVPASEQISCAKEDPQVYCPEETGGTKDVQVTDCKSPEDSRPPKETDCCNPEDSGQLMVSYEGKAMGYQVPPFGWRICLAHEFTEKRKPFQANNVSLSNMIKHIGMGLRYLQWWYRKTHVEKKTPFIDMINSVPLRQIYGCPLGGIGGGTITRGWRGQFCRWQLNPGMYQHRTVIADQFTVCLRREGQTVYQQVLSLERPSVLRSWNWGLCGYFAFYHALYPRAWTVYQLPGQNVTLTCRQITPILPHDYQDSSLPVGVFVWDVENEGDEALDVSIMFSMRNGLGGGDDAPGGLWNEPFCLERSGETVRGLLLHHPTLPNPYTMAVAARVTAATTVTHITAFDPDSTGQQVWQDLLQDGQLDSPTGQSTPTQKGVGIAGAVCVSSKLRPRGQCRLEFSLAWDMPRIMFGAKGQVHYRRYTRFFGQDGDAAPALSHYALCRYAEWEERISAWQSPVLDDRSLPAWYKSALFNELYFLADGGTVWLEVLEDSLPEELGRNMCHLRPTLRDYGRFGYLEGQEYRMYNTYDVHFYASFALIMLWPKLELSLQYDMALATLREDLTRRRYLMSGVMAPVKRRNVIPHDIGDPDDEPWLRVNAYLIHDTADWKDLNLKFVLQVYRDYYLTGDQNFLKDMWPVCLAVMESEMKFDKDHDGLIENGGYADQTYDGWVTTGPSAYCGGLWLAAVAVMVQMAALCGAQDIQDKFSSILSRGQEAYERLLWNGRYYNYDSSSRPQSRSVMSDQCAGQWFLKACGLGEGDTEVFPTQHVVRALQTIFELNVQAFAGGAMGAVNGMQPHGVPDKSSVQSDEVWVGVVYGLAATMIQELLPSGFCLWVIVISSTCWELLEGKDSTASIYPVEVALQRVPS

SEQ ID NO: 309485 - DNA, 519 bp, Artificial Sequence
  derived and/or modified sequence
atgagagactgctgcggcatggtgagcagcggcagcctgagcagcctgaaggccgccgagagaacccccggcgccctgttcttcagcagcagcacccccggcagatactacaactacgacagcagcagcagaccccagagcagaagcgtgatgagcgaccagtgcgccggccagtggttcctgaaggcctgcggcctgggcgagggcgacaccgaggtgttccccacccagcacgtggtgagagccctgcagaccatcttcgagctgaacgtgcaggccttcgccggcggcgccatgggcgccgtgaacggcatgcagccccacggcgtgcccgacaagagcagcgtgcagagcgacgaggtgtgggtgggcgtggtgtacggcctggccgccaccatgatccaggaggtgatgcacagcttcagccacctgagcaccatctgcatcctggcccagaagaccagcagcaccaccaagttcctgcagggcatcacccagtgccacctggtgagactgtag

SEQ ID NO: 309486 - DNA, 2634 bp, Artificial Sequence
  derived and/or modified sequence
atgggcacccaggaccccggcaacatgggcaccggcgtgcccgccagcgagcagatcagctgcgccaaggaggacccccaggtgtactgccccgaggagaccggcggcaccaaggacgtgcaggtgaccgactgcaagagccccgaggacagcagaccccccaaggagaccgactgctgcaaccccgaggacagcggccagctgatggtgagctacgagggcaaggccatgggctaccaggtgccccccttcggctggagaatctgcctggcccacgagttcaccgagaagagaaagcccttccaggccaacaacgtgagcctgagcaacatgatcaagcacatcggcatgggcctgagatacctgcagtggtggtacagaaagacccacgtggagaagaagacccccttcatcgacatgatcaacagcgtgcccctgagacagatctacggctgccccctgggcggcatcggcggcggcaccatcaccagaggctggagaggccagttctgcagatggcagctgaaccccggcatgtaccagcacagaaccgtgatcgccgaccagttcaccgtgtgcctgagaagagagggccagaccgtgtaccagcaggtgctgagcctggagagacccagcgtgctgagaagctggaactggggcctgtgcggctacttcgccttctaccacgccctgtaccccagagcctggaccgtgtaccagctgcccggccagaacgtgaccctgacctgcagacagatcacccccatcctgccccacgactaccaggacagcagcctgcccgtgggcgtgttcgtgtgggacgtggagaacgagggcgacgaggccctggacgtgagcatcatgttcagcatgagaaacggcctgggcggcggcgacgacgcccccggcggcctgtggaacgagcccttctgcctggagagaagcggcgagaccgtgagaggcctgctgctgcaccaccccaccctgcccaacccctacaccatggccgtggccgccagagtgaccgccgccaccaccgtgacccacatcaccgccttcgaccccgacagcaccggccagcaggtgtggcaggacctgctgcaggacggccagctggacagccccaccggccagagcacccccacccagaagggcgtgggcatcgccggcgccgtgtgcgtgagcagcaagctgagacccagaggccagtgcagactggagttcagcctggcctgggacatgcccagaatcatgttcggcgccaagggccaggtgcactacagaagatacaccagattcttcggccaggacggcgacgccgcccccgccctgagccactacgccctgtgcagatacgccgagtgggaggagagaatcagcgcctggcagagccccgtgctggacgacagaagcctgcccgcctggtacaagagcgccctgttcaacgagctgtacttcctggccgacggcggcaccgtgtggctggaggtgctggaggacagcctgcccgaggagctgggcagaaacatgtgccacctgagacccaccctgagagactacggcagattcggctacctggagggccaggagtacagaatgtacaacacctacgacgtgcacttctacgccagcttcgccctgatcatgctgtggcccaagctggagctgagcctgcagtacgacatggccctggccaccctgagagaggacctgaccagaagaagatacctgatgagcggcgtgatggcccccgtgaagagaagaaacgtgatcccccacgacatcggcgaccccgacgacgagccctggctgagagtgaacgcctacctgatccacgacaccgccgactggaaggacctgaacctgaagttcgtgctgcaggtgtacagagactactacctgaccggcgaccagaacttcctgaaggacatgtggcccgtgtgcctggccgtgatggagagcgagatgaagttcgacaaggaccacgacggcctgatcgagaacggcggctacgccgaccagacctacgacggctgggtgaccaccggccccagcgcctactgcggcggcctgtggctggccgccgtggccgtgatggtgcagatggccgccctgtgcggcgcccaggacatccaggacaagttcagcagcatcctgagcagaggccaggaggcctacgagagactgctgtggaacggcagatactacaactacgacagcagcagcagaccccagagcagaagcgtgatgagcgaccagtgcgccggccagtggttcctgaaggcctgcggcctgggcgagggcgacaccgaggtgttccccacccagcacgtggtgagagccctgcagaccatcttcgagctgaacgtgcaggccttcgccggcggcgccatgggcgccgtgaacggcatgcagccccacggcgtgcccgacaagagcagcgtgcagagcgacgaggtgtgggtgggcgtggtgtacggcctggccgccaccatgatccaggagctgctgcccagcggcttctgcctgtgggtgatcgtgatcagcagcacctgctgggagctgctggagggcaaggacagcaccgccagcatctaccccgtggaggtggccctgcagagagtgcccagctag

SEQ ID NO: 309487 - DNA, 3757 bp, Artificial Sequence
  derived and/or modified sequence
gggctcgggtcatcccggcgcccagggtcaccttcccacgggctggcacctgggcgcgggcgctgccccggagccggccggcgggacctggcgcccaatcctgggggacccggtgccgtggcccaggggccgggccgaggtcccgggggcggtgccttgcgggcccgtcccggggcggtgcctggtgggctggccccgcggctcctcccctctctgcgggcccagtcgccctttggccgggcgagctaatcgtcggctcaatgacgacgaggcccgacccttcccgtccaggacctacagagacaaccgaaggagagcccaaggcggcttctttgctgtcgccgcccccactgaagcaagagctccccggctccactgaaacaccagctcatttaagctttccccaacgcccggccctccgggacgatacctaacaacgaccggcgcccgcatctggaataggctggcgagatacttagtatccgagggctcgggacttggcgccatcgaggtcatggggacccaggatccagggaacatgggaaccggcgtcccagcctcggagcagataagctgtgccaaagaggatccacaagtttattgccctgaagagactggcggcaccaaggatgtgcaggttacagactgtaagagtcccgaagacagccgacccccaaaagagacggactgctgcaatccggaggactctgggcagctgatggtttcctatgagggtaaagctatgggctaccaggtgcctccctttggctggcgcatctgtctggctcatgagtttacagagaagaggaaaccctttcaagctaacaacgtctccctaagcaacatgataaagcatataggcatgggcttgaggtacctgcagtggtggtaccggaagacccatgtggaaaagaagacacctttcatcgacatgatcaattctgtacccctaagacagatttatggttgtcccttgggtggcatcgggggaggcactattacccgtggctggagaggccagttctgtcgttggcagcttaaccctggaatgtatcagcaccggacagtcatcgctgaccaattcacagtgtgcctgcgtcgggaagggcagactgtgtaccagcaagtcctgtccctggagcgcccaagtgtcctccgcagctggaactggggcctgtgtgggtactttgctttctaccatgccctctatccccgagcctggactgtctatcagcttcctggccagaatgtcaccctcacctgccgtcagatcacacccatcttgccccatgactaccaggacagcagcctgcctgtaggagtctttgtgtgggatgtggaaaatgaaggggacgaagctctagatgtgtccatcatgttctccatgcggaatggactgggtggtggagacgatgccccagggggtttgtggaatgagcccttctgtctggagcgtagcggggaaactgtccgggggctgctcctgcatcatccaacccttccaaacccctacacgatggctgtggctgcacgagtcacggcagctaccacggtaacccacatcacagcctttgaccctgacagcacggggcagcaggtgtggcaggatctacttcaggatggacagctggactctcccactggccaaagcacccctacgcagaaaggagtaggcattgctggagctgtgtgtgtttccagcaagttgcgacctcgaggccagtgccgcctggagttttcactggcttgggacatgcccaggatcatgtttggagctaaaggccaagtccactacaggcggtatacaaggttctttggccaggatggagatgcagcacctgccctcagccactatgcactgtgccgatacgcagagtgggaagagaggatctcagcttggcagagcccggtattggatgacagatcactgcctgcctggtacaaatctgcgctgttcaatgaactatacttcctggctgatggaggcacagtgtggctggaagttcttgaggactccctaccagaggagctgggcagaaacatgtgtcacctccgccccaccctacgggactacggtcgatttggctaccttgagggccaggagtaccgcatgtacaacacatatgatgtccacttttatgcttcctttgccctcatcatgctctggcccaaacttgagctcagcctacagtatgacatggctctggccactctcagggaggacctgacacggcgacggtacctgatgagtggggtgatggcacctgtgaaaaggaggaacgtcatcccccatgatattggggacccagatgatgaaccatggctccgcgtcaatgcatatttaatccatgatactgctgattggaaggacctgaacctgaagtttgtgctgcaggtttatcgggactattacctcacgggtgatcaaaacttcctgaaggacatgtggcctgtgtgtctagctgtgatggaatctgaaatgaagtttgacaaggaccatgatggactcattgaaaatggaggctatgcagaccagacctatgatggatgggtgaccacaggccccagtgcttactgtggagggctgtggctggcagctgtggctgtgatggtccagatggctgctctgtgtggggcacaggacatccaggataagttttcttctatcctcagccggggccaagaagcctatgagagactgctgtggaatggccgctattacaactatgacagcagctctcggcctcagtctcgtagtgttatgtctgaccagtgtgctggacagtggttcctgaaggcctgtggcctaggagaaggagacactgaggtgtttcctacccaacatgtggtccgtgctctccaaactatctttgagctgaacgtccaggcctttgcaggaggggccatgggggctgtgaatgggatgcagccccatggtgtccctgataaatccagtgtgcagtctgatgaagtctgggtgggtgtggtctacgggctggcagctaccatgatccaagagctcctgccttcaggcttctgtctgtgggtcatagttatctcctccacttgctgggagctccttgaaggcaaagactctactgcctccatctatccagtggaagtggctcttcagagggtgccaagttagtatgtatgactgtcatctctcccaacagggcctgacttgggagggcttccagacagctgaaggctgctaccgtaccgtgtgggagcgcctgggtctggccttccagaccccagaggcatactgccagcagcgagtgttccgctcactggcctacatgcggccactgagcatatgggccatgcagctagccctgcaacagcagcagcacaaaaaggcctcctggccaaaagtcaaacagggcacaggactaaggacagggcctatgtttggaccaaaggaagccatggcaaacctgagcccagagtgagccgtctgaactgtgggagggaagtgctaacagcccagcctccagcctggcctttcctccttcccctctgaacctcctgcaaccctgagccatcaggacaatcataccccttcccttctctccacccaattgtgccagtaaatgggggttgagggtgacctaggcagcattagaatcacttatttatttctttcctcacctgttccctgactgcgtgaaatgttcagggaggtcagttgatttccccaggtacattcatggtgtgacagacacatgggtacaaataaaagacccagaaagcc

SEQ ID NO: 309488 - DNA, 519 bp, Artificial Sequence
  derived and/or modified sequence
atgagagattgttgtgggatggtttccagcgggagcctttcctccctcaaggccgcagagcgtacacctggagctctcttcttcagtagtagtacccctggtcgatattataattatgattctagcagcagaccacagagccgttcagtgatgtctgaccaatgcgccggccaatggtttctgaaagcctgcggcctaggtgagggcgataccgaggttttccccacccaacatgtggtgcgggctctccagacgatctttgagctgaatgtccaggccttcgctggcggggcaatgggcgccgtgaacggaatgcagcctcacggtgttccagacaaatcgagcgttcagtccgatgaggtatgggtcggggtggtttacggactcgcagctaccatgatccaggaggtgatgcattccttttcacacctctctacaatttgcattctcgctcagaagacaagcagtaccactaaattcctgcaaggaattacacagtgccacctagtgcgcctatag

SEQ ID NO: 309489 - DNA, 2634 bp, Artificial Sequence
  derived and/or modified sequence
atgggaactcaggacccggggaacatggggaccggagttccagctagtgagcaaatttcttgcgcaaaagaggatccacaagtgtactgtcctgaggaaaccggcggaaccaaggatgtgcaggtgacagattgcaagagccctgaggatagccggccacctaaggagactgactgctgcaatcctgaggattctggccaacttatggtttcttacgagggtaaggccatgggttaccaagtcccaccattcggctggaggatctgtttagcccatgagtttactgagaaacgaaagccattccaggcgaacaatgtgtccctcagcaacatgatcaaacatatcggcatgggtctgagatacctacagtggtggtacagaaaaacccacgtggaaaagaaaaccccctttatcgacatgattaactctgtacccttgagacagatctatggttgcccccttgggggcattggtggcggtactataacaaggggatggcgggggcagttttgtaggtggcagttgaatccaggtatgtatcaacacagaactgtcattgcggaccagtttaccgtgtgtctcagaagggaggggcagaccgtgtatcagcaggtcctgtctctagagcgaccttcagtgttgcgatcatggaattgggggctgtgtgggtacttcgctttttaccacgccttatatcctcgggcatggactgtgtaccagcttcccggccagaacgtgactctgacttgtcggcagattactcccattctgcctcatgattatcaggacagctctctgcccgtaggagtctttgtctgggatgtggagaatgagggcgacgaggccctggacgtgtccatcatgttcagtatgagaaacgggctgggcggaggggacgatgcccctggaggactttggaatgagccattttgccttgagcgatcaggggaaactgttcgggggttgcttctgcaccaccctaccttgcctaacccctataccatggcagtggcagcgagggtgactgctgccaccaccgtgacgcacatcaccgcctttgaccctgactccacagggcagcaggtgtggcaggacctccttcaagatggccagcttgattctccaaccggtcagtccactccaacccagaagggggtgggaattgccggcgctgtgtgcgtttcaagcaaactgcgtccgaggggacaatgcaggcttgagttttctcttgcctgggatatgccgcgaatcatgtttggggcaaaaggccaggttcattacagacgctacacacgtttttttggtcaagacggggacgcagcgccagcactgagtcactatgccctctgcaggtacgctgagtgggaggaaagaattagcgcgtggcagtccccggtactcgacgaccggtccctaccggcctggtataagagcgctttgttcaatgagctatacttcttggcagacggaggcactgtttggttggaggttttggaggatagtctgcccgaggaactcggccgcaacatgtgccatttaagaccgacattgcgagactacggcagattcggttacctggaggggcaggaatatcggatgtataacacctatgacgtgcatttctatgcgagttttgcgctgattatgttgtggccaaaactggagctatcactccagtacgacatggccctggccacactgcgcgaagatctgaccagacgtaggtacctcatgagcggcgtgatggccccagtgaagcggcgtaatgtgataccacacgatataggagatcctgatgacgagccctggttacgggttaatgcttatctgatacatgacactgcagactggaaagacctcaacctgaaattcgtcctgcaggtttaccgtgattattatctgacgggcgaccagaacttcctaaaagatatgtggccggtgtgcctagctgttatggaaagcgaaatgaagttcgataaagatcatgacgggcttatcgagaatggcgggtatgctgatcaaacatacgacggctgggtgacaaccgggccgagcgcttactgtgggggcctttggctagccgccgtagccgtcatggtgcaaatggccgccctctgtggcgcccaggacatccaggataagttcagctccattctttcccgaggacaagaagcatacgagcgtctcctctggaatggcagatactacaactatgacagcagctctagaccccaaagtagatctgtcatgtcagaccagtgtgccggccagtggttcctaaaggcttgtgggttgggagaaggcgatactgaggtatttccaactcaacatgtggtgcgggccctgcaaaccatctttgagctgaatgtgcaggccttcgccggcggcgctatgggtgctgtgaatggcatgcagccacacggggtgcccgataagagtagtgtgcagtctgatgaggtgtgggtgggagttgtctacggtttggccgctaccatgatccaagagctcctaccaagcggcttctgcttatgggtgatcgtgatctcaagtacttgttgggaattgttggagggcaaggatagcaccgccagcatctatcccgtggaggtggctctgcagagggtgcccagctag

SEQ ID NO: 309490 - DNA, 519 bp, Artificial Sequence
  derived and/or modified sequence
atgagggactgctgcggcatggtgagcagcggcagcctgagcagcctgaaggctgctgagaggacccctggggccctcttcttcagcagcagcaccccaggccgctactacaactatgacagcagcagccggccccagagccgctctgtgatgtctgaccagtgtgccggccagtggttcctgaaggcctgtggcctgggggagggggacacagaggtgttccccacccagcacgtggtgcgggccctgcagaccatctttgagctgaatgtgcaggcctttgctggaggagccatgggcgctgtgaatggcatgcagccccacggcgtgcctgacaagagctctgtgcagagtgatgaggtgtgggtgggcgtggtgtatggcctggccgccaccatgatccaggaggtgatgcacagcttcagccacctgagcaccatctgcatcctggcccagaagaccagcagcaccaccaagttcctgcagggcatcacccagtgccacctggtgcggctgtag

SEQ ID NO: 309491 - DNA, 2634 bp, Artificial Sequence
  derived and/or modified sequence
atgggcacccaggaccccggcaacatgggcactggagtgcctgccagcgagcagatcagctgtgccaaggaggacccccaggtgtactgcccagaggagaccggcggcaccaaggatgtgcaggtgacagactgcaagagccctgaggacagcaggcctcccaaggagacagactgctgcaacccagaagattctggccagctgatggtgtcctatgagggcaaggccatgggctaccaggtgccccccttcggctggaggatctgcctggcccacgagttcacagagaagaggaagcccttccaggccaacaacgtgtccctgagcaacatgatcaagcacatcggcatgggcctgcgctacctgcagtggtggtacaggaagacccacgtggagaagaagacccccttcatcgacatgatcaacagcgtgcccctgcggcagatctacggctgccccctgggcggcattggaggcggcaccatcacccggggctggaggggccagttctgccgctggcagctgaaccctggcatgtaccagcacaggacagtgattgctgaccagttcaccgtgtgcctgcggcgggagggccagacagtgtaccagcaggtgctgagcctggagcggcccagcgtgctgcgctcctggaactggggcctgtgtggctactttgccttctaccacgccctgtacccccgggcctggacagtgtaccagctgcccggccagaatgtgaccctgacctgccggcagatcacccccatcctgccccatgactaccaggacagcagcctgcctgtgggcgtgtttgtgtgggatgtggagaatgaaggagatgaggccctggatgtgtccatcatgttctccatgagaaatggcctgggcggcggagatgatgcccctgggggcctgtggaatgagcccttctgcctggagaggtctggagagaccgtgcggggcctgctgctgcaccaccccaccctgcccaacccctacaccatggctgtggccgcccgggtgacagctgccaccaccgtgacccacatcacagcctttgatcctgacagcacaggccagcaggtgtggcaggacctgctgcaggacggccagctggacagccccaccggccagagcacccccacccagaagggcgtgggcattgctggagctgtgtgtgtgagcagcaagctgcggccccggggccagtgccgcctggagttcagcctggcctgggacatgccccgcatcatgtttggagccaagggccaggtgcactaccgccgctacacccgcttcttcggccaggatggagatgctgccccagccctgagccactacgccctgtgccgctatgcagagtgggaggagcgcatcagcgcctggcagagccctgtgctggatgacaggagcctgcctgcctggtacaagagcgccctcttcaatgagctgtacttcctggctgatggcggcaccgtgtggctggaggtgctggaggacagcctgcctgaggagctgggcaggaacatgtgccacctgcggcccaccctgcgggactatggccgcttcggctacctggagggccaggagtacaggatgtacaacacctatgatgtgcacttctacgccagctttgccctgatcatgctgtggcccaagctggagctgagcctgcagtatgacatggccctggccaccctgcgggaggacctgacccggcggcgctacctgatgtctggagtgatggcccctgtgaagagaagaaatgtcatcccccatgacattggagaccctgatgatgagccctggctgcgggtgaatgcctacctgattcatgacacagctgactggaaggacctgaacctgaagtttgtgctgcaggtgtacagagactactacctgactggagaccagaacttcctgaaggacatgtggcctgtgtgcctggccgtgatggagagcgagatgaagtttgacaaggaccatgatggcctgattgaaaatggaggctacgccgaccagacctatgatggctgggtgaccaccggccccagcgcctactgcggcggcctgtggctggccgctgtggccgtgatggtgcagatggccgccctgtgtggggcccaggacatccaggacaagttcagcagcatcctgagccggggccaggaggcctatgaaaggctgctgtggaatggccgctactacaactatgacagcagcagccggccccagagccgctctgtgatgtctgaccagtgtgccggccagtggttcctgaaggcctgtggcctgggggagggggacacagaggtgttccccacccagcacgtggtgcgggccctgcagaccatctttgagctgaatgtgcaggcctttgctgggggcgccatgggcgctgtgaatggcatgcagccccatggagtgcctgacaagagctctgtgcagagtgatgaggtgtgggtgggcgtggtgtatggcctggccgccaccatgatccaggagctgctgcccagcggcttctgcctgtgggtgattgtcatcagcagcacctgctgggagctgctggagggcaaggacagcacagccagcatctaccctgtggaggtggccctgcagagggtgcccagctag

SEQ ID NO: 309492 - DNA, 519 bp, Artificial Sequence
  derived and/or modified sequence
atgcgggactgctgcggcatggtgagcagcggcagcctgagcagcctcaaagccgcagaacgtaccccgggcgcgctttttttctccagtagtacaccgggcaggtattacaattacgatagttcttcccggccgcagtcccgctcagtaatgtctgaccagtgtgccggccagtggttcttaaaggcttgcggccttggagagggcgatacagaggttttcccaacgcagcacgttgtgagagccttgcagaccattttcgaactgaatgttcaagccttcgccggaggtgctatgggggctgtaaatgggatgcagccgcatggcgtcccagacaaatccagtgtccagtctgacgaagtatgggttggcgtggtgtacggtttagcagccacaatgattcaggaggtgatgcacagcttttctcacctcagtactatttgtattctcgcacagaagacctcctctaccactaagtttttgcagggtattacacagtgtcatctggtacgcctgtag

SEQ ID NO: 309493 - DNA, 2634 bp, Artificial Sequence
  derived and/or modified sequence
atgggcacccaggaccccggcaacatgggcaccggcgtgcccgcctcagaacaaatctcctgcgccaaggaggacccgcaggtctattgccccgaggagaccggcgggactaaggacgtgcaggtgacagactgtaagtctcctgaagattccaggccccccaaggaaacagactgctgcaatcccgaggatagcgggcagttaatggtcagttacgaaggtaaggctatgggctatcaagtccctccattcggctggcgtatctgtcttgcgcatgaatttaccgagaagcgcaagccattccaagccaataacgtgagcttgagcaatatgatcaaacatattggtatggggctgcgttacctgcagtggtggtaccgaaagacacatgtggagaaaaaaaccccatttatagacatgataaacagtgtgccactgcggcagatttacgggtgtcccttgggtggtataggtggtggaaccattacacgaggctggagggggcagttttgtagatggcagcttaatcctggcatgtaccaacatcggactgtgatcgcagaccagttcacagtatgtctccgcagagaagggcagaccgtctaccagcaagttttatctctcgagcggcctagtgtgctgcggtcttggaattggggcctctgtggctacttcgctttctatcacgctctgtatccccgagcatggactgtgtatcagctccctggacaaaacgtaacactgacatgccgacagattacaccgatactgccgcacgattaccaagattcctctctccctgtgggcgttttcgtttgggatgtggagaacgagggggacgaagcactggatgtgtctatcatgttttcaatgcggaatggactgggagggggtgacgacgcaccaggcggcctgtggaatgaacctttctgcctggagaggtctggtgaaaccgtcagaggcctactgctgcatcaccctactctgccgaacccatacactatggcagtcgccgcacgggtgaccgctgccaccacggtaacgcacatcaccgctttcgaccctgactctacaggccagcaagtgtggcaggatctccttcaggatggccagcttgactccccgacgggacagtcgacacccacccagaaaggagtaggaatagctggggcagtgtgcgtgtcatctaaactgcgccccagaggccaatgtcgcctggagtttagcctggcatgggacatgccccgaataatgtttggagctaaaggccaggtgcattacaggagatatactcgcttcttcgggcaagacggggacgccgcccctgccttaagccactacgcgctgtgtcgctatgccgagtgggaggaaaggatcagcgcctggcagagtccagtccttgatgacagatctctcccagcatggtacaagagtgctctgttcaacgagctttatttcctagctgacggtggtactgtttggctcgaggttctggaggatagtttacctgaagagctcggccggaatatgtgtcaccttcgccctacccttcgtgactacggtcgatttggttacctagaggggcaggaataccgcatgtataacacgtacgatgtccacttctacgcctcatttgcactaattatgctttggccaaagctggagctcagtctgcaatacgacatggcccttgctaccctgcgagaggacctgacccggcgccgctacttaatgagcggggtgatggccccagtgaagcgcaggaacgtgatccctcacgatataggggaccctgacgacgagccctggcttcgagtaaacgcctacctgattcacgatactgctgattggaaggacctgaacctgaagttcgtcctacaggtataccgggattactacctaaccggagatcagaattttctgaaggatatgtggccagtatgtctcgccgtgatggaaagcgaaatgaagttcgacaaggaccacgatgggctgatcgagaacggcggttacgctgaccagacttacgacggatgggtaaccacaggcccaagcgcatactgcgggggcctgtggctggccgccgtagccgtgatggtgcagatggccgccctgtgcggggcccaagatattcaagataagttcagctctatcctttcacggggacaggaagcctacgaaagactactttggaacggtaggtactataactatgattcaagcagcaggccccaaagcaggtcagtgatgtcagaccagtgtgcaggccaatggtttctcaaggcctgtggactgggcgagggggatactgaggtcttccccacccaacacgtagtccgagccctgcagacaatcttcgaactgaacgttcaggcgttcgccggcggagccatgggggccgtcaacggcatgcaaccacacggcgtacctgacaagtcttcggttcagtcagacgaagtgtgggtgggagttgtgtacggccttgccgccacaatgatccaagaactgctgccctcaggcttctgcctttgggtcatagtgatatcatccacatgctgggaattactggaagggaaggactccacggccagtatttaccccgtggaagtggccctccagcgggtccctagttag

SEQ ID NO: 309494 - DNA, 519 bp, Artificial Sequence
  derived and/or modified sequence
atgcgcgactgctgcggaatggtgtcctccggttctctttctagcttgaaggccgcagaacggaccccaggggcacttttcttttcaagctcgacacctggaagatattacaactacgattcttcatcgcgcccacaatcgcgctctgtcatgagcgatcagtgtgcaggtcagtggttcctgaaggcttgcgggttgggcgaaggcgacaccgaggtgttccccactcagcacgtcgtaagagctctgcagacaatctttgagttgaacgtgcaggcgtttgctgggggtgcaatgggagcggtgaatggcatgcagccacacggggttccagataagtcctctgttcagtcggacgaagtgtgggtgggcgtcgtgtatgggctggcggctactatgatccaggaagtgatgcatagttttagccacctgtcaacaatttgtatcctggcccagaagacatcaagtacgacaaaattcctccaaggaattacgcagtgccacctcgtaagactgtag

SEQ ID NO: 309495 - DNA, 2634 bp, Artificial Sequence
  derived and/or modified sequence
atgggcacacaggacccaggtaatatgggcactggagtgcctgcgtctgagcagatcagctgcgctaaggaggatccgcaggtttattgccctgaagaaactggcggaacaaaagatgttcaggtcactgattgcaaaagccctgaggatagccgtccgccaaaggagactgactgttgcaaccccgaagacagcggacagctaatggtaagttacgagggaaaagcaatgggttaccaagtgcccccattcggttggaggatctgtctggctcacgaatttactgagaagaggaagccattccaagccaacaacgtgtcactgtcaaacatgatcaaacatatcggcatgggcctccgatacctccagtggtggtaccgtaaaacacacgttgagaagaagactcctttcatagacatgatcaactctgttccacttcggcagatctacggatgtcccctaggcggaattggtgggggtactatcactcgaggatggcgcggacagttctgccggtggcagcttaatccgggtatgtaccagcacaggactgtcattgccgaccagtttaccgtctgtttgcggagagaggggcaaactgtctatcagcaggttcttagtctggagagaccatctgtgctgcgatcttggaattggggcctttgtggatattttgccttctaccacgcgctgtacccgcgtgcctggacagtgtaccagcttcctggccagaatgttaccttgacttgtcgccagatcaccccaatcttaccgcatgactaccaggattcgtccctcccggtgggggtgttcgtctgggatgtggaaaatgagggagatgaggccctcgacgtgtctatcatgttcagtatgagaaatggcctgggcggaggagatgacgcccctggagggttgtggaacgagccattttgccttgaaagatccggggaaaccgtgagaggtttgctcctgcaccatcctaccttgcctaacccgtacaccatggccgtggccgctcgggtgacagcagcaacaaccgtaacacacattactgccttcgacccagatagcaccggccagcaggtgtggcaggacctcctgcaggatgggcagctcgatagccccacagggcagagtaccccaacccagaagggcgtgggaattgctggcgcagtgtgtgtgagtagcaagttgcgccctcgtggtcagtgcaggctggaattttccctggcttgggacatgccacgcattatgtttggcgctaaaggccaggtgcactataggaggtacacaagattcttcgggcaggacggtgatgcggcacctgccctgagtcattacgcactgtgtaggtatgccgagtgggaggaacggatcagtgcatggcagtctccggtgctggacgaccggagtttgcccgcttggtataagagtgccctctttaatgagctctactttctggctgatgggggtacagtatggctggaggttctcgaggactcactcccagaagaattggggcgaaacatgtgccacctgcgccctactctgcgagactacggtcggtttggttacctagaaggtcaggagtatagaatgtacaacacttacgacgtgcacttttacgcgtccttcgctctgattatgctctggcctaagcttgagctgtctctgcagtacgatatggctttggcaaccctgcgggaggacctgacccggagacgatatctgatgtctggtgtgatggccccagtgaagcggaggaatgtgatcccccatgatattggggatcccgatgatgaaccctggttgcgtgttaacgcctatctgattcatgacactgccgattggaaagacttgaatctcaagttcgtgttgcaagtgtatcgagactattatctcacaggggatcagaatttcttaaaggacatgtggccggtatgtctggcagtgatggaaagtgaaatgaagttcgataaagatcacgatgggctgatagagaatggcggttacgccgaccagacctacgatgggtgggtgactacagggccaagtgcttattgcgggggactatggttggctgctgttgctgtgatggttcagatggcggctctatgtggcgctcaagatatccaggataaattctcatctatcctctcgagaggacaggaggcatacgagcgccttctctggaatggacggtactacaattatgactcctcgtccaggccacagagtcggtcagtcatgtctgaccagtgtgccggacagtggtttctgaaggcctgtgggttaggagagggagataccgaagtcttcccaacccagcacgtcgtccgagcactgcagactatctttgagctcaatgtgcaggctttcgcaggtggagcaatgggagccgtgaatggaatgcagccacatggggtcccagacaagagcagtgtacagagcgacgaagtatgggtgggcgtggtttacgggctggccgctactatgattcaggagttgctcccaagcgggttttgcctatgggtgatcgtgataagtagcacttgttgggaactattagaaggcaaagacagcactgcaagtatataccccgtggaggtcgcactgcagcgagtccccagttag

SEQ ID NO: 309496 - protein, 1890 aa, Artificial Sequence
  derived and/or modified sequence
MVHVARLLLLLLTFFLRTDAETPPRFTRTPVDQTGVSGGVASFICQATGDPRPKIVWNKKGKKVSNQRFEVIEFDDGSGSVLRIQPLRTPRDEAIYECVASNNVGEISVSTRLTVLREDQIPRGFPTIDMGPQLKVVERTRTATMLCAASGNPDPEITWFKDFLPVDTSNNNGRIKQLRSGALQIEQSEESDQGKYECVATNSAGTRYSAPANLYVRVRRVPPRFSIPPTNHEIMPGGSVNITCVAVGSPMPYVKWMLGAEDLTPEDDMPIGRNVLELNDVRQSANYTCVAMSTLGVIEAIAQITVKALPKPPGTPVVTESTATSITLTWDSGNPEPVSYYIIQHKPKNSEELYKEIDGVATTRYSVAGLSPYSDYEFRVVAVNNIGRGPPSEPVLTQTSEQAPSSAPRDVQARMLSSTTILVQWKEPEEPNGQIQGYRVYYTMDPTQHVNNWMKHNVADSQITTIGNLVPQKTYSVKVLAFTSIGDGPLSSDIQVITQTGVPGQPLNFKAEPESETSILLSWTPPRSDTIANYELVYKDGEHGEEQRITIEPGTSYRLQGLKPNSLYYFRLAARSPQGLGASTAEISARTMQSKPSAPPQDISCTSPSSTSILVSWQPPPVEKQNGIITEYSIKYTAVDGEDDKPHEILGIPSDTTKYLLEQLEKWTEYRITVTAHTDVGPGPESLSVLIRTNEDVPSGPPRKVEVEAVNSTSVKVSWRSPVPNKQHGQIRGYQVHYVRMENGEPKGQPMLKDVMLADAQDMIISGLQPETSYSLTVTAYTTKGDGARSKPKLVSTTGAVPGKPRLVINHTQMNTALIQWHPPVDTFGPLQGYRLKFGRKDMEPLTTLEFSEKEDHFTATDIHKGASYVFRLSARNKVGFGEEMVKEISIPEEVPTGFPQNLHSEGTTSTSVQLSWQPPVLAERNGIITKYTLLYRDINIPLLPMEQLIVPADTTMTLTGLKPDTTYDVKVRAHTSKGPGPYSPSVQFRTLPVDQVFAKNFHVKAVMKTSVLLSWEIPENYNSAMPFKILYDDGKMVEEVDGRATQKLIVNLKPEKSYSFVLTNRGNSAGGLQHRVTAKTAPDVLRTKPAFIGKTNLDGMITVQLPEVPANENIKGYYIIIVPLKKSRGKFIKPWESPDEMELDELLKEISRKRRSIRYGREVELKPYIAAHFDVLPTEFTLGDDKHYGGFTNKQLQSGQEYVFFVLAVMEHAESKMYATSPYSDPVVSMDLDPQPITDEEEGLIWVVGPVLAVVFIICIVIAILLYKRKRAESDSRKSSIPNNKEIPSHHPTDPVELRRLNFQTPGMASHPPIPILELADHIERLKANDNLKFSQEYESIDPGQQFTWEHSNLEVNKPKNRYANVIAYDHSRVLLSAIEGIPGSDYVNANYIDGYRKQNAYIATQGSLPETFGDFWRMIWEQRSATVVMMTKLEERSRVKCDQYWPSRGTETHGLVQVTLLDTVELATYCVRTFALYKNGSSEKREVRQFQFTAWPDHGVPEHPTPFLAFLRRVKTCNPPDAGPMVVHCSAGVGRTGCFIVIDAMLERIKHEKTVDIYGHVTLMRAQRNYMVQTEDQYIFIHDALLEAVTCGNTEVPARNLYAYIQKLTQIETGENVTGMELEFKRLASSKAHTSRFISANLPCNKFKNRLVNIMPYESTRVCLQPIRGVEGSDYINASFIDGYRQQKAYIATQGPLAETTEDFWRMLWEHNSTIVVMLTKLREMGREKCHQYWPAERSARYQYFVVDPMAEYNMPQYILREFKVTDARDGQSRTVRQFQFTDWPEQGVPKSGEGFIDFIGQVHKTKEQFGQDGPISVHCSAGVGRTGVFITLSIVLERMRYEGVVDIFQTVKMLRTQRPAMVQTEDQYQFSYRAALEYLGSFDHYAT

SEQ ID NO: 309497 - protein, 93 aa, Artificial Sequence
  derived and/or modified sequence
MVHVARLLLLLLTFFLRTDAETPPRFTRTPVDQTGVSGGVASFICQATGDPRPKIVWNKKGKKVSNQRFEVIEFDDGSGSVLRIQPLRTPRDE

SEQ ID NO: 309498 - DNA, 5673 bp, Artificial Sequence
  derived and/or modified sequence
atggtccacgttgctaggctgctcctgctgctacttacgttcttcctcagaacagacgcagagacgccacctaggttcacaaggacgccggtggatcaaaccggggtttccggcggagtggcgagcttcatctgccaagccaccggcgatcctagacccaagatcgtctggaacaagaagggcaaaaaggtcagcaatcaaagatttgaagtgatcgagtttgatgatggctcagggtcagtgctgcgtatccagcctctgaggacaccccgcgacgaagccatatatgagtgtgtggcatccaataacgtgggcgaaattagcgtttcaacacgcctgacagtcttgcgtgaagaccagattccccgtggatttcctaccatcgacatgggaccccagctgaaggttgtagaacggacgaggacagccaccatgctgtgcgcagcttcaggcaatcccgaccccgagataacttggttcaaggatttcctgcctgtcgacacctctaacaataatggcagaatcaaacagctaaggtcaggagctctccagatcgagcagtccgaagaaagtgatcaaggcaagtacgagtgcgtggctacaaattccgccggcacacgatattctgccccagctaatctctacgtgagggtgaggagagtcccgccaagattctctatccctccaacaaaccatgaaataatgccaggtgggagtgtaaatattacatgcgtcgccgtgggatcgcctatgccttatgtgaaatggatgctaggcgccgaggatctgacacccgaggacgatatgcccatcgggaggaatgtcctggagctcaacgacgttcgacagagtgcgaactacacgtgtgtagccatgtcaaccctcggagtcatagaggcaatcgcccagataacagttaaagccttgcctaagccaccgggtacacccgtggttacagagagtacggccacaagcataacacttacctgggattccggtaaccccgagcccgtgtcctattacattattcagcataaaccaaagaattcggaggagctctataaggaaatcgatggggttgccacaaccagatattctgtggccggactgtcaccttactccgattatgagttccgcgttgttgccgtgaacaacatcgggcgaggtccacctagtgaaccggtgctaacacagacatcggagcaggccccgtcgtctgccccgcgtgatgtccaagctcggatgctgtccagtacaaccatcttggttcagtggaaggaacctgaggagccaaatggccaaatccaggggtacagggtctattacactatggacccaactcagcatgtgaacaattggatgaagcacaacgttgctgactcccagatcactaccataggcaatctagttccccaaaaaacgtactcggtgaaagtgctggccttcaccagcatcggagacggtccactgtcaagtgacattcaggttattacacagacgggcgtgcccggtcaaccactcaacttcaaggccgagccagagtcagaaacttccatcctattgtcctggacgccaccaaggagtgacaccatcgcaaactatgagctagtctacaaagacggagaacacggcgaggaacaacgtattactatcgagccgggtactagctatcgactccaggggcttaaaccgaatagtttatattactttaggcttgctgcaaggtcacctcaaggtcttggagctagtactgcggagatatctgcacggacaatgcagtctaagcccagcgcccccccccaagatatctcatgtaccagccctagcagcacctccattttagtgtcttggcagcctcctcctgtggagaaacaaaatggcataattaccgagtatagcatcaaatacactgccgttgacggagaggatgacaagccacatgaaattcttggaattccaagcgatactaccaaatatttactagagcagttggagaagtggactgaatataggatcactgtgaccgcacacaccgatgtaggccccgggccggagtccctgtcagtcctgattcgcaccaatgaggacgtcccgagtggccctcctcgtaaggtggaagtggaggccgtgaacagcacctccgtgaaggtgagctggagatcacccgtgcccaacaaacagcatggccagatcaggggatatcaagtgcactatgttcgcatggagaatggcgagccaaagggacagccaatgctgaaggacgttatgcttgccgacgcacaggacatgatcattagtggtctccagcctgagaccagctattcattaactgttaccgcatacaccactaagggcgatggtgctaggtcaaaacctaagctcgtttctacaactggagccgtgcccggcaagccacggctggttatcaatcacacacagatgaataccgcccttatccaatggcacccccctgttgatacctttggcccactgcagggttatcgactgaagtttggcaggaaagatatggaacctctgaccacactggagttcagtgaaaaggaggatcatttcacagccacggacatccataagggggcctcctacgtcttccggctgagtgctaggaacaaagttggatttggcgaagaaatggtgaaggaaatcagtatccccgaggaagttccaacaggattcccgcagaaccttcattcagaaggcactacctcaacgagtgtacaactttcctggcagcccccagtgcttgctgagcgaaacggtatcatcactaaatatactctgttgtacagggacattaatatcccactgcttccaatggagcaattgattgttcccgccgacacaacaatgacgcttactggcctgaagcccgacaccacatatgacgtcaaggtgagggctcacacatccaaaggccctggtccatacagtcctagcgtgcaattccgcacgctgcctgtggaccaagtctttgcaaagaattttcatgtaaaggcggtgatgaagacgtccgtgctactcagctgggagatccccgaaaactacaactctgctatgccattcaaaatcctgtacgatgatggcaagatggtggaggaagtagatgggcgagccacacagaagctgatcgtgaatctcaagccagaaaaatcctactccttcgtgttgacaaacaggggtaacagcgctggagggctccagcacagagtcacggccaagacagccccagatgttctgcgtaccaagcctgctttcatcgggaagaccaacttagacggaatgatcactgtccagttgcccgaggttcccgcaaacgagaatatcaagggctattacattattattgtgcccctgaaaaagagtaggggaaagttcatcaaaccatgggaatcgcctgacgagatggaacttgatgagctgctaaaagagatttcccggaagagaaggtccattcggtatggtagagaggtggaactaaagccatacatagcagcacactttgacgttttacctactgagtttaccctgggagacgacaaacattacggcggcttcaccaacaagcagctgcagtccggccaagagtatgtattcttcgtgctcgccgtgatggagcatgcagagtccaagatgtatgctacttccccctactctgacccagtagtttccatggatctcgacccccaacctataactgatgaagaggaaggactgatctgggtcgtaggacctgtactggccgtggtgttcatcatttgcattgtgatcgcaatcctgctgtataagaggaagcgcgccgaaagtgattcccgaaagagttctatacctaacaacaaagagatacccagccaccaccccacggatcctgtggaacttagacgcttgaatttccagacccccggcatggcctcccaccctccaatcccaatcctggagctcgcagaccatattgagcggttgaaagctaacgataacctgaaattcagtcaggagtacgagtccatagatcccggacagcagttcacctgggaacactccaatttggaggtgaacaagcccaagaaccggtacgctaacgtgatagcttacgatcacagtcgagtcctgctttctgcaatcgaaggcataccaggatctgattatgtcaatgccaactatatcgatggctatcgaaagcagaatgcctacatcgccacacagggctctctgccagaaacctttggagacttctggaggatgatttgggagcagaggtccgcaaccgtcgtaatgatgacaaaactagaggagcgatcccgggtaaagtgcgatcagtactggcctagcagggggacagagactcacggacttgttcaagtcacacttttagataccgttgaactcgctacctactgcgtgcgcacattcgctttgtacaagaatggctcttccgagaagagggaggtccggcagttccagttcacagcttggcctgaccatggtgtgccggagcacccaactccattcctggcattcctccggagggtcaaaacctgcaaccccccggatgccgggccaatggttgtacactgttccgccggtgtaggccgcacgggatgcttcattgtgattgatgcaatgcttgaacgaataaagcacgagaagaccgtcgacatatacggacacgtgacactgatgagggcacagcggaattacatggtccagaccgaagatcagtacattttcattcacgatgccctgcttgaggcggtcacatgtggcaataccgaagtgccggcgcgtaacctgtacgcgtacattcagaaactgactcagatcgaaacaggcgaaaacgttacaggtatggagctggaattcaagcgacttgcatcctccaaagcccataccagtcggttcatctccgccaacctcccctgcaataagtttaagaacaggctggtgaacattatgccgtacgagtcaacacgggtctgtctccaacctattcggggtgtggaggggtcagactatattaatgcgtctttcatcgatggttacagacagcaaaaggcttatattgccacacagggaccactcgcagagactacagaagatttttggaggatgctttgggaacataattctacaattgtcgtgatgttaactaagctacgtgagatgggccgagagaaatgccatcaatactggcccgcagaaaggtccgcccgctatcagtatttcgtcgttgaccccatggctgagtacaatatgccccaatacatcttgcgcgaattcaaagtgaccgatgctagagacggtcaatcaagaaccgtgagacaatttcagtttactgattggccagagcaaggcgtccccaaatccggtgaaggctttatcgatttcatcggacaagttcacaaaaccaaggagcagttcggacaggacggccctatcagcgttcattgttcagctggagttggccgcaccggagtgtttattactctcagtattgtcctggagagaatgcggtacgagggggtggtggatattttccaaacagtgaagatgcttcgaacacagcgccccgctatggtccagacggaggaccaatatcagttttcttatagggccgccttggagtacctaggctccttcgaccattatgctacatag

SEQ ID NO: 309499 - DNA, 5673 bp, Artificial Sequence
  derived and/or modified sequence
atggtgcacgtggcccggctgctgctgctgctgctgaccttcttcctgaggacagatgctgagaccccaccccgcttcaccaggacccctgtggaccagacaggagtgtctggaggagtggccagcttcatctgccaggccaccggggacccccggcccaagatcgtgtggaacaagaagggcaagaaggtgagcaaccagagatttgaagtcatcgagtttgatgatggcagcggctctgtgctgcgcatccagcccctgcggaccccaagagatgaggccatctatgaatgtgtggccagcaacaacgtgggggagatctctgtgtccacccggctgactgtgctgcgggaggaccagatcccccggggcttccccaccatcgacatgggcccccagctgaaggtggtggagaggaccaggacagccaccatgctgtgtgccgccagcggcaacccagaccctgagatcacctggttcaaggacttcctgcctgtggacaccagcaacaacaacggccgcatcaagcagctgcggagcggggccctgcagatcgagcagagcgaggagagtgaccagggcaagtatgaatgtgtggccaccaacagcgctggcacccgctacagcgccccagccaacctgtatgtgcgggtgagaagagtgcccccacgcttcagcatcccccccaccaaccacgagatcatgcctgggggctctgtgaacatcacctgtgtggccgtgggcagccccatgccctacgtgaagtggatgctgggcgctgaggacctgaccccagaagatgacatgcccatcggcagaaatgtgctggagctgaatgatgtgcggcagagcgccaactacacctgtgtggccatgagcaccctgggcgtcatcgaggccatcgcccagatcaccgtgaaggccctgcccaagcccccaggcacccctgtggtgacagagagcacagccaccagcatcaccctgacctgggacagcggcaaccctgagcctgtgtcctactacatcatccagcacaagcccaagaacagcgaggagctgtacaaggagattgatggagtggccaccacccgctacagcgtggccggcctgagcccctacagcgactatgagttccgggtggtggccgtgaacaacatcggccggggcccccccagcgagcctgtgctgacccagaccagcgagcaggcccccagcagcgcccccagagatgtgcaggccaggatgctgagcagcaccaccatcctggtgcagtggaaggagcctgaggagcccaacggccagatccagggctacagagtgtactacaccatggaccccacccagcacgtgaacaactggatgaagcacaacgtggccgacagccagatcaccaccatcggcaacctggtgccccagaagacctacagcgtgaaggtgctggccttcaccagcattggagatggccccctgagcagtgacatccaggtgatcacccagacaggagtgcccggccagcccctgaacttcaaggccgagcctgagagcgagaccagcatcctgctgtcctggaccccacccaggagtgacaccatcgccaactatgagctggtgtacaaggatggagaacatggagaggagcagaggatcaccatcgagcccggcaccagctaccgcctgcagggcctgaagcccaacagcctgtactacttccggctggccgcccggagcccccagggcctgggcgccagcacagctgagatcagcgcccggaccatgcagagcaagcccagcgccccaccccaggacatcagctgcaccagccccagcagcaccagcatcctggtgtcctggcagcccccacctgtggagaagcagaatggcatcatcacagagtacagcatcaagtacacagctgtggatggagaagatgacaagccccatgagatcctgggcatccccagcgacaccaccaagtacctgctggagcagctggagaagtggacagagtaccgcatcaccgtgacagcccacacagatgtgggccctggccctgagagcctgtctgtgctgatccgcaccaatgaagatgtgcccagcggcccccccaggaaggtggaggtggaggccgtgaacagcacctctgtgaaggtgtcctggaggagccctgtgcccaacaagcagcacggccagatccggggctaccaggtgcactacgtgaggatggagaatggagagcccaagggccagcccatgctgaaggatgtgatgctggctgatgcccaggacatgatcatcagcggcctgcagcctgagaccagctacagcctgactgtgacagcctacaccaccaagggagatggagcccggagcaagcccaagctggtgtccaccaccggggctgtgcctgggaagccccggctggtgatcaaccacacccagatgaacacagccctgatccagtggcacccccctgtggacaccttcggccccctgcagggctaccgcctgaagtttggaaggaaggacatggagcccctgaccaccctggagttcagcgagaaggaggaccacttcaccgccacagacatccacaagggggccagctatgtgttccggctgagcgccaggaacaaggtgggctttggagaggagatggtgaaggagatcagcatccctgaggaggtgcccaccggcttcccccagaacctgcacagcgagggcaccaccagcacctctgtgcagctgtcctggcagccccctgtgctggccgagagaaatggcatcatcaccaagtacaccctgctgtacagagacatcaacatccccctgctgcccatggagcagctgattgtgcctgctgacaccaccatgaccctgaccggcctgaagccagacaccacctatgatgtgaaggtgcgggcccacaccagcaagggccctggcccctacagccccagcgtgcagttccgcaccctgcctgtggaccaggtgtttgccaagaacttccacgtgaaggctgtgatgaagacctctgtgctgctgtcctgggagatccctgagaactacaacagcgccatgcccttcaagatcctgtatgatgatggcaagatggtggaggaggtggatggccgggccacccagaagctgattgtgaacctgaagccagagaagagctacagctttgtgctgaccaacagaggcaacagcgctgggggcctgcagcaccgggtgacagccaagacagccccagatgtgctgcggaccaagccagccttcatcggcaagaccaacctggatggcatgatcaccgtgcagctgcctgaggtgcctgccaatgaaaacatcaagggctactacatcatcatcgtgcccctgaagaagagccggggcaagttcatcaagccctgggagagcccagatgagatggagctggatgagctgctgaaggagatcagcaggaagagaagaagcatccgctatggccgggaggtggagctgaagccctacatcgccgcccactttgatgtgctgcccacagagttcaccctgggagatgacaagcactatggaggcttcaccaacaagcagctgcagagcggccaggagtatgtgttctttgtgctggccgtgatggagcacgccgagagcaagatgtatgccaccagcccctacagcgaccctgtggtgtccatggacctggacccccagcccatcacagatgaggaggagggcctcatctgggtggtgggccctgtgctggccgtggtgttcatcatctgcatcgtgattgccatcctgctgtacaagaggaagagagctgagagtgacagcaggaagagcagcatccccaacaacaaggagatccccagccaccaccccacagatcctgtggagctgcggcggctgaacttccagaccccaggcatggccagccacccccccatccccatcctggagctggccgaccacatcgagcggctgaaggccaatgacaacctgaagttcagccaggagtatgagagcattgaccccggccagcagttcacctgggagcacagcaacctggaggtgaacaagcccaagaacagatatgccaacgtcatcgcctatgaccacagccgggtgctgctgagcgccatcgagggcatccctggcagtgactatgtgaatgccaactacattgatggctacaggaagcagaatgcctacatcgccacccagggcagcctgcctgagaccttcggggacttctggaggatgatctgggagcagaggtctgccaccgtggtgatgatgaccaagctggaggagaggagccgggtgaagtgtgaccagtactggcccagccggggcacagagacccacggcctggtgcaggtgaccctgctggacacagtggagctggccacctactgtgtgaggacctttgccctgtacaagaatggcagcagcgagaagcgggaggtgcggcagttccagttcaccgcctggccagaccacggcgtgcctgagcaccccacccccttcctggccttcctgcggcgggtgaagacctgcaaccccccagatgctggccccatggtggtgcactgcagcgctggggtgggccgcacaggctgcttcatcgtgattgatgccatgctggagcgcatcaagcatgagaagacagtggacatctacggccacgtgaccctgatgagggcccagaggaactacatggtgcagacagaggaccagtacatcttcatccatgatgccctgctggaggccgtgacctgtggcaacacagaggtgcctgccaggaacctgtatgcctacatccagaagctgacccagattgaaacaggagaaaatgtgacaggcatggagctggagttcaagaggctggccagcagcaaggcccacaccagccgcttcatcagcgccaacctgccctgcaacaagttcaagaaccggctggtgaacatcatgccctatgagagcaccagggtgtgcctgcagcccatccggggcgtggagggcagtgactacatcaatgccagcttcattgatggctaccggcagcagaaggcctacatcgccacccagggccccctggccgagaccacagaggacttctggaggatgctgtgggagcacaacagcaccatcgtggtgatgctgaccaagctgcgggagatgggccgggagaagtgccaccagtactggccagctgagaggtctgcccgctaccagtactttgtggtggaccccatggccgagtacaacatgccccagtacatcctgcgggagttcaaggtgacagatgccagagatggccagagcaggacagtgcggcagttccagttcacagactggccagagcagggcgtgcccaagagcggggagggcttcatcgacttcatcggccaggtgcacaagaccaaggagcagtttggccaggacggccccatctctgtgcactgcagcgctggggtgggccgcactggagtcttcatcaccctgagcatcgtgctggagaggatgagatatgagggcgtggtggacatcttccagacagtgaagatgctgcggacccagaggcctgccatggtgcagacagaggaccagtaccagttctcctacagagctgccctggagtacctgggcagctttgaccactacgccacctag

SEQ ID NO: 309500 - DNA, 5673 bp, Artificial Sequence
  derived and/or modified sequence
atggtgcacgtggcccggctgctgctgctgctgctgaccttcttcttacgaactgacgctgaaacccctcctagatttacacggacacccgtggaccaaaccggtgtgtctggcggggtagcctcctttatttgccaggctactggggatccaaggcctaagattgtgtggaataaaaagggaaaaaaagtcagcaaccaacgattcgaggtgattgagtttgacgacgggagtgggagcgttttgaggattcagccgctgcggactccaagggacgaagcgatttacgagtgcgtcgccagcaacaatgtgggggagatatccgtgtctactcggcttaccgttctgcgggaagaccagataccacgaggatttcccactatcgacatgggccctcagctgaaagtggttgagagaacccgcactgcaactatgttgtgcgctgcatctggaaaccccgaccccgagatcacttggtttaaagactttctgccggtggacacttcaaataacaatggcaggataaagcagctgaggtcaggagctttacagatagagcagtcagaggagagcgatcaaggcaagtatgaatgtgtggccacaaatagcgctggcactcgctacagcgcccccgctaatctgtacgtgcgtgttcgacgagtgccgccacggttctcaatacctccgactaatcatgagatcatgccaggagggagtgtcaacattacgtgcgtcgctgtcgggtctccgatgccatatgtgaagtggatgctgggcgcggaagacctcacacctgaggacgatatgccgattgggaggaacgttctggaactaaatgacgttcgacagtccgccaattacacttgtgtcgcaatgagcactctcggagtcatagaagctatagcacagatcaccgtcaaggccctacctaagccccctggtactccggtcgtgaccgagtcaacggcaacatccattacccttacttgggactctgggaacccagagcccgtcagctattacatcatccagcataagccgaagaattcagaggaactgtacaaagaaatcgacggagtggccaccaccagatactcagtagctgggctctcgccatattccgactatgagtttcgagtggtcgccgtaaataatatagggaggggccctcctagtgagccggtactgactcagacgtctgagcaagctccctccagcgcgcccagagacgtgcaggcccggatgctttcctctacgaccattctggtacaatggaaggagccggaagaaccaaatggccagatccaggggtacagggtgtactataccatggacccaactcagcacgtcaataactggatgaagcataatgttgccgactcccagatcaccaccatcggcaatctcgttcctcaaaagacttattcagttaaggttcttgcttttaccagcattggagatggacccttatcctcagacatccaggtgataacacagactggggttcccgggcagccactcaatttcaaagctgagccagagtccgagaccagtatacttctgtcgtggaccccacccagatctgatacaatagccaattacgagctggtctataaggacggagagcatggcgaggaacagcggatcacaatcgagccgggcacctcttatcgcctacaaggactcaaacccaattctctttattatttcaggctagccgcccgctctccacaaggcctcggcgcctcaacagccgaaatctcagcgagaacgatgcagagcaaaccgagtgccccgccgcaagacatcagttgtacaagcccttcatctacaagcattctggtctcttggcagcctccaccagttgaaaagcagaacgggatcattaccgaatacagcatcaaatataccgctgtggatggagaggacgacaagccgcacgaaatactgggcattccctctgacacgactaagtatttgctggagcagttagagaaatggaccgagtacaggataacagtcaccgcacataccgacgtgggaccaggccctgagagcctttctgtcctgattcgtacaaatgaggacgtcccaagcggccctcccaggaaagtggaagtggaggccgttaactctacatctgtgaaagtaagctggcgcagtcccgtccccaacaaacagcatggccagatccgagggtaccaagtgcactacgttcgaatggagaacggcgaacctaaggggcaaccaatgctcaaagatgtcatgcttgctgatgctcaggacatgataatcagcggactgcagcccgagactagttattccctaaccgtgaccgcctacactacgaaaggagatggagcccggagtaaacctaagctggtgagtacgactggggcagtacctggaaagccccggctcgttatcaatcatacccagatgaatacggctttaatacagtggcatcccccagttgacacatttggacccctgcagggctacagactgaaattcggccggaaggatatggaacctctcacgactctggaattcagtgagaaggaagaccactttactgctacggatatccataagggggcgtcatacgtgtttcgactcagtgccaggaacaaggtcgggttcggagaagagatggttaaggaaatttctatccccgaagaagtgcctactggtttcccacagaatctccattcagaggggactacaagcacctcagtgcagttgagttggcagccaccagtgctggcagaaaggaatggcatcattactaagtacaccttgctatatcgggacattaacatcccgcttctacccatggagcaattgatcgtccctgcagacacaactatgaccctgaccggcctaaaacccgacactacatatgatgtgaaagtcagggctcatacgtcaaaaggccccggcccgtattctcccagcgtgcagttccgaactctgcccgtggatcaggtctttgccaagaatttccatgtaaaagctgtgatgaagacgtcagtacttctgagctgggaaatccccgagaactataactcagccatgccgtttaaaatactgtacgatgacggaaagatggtggaggaggtcgatggccgggcgacgcagaaattaatagttaatctgaagcctgaaaagtcttactcgtttgtcctgaccaacagggggaacagtgccggtggactgcaacacagggtgacagccaagacagcccctgacgtactgcgaaccaagccagccttcataggcaagacgaatttggatggaatgattacggtccaactgccagaagttccagcgaacgagaacataaaggggtattacataatcatcgttccactgaagaagagtagaggcaaatttatcaaaccctgggaatctccagacgagatggagcttgacgagctcctgaaggagataagtagaaagagacgtagcatccgctatggccgagaggttgagctgaagccctacatagcagcccattttgacgtgctgcccaccgaattcaccctgggagacgataaacattacggcgggttcacaaataaacagttgcaatctgggcaggaatacgttttcttcgtgctggcagtgatggaacacgcagagtccaaaatgtatgcaacctctccgtattctgatcctgtggtgagcatggacctggacccacagcctattaccgatgaagaggaaggtctgatttgggttgtggggcccgtgctcgccgtcgtgtttatcatttgcattgtgatcgctatactactgtacaaacgtaagagggcagaatcggattcaagaaagagtagcatccccaacaataaggagattccatcacatcatcccacagaccctgtagagctccggaggttgaatttccagactccaggaatggcgtcccaccctcctattccaatactcgaactggcagaccacattgaacggcttaaggccaatgacaatctcaaattttcccaggagtatgagtccatcgaccctggtcagcagttcacatgggaacatagcaaccttgaggtgaacaaacctaaaaataggtatgcgaacgtcatcgcctatgatcactcacgtgtattgttatccgcaattgaaggtatcccagggagcgattatgtgaacgccaattacatcgacggataccgcaaacagaatgcgtatatcgcaactcagggtagcctccccgagactttcggcgacttttggagaatgatatgggagcagaggtcagcaacagtggtcatgatgaccaaactggaagaacgttcaagggttaagtgtgaccagtactggccctctaggggcaccgagacgcatggcctagtgcaggttacccttctggacactgttgagcttgctacctactgtgtgcgtacattcgcactttataaaaatggatcgtctgaaaagcgagaggtccgtcaatttcagttcaccgcctggcccgatcacggagtgccagagcacccaacaccttttctggccttcctacgaagagtcaagacctgtaaccctcctgacgccggccccatggtcgtccactgctccgctggggtcgggcgaactgggtgctttatcgtcatagacgctatgctggagagaataaagcacgagaagaccgtggatatctacggtcatgtgacactcatgcgggctcaaagaaattacatggtgcagaccgaggaccagtacatcttcatccacgacgcactgcttgaggcagtgacctgtggaaacaccgaagtgccagcgcgaaacctgtacgcttacattcaaaaactcacacagattgaaacaggagaaaacgtgacaggaatggaattagaattcaaaagactggcctccagcaaggcacataccagcagatttatctccgctaacctgccttgcaacaagtttaagaatcggctggttaatatcatgccttacgaaagtacccgggtctgtctccagccgatcaggggagtggagggatcagattacattaacgcaagcttcattgatggataccgccagcagaaggcatacatcgctactcaagggccattggccgagacaacagaagatttttggcgaatgctgtgggagcacaacagtacaatagtggttatgttgacgaaactgagagagatgggccgggaaaaatgtcatcaatactggcctgccgagagaagcgcgaggtatcaatactttgtggtcgaccccatggcagagtacaatatgccacagtatatcctgagggagttcaaggtgaccgatgccagggatggtcagtcaagaacagtcaggcagttccagttcactgactggccggagcaaggagttccgaaatccggcgaagggttcatcgactttattggtcaggtccacaagaccaaagagcagtttggccaagacggtcctatctctgtgcattgttcagcaggcgttgggcgtacaggcgtctttattacattgtcaattgtccttgaaaggatgaggtacgaaggggtagtggacatcttccaaaccgtcaagatgctgcgcacccagcgccctgccatggtccaaaccgaggaccagtaccagttcagctaccgggccgcccttgaatacctcgggagtttcgaccactatgccacttag

SEQ ID NO: 309501 - DNA, 5672 bp, Artificial Sequence
  derived and/or modified sequence
atggtgcacgtagcacggctgttactgctgctccttaccttctttctgagaacagatgccgagacccctccacgttttactcgaacccccgtggaccagaccggggtttcaggaggtgtggctagctttatttgccaagccactggagatccgaggccaaagattgtatggaacaaaaagggcaaaaaggtgtccaatcagagattcgaggttatcgagttcgacgatggttcaggtagcgttcttcggatccagcccttaagaactccacgggacgaggccatttatgagtgcgtcgcctcaaataacgttggggaaattagcgtctccacccgactcacggtgctcagagaagatcaaattccccgaggcttccccacgatcgacatgggcccacagctgaaggtcgtggagagaacccgcaccgccactatgctgtgtgctgcctcggggaatcccgaccccgaaattacctggtttaaggacttcctgcccgtcgatacctcaaacaataatggacgcattaagcagctaagatccggcgcacttcagatcgaacagagcgaagagagcgatcagggaaaatatgagtgtgttgctactaacagcgccggtactcgctattccgccccagcaaatctgtatgtgagggtgcggcgtgtgccacctagattctccattccacccactaaccacgagataatgcctggaggttcagtcaatattacttgtgttgcggtggggtccccaatgccatacgtgaagtggatgctcggagctgaagatcttacaccagaagacgatatgccaatcggcagaaacgtactggaactgaacgatgtacggcagagcgccaattatacatgtgtcgcgatgtctactttaggtgtaattgaggcaatcgcccaaattactgtaaaggcccttcccaagcctccgggtactcccgtcgtgaccgagtcaacagctacctccatcacacttacatgggattctgggaaccccgaacccgtctcatattacataatccaacacaagcccaagaacagtgaggagctctacaaggagatcgacggcgtcgcgacgacacggtacagtgtagcgggtctgtccccctactccgactatgagttccgtgttgtcgccgttaacaatatcggcaggggccctccgtccgagcccgtgcttacccaaacaagtgagcaagccccttcttcagcgcctcgagatgtacaggctcggatgctgtcatcaaccacgattctcgtgcagtggaaagaacctgaagaacccaacggccagatacaggggtaccgggtgtactacaccatggatcctacccagcatgtgaacaactggatgaaacacaatgtggccgacagccagattaccaccatcggcaatttagttcctcagaagacttacagcgtcaaggtgctggccttcacttcgattggagacggccctctgtcttccgacatacaggtcattacacagaccggcgtgccagggcagccgttgaactttaaagctgagcccgaatctgaaacctcgatacttctgagctggactcctccacgaagtgacaccatcgccaattacgaactagtctataaggacggcgagcacggcgaagagcagcggatcactattgaaccaggcaccagctataggttgcagggtttgaagccaaattctctgtattacttccgccttgcagccaggtctccccagggactcggggcatcaacagcagagatatcagctaggacgatgcagagcaagccaagcgccccaccccaggacatcagttgtacatctccatcgagcaccagcatcctggtttcctggcagcccccacccgtggagaaacagaacgggatcatcaccgagtactctatcaaatatacggccgtggacggagaggacgataagccgcatgaaattctaggcattccttctgacactacgaaatacttacttgagcagctggaaaaatggactgagtatcgtatcactgtcaccgcccatacagatgtgggcccagggccagagagcctatctgttcttatcaggacgaatgaagacgtcccctctggaccccctcggaaggtcgaagtcgaggccgtaaattccacaagcgttaaagtgtcctggcggagtccagtgcctaataagcaacatggacagattcgcggttatcaggtgcattacgttaggatggagaatggcgagccaaaaggccaacccatgctgaaggacgtgatgctggcggacgcccaagacatgattatatctggcctgcagccagaaacatcctactctctgacagttaccgcctacaccacgaaaggggatggggcaagatctaaacctaaactggtctcgaccaccggcgcagtgccgggtaagcccaggcttgtgatcaatcacacacagatgaatactgccctgattcagtggcacccaccggtcgataccttcggcccactgcagggctatcgcctgaaatttggcagaaaagacatggagcctctcacaacactggagttctccgagaaggaagaccacttcacggccaccgatatccataagggcgcatcttacgttttcagactctcggccagaaataaggttggttttggcgaagaaatggtgaaggagatctcgatccctgaggaagtccccaccggtttcccacagaatttgcacagtgagggaacaaccagcaccagcgtgcaactgagctggcagccacctgtgctggccgagcgtaacggcattataacaaaatatacccttctgtatagagacatcaatattccactgcttcccatggagcaactcattgtgccagccgacaccaccatgaccctgaccgggctgaaacctgacacaacctacgatgtcaaggtgagggctcacacgtccaaggggccaggcccatactctccctctgtgcagtttaggacactgcctgtcgaccaggtcttcgccaaaaacttccatgtcaaggccgtcatgaagacctcggtgttgctctcatgggagatccctgaaaactataatagcgctatgccattcaagatcttgtatgacgacggcaagatggttgaggaagtggatggcagagccacccagaaattgatcgttaatctgaagcctgagaaaagctactcgtttgtcttaaccaatcgaggcaactccgccggtggcctgcaacaccgggtgactgctaaaactgcacctgacgtgcttcgcactaaacccgctttcatcggcaaaacgaacttagacggcatgattaccgtccaactgccagaagtgccagccaacgaaaacatcaaaggatattacattatcattgtccccctaaaaaaatcccgcggaaagttcatcaaaccttgggagagtccggatgaaatggagcttgacgagctactgaaagagatcagccgaaagcgcaggtccatcagatacggcagagaagtcgaattaaaaccctacatcgctgcccattttgacgtactcccaactgagtttacccttggcgacgataagcattacgggggattcaccaacaaacaactgcaatcaggacaggagtatgtgttcttcgtcttggctgtgatggagcatgcagagagcaaaatgtatgcaacctcgccctattccgaccctgtggtgagcatggatctagacccacagcccattaccgatgaagaggaggggctaatctgggttgttggacctgtcctcgccgtggtcttcataatctgcatcgtcatcgctatcttattgtacaagaggaaaagagcagagagtgattctcgtaagagcagcatacccaataacaaggaaataccgagccaccaccctactgatccagtggagctaaggcggcttaattttcaaaccccgggtatggccagccacccacctatccctatcctggaattagccgatcacatcgaacgtctgaaagccaacgataatctcaaatttagccaagaatatgagtctattgaccctggtcaacagttcacttgggagcatagcaatctcgaggtcaacaaacccaaaaacagatacgctaatgtgatcgcctatgaccatagcagggtgctgttgtcggccattgagggcatcccgggatctgactacgtcaacgccaactacattgacggttatcggaagcagaatgcttacattgctacacaggggagcctgcctgagacatttggggacttttggcgcatgatatgggagcagcgatcggctacagttgtcatgatgaccaagctggaagagcggagcagggtgaaatgcgaccagtactggccaagtagagggaccgaaactcacgggctggtacaggtcactcttctggacactgtagaactggccacatactgtgtgcgcaccttcgctctctataagaacggcagcagtgagaaacgggaggtgcgccagttccaattcactgcctggcctgatcatggtgtccccgagcatccgactcccttcctggcatttcttcgccgagtgaaaacttgtaaccctccggatgcgggaccaatggttgtacactgctcagccggtgttggcagaaccgggtgtttcattgtcattgacgccatgttggaaagaattaagcacgagaagaccgtggacatttacggccacgtgacacttatgagggctcagcgcaattacatggtacagacagaggatcagtatatttttattcacgatgccctcctcgaagcagtcacctgtggtaatactgaagttccagcccgtaacctctacgcctatatccagaagctgacccagatagaaaccggagaaaatgtaacaggcatggagctggagttcaagagactagcaagctctaaggctcatacttctcggttcatatcagccaatttaccttgcaataagttcaaaaatagactcgtgaatattatgccatacgaatccacacgtgtatgtctgcaacctatacgcggagttgaggggtccgattacattaatgccagtttcatcgatggatatcggcagcagaaagcatacatcgccacccagggccctctggccgagacaacagaagacttttggcgcatgctttgggagcataacagtacaatagttgtgatgctcacaaaacttagggaaatggggagggaaaagtgtcaccaatattggcctgccgagaggtcagccaggtatcagtattttgttgttgatccaatggcagagtacaacatgccgcaatacattcttagggagtttaaagttacagatgccagggacggccagagccggactgtccgccagtttcagttcacagattggcccgagcagggggtgccaaagtctggagaggggtttattgatttcatcggtcaggtccacaaaactaaggaacagttcggacaggatggccctataagcgtccattgttcagccggagtagggagaactggtgtgtttattacattgagcatcgtgcttgagcgcatgcggtacgaaggggtagtggatatcttccaaacagtgaagatgttaaggactcagcgacctgccatggttcagaccgaggatcagtaccagttttcatatcgagccgctctcgaatatttaggctctttcgaccactacgcaaccta

SEQ ID NO: 309502 - DNA, 9403 bp, Artificial Sequence
  derived and/or modified sequence
gctctgaaagtgttccagctgaaatttcagatcggacagactcgctgcggctccggaggcagtgattccaagctgctcgcgcacgctgctgccaagctgcaggatggtgcacgtagccaggctgctgctgctgctcctcactttcttcctccgcacggatgctgagacacctccaaggtttacacgaacacccgttgatcagacaggggtctctggcggagttgcctctttcatctgccaagctacgggagacccaagacctaaaattgtctggaacaaaaaaggaaagaaagtcagcaatcagagatttgaggtaatagagtttgacgatgggtctggatcagttctcagaatacaacccttacggactccgagggatgaggccatttatgaatgtgtggcctcaaataatgtgggagaaataagtgtatccaccagactcacagttttgcgggaagatcaaattcccaggggcttccctaccattgacatgggcccacagttgaaggtggttgagcgtactcgcacggccaccatgctttgtgcagccagtggtaatccggatccagaaatcacttggtttaaagatttcttacctgtggacacaagcaacaacaatggtcgtattaagcagttacgatcaggagcccttcagattgagcagagtgaagagtctgaccaaggaaaatatgagtgtgttgccaccaacagcgcgggcactcgctattccgctcctgccaatttatatgtcagagttcgccgtgtcccaccaagattctctatcccacccactaatcatgaaatcatgccaggcggaagcgttaatatcacctgtgtggccgtggggtcaccaatgccttatgtaaagtggatgttgggggcagaagatctgacacctgaagatgatatgccaataggaagaaatgtgctagaactgaatgatgtaagacagtcagcaaattacacctgtgttgctatgtcaacactgggtgtcattgaagcaatagcacagatcactgtcaaagccttacccaaacctccaggaactcctgtagtgaccgagagcacagctacaagcatcacactgacgtgggactctgggaaccctgagcctgtttcttattacataattcagcataaacctaaaaactctgaggaactttacaaagaaattgatggggtggcgaccacacgctacagtgtcgctggactaagtccctactcggattatgaattcagggttgttgctgtcaataacattgggcgggggcctcccagcgaacctgtgctaacacaaacctcagagcaagcaccatccagtgccccgagggatgtccaggcacgaatgttgagttcgaccaccattttggtacagtggaaggaacctgaagagccaaatggacagatccaaggatatagagtttattatacaatggatcccactcaacatgtcaacaactggatgaaacacaatgtagctgacagccaaatcactactattggcaacttagtgccccagaaaacatattctgtcaaagtcctggcttttacctcaattggagatggtcccctttcaagtgacatacaagtcatcactcagacaggagtaccagggcagccactaaacttcaaagcagaacctgagtctgaaacaagtattttgctctcttggacacctccacgttcagataccattgccaactatgaactggtctacaaagatggggagcatggagaggagcaacgaattaccattgagccagggacatcatataggctgcaaggactgaaaccaaacagcttatactatttccgtctggctgcacgctcccctcaaggcctgggtgcttctactgcagaaatatcagctagaaccatgcagtcaaagccgtcagctcctcctcaagacattagttgcaccagcccaagttccactagtattttggtaagttggcaacctccaccagtggaaaaacagaatggcattatcactgaatactccatcaagtacactgcagtggatggggaagatgacaagcctcacgagattttgggaattccttcggacactaccaaataccttttggaacagctggaaaaatggactgaataccggatcactgtgacagcccatacagatgtcggccctggccctgagagcttgtccgtgttgattcgaaccaatgaagatgttcctagtggtcctcctcgcaaagtcgaggtagaggctgtcaactcaacatctgttaaagtctcatggcgctcacccgtgcccaataaacagcatggccagataagaggatatcaggtgcattatgtgaggatggaaaatggtgagcccaagggccagcccatgctgaaagatgtcatgctggctgatgcacaggacatgatcatttctgggctccagcctgaaacttcctactccctcaccgtcacagcctacacaaccaaaggagatggtgctcgcagcaagcccaaactggtgtccaccactggggcagttccagggaaacctcggcttgtgattaaccacactcagatgaatactgctcttattcagtggcaccctccggtggacacatttggacctcttcagggctaccgtctaaaatttggccgcaaggatatggagccacttactactcttgagttctctgaaaaagaagatcactttacagctacagacatccacaagggagcatcatacgtcttcaggctctcagccagaaacaaagtgggctttggggaggagatggtgaaggagatttccattccagaagaagtaccaactggattccctcaaaaccttcactcagaaggcaccacttcaacctccgtccagttatcttggcaaccacctgtcctggcagagagaaatggcattatcaccaagtatacccttctttatagggatatcaacatcccccttctcccgatggagcagcttattgttccagctgacaccactatgacactcactggcttaaaaccagataccacatacgatgtaaaagtacgtgctcatacgagcaaagggcccgggccatatagtcccagtgtccagttcaggacactgcctgtggatcaagtgtttgcaaaaaattttcatgtcaaagcagtaatgaagacttccgtgttgctgtcttgggagattccagagaattataactccgccatgcctttcaaaattctttatgatgatgggaaaatggtagaagaagtggatggccgagccacacagaagttaattgtcaacctgaagcctgagaaatcatattcatttgtgctgacaaatcgtggaaacagtgctggtgggctgcagcacagggtcacggcaaagactgcaccagatgtattacgtaccaagcctgccttcattgggaagaccaacttggatggcatgattactgtgcaactgcctgaagtacctgcaaatgagaatataaaaggttactacataataattgtgcctttgaagaaatctcgcgggaaatttatcaagccatgggagagtccagatgaaatggaattagatgagctgcttaaggagatatctaggaagcgcagaagcatccgttatgggagagaagttgaattaaagccatatattgccgctcactttgatgtccttcccactgagttcaccctgggggatgacaagcattatggtggatttacaaacaagcaactccaaagtggtcaagaatatgtcttctttgtgttagcagtaatggaacatgcagagtctaagatgtatgcaaccagcccttactccgaccccgtggtgtcaatggatctggatccgcagccaatcacggatgaagaagaaggcttgatctgggttgtaggtcctgtccttgcagtggtctttatcatctgcattgtcattgctattcttctttataaaaggaagagggcagagtccgactctagaaaaagcagcataccgaacaataaggagatcccttcacaccacccaacagaccctgtagaactgaggcgccttaactttcaaacaccgggtatggctagccatcctccaatacccatcttggaacttgcagaccacattgaaagattgaaagcaaatgacaacttgaagttttcccaggaatatgagtcaattgaccctggccagcagttcacttgggaacattcaaacttggaagtaaacaaaccaaagaatagatacgcgaatgtaatcgcatatgatcattcccgggttctcctatcagctatagaagggatcccaggaagtgactatgtgaatgccaactacatagatgggtataggaagcaaaatgcctatattgcaacacagggatctctccccgaaacatttggggacttttggagaatgatatgggaacaacggagtgccacagttgtcatgatgacaaaactagaagaaagatcaagggtgaagtgtgaccagtattggcctagcagaggcacagaaacccacggactcgttcaagtaacgctgcttgatactgtggagctggccacatattgtgttcgaacatttgcactttacaagaatggttcaagtgagaagagagaagtgagacaattccagttcaccgcctggcctgatcatggtgttccagaacaccctacaccttttctagctttcttacgtagagtcaaaacctgtaaccctcccgatgctggtccgatggttgtgcactgcagtgcgggagttggccggactggttgcttcatcgtcatagatgccatgttagaaagaataaagcatgaaaaaactgtagatatttatggccatgtaactttaatgagagcccagaggaactatatggttcaaacagaagaccaatacatctttatccatgatgcactgttagaagcagtgacttgtggaaataccgaagtgccagctagaaacttgtatgcctacattcagaagctgacacaaatagaaacgggagagaatgtcacaggaatggagctcgaatttaagcgtctagccagctcaaaagctcacacctcaaggtttatcagtgccaatcttccatgtaataaattcaaaaatcgccttgttaatattatgccatatgaatccacaagggtatgcctgcagcctatccgtggagtagaaggatctgattacatcaatgccagttttattgatggatacagacaacagaaagcctacatcgctacccaggggcccttggcagagaccactgaagacttctggcggatgctctgggaacacaattccaccatagttgtgatgctcaccaagctgcgtgaaatgggcagagagaaatgtcaccaatactggccagcagaacggtctgcaagataccagtactttgttgtagatcccatggctgagtacaacatgccacagtatatcctaagggaattcaaggtcacagatgccagggacggccagtcccgaacagtaaggcagttccagttcactgactggccagagcaaggagtgccaaagtccggagaaggatttattgacttcatcggccaagtccataaaacaaaagaacagtttggccaagatggacccatttcagtccattgcagcgcgggcgttggaagaactggagtcttcataacgctaagcattgttttggaaagaatgagatatgaaggagttgtagatatcttccagactgtcaaaatgttaagaacacaacgaccagctatggtacagacagaggatcaatatcagttttcctatcgtgccgcactagagtacctgggcagctttgaccactatgcaacgtagaaacccctgacccattctggatttttactacaggcccttcaatatccatggagtctcttctgagccatacagggcacttgagaagtccttcttaacttctagctaacaactacttagtgggactattacacacaaaacaaattaaaaacaaattattccaggtggaccaagaattcacagtttaataatctaacctgaaaaataatgaagagaatcctgactgatgaggcatctgaaggattttatttacagatacctcaaggattcaaaatcaagggaagaagaaatcacagcaaagaaccaccatcttattcaggattgcttgaaaggtgcaaggagaaattgccagaatgctgcagttcagcacaagatatgtgctggtgtggcttctcacaatgaaacggactctgctttgacatcgccccttcccaccatactgctcataataacattttagggggaaaggggagggaatgtttaaaaagaaagtccttgatttagttttttagtattgtaaagatactgctgacctgtgcttcatttctaactgtgtaaacttttttttaacaaaatgtatcattcgataaagtgaattttaaaaaagttacataactcttcatttttttatttccaaatcgtaggtttttttaagctgtagaactgttatctgtaatatcttgctgtagaaatatcaaatcatttgaaaatttgcacatttttgtgcaaaactcaatctacagtatcagtctcgtcagatatattaattttacacttcagttttgattggtgagaaagtacccattctcttcaaataatcaaagataattattattttgttttgtttttggaatcaacagggaggcgcaaagtataaagttgctgctaacatatatacatatatatccatattttataagggtgtctatgtatatatagacagtgtgtccacacaaaaaatagatacagttatcagtcagtcagttcttccatgatttagtttttttaaacgtagaaaagctattgtaaacatctctttccatttattcttaattttttgacatattggtatttctttaaagggaaatgaggaatgcacatcagtgattgattgtcaaacctcaccccctgatttcctacctaatctacccccacctaaccaatcaatcacatccacaaattgttttgtttgtttgttagtcaggcttccaacaaagttcaatatttctaacactctagtgcaataaaaattattattaaatagctaagaggtgtgcatgtgggaaaggtcagtgcatatccctttaggaggggagaatgttgtaatatatcagctatcgagttgtttaaaaaaagtgtattcaatcgtatattgtctatagtatgtgctatgaaatttgcatttatgatatgtaacaggggcaaagccaaattcatgttactctgttcagtcagaaacattttgtggcatacagcattcctgggaagtgctgtactttgtttcgttttggttttagttttgcatttagagtgccttataattgatgcctattttaatagcatttctttttagcttttggttcgtatttccattcactgttcgtatctgttactttctattaaagcattatctgtttaccacatgtacaaaaactctttgaataatatgcattcctagttttcagccaagtcggggatgttagtgattgtaccagcccaaagcacttggataatcagggcccttcttccttttataatcaatcatcaacatcagaaaaagctacttgttttatttatattcccttccaaatccgctctggaacatgcagtaactgcaccaaacttattttagtaacaaatatcattggcaactttggaatatatttgatattccattaggatttttctaaaaggggaaataaactatatatatatatgtatcttacccccaattcttccaacagaatttctataggaagccatggatgatggcataagtttgccacatattacatgattttaaataatcctcaaaatacccaaggaactcttaaagagttttggtatgagtatactactttggtttaattttagcttcatggatgttctgcatggaaggatttttgttttccacattttcccattgctagcagagtgaaatccaagagaccaaacatttgcaagcattgtatttgagcacttttgtaaaaaacaaagaaaaagaaaaaaaagaaaatatatataatactaaaaaaaagtatctagaaggctacctcagaatgagactctctaacctacatcagaaccagagaagaatgtgcactatgtgggtctgttatcattattttcttttagtttgtatctttttggagatttatccaagtgccagattactcagtgctataattttcttttagttaaacaaagggggtcagacagacattgcatcatccagacatgccttgttggacatgtagaatccgatggagcactgcacaccagaatgattggccaatgagcagcttctctccctgaaacaataactgcccatttggcaaagggaaagatgacaataatcagaagaagaaaatgaatgggatgcataccatagacgaacgaggcggagactattgcgggaatcttactgttcaggagctgttcctagaactaactcccttactgtcattgatgtgcattccactctgtgcttttctgtacaaccattcaagttttaatttcccaggtgaaccatctttatctgccattaccacaagctttcaagtttccagttattttcatcatcataaccagtacggtgctattatttacctatgtacgtgtagttatgtataattttgtaattagttacaatggtaaaaaaaatcaaaatatataaaaagtgatttgtacagaactttattttagctcttttttaaaaatgatttgcatggttagaaaacggcgaggacagccaggggagggaagggcctctagggaactttgcactttctatacctttgtactatgcactgccctattgattctacacccaataatgatattacttgaacccatctgtaagaaactgcttcggaaattcatttgtgtgtatgtaaataacacaacatagaaacaggaagggaaaaaagtctgcagtaatgcacgtattttttttctttcctgtttattttcggttttgctttaagtccttttatttttaattccctttttgtttttctttttgggttttggttccttttgggtttatgggtgccctgatactccagcagagatcagaaggctacagatccattctatccatccgttatgtggctttgccatcccagcttggagtgtctttacaaagataataacagttgtgttctttgctctcgttttggatgcatagactgaaaaattaaaacaaataacttgtaaaatggcttgttaaaaaatacaattacctctaattagtagtacgcgtaaatgttttacagaatgaaaggcgtgctttttattttcttacttcgttacattggtggcgaaagaagtctgtatgaaaatcagttctttgctgacacaagttccatttgttacaaatgaattctaataaaaatgtcagtgttatgc

SEQ ID NO: 309503 - DNA, 5673 bp, Artificial Sequence
  derived and/or modified sequence
atggtgcacgtggccagactgctgctgctgctgctgaccttcttcctgagaaccgacgccgagaccccccccagattcaccagaacccccgtggaccagaccggcgtgagcggcggcgtggccagcttcatctgccaggccaccggcgaccccagacccaagatcgtgtggaacaagaagggcaagaaggtgagcaaccagagattcgaggtgatcgagttcgacgacggcagcggcagcgtgctgagaatccagcccctgagaacccccagagacgaggccatctacgagtgcgtggccagcaacaacgtgggcgagatcagcgtgagcaccagactgaccgtgctgagagaggaccagatccccagaggcttccccaccatcgacatgggcccccagctgaaggtggtggagagaaccagaaccgccaccatgctgtgcgccgccagcggcaaccccgaccccgagatcacctggttcaaggacttcctgcccgtggacaccagcaacaacaacggcagaatcaagcagctgagaagcggcgccctgcagatcgagcagagcgaggagagcgaccagggcaagtacgagtgcgtggccaccaacagcgccggcaccagatacagcgcccccgccaacctgtacgtgagagtgagaagagtgccccccagattcagcatcccccccaccaaccacgagatcatgcccggcggcagcgtgaacatcacctgcgtggccgtgggcagccccatgccctacgtgaagtggatgctgggcgccgaggacctgacccccgaggacgacatgcccatcggcagaaacgtgctggagctgaacgacgtgagacagagcgccaactacacctgcgtggccatgagcaccctgggcgtgatcgaggccatcgcccagatcaccgtgaaggccctgcccaagccccccggcacccccgtggtgaccgagagcaccgccaccagcatcaccctgacctgggacagcggcaaccccgagcccgtgagctactacatcatccagcacaagcccaagaacagcgaggagctgtacaaggagatcgacggcgtggccaccaccagatacagcgtggccggcctgagcccctacagcgactacgagttcagagtggtggccgtgaacaacatcggcagaggcccccccagcgagcccgtgctgacccagaccagcgagcaggcccccagcagcgcccccagagacgtgcaggccagaatgctgagcagcaccaccatcctggtgcagtggaaggagcccgaggagcccaacggccagatccagggctacagagtgtactacaccatggaccccacccagcacgtgaacaactggatgaagcacaacgtggccgacagccagatcaccaccatcggcaacctggtgccccagaagacctacagcgtgaaggtgctggccttcaccagcatcggcgacggccccctgagcagcgacatccaggtgatcacccagaccggcgtgcccggccagcccctgaacttcaaggccgagcccgagagcgagaccagcatcctgctgagctggaccccccccagaagcgacaccatcgccaactacgagctggtgtacaaggacggcgagcacggcgaggagcagagaatcaccatcgagcccggcaccagctacagactgcagggcctgaagcccaacagcctgtactacttcagactggccgccagaagcccccagggcctgggcgccagcaccgccgagatcagcgccagaaccatgcagagcaagcccagcgcccccccccaggacatcagctgcaccagccccagcagcaccagcatcctggtgagctggcagcccccccccgtggagaagcagaacggcatcatcaccgagtacagcatcaagtacaccgccgtggacggcgaggacgacaagccccacgagatcctgggcatccccagcgacaccaccaagtacctgctggagcagctggagaagtggaccgagtacagaatcaccgtgaccgcccacaccgacgtgggccccggccccgagagcctgagcgtgctgatcagaaccaacgaggacgtgcccagcggcccccccagaaaggtggaggtggaggccgtgaacagcaccagcgtgaaggtgagctggagaagccccgtgcccaacaagcagcacggccagatcagaggctaccaggtgcactacgtgagaatggagaacggcgagcccaagggccagcccatgctgaaggacgtgatgctggccgacgcccaggacatgatcatcagcggcctgcagcccgagaccagctacagcctgaccgtgaccgcctacaccaccaagggcgacggcgccagaagcaagcccaagctggtgagcaccaccggcgccgtgcccggcaagcccagactggtgatcaaccacacccagatgaacaccgccctgatccagtggcacccccccgtggacaccttcggccccctgcagggctacagactgaagttcggcagaaaggacatggagcccctgaccaccctggagttcagcgagaaggaggaccacttcaccgccaccgacatccacaagggcgccagctacgtgttcagactgagcgccagaaacaaggtgggcttcggcgaggagatggtgaaggagatcagcatccccgaggaggtgcccaccggcttcccccagaacctgcacagcgagggcaccaccagcaccagcgtgcagctgagctggcagccccccgtgctggccgagagaaacggcatcatcaccaagtacaccctgctgtacagagacatcaacatccccctgctgcccatggagcagctgatcgtgcccgccgacaccaccatgaccctgaccggcctgaagcccgacaccacctacgacgtgaaggtgagagcccacaccagcaagggccccggcccctacagccccagcgtgcagttcagaaccctgcccgtggaccaggtgttcgccaagaacttccacgtgaaggccgtgatgaagaccagcgtgctgctgagctgggagatccccgagaactacaacagcgccatgcccttcaagatcctgtacgacgacggcaagatggtggaggaggtggacggcagagccacccagaagctgatcgtgaacctgaagcccgagaagagctacagcttcgtgctgaccaacagaggcaacagcgccggcggcctgcagcacagagtgaccgccaagaccgcccccgacgtgctgagaaccaagcccgccttcatcggcaagaccaacctggacggcatgatcaccgtgcagctgcccgaggtgcccgccaacgagaacatcaagggctactacatcatcatcgtgcccctgaagaagagcagaggcaagttcatcaagccctgggagagccccgacgagatggagctggacgagctgctgaaggagatcagcagaaagagaagaagcatcagatacggcagagaggtggagctgaagccctacatcgccgcccacttcgacgtgctgcccaccgagttcaccctgggcgacgacaagcactacggcggcttcaccaacaagcagctgcagagcggccaggagtacgtgttcttcgtgctggccgtgatggagcacgccgagagcaagatgtacgccaccagcccctacagcgaccccgtggtgagcatggacctggacccccagcccatcaccgacgaggaggagggcctgatctgggtggtgggccccgtgctggccgtggtgttcatcatctgcatcgtgatcgccatcctgctgtacaagagaaagagagccgagagcgacagcagaaagagcagcatccccaacaacaaggagatccccagccaccaccccaccgaccccgtggagctgagaagactgaacttccagacccccggcatggccagccacccccccatccccatcctggagctggccgaccacatcgagagactgaaggccaacgacaacctgaagttcagccaggagtacgagagcatcgaccccggccagcagttcacctgggagcacagcaacctggaggtgaacaagcccaagaacagatacgccaacgtgatcgcctacgaccacagcagagtgctgctgagcgccatcgagggcatccccggcagcgactacgtgaacgccaactacatcgacggctacagaaagcagaacgcctacatcgccacccagggcagcctgcccgagaccttcggcgacttctggagaatgatctgggagcagagaagcgccaccgtggtgatgatgaccaagctggaggagagaagcagagtgaagtgcgaccagtactggcccagcagaggcaccgagacccacggcctggtgcaggtgaccctgctggacaccgtggagctggccacctactgcgtgagaaccttcgccctgtacaagaacggcagcagcgagaagagagaggtgagacagttccagttcaccgcctggcccgaccacggcgtgcccgagcaccccacccccttcctggccttcctgagaagagtgaagacctgcaacccccccgacgccggccccatggtggtgcactgcagcgccggcgtgggcagaaccggctgcttcatcgtgatcgacgccatgctggagagaatcaagcacgagaagaccgtggacatctacggccacgtgaccctgatgagagcccagagaaactacatggtgcagaccgaggaccagtacatcttcatccacgacgccctgctggaggccgtgacctgcggcaacaccgaggtgcccgccagaaacctgtacgcctacatccagaagctgacccagatcgagaccggcgagaacgtgaccggcatggagctggagttcaagagactggccagcagcaaggcccacaccagcagattcatcagcgccaacctgccctgcaacaagttcaagaacagactggtgaacatcatgccctacgagagcaccagagtgtgcctgcagcccatcagaggcgtggagggcagcgactacatcaacgccagcttcatcgacggctacagacagcagaaggcctacatcgccacccagggccccctggccgagaccaccgaggacttctggagaatgctgtgggagcacaacagcaccatcgtggtgatgctgaccaagctgagagagatgggcagagagaagtgccaccagtactggcccgccgagagaagcgccagataccagtacttcgtggtggaccccatggccgagtacaacatgccccagtacatcctgagagagttcaaggtgaccgacgccagagacggccagagcagaaccgtgagacagttccagttcaccgactggcccgagcagggcgtgcccaagagcggcgagggcttcatcgacttcatcggccaggtgcacaagaccaaggagcagttcggccaggacggccccatcagcgtgcactgcagcgccggcgtgggcagaaccggcgtgttcatcaccctgagcatcgtgctggagagaatgagatacgagggcgtggtggacatcttccagaccgtgaagatgctgagaacccagagacccgccatggtgcagaccgaggaccagtaccagttcagctacagagccgccctggagtacctgggcagcttcgaccactacgccacctag

SEQ ID NO: 309504 - DNA, 339 bp, Artificial Sequence
  derived and/or modified sequence
atgcacactagaaagcgactgacccagctgttctgtttcccggaccttacagaagaacgcctcggggatggcaagtccgctgacaacacagaagtcttctcagataaagatacagaccagaggagctcacctgacgtggctaagtctaaagggtgtttcacaccagagtccccggaaatcgtgtcagtggaggagggagggtatgctgtacagaagaatggagggaaccccgaatcacggccggactccccaaaatgccatgctgagcagaatcacctgctgatcgagggtcctagcggaactgtgtccttgcctttttcactgaaggcgaacagatag

SEQ ID NO: 309505 - DNA, 339 bp, Artificial Sequence
  derived and/or modified sequence
atgcacaccaggaagaggctgacccagctgttctgcttcccagacctgacagaggagcggctgggagatggcaagtctgctgacaacacagaggtgttcagtgacaaggacacagaccagaggagcagcccagatgtggccaagagcaagggctgcttcaccccagagagccctgagatcgtgtctgtggaggagggcggctatgctgtgcagaagaatggaggcaaccctgagagcaggccagacagccccaagtgccacgccgagcagaaccacctgctgattgagggccccagcggcaccgtgtccctgcccttcagcctgaaggccaacagatag

SEQ ID NO: 309506 - DNA, 339 bp, Artificial Sequence
  derived and/or modified sequence
atgcacacccggaagcggctgacccagctgttctgcttccccgaccttacagaagagagactgggcgatggtaaatctgccgacaataccgaggttttcagtgataaagacactgatcagagatcatctcccgacgttgccaagagcaaaggctgcttcacccctgaaagccccgaaatcgtctctgtggaggagggtgggtacgctgtgcagaagaatggaggcaacccggagagccgtcctgactctcctaaatgccacgctgaacagaatcaccttctgatagaaggaccgtcaggcaccgtgagccttcctttttctctaaaggcgaataggtag

SEQ ID NO: 309507 - DNA, 339 bp, Artificial Sequence
  derived and/or modified sequence
atgcacactcgtaaacgccttacccaactattttgcttccctgatttgacggaagaaaggttgggcgacggcaagtctgcagacaataccgaagtgttctccgacaaggatacggatcagagatcttctcctgacgtcgcgaagtctaaggggtgcttcactccagaaagccccgagattgtcagcgtggaagagggcggttacgctgtgcagaagaacggaggaaaccccgaatcacggcctgacagccctaagtgccacgccgagcaaaaccatctgttaattgagggcccttcgggcactgtgagtctgccattctcattaaaagccaatcgatag

SEQ ID NO: 309508 - DNA, 497 bp, Artificial Sequence
  derived and/or modified sequence
tgatttctagatctttatttacagggtttttgtttcatttgccagtgatatagttcgaatttttttaaaaaggcttgtagtatattatgacccattgagatgcatttgctcttccaaaaagcacgtgtacaggtctcttctgagcacatctgctcctctttatgcacaccaggaaaagattaactcagctgttctgttttccagatttgactgaagaacgacttggagacggcaagtcggcagacaatacagaggtcttcagtgacaaagacactgaccagaggagttccccagatgtggcaaagagtaagggctgcttcacccctgagagccctgagatagtgtccgtggaggaagggggatacgctgtccagaaaaacggaggcaaccccgagagccgccctgacagccccaagtgtcacgcggagcagaatcacctcctgattgagggcccctcggggactgtttctctgcccttcagcttgaaagccaacaga

SEQ ID NO: 309509 - DNA, 339 bp, Artificial Sequence
  derived and/or modified sequence
atgcacaccagaaagagactgacccagctgttctgcttccccgacctgaccgaggagagactgggcgacggcaagagcgccgacaacaccgaggtgttcagcgacaaggacaccgaccagagaagcagccccgacgtggccaagagcaagggctgcttcacccccgagagccccgagatcgtgagcgtggaggagggcggctacgccgtgcagaagaacggcggcaaccccgagagcagacccgacagccccaagtgccacgccgagcagaaccacctgctgatcgagggccccagcggcaccgtgagcctgcccttcagcctgaaggccaacagatag

SEQ ID NO: 309510 - protein, 216 aa, Artificial Sequence
  derived and/or modified sequence
MQTSETGSDTGSTVTLQTSVASQAAVPTQVVQQVPVQQQVQQVQTVQQVQHVYPAQVQYVEGSDTVYTNGAIRTTTYPYTETQMYSQNTGGNYFDTQGSSAQVTTVVSSHSMVGTGGIQMGVTGGQLISSSGGTYLIGNSMENSGHSVTHTTRASPATLQWLLDNYETAEGVSLPRSTLYNHYLRHCQEHKLDPVNAASFGKLIRSIFMGLRTRRL

SEQ ID NO: 309511 - protein, 135 aa, Artificial Sequence
  derived and/or modified sequence
VQQVQTVQQVQHVYPAQVQYVEGSDTVYTNGAIRTTTYPYTETQMYSQNTGGNYFDTQGSSAQVTTVVSSHSMVGTGGIQMGVTGGQLISSSGGTYLIGNSMENSGHSVTHTTRASPATLFLFSCVPFSLGQLSP

SEQ ID NO: 309512 - DNA, 651 bp, Artificial Sequence
  derived and/or modified sequence
atgcagacatccgagacaggatctgatacgggcagcactgtgacattacagacatccgttgcctcccaagcagccgtgcccacccaagtggtccagcaagtcccggtccaacagcaagtccagcaggtgcagaccgtgcaacaggttcagcacgtctaccccgctcaggtgcagtacgtggaaggcagcgacacagtatacactaatggcgctattcgtaccactacatatccctacaccgagacacaaatgtatagtcaaaacacaggcggtaactatttcgatacccaggggtcatcagctcaggtgacgaccgtcgtctcctcgcactctatggtaggcacagggggcattcagatgggagtgaccggcggacagctgatttcctcaagcggcggcacctatctgatcggcaattctatggaaaactccgggcactcagtcacgcataccacgagagctagtcccgctactttgcaatggcttctggataattatgagacagccgagggcgtctctctccccagatctaccctctacaatcactatctgagacactgtcaagaacacaaactcgatcccgttaacgctgcatccttcgggaagctgatacgctctattttcatgggcctgcgaacacggaggctctag

SEQ ID NO: 309513 - DNA, 651 bp, Artificial Sequence
  derived and/or modified sequence
atgcagacctcagagaccgggagtgacaccggctccaccgttacactgcagacttcggtcgccagccaggccgccgtcccgactcaagtcgtccagcaggtgccagtccagcagcaggtccaacaagtgcagactgttcaacaggttcagcatgtctacccggctcaggtacaatacgtggaaggttcggacacagtgtacacaaatggagcaatacgcacgaccacatacccgtacaccgagactcagatgtatagccagaacacgggagggaactatttcgacactcagggcagtagcgctcaggtgaccacggttgtatcaagtcattcaatggtgggcaccggtggaattcaaatgggagtgactggagggcagctgatctcttcaagcggtggaacgtatcttataggcaacagcatggagaattcaggtcattccgtcacacacacaacacgcgccagtcccgcaacgctgcagtggcttctcgacaattacgagacagcagagggggtgagcctgccacgtagtaccctttacaaccactatctgagacactgccaggagcacaaattagaccctgttaatgctgcctctttcggcaagttgatcagatcaatttttatggggctgcgcacccgtcgactttag

SEQ ID NO: 309514 - DNA, 651 bp, Artificial Sequence
  derived and/or modified sequence
atgcagaccagcgagaccggcagtgacaccggcagcacagtgaccctgcagacctctgtggccagccaggccgctgtgcccacccaggtggtgcagcaggtgcctgtgcagcagcaggtgcagcaggtgcagacagtgcagcaggtgcagcacgtgtacccagcccaggtgcagtatgtggagggcagtgacacagtgtacaccaatggagccatccgcaccaccacctacccctacacagagacccagatgtacagccagaacacaggaggcaactactttgacacccagggcagcagcgcccaggtgaccaccgtggtgagcagccacagcatggtgggcactggaggcatccagatgggcgtgactggaggccagctgatcagcagcagcggcggcacctacctgattggcaacagcatggagaacagcggccacagcgtgacccacaccacccgggccagccctgccaccctgcagtggctgctggacaactatgaaacagctgagggcgtgtccctgcccaggagcaccctgtacaaccactacctgcggcactgccaggagcacaagctggaccctgtgaatgctgccagctttgggaagctgatccgcagcatcttcatgggcctgcggacccggcggctgtag

SEQ ID NO: 309515 - DNA, 2880 bp, Artificial Sequence
  derived and/or modified sequence
cgtgcgagtgtctccctctccctctcgctctctctctctctccctctctctctctcttttgtgagttatagcaaccgttgccttgtgaatcaagcgccatagtcaccgtagtcctggcgactgttacccatcaacaacaactactcctctcctcctcctcctcctcttcctcctcctcctccccaccaccaccatctccatcacccaccaacaacaccacaataatccacagccaaggccacttggtcattctggcattttatggtagagaatacgttgagtttggctctggaaggaatatgagagaccatcatgcagacatcagagactgggtcggacacaggctcgacagtgaccttacaaacatctgtggctagtcaagcagcagtgcctacgcaggtggtacagcaagtaccagtacaacaacaggtacagcaggtacagactgtgcagcaggtacaacatgtctatcccgctcaggtgcagtatgtggaaggaagcgatactgtctataccaatggagcaatccgaacaacaacgtatccttacacagagacacagatgtacagccaaaatactggagggaattactttgatactcaagggagttccgcccaggtgactaccgtggtctcatcccacagtatggtgggcactggtgggattcagatgggcgtcacaggaggacaactcatcagcagctctggaggaacctatctgatcggcaactcaatggagaattctggtcactcagtgacacacacaactcgggcctccccagcgacactccagtggctgttggacaattatgagacagcagaaggagtgagccttcccagaagcactctgtacaaccactaccttcgacactgtcaggaacacaaactggacccagtcaatgctgcctcttttggaaaattaataagatcaatttttatggggctacgaaccaggagattgggcactagaggaaactccaaataccactactatgggattcgtgtcaagccagattcccctcttaatcgtctgcaagaagacatgcagtatatggctatgagacaacaacccatgcaacagaaacaaaggtacaagcctatgcagaaagtggatggggttgcagatggtttcacaggaagtggtcaacagacaggcacatctgttgagcaaactgtaattgcccaaagccaacatcatcaacagtttttagatgcatctcgagcacttccagagtttggagaagttgaaatctcttctctgccagatggtactacctttgaggatatcaagtcactgcagagtctttatagagagcactgtgaggcaatattggacgttgttgtgaatcttcaatttagcctgatagaaaaattgtggcaaacattctggcgctattctccctctactccaactgatggcactaccattaccgaatcgagcaatctgagtgaaatagaaagtcgacttccgaaagcaaagctgataactctgtgcaaacatgagtctatcctgaaatggatgtgtaactgtgaccatgggatgtaccaggctttggtggagattctcatccccgacgtccttagacctattcctagtgccttgacccaagccattcgaaattttgcaaaaagccttgaaggttggctttccaatgccatgaacaatattccacagagaatgatacaaaccaaggttgccgctgtaagtgcctttgcccagactctgcgaagatacacgtcgcttaatcacctggcccaggcagctcgtgcagtgcttcagaacacttcccaaatcaaccagatgcttagtgacctcaaccgtgtcgactttgccaatgtccaggagcaggcttcctgggtgtgccagtgtgatgacaacatggttcagagactagaaacagacttcaagatgactcttcagcagcagagcaccctggagcagtgggctgcgtggcttgacaatgtgatgatgcaagcactgaaaccctatgaaggaagacccagttttcctaaagccgccaggcagtttctgctaaaatggtctttctacagctcaatggttattcgggacttaaccttacgcagtgctgctagctttggctccttccacctgatccgtctactctacgacgaatatatgttttacttagtagaacatcgtgttgctcaggcaacaggagagactcctatagcagtcatgggcgagtttggtgatttaaatgccgtgtctcctggaaatctggataaagatgaaggcagtgaagtagaaagtgaaatggatgaagaactggatgactcttcagagcctcaagccaaaagagagaaaacagagctgagccaggcatttccagtgggctgcatgcagcctgttctcgagactggcgtgcaaccaagcctcctgaatccaattcacagcgagcacattgtcacaagtactcagactatcagacagtgcagcgctacaggaaatacctacactgcagtctaaagaatattaaagcgtatttttccagcttacattaaccctgttgatattgggcttaagttgaaaatttaataagcctgaaggtcgactgttgtcaaattctatctgtgctgaacattaactttttggagttgtgaaatggaatgggtgtatgtattttgccagatctttttttttaacgtaaacaaattatttgcttcttaataatgaattttttcccttagtttcaggtgtcaagaaggatttttacaacacttaatgtcaatgttttgttttcttataattaaaaagtaatttacattttttgtagcttaaaatattttattgttgattgttagtcttggtgtatgatttcatgtgtaagttttttaattagatgcacttctgtgaaatatc

SEQ ID NO: 309516 - DNA, 822 bp, Artificial Sequence
  derived and/or modified sequence
actacaaacagtactttaaagacaggccttccactgccattcagaaagccatggaggatactctagtttctttgggaagataaacactcaatctgctagttaagagacaaagctcaagagaaataagctgaagctgtaacctccatttcaaacttgtggttctgcagaccatcatgcagacatcagagactgggtcggacacaggctcgacagtgaccttacaaacatctgtggctagtcaagcagcagtgcctacgcaggtggtacagcaagtaccagtacaacaacaggtacagcaggtacagactgtgcagcaggtacaacatgtctatcccgctcaggtgcagtatgtggaaggaagcgatactgtctataccaatggagcaatccgaacaacaacgtatccttacacagagacacagatgtacagccaaaatactggagggaattactttgatactcaagggagttccgcccaggtgactaccgtggtctcatcccacagtatggtgggcactggtgggattcagatgggcgtcacaggaggacaactcatcagcagctctggaggaacctatctgatcggcaactcaatggagaattctggtcactcagtgacacacacaactcgggcctccccagcgacactccagtggctgttggacaattatgagacagcagaaggagtgagccttcccagaagcactctgtacaaccactaccttcgacactgtcaggaacacaaactggacccagtcaatgctgcctcttttggaaaattaataagatcaatttttatggggctacgaaccaggagattgg

SEQ ID NO: 309517 - DNA, 651 bp, Artificial Sequence
  derived and/or modified sequence
atgcagaccagcgagaccggcagcgacaccggcagcaccgtgaccctccagacttctgtggcatcccaagccgccgtgcccacccaggtcgtgcaacaagtgccagtgcaacagcaggtccaacaggttcagaccgtgcaacaggtacaacacgtatatccagcacaggtacaatacgtcgagggttcagacacggtgtatactaatggcgcaattcggacaactacatacccatacaccgagacacagatgtatagtcagaatacggggggcaattatttcgatacacaggggagtagcgcacaggtgactactgtcgtctccagccactccatggtgggcaccggaggcattcaaatgggtgtcacgggtgggcagttgatttcctcttcgggcggtacatacctgatcggtaattctatggagaactcggggcattcagtgacacacactacacgggccagtcctgccaccctgcagtggttgttagataactatgagacggccgaaggggtgtccctccctaggagtacgttgtataaccattatctgcggcattgtcaagagcataagttggaccccgtaaatgccgcgagctttggcaaactcatcaggtctatctttatgggcctgagaacacggcgactctag

SEQ ID NO: 309518 - DNA, 651 bp, Artificial Sequence
  derived and/or modified sequence
atgcagaccagcgagaccggcagcgacaccggcagcaccgtgaccctacagactagtgtcgcttcccaagccgccgtcccaactcaggtcgtgcagcaggtccccgtgcaacagcaggtgcaacaggttcaaactgtgcagcaggtgcagcacgtataccccgcccaggtgcagtatgtcgagggctcagatacagtgtacaccaacggtgcaatccgtactaccacctatccttatacagaaacccaaatgtattcccagaataccggcgggaattatttcgatacccaaggaagctcagctcaagtgaccaccgtggttagcagccactccatggtgggcacaggcgggatacagatgggcgtgaccggtggccagcttatctcttcatctgggggcacgtatctgattgggaacagtatggaaaacagcggtcactcagtgacacacacaacgcgagctagtccagccactttgcaatggctgctggacaattacgaaacggccgaaggggtgtcccttccaaggagcaccctctataatcactacttgcggcattgtcaggaacacaagctcgatccggtcaatgcggccagcttcggtaagctcattcgcagcatttttatgggcctaaggacgcgccgactgtag

SEQ ID NO: 309519 - DNA, 651 bp, Artificial Sequence
  derived and/or modified sequence
atgcagacaagcgagacaggcagcgacacaggcagcactgtcaccctccagacctctgtggccagccaagctgccgttcctacgcaggtcgtgcagcaggttcccgtgcaacagcaagtgcagcaagtgcagactgtgcagcaggttcagcacgtctatccagcccaggtgcagtacgtcgaaggatctgataccgtgtatactaacggagcaatacggacgaccacgtacccttacaccgagacacagatgtattcccagaacaccgggggaaattacttcgatacccaagggtcaagcgcgcaggtgaccactgtggtgtccagccatagcatggtgggcactggcggaatccagatgggcgtgaccgggggacagctgatctccagcagtggcggtacctatttgatcggtaactcgatggagaactctggacatagcgtcacccataccacccgtgcttctcccgctaccttacaatggttgttagataactatgaaacagctgagggtgtttctctccctaggtccacactatataatcattatttgaggcattgtcaagagcacaaacttgatcctgtgaatgcggctagctttggcaaattaatcagatccatttttatggggttacggactcggagattgtag

SEQ ID NO: 309520 - DNA, 651 bp, Artificial Sequence
  derived and/or modified sequence
atgcagacaagtgagactggtagcgacacaggctctactgttactctgcagacctctgtagcctctcaggccgctgtgcctacacaggttgtgcagcaggtgccagtccagcagcaagtccagcaggtccagacagtgcaacaagtgcagcacgtttatcccgcacaggtccagtacgtggagggaagtgacaccgtgtacacaaacggagccattcgcacaactacctacccttatacagaaacacaaatgtactcgcagaatacaggtggtaactattttgacacccagggctccagcgcacaagtcactaccgtcgtcagcagccatagcatggtcggcactggcggtattcagatgggcgtcacgggcggtcagttaattagtagttcaggcggaacctacctgatcggaaatagtatggagaactctgggcatagcgtgacccacaccacgagggcgagccccgctaccctccaatggcttcttgacaattatgaaacggctgagggggttagcctgccaaggtccacgctctataaccattatctgcggcactgccaggaacataaactcgaccctgtgaacgcggcttctttcggaaagttgatccgttctattttcatgggattgaggacgcgcaggctgtag

SEQ ID NO: 309521 - DNA, 651 bp, Artificial Sequence
  derived and/or modified sequence
atgcagaccagcgagaccggcagcgacaccggcagcaccgtgaccctgcagaccagcgtggccagccaggccgccgtgcccacccaggtggtgcagcaggtgcccgtgcagcagcaggtgcagcaggtgcagaccgtgcagcaggtgcagcacgtgtaccccgcccaggtgcagtacgtggagggcagcgacaccgtgtacaccaacggcgccatcagaaccaccacctacccctacaccgagacccagatgtacagccagaacaccggcggcaactacttcgacacccagggcagcagcgcccaggtgaccaccgtggtgagcagccacagcatggtgggcaccggcggcatccagatgggcgtgaccggcggccagctgatcagcagcagcggcggcacctacctgatcggcaacagcatggagaacagcggccacagcgtgacccacaccaccagagccagccccgccaccctgcagtggctgctggacaactacgagaccgccgagggcgtgagcctgcccagaagcaccctgtacaaccactacctgagacactgccaggagcacaagctggaccccgtgaacgccgccagcttcggcaagctgatcagaagcatcttcatgggcctgagaaccagaagactgtag

SEQ ID NO: 309522 - DNA, 599 bp, Artificial Sequence
  derived and/or modified sequence
gacatggctcagtcactggctctgagcctccttatcctggttctggcctttggcatccccaggacccaaggcagtgatggaggggctcaggactgttgcctcaagtacagccaaaggaagattcccgccaaggttgtccgcagctaccggaagcaggaaccaagcttaggctgctccatcccagctatcctgttcttgccccgcaagcgctctcaggcagagctatgtgcagacccaaaggagctctgggtgcagcagctgatgcagcatctggacaagacaccatccccacagaaaccagcccagggctgcaggaaggacaggggggcctccaagactggcaagaaaggaaagggctccaaaggctgcaagaggtgaggaatctgagggatgtgggtaaaggggagcctcagtcagcccctcacacccctcttctgccctcacaggactgagcggtcacagacccctaaagggccatagcccagtgagcagcctggagccctggagaccccaccagcctcaccagcgcttgaagcctgaacccaagatgcaagaaggaggctatgctcaggggccctggagcagccaccccatgctgg

SEQ ID NO: 309523 - protein, 242 aa, Artificial Sequence
  derived and/or modified sequence
  misc_feature (1)..(1): Xaa can be any naturally occurring amino acid
XFFNALSDATMKIVQIIMCYMPLGILFLIAGKIIEVEDWEIFRKLGLYMATVLTGLAIHSIVILPLIYFIVVRKNPFRFAMGMAQALLTALMISSSSATLPVTFRCAEENNQVDKRITRFVLPVGATINMDGTALYEAVAAVFIAQLNDLDLGIGQIITIRDRFRTMVNVLGDAFGTGIVEKLSKKELEQMDVSSEVNIVNPFALESTILDNEDSDTKKSYVNGGFAVDKSDTISFTQTSQF

SEQ ID NO: 309524 - DNA, 729 bp, Artificial Sequence
  derived and/or modified sequence
tgatttttcaacgcactgagcgacgccactatgaagatcgtccagattattatgtgctacatgccgctgggtatcttatttctgatagccggcaaaattatcgaggtcgaagactgggagatctttcgtaagttgggcctatatatggctactgtgttgacaggtctggcaatacattccattgttatcctgcctctgatttacttcatcgttgtccggaagaacccgtttcgtttcgccatggggatggctcaggctcttctaacagctctgatgatctcgagcagcagtgcaacattgcctgtgacatttaggtgtgctgaggagaacaaccaggtggataagaggataacaagatttgtgcttcccgtgggagccaccatcaacatggatggcaccgccctctatgaggctgtcgcagccgttttcattgcccagttgaatgacctggacctggggattggacagataatcaccatccgggatcgttttaggacaatggttaatgtcctaggagacgccttcggaacgggtatcgtagagaagttgtctaagaaggagctggagcagatggacgtttcctctgaggtgaacatcgtcaacccgttcgccctggaaagcactatcctagacaacgaggactcagacaccaagaagtcttacgtgaatggagggttcgcggtggacaaatccgatactatatcatttacccagacctcccagttctag

SEQ ID NO: 309525 - DNA, 729 bp, Artificial Sequence
  derived and/or modified sequence
tgattcttcaatgccctgagtgatgccaccatgaagatcgtgcagatcatcatgtgctacatgcccctgggcatcctcttcctgattgctgggaagatcatcgaggtggaggactgggagatcttcaggaagctgggcctgtacatggccaccgtgctgaccggcctggccatccacagcatcgtcatcctgcccctcatctacttcatcgtggtgaggaagaaccccttccgctttgccatgggcatggcccaggccctgctgacagccctgatgatcagcagcagcagcgccaccctgcctgtgaccttccgctgtgccgaggagaacaaccaggtggacaagaggatcaccaggtttgtgctgcctgtgggcgccaccatcaacatggatggaacagccctgtatgaggccgtggccgctgtgttcatcgcccagctgaatgacctggacctgggcatcggccagatcatcaccatccgggaccgcttccgcaccatggtgaatgtgctgggagatgcctttggaactggaattgtggagaagctgagcaagaaggagctggagcagatggatgtgtcctctgaggtgaacatcgtgaacccctttgccctggagagcaccatcctggacaatgaagattctgacaccaagaagagctatgtgaatggaggctttgctgtggacaagagtgacaccatctccttcacccagaccagccagttctag

SEQ ID NO: 309526 - DNA, 729 bp, Artificial Sequence
  derived and/or modified sequence
tgattcttcaacgccctgagcgacgccaccatgaagatcgtgcagattatcatgtgttacatgccactgggcatcctgttcctgattgctggaaagattattgaagtagaagactgggagatttttcgaaagcttgggttatacatggcgactgtgctcacaggcctcgccatccacagcatcgtgatactgcccttgatctatttcattgtagtgcgcaagaaccccttccggtttgcaatgggcatggcgcaggccctgttgaccgcccttatgatatcttcctcctcagccaccctacctgtgactttccgttgtgctgaggagaataaccaggtagacaaacggataaccaggttcgttctgcccgtgggggcaaccatcaatatggacggaactgcgctgtatgaggccgtggctgccgtgtttattgctcaacttaatgatttggatctcggtatcgggcagatcatcacaattagagatcggtttcggaccatggtcaatgtgctgggggatgcgttcggaaccgggattgtggagaagctttccaaaaaggaacttgaacagatggatgtgtcctctgaagtcaacatcgtgaaccctttcgctctcgagtccacaatcctagacaatgaggattcagacaccaagaaatcatacgttaacggggggttcgctgtggacaagagcgatacaatctcatttactcagacgagccagttttag

SEQ ID NO: 309527 - DNA, 729 bp, Artificial Sequence
  derived and/or modified sequence
taattctttaacgctctgagcgacgcgacgatgaagatcgttcagatcattatgtgttatatgcctcttgggatcttgtttttgatagccggtaaaataattgaagtagaggattgggagatttttagaaaactcggtctttatatggccaccgttctcacaggattggccatccacagcatcgttattctcccccttatttatttcattgtggtccgcaaaaatccttttcgcttcgccatggggatggcccaagcgctcctaaccgctcttatgatctcctccagcagtgcaactctccctgtgacattccgctgcgctgaggagaataaccaggttgacaaacggattacacggttcgtcctgcccgtgggggctaccatcaacatggacggtacagcattgtatgaagccgtggccgcagtctttatcgcccagctgaacgacttggatctgggaatcggccaaataattacgattcgcgacagattcaggactatggtcaacgtgctcggggacgcctttggcactggaatcgtcgaaaagctcagcaaaaaagaactcgaacaaatggatgtaagttcagaggtcaacatcgtgaaccctttcgcgcttgagagcacgattctcgataatgaggactccgatacaaaaaaaagctatgttaacgggggttttgcagtggataagagcgacaccatctcctttactcagacctctcaattttag

SEQ ID NO: 309528 - DNA, 726 bp, Artificial Sequence
  derived and/or modified sequence
tttcttcaatgctttgagtgatgcaaccatgaaaatcgttcagatcatcatgtgttatatgccactaggtattttgttcctgattgctgggaagatcatagaagttgaagactgggaaatattccgcaagctgggcctttacatggccacagtcctgactgggcttgcaatccactccattgtaattctcccgctgatatatttcatagtcgtacgaaagaaccctttccgatttgccatgggaatggcccaggctctcctgacagctctcatgatctcttccagttcagcaacactgcctgtcaccttccgctgtgctgaagaaaataaccaggtggacaagaggatcactcgattcgtgttacccgttggtgcaacaatcaacatggatgggactgcgctctatgaagcagtggcagcggtgtttattgcacagttgaatgacctggacttgggcattgggcagatcatcaccatcagggaccggttcaggaccatggtcaacgtccttggtgatgcttttgggacgggcattgtggaaaagctctccaagaaggagctggagcagatggatgtttcatctgaagtcaacattgtgaatccctttgccttggaatccacaatccttgacaacgaagactcagacaccaagaagtcttatgtcaatggaggctttgcagtagacaagtctgacaccatctcattcacccagacctcacagttcta

SEQ ID NO: 309529 - DNA, 729 bp, Artificial Sequence
  derived and/or modified sequence
tgattcttcaacgccctgagcgacgccaccatgaagatcgtgcagatcatcatgtgctacatgcccctgggcatcctgttcctgatcgccggcaagatcatcgaggtggaggactgggagatcttcagaaagctgggcctgtacatggccaccgtgctgaccggcctggccatccacagcatcgtgatcctgcccctgatctacttcatcgtggtgagaaagaaccccttcagattcgccatgggcatggcccaggccctgctgaccgccctgatgatcagcagcagcagcgccaccctgcccgtgaccttcagatgcgccgaggagaacaaccaggtggacaagagaatcaccagattcgtgctgcccgtgggcgccaccatcaacatggacggcaccgccctgtacgaggccgtggccgccgtgttcatcgcccagctgaacgacctggacctgggcatcggccagatcatcaccatcagagacagattcagaaccatggtgaacgtgctgggcgacgccttcggcaccggcatcgtggagaagctgagcaagaaggagctggagcagatggacgtgagcagcgaggtgaacatcgtgaaccccttcgccctggagagcaccatcctggacaacgaggacagcgacaccaagaagagctacgtgaacggcggcttcgccgtggacaagagcgacaccatcagcttcacccagaccagccagttctag

SEQ ID NO: 309530 - protein, 752 aa, Artificial Sequence
  derived and/or modified sequence
MGTSALWALWLLLALCWAPRESGATGTGRKAKCEPSQFQCTNGRCITLLWKCDGDEDCVDGSDELDCAPPTCGAHEFQCSTSSCIPISWVCDDDADCSDQSDESLEQCGRQPVIHTKCPASEIQCGSGECIHKKWRCDGDPDCKDGSDEVNCPSRTCRPDQFECEDGSCIHGSRQCNGIRDCVDGSDEVNCKNVNQCLGPGKFKCRSGECIDISKVCNQEQDCRDWSDEPLKECHINECLVNNGGCSHICKDLVIGYECDCAAGFELIDRKTCGDIDECQNPGICSQICINLKGGYKCECSRGYQMDLATGVCKAVGKEPSLIFTNRRDIRKIGLERKEYIQLVEQLRNTVALDADIAAQKLFWADLSQKAIFSASIDDKVGRHVKMIDNVYNPAAIAVDWVYKTIYWTDAASKTISVATLDGTKRKFLFNSDLREPASIAVDPLSGFVYWSDWGEPAKIEKAGMNGFDRRPLVTADIQWPNGITLDLIKSRLYWLDSKLHMLSSVDLNGQDRRIVLKSLEFLAHPLALTIFEDRVYWIDGENEAVYGANKFTGSELATLVNNLNDAQDIIVYHELVQPSGKNWCEEDMENGGCEYLCLPAPQINDHSPKYTCSCPSGYNVEENGRDCQSTATTVTYSETKDTNTTEISATSGLVPGGINVTTAVSEVSVPPKGTSAAWAILPLLLLVMAAVGGYLMWRNWQHKNMKSMNFDNPVYLKTTEEDLSIDIGRHSASVGHTYPAISVVSTDDDLA

SEQ ID NO: 309531 - protein, 173 aa, Artificial Sequence
  derived and/or modified sequence
MGTSALWALWLLLALCWAPRESGATGTGRKAKCEPSQFQCTNGRCITLLWKCDGDEDCVDGSDEKNCVKKTCAESDFVCNNGQCVPSRWKCDGDPDCEDGSDESPEQCRNITCSPDEFTCSSGRCISRNFVCNGQDDCSDGSDELDCAPPTCGAHEFQCSTSSCIPISWVCDD

SEQ ID NO: 309532 - DNA, 2259 bp, Artificial Sequence
  derived and/or modified sequence
atgggcaccagcgccctgtgggccctgtggctgctgctggccctgtgctgggcccccagagagagcggcgccaccggcaccggcagaaaggccaagtgcgagcccagccagttccagtgcaccaacggcagatgcatcaccctgctgtggaagtgcgacggcgacgaggactgcgtggacggcagcgacgagctggactgcgccccccccacctgcggcgcccacgagttccagtgcagcaccagcagctgcatccccatcagctgggtgtgcgacgacgacgccgactgcagcgaccagagcgacgagagcctggagcagtgcggcagacagcccgtgatccacaccaagtgccccgccagcgagatccagtgcggcagcggcgagtgcatccacaagaagtggagatgcgacggcgaccccgactgcaaggacggcagcgacgaggtgaactgccccagcagaacctgcagacccgaccagttcgagtgcgaggacggcagctgcatccacggcagcagacagtgcaacggcatcagagactgcgtggacggcagcgacgaggtgaactgcaagaacgtgaaccagtgcctgggccccggcaagttcaagtgcagaagcggcgagtgcatcgacatcagcaaggtgtgcaaccaggagcaggactgcagagactggagcgacgagcccctgaaggagtgccacatcaacgagtgcctggtgaacaacggcggctgcagccacatctgcaaggacctggtgatcggctacgagtgcgactgcgccgccggcttcgagctgatcgacagaaagacctgcggcgacatcgacgagtgccagaaccccggcatctgcagccagatctgcatcaacctgaagggcggctacaagtgcgagtgcagcagaggctaccagatggacctggccaccggcgtgtgcaaggccgtgggcaaggagcccagcctgatcttcaccaacagaagagacatcagaaagatcggcctggagagaaaggagtacatccagctggtggagcagctgagaaacaccgtggccctggacgccgacatcgccgcccagaagctgttctgggccgacctgagccagaaggccatcttcagcgccagcatcgacgacaaggtgggcagacacgtgaagatgatcgacaacgtgtacaaccccgccgccatcgccgtggactgggtgtacaagaccatctactggaccgacgccgccagcaagaccatcagcgtggccaccctggacggcaccaagagaaagttcctgttcaacagcgacctgagagagcccgccagcatcgccgtggaccccctgagcggcttcgtgtactggagcgactggggcgagcccgccaagatcgagaaggccggcatgaacggcttcgacagaagacccctggtgaccgccgacatccagtggcccaacggcatcaccctggacctgatcaagagcagactgtactggctggacagcaagctgcacatgctgagcagcgtggacctgaacggccaggacagaagaatcgtgctgaagagcctggagttcctggcccaccccctggccctgaccatcttcgaggacagagtgtactggatcgacggcgagaacgaggccgtgtacggcgccaacaagttcaccggcagcgagctggccaccctggtgaacaacctgaacgacgcccaggacatcatcgtgtaccacgagctggtgcagcccagcggcaagaactggtgcgaggaggacatggagaacggcggctgcgagtacctgtgcctgcccgccccccagatcaacgaccacagccccaagtacacctgcagctgccccagcggctacaacgtggaggagaacggcagagactgccagagcaccgccaccaccgtgacctacagcgagaccaaggacaccaacaccaccgagatcagcgccaccagcggcctggtgcccggcggcatcaacgtgaccaccgccgtgagcgaggtgagcgtgccccccaagggcaccagcgccgcctgggccatcctgcccctgctgctgctggtgatggccgccgtgggcggctacctgatgtggagaaactggcagcacaagaacatgaagagcatgaacttcgacaaccccgtgtacctgaagaccaccgaggaggacctgagcatcgacatcggcagacacagcgccagcgtgggccacacctaccccgccatcagcgtggtgagcaccgacgacgacctggcctag

SEQ ID NO: 309533 - DNA, 522 bp, Artificial Sequence
  derived and/or modified sequence
atgggcaccagcgccctgtgggccctgtggctgctgctggccctgtgctgggcccccagagagagcggcgccaccggcaccggcagaaaggccaagtgcgagcccagccagttccagtgcaccaacggcagatgcatcaccctgctgtggaagtgcgacggcgacgaggactgcgtggacggcagcgacgagaagaactgcgtgaagaagacctgcgccgagagcgacttcgtgtgcaacaacggccagtgcgtgcccagcagatggaagtgcgacggcgaccccgactgcgaggacggcagcgacgagagccccgagcagtgcagaaacatcacctgcagccccgacgagttcacctgcagcagcggcagatgcatcagcagaaacttcgtgtgcaacggccaggacgactgcagcgacggcagcgacgagctggactgcgccccccccacctgcggcgcccacgagttccagtgcagcaccagcagctgcatccccatcagctgggtgtgcgacgactag

SEQ ID NO: 309534 - DNA, 2259 bp, Artificial Sequence
  derived and/or modified sequence
atgggcacatcggcgctatgggctttgtggctgctcttggccctatgttgggccccacgcgaatctggtgctactgggactggtaggaaggcgaaatgtgaaccctcacagtttcaatgcaccaacggacgttgtatcacactgctatggaaatgcgacggggacgaagattgcgttgatggatctgacgaacttgactgtgcgccacccacctgcggagcccacgagttccagtgcagtacatcaagttgtatccccatcagctgggtgtgtgacgatgacgcagattgttctgatcagagcgacgaatcactcgagcagtgcggccgtcagccagtaatccatacgaagtgtcccgcctccgagattcagtgtggaagcggtgagtgtatacataagaaatggcggtgcgacggcgaccccgactgcaaagatggtagcgatgaagtgaactgcccctccagaacttgtcggccagaccagttcgaatgcgaggacggatcttgtattcatggatcacgacaatgtaatggcattcgggattgcgtcgacggcagcgacgaggtgaactgcaaaaatgtgaaccagtgtctgggaccaggtaagtttaagtgcaggtcaggtgaatgtatcgacatttctaaagtctgcaatcaagaacaggattgccgtgactggagcgacgagcccctcaaggagtgtcatattaatgagtgcctggtcaataacggcggctgcagtcatatatgtaaagatttggtgatcggttatgagtgtgactgcgcagctggcttcgagttgatagacaggaaaacatgcggcgatattgatgaatgccagaaccccgggatttgttcccagatttgcatcaacctcaaggggggctacaagtgtgaatgtagtcggggttatcagatggatctggcgacaggagtatgtaaagctgttggtaaggagcctagcttgatctttaccaataggagagacatccgaaaaataggacttgagagaaaagagtacatccagctagtagaacagctgagaaataccgtcgcccttgatgccgacatcgcagcacagaaattattctgggccgacctttcccagaaagcgatttttagcgccagcattgacgacaaggttggccggcacgtcaaaatgatagacaatgtctacaaccctgctgccattgctgtggattgggtgtataaaaccatctactggaccgatgccgcatctaagacgatctcagttgccacactggacgggaccaaaaggaagttcttgttcaattctgacctgagggaacctgcttcaatcgcggtcgacccgttgtccggttttgtctactggagtgattggggagagcctgctaagatcgagaaggccggcatgaatggattcgaccggagaccactcgtgactgcagacattcagtggcccaatggcatcacgcttgatttaatcaaatcacgcctgtactggctcgactccaaattgcacatgctgtccagcgttgatcttaacgggcaagaccgccgcattgtgctgaagagtctggaatttctggcgcatcctttggccctgaccatcttcgaagatcgcgtgtattggatcgatggtgagaacgaggccgtgtacggtgcaaataagttcactgggagcgagctggccaccctcgtgaataatcttaacgacgcacaggacatcatcgtctatcatgaactcgtgcagccctcaggcaaaaactggtgtgaagaggacatggagaatggcggttgcgagtacctctgtttacccgctccccagattaatgaccacagccctaagtatacttgctcatgcccttcgggatataatgttgaggagaatggaagggattgtcagtctaccgcgacgaccgtcacttatagtgagactaaggatacgaacaccactgaaatcagcgctacatctggactggtccctggagggatcaatgtaacgaccgctgtgtccgaagtgtcagtcccgcctaagggaacatccgctgcgtgggccattctgcccctgttgcttctggtcatggcagcagtcggaggctacttgatgtggcgaaactggcagcataagaacatgaaaagcatgaatttcgacaatcccgtctacctgaaaaccaccgaagaagatctttccatcgacataggtagacattccgcatcagtgggccacacttatccagctatcagcgtggtgtccaccgatgacgatctggcctag

SEQ ID NO: 309535 - DNA, 522 bp, Artificial Sequence
  derived and/or modified sequence
atgggaacgtctgctttgtgggccctttggttgcttctggccttatgctgggctcctcgcgagagcggggccactggcaccggcagaaaagcaaaatgcgagccctcccagttccagtgtaccaacgggaggtgcatcactttactgtggaaatgcgacggggacgaggactgtgtagacggcagtgacgagaagaactgcgtaaagaagacttgcgcagagagcgacttcgtatgtaataatggtcagtgcgttccatctcgctggaagtgtgatggggatcctgattgtgaggacggaagcgacgagtcccctgaacagtgcagaaatatcacctgcagccccgacgaatttacttgctcttcaggacgctgtatttcgcggaacttcgtgtgcaacgggcaggacgattgcagtgacggctctgacgagttggattgcgcaccccccacctgtggtgcccacgaattccaatgctctacctcaagttgtatccccatttcctgggtctgtgacgactag

SEQ ID NO: 309536 - DNA, 2259 bp, Artificial Sequence
  derived and/or modified sequence
atgggcaccagcgccctgtgggccctgtggctgctgctggccctgtgctgggccccccgggagagcggggccactggaactggaaggaaggccaagtgtgagcccagccagttccagtgcaccaacggccgctgcatcaccctgctgtggaagtgtgatggagatgaggactgtgtggatggcagtgatgagctggactgtgccccacccacctgtggggcccacgagttccagtgcagcaccagcagctgcatccccatctcctgggtgtgtgatgatgatgctgactgcagcgaccagagtgatgagagcctggagcagtgtggccggcagcccgtcatccacaccaagtgcccagccagcgagatccagtgtggcagcggggagtgcatccacaagaagtggaggtgtgatggagaccctgactgcaaggatggcagtgatgaggtgaactgccccagcaggacctgcaggccagaccagtttgaatgtgaagatggcagctgcatccacggcagccggcagtgcaatggcatccgggactgtgtggatggcagtgatgaggtgaactgcaagaatgtgaaccagtgcctgggccctgggaagttcaagtgccgctctggagaatgtattgacatcagcaaggtgtgcaaccaggagcaggactgccgggactggagcgatgagcccctgaaggagtgccacatcaatgaatgtctggtgaacaatggaggctgcagccacatctgcaaggacctggtgattggctatgaatgtgactgtgccgccggctttgagctgattgacaggaagacctgtggggacattgatgagtgccagaaccctggcatctgcagccagatctgcatcaacctgaagggcggctacaagtgtgaatgttcccggggctaccagatggacctggccaccggggtgtgcaaggctgtgggcaaggagcccagcctcatcttcaccaacagaagagacatcaggaagattggcctggagaggaaggagtacatccagctggtggagcagctgaggaacacagtggccctggatgctgacattgctgcccagaagctgttctgggccgacctgagccagaaggccatcttcagcgccagcattgatgacaaggtgggccgccacgtgaagatgattgacaacgtgtacaacccagctgccatcgctgtggactgggtgtacaagaccatctactggacagatgctgccagcaagaccatctctgtggccaccctggatggcaccaagaggaagttcctgttcaacagcgacctgcgggagcccgccagcattgctgtggaccccctgagcggctttgtgtactggagcgactggggcgagcccgccaagattgagaaggccggcatgaatggatttgaccggcggcccctggtgacagctgacatccagtggcccaacggcatcaccctggacctgatcaagagccggctgtactggctggacagcaagctgcacatgctgagctctgtggacctgaatggccaggacagaagaattgtgctgaagagcctggagttcctggcccaccccctggccctgaccatctttgaagatagagtgtactggattgatggagaaaatgaagctgtgtatggagccaacaagttcaccggcagcgagctggccaccctggtgaacaacctgaatgatgcccaggacatcatcgtgtaccacgagctggtgcagcccagcggcaagaactggtgtgaggaggacatggagaatggaggctgtgagtacctgtgcctgcctgccccccagatcaatgaccacagccccaagtacacctgcagctgccccagcggctacaacgtggaggagaatggccgggactgccagagcacagccaccaccgtgacctacagcgagaccaaggacaccaacaccacagagatcagcgccaccagcggcctggtgcctgggggcatcaacgtgaccacagctgtgtctgaggtgtctgtgccccccaagggcaccagcgctgcctgggccatcctgcccctgctgctgctggtgatggctgctgtgggcggctacctgatgtggaggaactggcagcacaagaacatgaagtccatgaactttgacaaccctgtgtacctgaagaccacagaggaggacctgagcattgacatcggccgccacagcgcctctgtgggccacacctacccagccatctctgtggtgtccacagatgatgacctggcctag

SEQ ID NO: 309537 - DNA, 522 bp, Artificial Sequence
  derived and/or modified sequence
atgggcaccagcgccctgtgggccctgtggctgctgctggccctgtgctgggccccccgggagagcggggccactggaactggaaggaaggccaagtgtgagcccagccagttccagtgcaccaacggccgctgcatcaccctgctgtggaagtgtgatggagatgaggactgtgtggatggcagtgatgagaagaactgtgtgaagaagacctgtgccgagagtgactttgtgtgcaacaacggccagtgtgtgcccagccgctggaagtgtgatggagaccctgactgtgaagatggcagtgatgagagccctgagcagtgcaggaacatcacctgcagcccagatgagttcacctgcagcagcggccgctgcatcagcaggaactttgtgtgcaatggccaggatgactgcagtgatggcagtgatgagctggactgtgccccacccacctgtggggcccacgagttccagtgcagcaccagcagctgcatccccatctcctgggtgtgtgatgactag

SEQ ID NO: 309538 - DNA, 2259 bp, Artificial Sequence
  derived and/or modified sequence
atgggcaccagcgccctgtgggccctgtggctgctgctggccctgtgttgggcccctagggagagtggtgcgaccggcacaggaaggaaagctaagtgcgagccttcccagtttcaatgcactaacgggcgctgcatcacactgctttggaagtgtgacggagatgaggactgtgttgacggcagcgatgagttggactgcgccccccccacatgtggggcgcacgagttccagtgctctacttccagctgtatcccgataagctgggtatgtgatgacgatgcggactgttcagatcagtcagatgaatccctggagcaatgcgggaggcagcccgtgatacataccaagtgtcccgcatccgaaatacaatgtggctctggggaatgtatccacaagaaatggaggtgtgacggcgatcctgactgcaaagacggatccgacgaagtcaattgtccgtcccgcacatgcaggcccgatcagttcgagtgcgaagacggatcctgtatccacggttcacgacagtgtaacggcatacgggactgcgtagatggctctgacgaggtaaattgcaagaacgtgaatcagtgcctgggccctggaaaattcaaatgccgctccggcgagtgcattgatatctctaaggtctgcaatcaggaacaggactgccgggattggtccgatgaacccctgaaagaatgtcatatcaatgagtgcttagttaacaatggcggatgctctcacatctgtaaagacctagtgataggatatgaatgtgactgtgcggcaggtttcgagctgattgacagaaagacgtgtggtgatatcgatgaatgccagaacccaggcatttgttctcagatttgtattaatctgaagggcggttacaagtgcgaatgcagtagaggctaccagatggatctggctacaggcgtgtgcaaggctgtgggaaaggagccgtcccttatcttcaccaaccgcagggacattaggaagatcggccttgagcgaaaagagtacatccagctggtagagcaactgagaaataccgttgctctcgacgcggatattgctgcacagaaactgttctgggcagacctgagccaaaaggccatcttttcggcatctatagacgataaggtcgggagacatgttaagatgatcgacaatgtgtacaatccagccgctattgctgtcgattgggtgtacaaaaccatttactggaccgatgcggcctccaagacgatctctgtggctacactcgacgggacaaagaggaaatttctattcaacagtgacctcagagaaccggcaagcattgccgtggaccctctctcagggttcgtctattggtccgattggggagagcccgctaaaatagagaaagctggcatgaatgggttcgataggagacctctcgtgaccgccgatatccagtggcctaatgggattactctggatctgataaagtctagactctactggctcgactctaagttgcatatgctatcaagtgtagatttaaacggacaggaccgacgaatcgtgctgaaatctctggagttcctggctcatcctttagctctgaccatcttcgaagatagggtttactggatcgacggggagaacgaggccgtgtacggagccaacaaatttaccggcagcgaactggctaccctggtcaacaatttaaatgacgctcaggacattatcgtctatcacgaattagttcagccatcgggaaagaactggtgcgaggaggacatggagaatgggggctgcgaatacctgtgtctcccagccccccaaataaacgaccacagcccaaaatacacgtgcagctgtccttccggatataatgtcgaggaaaacggaagagattgtcagtccacagctacgacagtgacctacagcgagacaaaggacactaacaccacagagatcagtgcaacatctgggctggttccaggaggcataaatgtgaccaccgcagtaagtgaggtgtccgttccccctaaggggaccagtgcagcttgggccatattgcccctgttgctgctggtgatggccgcggttggggggtatctgatgtggcggaattggcaacacaaaaatatgaagagcatgaacttcgacaaccctgtctacttgaagaccacggaagaggatctatccatcgatatcggccggcacagcgcttctgtgggtcacacatacccagcaataagtgtcgttagcaccgacgatgacctggcatag

SEQ ID NO: 309539 - DNA, 522 bp, Artificial Sequence
  derived and/or modified sequence
atgggcaccagcgccctgtgggccctgtggctgctgctggccctgtgctgggcaccccgcgaatcaggcgccaccgggaccggccggaaagcgaagtgtgaaccttcccagtttcagtgtacgaacgggcggtgcatcacactgttatggaagtgtgatggggacgaggattgtgtggacggcagcgacgagaaaaattgcgttaagaaaacatgtgctgagtccgacttcgtgtgtaacaacggccaatgtgtgccgtcccggtggaagtgtgacggcgaccctgactgcgaggacggttccgacgaatcccctgaacaatgccggaatatcacttgtagtcctgatgagttcacatgctcttccggccggtgcatatctaggaattttgtgtgtaatggtcaggatgattgttcagatggcagcgatgagcttgactgcgcccctccaacctgcggagcccacgagtttcaatgctccacttcttcctgtatacccatctcgtgggtgtgtgatgattag

SEQ ID NO: 309540 - DNA, 2259 bp, Artificial Sequence
  derived and/or modified sequence
atgggaacgtctgccctttgggccctctggctcctgttggctttatgctgggctcccagggagagcggcgctactggcacagggcgaaaagccaagtgtgaaccatcccagttccagtgcaccaacggtaggtgtatcaccctcctctggaaatgcgacggagacgaagattgcgtggacgggtccgacgagctcgactgtgcaccaccgacctgtggcgcacacgaattccaatgcagtacgtcaagctgtattccaatctcgtgggtatgtgacgatgacgccgactgctccgatcagagtgatgagtcactcgaacagtgcgggcgtcaacccgtgatccacactaaatgtcccgctagtgagattcagtgcggctcaggtgaatgtatccacaaaaagtggcgctgtgacggcgaccctgattgtaaggatggctccgatgaggtcaactgtccttcccggacctgtcggcctgatcagttcgagtgtgaagacgggtcgtgtatccatgggtcccggcaatgcaacgggataagagattgcgtggacgggagcgatgaagtgaattgcaagaacgtaaaccaatgcttgggcccaggaaagttcaaatgtcgctccggagaatgcatcgacatttcaaaagtctgcaaccaggagcaggactgccgggactggtcagacgaacccctgaaggagtgtcacatcaacgagtgccttgtgaataatggtggctgctcccatatttgtaaggatcttgttatcggctacgaatgcgattgcgcagcgggtttcgaactgattgataggaagacctgcggtgacatcgatgaatgtcaaaacccgggtatctgtagccagatctgtatcaatctaaaagggggttataaatgcgagtgctcgaggggataccaaatggacctagccacgggtgtgtgcaaagcggtggggaaggaaccttccctcatcttcactaatagaagggacatccgcaagatcgggcttgagcgaaaggaatacatccagcttgtggaacagctcaggaataccgtcgccctcgacgccgacatcgccgctcaaaagttgttttgggcagacctatcccaaaaagccatcttcagtgcctccatcgatgacaaggtcggcagacatgtgaaaatgatcgataatgtgtacaaccctgccgcaattgcggttgactgggtgtataaaaccatctactggaccgatgccgcatccaagactatttccgtggctaccctcgacgggactaagagaaaatttctgttcaacagtgatttacgggagcccgcttctattgcggtggatccactgagtggctttgtgtattggtctgattggggagaacccgctaagatcgagaaagcgggtatgaacggatttgataggagacccctagtgacagcagacatccagtggcccaatggcatcacgttggatttgataaaatcccgcctgtattggcttgactccaaactacatatgctgtcgtcagtggacctgaacggacaggaccggaggattgttctgaagagccttgaattcttagctcatcccctcgccttaactattttcgaggatcgcgtttattggatcgacggggagaatgaggccgtgtacggggcaaacaaattcacagggtcggaactcgcaacattggttaataatctgaatgacgcacaggacattattgtctaccatgagcttgtccagccctcagggaaaaattggtgtgaggaggacatggaaaacgggggttgcgagtacttgtgtctgcctgcaccccagattaatgatcactcccctaaatacacatgctcatgtcccagcggctataatgtggaggaaaacgggcgagattgccagtcaaccgccaccacagttacatattctgagacgaaagatactaataccactgagatatctgccacatcgggtttggtcccaggagggattaatgtcactactgccgtatctgaagtgagtgtaccgcctaaagggactagcgccgcatgggccattctgcctttgttgctattggttatggccgcagtgggtgggtaccttatgtggcgcaactggcagcacaagaatatgaagagcatgaatttcgataaccccgtgtatttgaaaacaacagaggaagatctgtcaattgatatcggtagacactctgctagtgtaggacacacctacccagcgattagcgtagttagtaccgacgatgacctggcttag

SEQ ID NO: 309541 - DNA, 522 bp, Artificial Sequence
  derived and/or modified sequence
atgggaacttcggcactttgggccctgtggctactgcttgcactgtgttgggctccgcgtgaatctggcgctactggtaccggcaggaaagccaagtgcgagccgtctcagttccagtgcactaatggcaggtgcatcacactgttgtggaagtgtgatggagatgaggactgcgtagatggcagcgacgaaaaaaattgtgtaaagaaaacatgcgcggagtcggattttgtttgtaataacggccaatgcgtcccatctagatggaagtgcgacggggatccagactgtgaggatggatcagatgagtcacccgagcaatgtcggaacatcacctgctccccagatgagttcacttgctcgagtggcaggtgcatctctcggaactttgtgtgtaacggccaggatgactgtagcgacgggtcagacgagcttgactgtgctccacccacttgtggtgctcacgagtttcagtgctcgacgtctagctgcattccaatttcttgggtctgcgacgactag

SEQ ID NO: 309542 - DNA, 2905 bp, Artificial Sequence
  derived and/or modified sequence
cggcggcggcggcggcaccatccaggcgggcaccatgggcacgtccgcgctctgggcgctctggctgctgctcgcgctgtgctgggcgccccgggagagcggcgccaccggaaccgggagaaaagccaaatgtgaaccctcccaattccagtgcacaaatggtcgctgtattacgctgttgtggaaatgtgatggggatgaagactgtgttgacggcagtgatgagctggactgtgccccgccaacctgtggcgcccatgagttccagtgcagcacctcctcctgcatccccatcagctgggtatgcgacgatgatgcagactgctccgaccaatctgatgagtccctggagcagtgtggccgtcagccagtcatacacaccaagtgtccagccagcgaaatccagtgcggctctggcgagtgcatccataagaagtggcgatgtgatggggaccctgactgcaaggatggcagtgatgaggtcaactgtccctctcgaacttgccgacctgaccaatttgaatgtgaggatggcagctgcatccatggcagcaggcagtgtaatggtatccgagactgtgtcgatggttccgatgaagtcaactgcaaaaatgtcaatcagtgcttgggccctggaaaattcaagtgcagaagtggagaatgcatagatatcagcaaagtatgtaaccaggagcaggactgcagggactggagtgatgagcccctgaaagagtgtcatataaacgaatgcttggtaaataatggtggatgttctcatatctgcaaagacctagttataggctacgagtgtgactgtgcagctgggtttgaactgatagataggaaaacctgtggagatattgatgaatgccaaaatccaggaatctgcagtcaaatttgtatcaacttaaaaggcggttacaagtgtgaatgtagtcgtggctatcaaatggatcttgctactggcgtgtgcaaggcagtaggcaaagagccaagtctgatcttcactaatcgaagagacatcaggaagattggcttagagaggaaagaatatatccaactagttgaacagctaagaaacactgtggctctcgatgctgacattgctgcccagaaactattctgggccgatctaagccaaaaggctatcttcagtgcctcaattgatgacaaggttggtagacatgttaaaatgatcgacaatgtctataatcctgcagccattgctgttgattgggtgtacaagaccatctactggactgatgcggcttctaagactatttcagtagctaccctagatggaaccaagaggaagttcctgtttaactctgacttgcgagagcctgcctccatagctgtggacccactgtctggctttgtttactggtcagactggggtgaaccagctaaaatagaaaaagcaggaatgaatggattcgatagacgtccactggtgacagcggatatccagtggcctaacggaattacacttgaccttataaaaagtcgcctctattggcttgattctaagttgcacatgttatccagcgtggacttgaatggccaagatcgtaggatagtactaaagtctctggagttcctagctcatcctcttgcactaacaatatttgaggatcgtgtctactggatagatggggaaaatgaagcagtctatggtgccaataaattcactggatcagagctagccactctagtcaacaacctgaatgatgcccaagacatcattgtctatcatgaacttgtacagccatcaggtaaaaattggtgtgaagaagacatggagaatggaggatgtgaatacctatgcctgccagcaccacagattaatgatcactctccaaaatatacctgttcctgtcccagtgggtacaatgtagaggaaaatggccgagactgtcaaagtactgcaactactgtgacttacagtgagacaaaagatacgaacacaacagaaatttcagcaactagtggactagttcctggagggatcaatgtgaccacagcagtatcagaggtcagtgttcccccaaaagggacttctgccgcatgggccattcttcctctcttgctcttagtgatggcagcagtaggtggctacttgatgtggcggaattggcaacacaagaacatgaaaagcatgaactttgacaatcctgtgtacttgaaaaccactgaagaggacctctccatagacattggtagacacagtgcttctgttggacacacgtacccagcaatatcagttgtaagcacagatgatgatctagcttgacttctgtgacaaatgttgacctttgaggtctaaacaaataatacccccgtcggaatggtaaccgagccagcagctgaagtctctttttcttcctctcggctggaagaacatcaagatacctttgcgtggatcaagcttgtgtacttgaccgtttttatattacttttgtaaatattcttgtccacattctacttcagctttggatgtggttaccgagtatctgtaacccttgaatttctagacagtattgccacctctggccaaatatgcactttccctagaaagccatattccagcagtgaaacttgtgctatagtgtataccacctgtacatacattgtataggccatctgtaaatatcccagagaacaatcactattcttaagcactttgaaaatatttctatgtaaattattgtaaactttttcaatggttgggacaatggcaataggacaaaacgggttactaagatgaaattgccaaaaaaatttataaactaattttgtacgtatgaatgatatctttgacctcaatggaggtttgcaaagactgagtgttcaaactactgtacattttttttcaagtgctaaaaaattaaaccaagcagcttaa

SEQ ID NO: 309543 - DNA, 736 bp, Artificial Sequence
  derived and/or modified sequence
ggtggctgggtgggtggggaggagactgtgcaagttgtaggggagggggtgccctcttcttccccgctcccttcccccgccaactccttcccctccttctccccctttcccctccccgcccccaccttcttcctcctttcggaaggactggtaacttgtcgtgcggagcgaacggcggcggcggcggcggcggcggcaccatccaggcgggcaccatgggcacgtccgcgctctgggcgctctggctgctgctcgcgctgtgctgggcgccccgggagagcggcgccaccggaaccgggagaaaagccaaatgtgaaccctcccaattccagtgcacaaatggtcgctgtattacgctgttgtggaaatgtgatggggatgaagactgtgttgacggcagtgatgaaaagaactgtgtaaagaagacgtgtgctgaatctgacttcgtgtgcaacaatggccagtgtgttcccagccgatggaagtgtgatggagatcctgactgcgaagatggttcagatgaaagcccagaacagtgccgcaatataacatgtagtcccgacgagttcacctgctccagtggccgctgcatctccaggaactttgtatgcaatggccaggatgactgcagcgatggcagtgatgagctggactgtgccccgccaacctgtggcgcccatgagttccagtgcagcacctcctcctgcatccccatcagctgggtatgcgacgatga

SEQ ID NO: 309544 - DNA, 390 bp, Artificial Sequence
  derived and/or modified sequence
tgaatcagcgcctacttcgccaccggcagcagcatgacctaccacttccaggagcactacaccctgagcgagaacagcagcagcctggtgagcagcctgcacagagacgtgaccctgaccagagagatgatcaccctgagcttcagaaccaccagaacccccagcctgctgctgtacgtgagcagcttctacgaggagtacctgagcgtgatcctggccaacaacggcagcctgcagatcagatacaagctggacagacaccagaaccccgacgccttcaccttcgacttcaagaacatggccgacggccagctgcaccaggtgaagatcaacagagaggaggccgtggtgatggtggaggtgatcccccagatgcagaagagcaactag

SEQ ID NO: 309545 - DNA, 543 bp, Artificial Sequence
  derived and/or modified sequence
tgaagagacgtgaccctgaccagagagatgatcaccctgagcttcagaaccaccagaacccccagcctgctgctgtacgtgagcagcttctacgaggagtacctgagcgtgatcctggccaacaacggcagcctgcagatcagatacaagctggacagacaccagaaccccgacgccttcaccttcgacttcaagaacatggccgacggccagctgcaccaggtgaagatcaacagagaggaggccgtggtgatggtggaggtgaaccagagcgccaagaagcaggtgatcctgagcagcggcaccgagttcaacgccgtgaagagcctgatcctgggcaaggtgctgggcagaagcggccccgtggacgagggcgagcccctggtgaacgccgacagaagagacagcgccgtgatcggcggcgtgatcgccgtggagatcttcatcctgctgtgcatcaccgccatcgccatcagaatctaccagcagagaaagctgagaaaggagaacgagagcaaggtgagcaagaaggaggagtgctag

SEQ ID NO: 309546 - DNA, 390 bp, Artificial Sequence
  derived and/or modified sequence
tgaatctcagcatatttcgctaccggttcgtctatgacttaccatttccaggaacactatacattaagtgaaaacagctcgagcctggtctccagtttacatcgcgacgtgaccctgacaagagagatgattacattatcgttccgcacaacccgtacacctagtttgctcctgtacgtgagttccttttatgaggagtacctgagcgtcatcctcgccaacaacggtagcctgcagatccgctacaaactggaccggcatcagaacccggatgcttttacattcgacttcaaaaatatggcagatggacaattacaccaagtgaaaatcaaccgtgaggaagcagtcgtcatggtggaggtcatcccccagatgcagaagtccaactag

SEQ ID NO: 309547 - DNA, 543 bp, Artificial Sequence
  derived and/or modified sequence
tagagggacgtcactttaacacgtgaaatgattacgttgtctttcaggactactcgaacaccttcgttactgttatatgtcagctcattttacgaggaatacctatccgtgatcttggcaaataacggcagtttacagattcggtacaagcttgatcgccatcagaatccagatgcgttcacgttcgatttcaagaacatggcagatggccaactgcaccaggttaagatcaatcgagaagaagcagtggtgatggttgaggtcaatcaatctgccaagaaacaagtcatcctttcctcggggacagagttcaacgccgtcaagtccctgattcttggtaaagttctcggccggtctggcccagtggatgagggcgagcctcttgtcaatgctgataggagggattccgccgtaatcggtggagtgatcgcggttgagatctttattctgctctgtatcacagcaatagcaattagaatctatcagcagaggaaactccggaaggagaacgaatctaaggtctcaaagaaggaagagtgctag

SEQ ID NO: 309548 - DNA, 390 bp, Artificial Sequence
  derived and/or modified sequence
tgaatttctgcctactttgccaccggcagctccatgacctaccacttccaggagcactacaccctgtctgagaacagcagcagcctggtgagcagcctgcacagagatgtgaccctgacccgggagatgatcaccctgtccttccgcaccaccaggacccccagcctgctgctgtatgtgagcagcttctatgaggagtacctgagcgtcatcctggccaacaacggcagcctgcagatccgctacaagctggacagacaccagaacccagatgccttcacctttgacttcaagaacatggctgatggccagctgcaccaggtgaagatcaaccgggaggaggccgtggtgatggtggaggtgatcccccagatgcagaagagcaactag

SEQ ID NO: 309549 - DNA, 543 bp, Artificial Sequence
  derived and/or modified sequence
tgaagagatgtgaccctgacccgggagatgatcaccctgtccttccgcaccaccaggacccccagcctgctgctgtatgtgtcctccttctatgaggagtacctgagcgtcatcctggccaacaacggcagcctgcagatccgctacaagctggacagacaccagaacccagatgccttcacctttgacttcaagaacatggctgatggccagctgcaccaggtgaagatcaaccgggaggaggccgtggtgatggtggaggtgaaccagagcgccaagaagcaggtgatcctgagcagcggcacagagttcaatgctgtgaagagcctcatcctgggcaaggtgctgggccgcagcggccctgtggatgaaggagagcccctggtgaatgctgacagaagagacagcgctgtgattggaggagtgattgctgtggagatcttcatcctgctgtgcatcacagccatcgccatccgcatctaccagcagaggaagctgaggaaagaaaatgaaagcaaggtgtccaagaaggaggagtgctag

SEQ ID NO: 309550 - DNA, 390 bp, Artificial Sequence
  derived and/or modified sequence
tgaatcagcgcctacttcgccaccggcagcagcatgacctaccactttcaggaacactacactctgtcagaaaattccagctccctggtttctagcctgcacagggatgtgaccctgactagggaaatgattaccctgtcgtttaggaccactagaacaccgtcactccttctttacgtgtctagcttctatgaagagtacctgagtgtgatactggcaaacaacggatcactgcagattagatacaagctggacagacatcagaaccctgacgctttcacctttgattttaaaaacatggctgacggtcaattgcatcaggtgaagatcaaccgggaggaagccgtagtcatggtcgaagtaattccgcaaatgcagaaatcaaattag

SEQ ID NO: 309551 - DNA, 543 bp, Artificial Sequence
  derived and/or modified sequence
tgacgggacgtgaccctgacccgggagatgatcaccctgagcttcaggactacacgcactcctagcctgctcctgtatgtgtcgtctttctacgaggagtatctgagcgtaatcttggccaataatgggtccctgcagattaggtacaaactggatcggcaccagaacccggacgcttttacctttgatttcaaaaacatggcagatgggcagcttcaccaagtgaaaatcaacagagaggaagccgtcgtcatggtggaagtaaatcagtcggcgaagaaacaggtgatactaagcagcgggaccgaattcaacgcagtcaagtcactgattctcggcaaagtgttagggaggagcgggcctgtggatgagggggagcctctggtaaatgctgatagaagagacagcgccgtgattggcggcgtcattgccgtagaaatttttattctgctctgcatcactgccatcgcgattaggatttaccagcagagaaagctgagaaaggaaaacgagagcaaggtaagcaagaaggaagagtgctag

SEQ ID NO: 309552 - DNA, 2115 bp, Artificial Sequence
  derived and/or modified sequence
agatttccgcatatttcgcaactggctcctcaatgacataccattttcaagaacattacactttaagtgaaaactccagctctctcgtttcttcattacacagagatgtaacattgaccagagaaatgatcacactgagcttccgaaccacacgaactccgagcttattgctgtatgtgagctctttctatgaggaatacctttcagttatcctcgccaacaatggaagtttgcagattaggtacaagctagatagacatcaaaatcctgatgcatttacctttgattttaaaaacatggctgatgggcaacttcaccaagtgaagattaacagagaagaagccgtggtcatggtagaggtaatcccacaaatgcaaaagtcaaactaactaatattattattttgagaacaaataatctaatgaaaaaatttgataataaatattaatagaagagcaacccattcagtgctgctcttccataagtcaagaagaggccaaatatggccaggatctgggagagaggaggtggttgtttattctgtattgctttgttttgtttgtttagcaatgcaattccgtcaaaggtattattaatattttactatttaaaatatcaaaatatctttatttgttttactttactcaataggggaatgttctctagtttatcatagtgactactggtggaatctattcattgatattgcagtgggaacttgtcttattccgattataaaagaacaaatactttagcaacttaaaaacacggtttaaaagcacacaacatagttattaaaatgggaataagtaagaaaatagacctgagtcaccacagaggaagtaaattacacattgtcattggcattggaaggaaaatatactgtatagagaacagcagtgcttggttttatgtttcatattttctccacagaatgagtacgtatttaagtttaaaacagccagttccatctttttcatggattctgccaattatagatccttccattatgaagaagagtaaagccagcaagtgggtacatcgtggatagggtggtagctgatggcatcataggaattgcttataaaatagcttccccttctaaatgattaattatttgaaggtggcttcttgagcttttgtagtggtacttaaaagtgatttattttcatctttcctttcctcatcttcctttgcttccttatcattaaaattgtactttgtgttgatgtttgcttctcatgggacatctaataggttaaccagagcgcaaagaaacaagtcatcttgtcctcagggacagaattcaacgccgtcaaatctctcatattgggaaaggttttaggtaagtaggagaaagagctttttcccaaaaaatctaagtgtcatgtcacaaactctggaagcattcatcatgctgaaagaagctccttgtcttacttgaataataatttcacagtgagtgacaatcaaggtgcaaactgtactcttgcctgagtgtacatataatcatgagtaagtgctgcctgtgagatgtgcaagggcgttcctggaaaaatacctccacacttaacctctcacttggcaatcatgcataatgaatcacggtatttttctaacccttcttgaaaagtgaaatgttatcaaagctgacacgaagttcacagattatgtatgtattaatcaacatcaactccggagaccatcattcaatgataaaactacatttgagttgaacacaagagaaaaaactggtaatcttattacagcagatgaatacagttttatttctctctcaagccctgctttgcctgttgtttccatcctttttgactttagtatctaacaggaatggggaggcatattcataaatatctgttacgcaaggtagaaagttacagtaattgtctatcatattgtctatcataacctgttgtaaaagcacagttagctttacatttaataaaggaactgaggaaagtaatcttttttaaaaaaaacccatcttatgtaactcaattaagaaaatgaactatactttaatattaggatcaaaaagttgaataatatttattatatacatctttgtttccttccaaataaaggagaacatgg

SEQ ID NO: 309553 - DNA, 4216 bp, Artificial Sequence
  derived and/or modified sequence
cagagatgtaacattgaccagagaaatgatcacactgagcttccgaaccacacgaactccgagcttattgctgtatgtgagctctttctatgaggaatacctttcagttatcctcgccaacaatggaagtttgcagattaggtacaagctagatagacatcaaaatcctgatgcatttacctttgattttaaaaacatggctgatgggcaacttcaccaagtgaagattaacagagaagaagccgtggtcatggtagaggttaaccagagcgcaaagaaacaagtcatcttgtcctcagggacagaattcaacgccgtcaaatctctcatattgggaaaggttttaggtcgttctggaccagtggatgagggagagcccttggttaatgcagacagaagagactctgctgtcatcggaggtgtgatagcagtggagatatttattttgctttgcatcactgccatagccatacgcatctatcaacagagaaagttacgcaaagaaaatgagtcaaaagtctcaaaaaaagaagagtgctaggacagctctaaacagtgagctcgatgtgcaaaacgcagtccatgaaaaccagaaagagtgagtcttctgattggcagctgtggctgtctctatcatcgtgactgtggacttccctgctgttgccatcagggtgcacacagcaggtgcagtgctgtcacctggctgaagatctgcagcctcagagcctctgggaggtccctttctccctcggtgaaacacagtcctccacatcaatttccaaacaatgaattaggtatggccattcatcactgttcagtagtttccccgtccaaaggctctcttccaaaactgcagtttgatctgtgttaataattgtggggttttagatgagaaaatgactataaagctgtggccctactttattttttaaaaatgacagaacttttgttcagatgtaaaagacaaaattgcactttaatgttttttgttacttgaaaacatatctgggatccctttttttggtcctctgctgatattataaaacaagaaatgcttcttggactaccttcactggcatttccatagtcctggaatccagagccaagtggcctatctaaaattcacagcccttttattctcctgtgtgatggttaatacaacacagttgaagcctggaaacactaccattatttttggtgtattgctttttctaattgactgtttttaatgattttgatacattttaatgttgaaattaatattgaatgttagctatgaaattttagtattgaattttataatggaacagaacattggtaggtaacaagatgcaagaggatgtcaatacaagattgtctgcctgtttttctttgtaatttgtaattacagtttttgtaacttgtgattatgtttttaactaaatttaccaccagatacaaacactacttcttacacagagttatcctttatttatatcattaagacgtgaatgaaacatcatcctaacttacttccccaagatattgagaggtcatatctgtttttcatcattcatttctttttctaaaagttgttactgatatgcttttgatttcctatgactctattatgttgtacagaacatcttttcaatttattaaaaaaaatagcttaactgaagatcactaattccttttctaaattttgaactgctctaggcataaatatcattgtgtattatcctttcatctaatcacttttggaatgtaaactgaaggctgttcactccaagttaagttaacatttacatgatgtttattaaatctgccagtctgatcaaaggtttatgaccatggggccaaattcccatagattacccaaaattgaatatgtgcagttaactggaacatgtctcattaaggtttacatacacactaagacagcaaaggattggaattaactttatggagacagttccagggactaatattgaagcagtggttatttgataatgcatggaaccaccatttggattcaataaaccaattacataaaagcaatgatgctacgctcttcatattccagataccaactgcctaccaaggactaatgagatggtatatttcttccacatcagggcaagctgaaaatatattgattcagcgttactgttatgtaaatgaatttccatcttctcatatgtgttatttttgaaagaatgaatacactctctgtcttaaatccgctcttaacaaatgatctcttctcagaatactacatctgtattgagagtacagacagcccattggtcactgcaccttttgcaagacagcgaaacggatgcatcaaattgcattgatacatcatcaccatcaatcttttgcactgatttttagacttaatcttcttatttgaaaataaactcatttttaaataaaataaaaaatattttagggaaagctctataaaattaaaattacagaattatatgctttttaaaatttatgcaaaaatgtgcagacaaatgtattctgtattggtttatgtatcactttgcccttgtatattttgagattattaagatttgttgacttttttggtttgatatttatcatctgttaaatttttccttttaaattattaaatgcaaagtgcaagaaaaagagataaatatttactgattgctagatgtaaaaatatctatgaatatatatatttaaacttctgccagagagcaaccatctgacagtcaacttactaaaatctaaattgagtactttttactgttgcagagaattaagtcactaaacgttatttagatatatagatgctagttgcaagtaacacccttttgtaatataaaagtaaaagcataataatttcccaacttttgtcttcaaattaaaaaagaaaatagcatataattaccattcttcatttgagaaagctgaagattctgatgcttaaaaacttcagaattctaatattaaaaatagagtggttcatgtgacattgaaggcttatctctgtaaaatagtgacactggtgagtggtattatctcaatatttttgtccaaattcaccttaggaagtcactgtaaatcttcattgtttcctaaaagtcattattacggcataaacttaacatactttgatagtagttagtactgatacgtgacatattctaccccgtgtctctgttactctgtctctattactgtgaaaagtcacagtaaatttaacattttcttccagactgtgtatgatctttcattgtaatagagacatggagtaggataagtcatgtattaacatataagatttttttaacctgctccctcagttttatagatgagacaaagataaggttgtaagagctaatctcttcaagtaggcagtactagtaagttgtcatgcgtggactgaactcctggcacttctttctcttaacttcaatccatagagaagcccaccttcctgccttcccagtattatttagcagaggagaaaatcatattaggctgtttgatactctgtttgcctagactgatcaataattctggatctttgttcacatcttctctgaaagaatatttgatgggaaatcttttttattttttaatttttgtgtacatactaggtgcatatatttatggagtacatgaaatgttttgatacaggcatgcactgtgaaataagcacatcatggagaatggggtatccatcccctcaacatttatcctttgtgttacaaacaacctgattacactctgtattttaaaatatgcagttaagtttttattgactatagtcaccctattgtgctatcatatagtaagttttactcattctttctactttttttgtacccattaacctatccccacctctgccccaccattatctcagctgtctactacttttttcagcctttactaaccatccttctactctatatccatgagttccgttgttttggtttttagatcccacaaataaatgagaacatggcaatgtttgtctttctatgcctggcctatttcacttaacataatgacctccagttccatccatgctgtcgcaagtgacaggatctcattctcttttatggctgaagagtactccattttgtatgtgaaccacattttcttcattcatctgttgatgaacacttagggtgtttccaaatcttagctgttataaacagtattgcaacaaataaaagagtgcagatgg

SEQ ID NO: 309554 - DNA, 390 bp, Artificial Sequence
  derived and/or modified sequence
taaattagcgcctattttgctaccgggtcttccatgacgtaccattttcaggagcattacaccttgagtgaaaatagctcaagccttgtgtcgtcacttcacagggatgtgacattgactcgagaaatgatcacactaagctttaggaccacccgcacaccctcacttctgctctatgtgtcttccttctatgaggaatacttaagcgtgatcctcgcgaataatggctccctacaaattaggtacaaactggatagacatcagaatcctgacgccttcacatttgatttcaagaatatggcggatggacaactgcatcaggtgaagataaaccgggaagaggctgtggtgatggtggaagtcattcctcaaatgcagaaaagcaattag

SEQ ID NO: 309555 - DNA, 543 bp, Artificial Sequence
  derived and/or modified sequence
tgaagagatgtaactctgacccgggagatgatcacactttcattcaggacaactagaactccctctctgctcctgtacgtctccagcttctacgaggaatacctttccgttatccttgccaataatggcagtctccaaatacgatataaattggatagacaccagaaccccgacgcattcacatttgattttaagaacatggctgacggccagctgcaccaggtcaagataaatagggaagaggctgtcgttatggtggaagtgaaccagagcgcgaaaaaacaggtcatactcagttccggtacggagtttaacgctgtgaaatctctgatccttgggaaggtgctcggacgaagtggcccagtggacgagggtgagccactcgtgaatgctgaccgtcgtgacagcgctgtgatcggtggggtgattgctgtggaaatatttatcctgctgtgcataaccgccatcgcaattcgtatttaccaacagcgaaagctcagaaaggagaatgaatcaaaagtcagcaagaaagaggaatgttag

SEQ ID NO: 309556 - DNA, 1056 bp, Artificial Sequence
  derived and/or modified sequence
atgctggaagtgctgcgggtgctgagtactagcagcgaagcccttcatcatgcagtaatatttctctttaacggcgccgaggagaacgtcttacaagcatcccacggctttattacacagcacccgtgggctagtttaattagagccttcatcaatctggaggccgcaggggttggcgggaaggagctggtctttcagacaggcccggaaaatccatggctcgtgcaggcttacgtatccgccgccaaacacccttttgcatctgtcgtggcccaagaagtgttccaatctggtatcatcccctctgatacagacttcaggatatatcgggacttcggaaatatccccggtatcgacctggcgtttatcgagaatggctatatctatcacaccaaatacgacacggcggatcggattctaaccgacagcatccaacgagccggtgataacatcctggccgttttaaagcacttagcgaccagcgatatgcttgctgccgcctctaagtatagacatgggaacatggtgtttttcgacgtcctaggcctttttgtgatcgcctaccctagtcggatcggaagcatcatcaattacatggtcgtcatgggcgtggtcctgtacctgggcaagaagttcttgcagccgaaacacaagaccggcaattataagaaggatttcctgtgcggactgggcattaccctgatttcttggtttacatccctggtaaccgtgctaattattgccgtgtttatcagtctgatcggccaatccctgtcctggtataaccacttctacgtgtcagtgtgtttgtacggaacagcaacggtggctaaaattatccttattcatacgctcgccaagcgattttattatatgaatgcatcagcccagtatcttggcgaggtgttttttgacataagcctgtttgttcactgctgcttcctggtgacacttacctaccaaggcctttgttcggcctttatatccgccgtctgggttgcttttccgcttctgaccaagctatgtgttcacaaagacttcaaacaacacgactag

SEQ ID NO: 309557 - DNA, 1260 bp, Artificial Sequence
  derived and/or modified sequence
atggttgtcatgggtgtcgtcctgtacctgggaaagaaatttctccagcccaagcataaaaccggcaactacaagaaggactttctctgtggtctagggattactttgatcagctggtttacctctttggtgaccgtgctgataatagccgtgttcatatccctgattgggcaatctctaagttggtacaatcacttctatgttagtgtttgtttatatggcacagcaactgtcgcaaagatcattctaatccatactctggcaaagcgattttattacatgaacgcttccgcacagtacctaggtgaggttttcttcgatatctcccttttcgtacattgttgctttttagtcacacttacataccagggcctttgttctgcttttatctccgcagtatgggtcgcgtttccactcctcactaaactttgcgtgcataaggattttaaacaacacggcgcccaggggaagttcattgcattctacctgctggggatgttcattccctacctctacgccctgtatttaatttgggctgtctttgaaatgtttactcctattctcggacggtcggggagcgaaattcctcccgacgtggtcttggcctccatcctggccggctgcaccatgatactatccagttacttcatcaactttatctacttggcaaagagtactaagaagactatgctgacactcacattggtgtgtgctattacctttctgctagtctgcagcggtacgttctttccgtattccagcaaccccgctaaccccaagcctaagcgcgttttcttgcagcacatgactaggacattccacgacctcgaagggaacgcggtaaagcgagactcaggaatctggattaacgggtttgactacacaggaatcagtcacattacaccccacataccggagattaatgactccattcgcgcacactgcgaagaaaacgcacccctatgcggctttccctggtacctgcccgttcattttttgatccggaaaaattggtatctccctgcacctgaagtttcaccccgcaatcctccacatttccgtcttatcagtaaggagcagactccatgggattccataaaactgaccttcgaggcgaccgcatgcttgcccattctccagatcctcgacctgcccgctagcacgattatgactaagccatacgtgctgctatgttcctcccctcagcgggtgaacacgtttagtgtagtctcatggcagtggcaccccagccataaatag

SEQ ID NO: 309558 - DNA, 1056 bp, Artificial Sequence
  derived and/or modified sequence
atgctggaggtgctgcgggtgctgagcaccagcagcgaggccctgcaccacgccgtcatcttcctgttcaacggggctgaggagaatgtgctgcaggccagccacggcttcatcacccagcacccctgggccagcctcatccgggccttcatcaacctggaggccgccggcgtgggcggcaaggagctggtgttccagacaggccctgagaacccctggctggtgcaggcctacgtgtctgctgccaagcacccctttgcctctgtggtggcccaggaggtgttccagagcggcatcatccccagcgacacagacttccgcatctacagagactttggaaacatccctggcatcgacctggccttcattgaaaatggctacatctaccacaccaagtatgacacagctgaccgcatcctgacagacagcatccagagagctggggacaacatcctggccgtgctgaagcacctggccaccagtgacatgctggccgccgccagcaagtaccgccacggcaacatggtgttctttgatgtgctgggcctcttcgtcatcgcctaccccagccgcatcggcagcatcatcaactacatggtggtgatgggcgtggtgctgtacctgggcaagaagttcctgcagcccaagcacaagacaggcaactacaagaaggacttcctgtgtggcctgggcatcaccctcatctcctggttcaccagcctggtgacagtgctgatcatcgctgtgttcatcagcctcatcggccagagcctgtcctggtacaaccacttctacgtgtctgtgtgcctgtatggaacagccaccgtggccaagatcatcctgatccacaccctggccaagcgcttctactacatgaatgccagcgcccagtacctgggggaggtgttctttgacatcagcctgtttgtgcactgctgcttcctggtgaccctgacctaccagggcctgtgcagcgccttcatctctgctgtgtgggtggccttccccctgctgaccaagctgtgtgtgcacaaggacttcaagcagcacgactag

SEQ ID NO: 309559 - DNA, 1260 bp, Artificial Sequence
  derived and/or modified sequence
atggtggtgatgggcgtggtgctgtacctgggcaagaagttcctgcagcccaagcacaagacaggcaactacaagaaggacttcctgtgtggcctgggcatcaccctcatctcctggttcaccagcctggtgacagtgctgatcatcgctgtgttcatcagcctcatcggccagagcctgtcctggtacaaccacttctacgtgtctgtgtgcctgtatggaacagccaccgtggccaagatcatcctgatccacaccctggccaagcgcttctactacatgaatgccagcgcccagtacctgggggaggtgttctttgacatcagcctgtttgtgcactgctgcttcctggtgaccctgacctaccagggcctgtgcagcgccttcatctctgctgtgtgggtggccttccccctgctgaccaagctgtgtgtgcacaaggacttcaagcagcacggggcccagggcaagttcatcgccttctacctgctgggcatgttcatcccctacctgtatgccctgtacctgatctgggccgtgtttgagatgttcacccccatcctgggccgcagcggcagcgagatccccccagatgtggtgctggccagcatcctggccggctgcaccatgatcctgagcagctacttcatcaacttcatctacctggccaagagcaccaagaagaccatgctgaccctgaccctggtgtgtgccatcaccttcctgctggtgtgcagcggcaccttcttcccctacagcagcaacccagccaaccccaagcccaagagggtcttcctgcagcacatgaccaggaccttccatgacctggagggcaatgctgtgaagagggacagcggcatctggatcaatggatttgactacacaggcatcagccacatcaccccccacatccctgagatcaatgacagcatccgggcccactgtgaagaaaatgcccccctgtgtggcttcccctggtacctgcctgtgcacttcctgatcaggaagaactggtacctgcctgcccctgaggtgagccccaggaaccccccccacttccgcctcatcagcaaggagcagaccccctgggacagcatcaagctgacctttgaggccacagcctgcctgcccatcctgcagatcctggacctgcctgccagcaccatcatgaccaagccctacgtgctgctgtgcagcagcccccagagggtgaacaccttctctgtggtgtcctggcagtggcaccccagccacaagtag

SEQ ID NO: 309560 - DNA, 1056 bp, Artificial Sequence
  derived and/or modified sequence
atgctggaggtgctgcgggtgctgagcaccagcagcgaggccctgcatcacgcggttattttcctgtttaacggcgctgaggaaaatgtgctccaagcgagccacgggtttattactcagcatccttgggcctccctcatccgcgcattcattaatcttgaggccgccggcgttggaggaaaagaactggtcttccaaaccggcccagagaatccttggttggttcaggcctacgttagcgcagccaaacatccatttgcctccgtcgttgcacaagaggtattccaatccggaatcatcccaagcgatacagactttcgcatttatcgagacttcggcaatattcccggaatcgacctggccttcattgagaacggatatatctaccacacaaagtacgacaccgcagaccggattttaactgattccatccaaagggcgggcgacaacatcctagccgtcctcaaacatcttgccaccagtgacatgctcgccgcggcctcaaaatacagacacggtaacatggttttcttcgatgtcctcgggctctttgtcatcgcatatccctctcgaataggaagtatcattaactacatggtggtgatgggggtggtcctgtacctcgggaagaaattccttcagcccaagcacaaaacgggcaactataagaaggattttttatgtgggcttggaatcaccctgattagctggttcacaagtctggtcaccgtgctgatcattgcagtattcatctctctgataggccaatcgctgtcctggtacaaccacttctatgtttccgtttgtctatatggaactgccaccgtggctaaaatcatcctgatccatacgctcgccaaacgcttctattatatgaacgcttcagcacaatatctcggcgaagtattcttcgacatctcactattcgtacattgttgcttcctcgttacattgacctaccagggtctgtgctccgcatttataagcgcggtgtgggtggcattccctctgctgacaaagctttgtgtgcacaaagacttcaaacaacatgattag

SEQ ID NO: 309561 - DNA, 1260 bp, Artificial Sequence
  derived and/or modified sequence
atggtggtgatgggcgtggtgctgtacctgggcaagaagttcctgcagcccaagcacaaaaccgggaattataagaaggacttcttgtgtggactgggcatcacactcatctcctggtttacatcactggtgactgtgctcatcatagcagtattcatatctttgattggtcaaagcttaagttggtacaaccacttttacgtttcagtatgcctgtatgggactgccaccgttgccaaaatcatcctgatacatactttggctaaaagattttactacatgaacgcctcggctcagtatttgggtgaggttttcttcgatatctccttattcgttcactgctgctttttggtgaccctgacctaccaaggtctgtgtagcgcttttatcagtgctgtgtgggtagcctttcctctgctcaccaaattgtgcgtgcataaagatttcaaacagcatggtgctcagggtaagtttatcgctttctacctgctaggaatgttcatcccgtatctgtacgcactctacctgatctgggcagtgttcgaaatgttcacacctatactcggacgatccgggagcgaaattcctccggatgtcgtactggcgtcaatcctggctggctgtacaatgattcttagtagctatttcatcaatttcatctacctggccaagtccactaagaagaccatgttgacacttaccttagtatgtgccattactttcttactcgtgtgttccgggactttttttccatatagcagcaaccccgccaatcccaagccaaagagagtgtttttacagcatatgacgcgcacttttcacgatctggagggcaacgccgtgaaacgtgactctggaatctggatcaacggttttgactacacaggcatttctcacataacgccacacatcccggaaattaacgactcgatcagagcacactgtgaagaaaatgcccccctatgcggatttccctggtatctgccggtccacttcctcatccggaaaaactggtatttgcccgcccccgaggtctcaccgaggaatcctccccactttagactcatcagtaaggagcagacgccttgggattctatcaaactgactttcgaggcaaccgcctgtctgcccatactgcaaatactcgatctgccagccagtacaatcatgacaaaaccctatgttctgctctgctcatccccccagcgtgtaaacaccttctccgttgtgagttggcagtggcatccatctcataaatag

SEQ ID NO: 309562 - DNA, 1056 bp, Artificial Sequence
  derived and/or modified sequence
atgctcgaggttctgagggtgctgtctacaagcagcgaggcgctgcatcatgccgtgatttttttgtttaacggtgcagaggaaaatgtgctgcaggcgtcacatggctttatcactcagcacccgtgggccagtttaattagggcctttatcaacttggaggccgcaggcgttgggggaaaggagctggtctttcagacagggccagaaaacccctggctcgtgcaggcctatgtcagcgctgcaaagcatccattcgcaagtgtagtggctcaggaagtatttcagagcggcatcataccctctgacaccgactttagaatctacagagattttgggaatataccaggaatcgacctcgcctttattgaaaatgggtacatttaccatactaaatacgatacggctgatcgaatacttactgacagcatccaacgggcaggggacaatattctggccgttctgaagcacttagccacaagcgacatgcttgccgcagcatcgaagtatcgccacggaaatatggtgttttttgacgtgcttggcctatttgtaatcgcctacccaagtcgtattggaagcattatcaactacatggtggtaatgggcgtggtactgtatctgggcaagaagttcctgcagcctaaacacaaaaccggaaactataaaaaggactttctctgcggcctcggcatcacgctgatatcttggttcacatccctcgttactgtactgattattgccgtcttcatctctttgatcggtcagagcctgtcctggtacaatcacttctatgtttccgtctgcctgtacgggacggcaacagtggctaagattatactcatccacacgctggccaaacgtttttactatatgaatgcgtcagctcagtatctgggcgaggtgtttttcgacattagtctgtttgtacactgctgtttcttggtgacactgacgtaccaaggactctgttccgccttcattagcgcagtgtgggtggcctttccgctgttaacaaagctctgtgttcataaagatttcaagcaacatgattag

SEQ ID NO: 309563 - DNA, 1260 bp, Artificial Sequence
  derived and/or modified sequence
atggtggtgatgggcgtagtgctctatctgggtaagaagtttctgcagcccaaacacaaaactgggaactacaaaaaggacttcctgtgcggcctgggtattaccttaatttcgtggttcacctctctcgtcacagttctgatcattgcagtctttatctcgctgatcggacagagcttgtcatggtataaccacttctacgtgagcgtgtgtctgtatggcacagccacggttgctaaaattatattaatacacaccctcgcgaagcgattctattacatgaatgcctcagcccagtacctgggcgaagtgttcttcgacatcagcctgttcgtgcattgttgctttctggtgactttgacctatcaaggcctgtgttctgcttttatctctgcagtctgggtcgccttcccgcttttgaccaagttgtgtgtgcacaaagatttcaaacaacacggagcacaaggcaagttcatcgcattctacctgcttggaatgttcatcccttatctatatgcgttgtacctcatttgggccgttttcgagatgttcactcccattctgggaagaagtggaagtgagatccctccagacgtggtccttgcatcaatactggctggttgtactatgattcttagctcatacttcattaatttcatctatttggctaagtccaccaagaaaacaatgttaactttgacattagtgtgcgcgattacttttctcctggtgtgctctggcaccttcttcccatatagtagtaatcccgcaaaccctaaaccaaaaagggtatttctgcagcacatgacccgcacatttcacgacctggaaggaaatgccgtgaaacgagactcagggatttggattaatggatttgactataccggcattagccatattaccccgcacattcccgaaattaatgatagcatccgtgcccactgtgaagagaatgcccctttgtgtggattcccatggtacctcccagttcactttctgatccgcaagaattggtatctgcccgcaccagaggtgtccccgaggaatcctccacatttccgcctgatttctaaggagcagactccctgggactctattaaactgacctttgaagcgacagcatgtttgcctatcctgcagatcttggacctccctgccagcactatcatgactaaaccgtacgtattactgtgttctagccctcaaagggtcaacacttttagcgtggtgagctggcaatggcacccctcccacaagtag

SEQ ID NO: 309564 - DNA, 1056 bp, Artificial Sequence
  derived and/or modified sequence
atgctggaggtgctgagagtgctgagcaccagcagcgaggccctgcaccacgccgtgatcttcctgttcaacggcgccgaggagaacgtgctgcaggccagccacggcttcatcacccagcacccctgggccagcctgatcagagccttcatcaacctggaggccgccggcgtgggcggcaaggagctggtgttccagaccggccccgagaacccctggctggtgcaggcctacgtgagcgccgccaagcaccccttcgccagcgtggtggcccaggaggtgttccagagcggcatcatccccagcgacaccgacttcagaatctacagagacttcggcaacatccccggcatcgacctggccttcatcgagaacggctacatctaccacaccaagtacgacaccgccgacagaatcctgaccgacagcatccagagagccggcgacaacatcctggccgtgctgaagcacctggccaccagcgacatgctggccgccgccagcaagtacagacacggcaacatggtgttcttcgacgtgctgggcctgttcgtgatcgcctaccccagcagaatcggcagcatcatcaactacatggtggtgatgggcgtggtgctgtacctgggcaagaagttcctgcagcccaagcacaagaccggcaactacaagaaggacttcctgtgcggcctgggcatcaccctgatcagctggttcaccagcctggtgaccgtgctgatcatcgccgtgttcatcagcctgatcggccagagcctgagctggtacaaccacttctacgtgagcgtgtgcctgtacggcaccgccaccgtggccaagatcatcctgatccacaccctggccaagagattctactacatgaacgccagcgcccagtacctgggcgaggtgttcttcgacatcagcctgttcgtgcactgctgcttcctggtgaccctgacctaccagggcctgtgcagcgccttcatcagcgccgtgtgggtggccttccccctgctgaccaagctgtgcgtgcacaaggacttcaagcagcacgactag

SEQ ID NO: 309565 - DNA, 1260 bp, Artificial Sequence
  derived and/or modified sequence
atggtggtgatgggcgtggtgctgtacctgggcaagaagttcctgcagcccaagcacaagaccggcaactacaagaaggacttcctgtgcggcctgggcatcaccctgatcagctggttcaccagcctggtgaccgtgctgatcatcgccgtgttcatcagcctgatcggccagagcctgagctggtacaaccacttctacgtgagcgtgtgcctgtacggcaccgccaccgtggccaagatcatcctgatccacaccctggccaagagattctactacatgaacgccagcgcccagtacctgggcgaggtgttcttcgacatcagcctgttcgtgcactgctgcttcctggtgaccctgacctaccagggcctgtgcagcgccttcatcagcgccgtgtgggtggccttccccctgctgaccaagctgtgcgtgcacaaggacttcaagcagcacggcgcccagggcaagttcatcgccttctacctgctgggcatgttcatcccctacctgtacgccctgtacctgatctgggccgtgttcgagatgttcacccccatcctgggcagaagcggcagcgagatcccccccgacgtggtgctggccagcatcctggccggctgcaccatgatcctgagcagctacttcatcaacttcatctacctggccaagagcaccaagaagaccatgctgaccctgaccctggtgtgcgccatcaccttcctgctggtgtgcagcggcaccttcttcccctacagcagcaaccccgccaaccccaagcccaagagagtgttcctgcagcacatgaccagaaccttccacgacctggagggcaacgccgtgaagagagacagcggcatctggatcaacggcttcgactacaccggcatcagccacatcaccccccacatccccgagatcaacgacagcatcagagcccactgcgaggagaacgcccccctgtgcggcttcccctggtacctgcccgtgcacttcctgatcagaaagaactggtacctgcccgcccccgaggtgagccccagaaaccccccccacttcagactgatcagcaaggagcagaccccctgggacagcatcaagctgaccttcgaggccaccgcctgcctgcccatcctgcagatcctggacctgcccgccagcaccatcatgaccaagccctacgtgctgctgtgcagcagcccccagagagtgaacaccttcagcgtggtgagctggcagtggcaccccagccacaagtag

SEQ ID NO: 309566 - DNA, 2054 bp, Artificial Sequence
  derived and/or modified sequence
gatggagcccagcatgctgtcttggctaattgtcattttgactcagtagcaaactcaccaggtgccagtgatgatgcagttagctgctcagtgatgctggaagtccttcgcgtcttgtcaacatcttcagaagccttgcatcatgctgtcatatttctctttaatggtgctgaggaaaatgtcttgcaagccagtcatggtttcattactcagcacccctgggctagcttgattcgtgcattcattaacctagaggcagcaggtgtaggagggaaagaacttgtattccaaacaggtcctgaaaatccttggttggttcaagcttatgtttcagcagctaaacacccttttgcttctgtggtggctcaggaggtttttcagagtggaatcattccttcagatactgactttcgtatctacagggattttgggaacattccaggaatagacttagcttttattgagaatggatacatttatcacaccaagtatgacacagcggacagaattctaacagattccattcagagagcaggtgacaacattttagcagttcttaagcatctagctacatctgatatgctggctgctgcttctaagtatcgacatggaaacatggtcttctttgatgtgctgggcctgtttgtcattgcctacccctctcgtattggctcaatcataaactacatggtggtaatgggtgttgttttgtacctgggcaaaaaatttttgcagcccaaacataagactggtaactacaagaaggacttcttgtgtggacttggcatcactttgatcagctggttcactagccttgttaccgttctcattatagcagtgttcatctctcttattggacagtctctctcatggtataaccacttctatgtctccgtttgtctgtatggaactgcaactgtagccaaaataatacttatacatactcttgcgaaaagattttattacatgaatgccagtgcccagtatctgggagaagtattttttgacatttcgctgtttgtccattgctgttttcttgttaccctcacttaccaaggactttgctcggcgtttattagtgctgtctgggtagcattcccattgctcacaaagctctgtgtgcataaggacttcaagcagcatgattaacttcatctaccttgccaagagcacaaaaaaaaccatgctaactttaactttggtatgtgcaattacattcctccttgtttgcagtggaacattttttccatatagctccaatcctgctaatccgaagccaaagagagtgtttcttcagcatatgactagaacattccatgacttggaaggaaatgcagttaaacgggactctggaatatggatcaatgggtttgattatactggaatttctcacataacccctcacattcctgagatcaatgatagtatccgagctcactgtgaggagaatgcacctctttgtggttttccttggtatcttccagtgcactttctgatcaggaaaaactggtatcttcctgccccagaagtttctccaagaaatcctcctcatttccgactcatatccaaagaacagacaccttgggattctataaaattgacttttgaagcaacaggaccaagccatatgtccttctatgttcgagcccacaaagggtcaacactttctcagtggtctcttggcaatggcaccccagtcacaagtaaaggaggagactactttgtcttttactcccatggactccaggcctctgcatggcagttctggatagaagtgcaggtttcagaagaacatcctgaaggaatggtcaccgtggccattgctgcccactatctgtctggggaagacaagagatcccctcaactggatgctctgaaggaaaagttcccagattggacatttccctctgcctgggtgtgcacctacgatctctttgtattttaatcttgtggatgagctctaagtacatgcccagtggatactccatgtgacatggtttctccctatgttacgtggatgtttgtaacgtaagtcaatgaattttaatgatcat

SEQ ID NO: 309567 - protein, 503 aa, Artificial Sequence
  derived and/or modified sequence
MASNHKSSAARPVSRGGVGLTGRPPSGIRPLSGNIRVATAMPPGTARPGSRGCPIGTGGVLSSQIKVAHRPVTQQGLTGMKTGTKGPQRQILDKSYYLGLLRSKISELTTEVNKLQKGIEMYNQENSVYLSYEKRAETLAVEIKELQGQLADYNMLVDKLNTNTEMEEVMNDYNMLKAQNDRETQSLDVIFTERQAKEKQIRSVEEEIEQEKQATDDIIKNMSFENQVKYLEMKTTNEKLLQELDTLQQQLDSQNMKKESLEAEIAHSQVKQEAVLLHEKLYELESHRDQMIAEDKSIGSPMEEREKLLKQIKDDNQEIASMERQLTDTKEKINQFIEEIRQLDMDLEEHQGEMNQKYKELKKREEHMDTFIETFEETKNQELKRKAQIEANIVALLEHCSRNINRIEQISSITNQELKMMQDDLNFKSTEVQKSQSTAQNLTSDIQRLQLDLQKMELLESKMTEEQHSLKSKIKQMTTDLEIYNDLPALKSSGEKKKKKKKK

SEQ ID NO: 309568 - DNA, 1512 bp, Artificial Sequence
  derived and/or modified sequence
atggccagcaaccacaagagcagcgccgccagacccgtgagcagaggcggcgtgggcctgaccggcagaccccccagcggcatcagacccctgagcggcaacatcagagtggccaccgccatgccccccggcaccgccagacccggcagcagaggctgccccatcggcaccggcggcgtgctgagcagccagatcaaggtggcccacagacccgtgacccagcagggcctgaccggcatgaagaccggcaccaagggcccccagagacagatcctggacaagagctactacctgggcctgctgagaagcaagatcagcgagctgaccaccgaggtgaacaagctgcagaagggcatcgagatgtacaaccaggagaacagcgtgtacctgagctacgagaagagagccgagaccctggccgtggagatcaaggagctgcagggccagctggccgactacaacatgctggtggacaagctgaacaccaacaccgagatggaggaggtgatgaacgactacaacatgctgaaggcccagaacgacagagagacccagagcctggacgtgatcttcaccgagagacaggccaaggagaagcagatcagaagcgtggaggaggagatcgagcaggagaagcaggccaccgacgacatcatcaagaacatgagcttcgagaaccaggtgaagtacctggagatgaagaccaccaacgagaagctgctgcaggagctggacaccctgcagcagcagctggacagccagaacatgaagaaggagagcctggaggccgagatcgcccacagccaggtgaagcaggaggccgtgctgctgcacgagaagctgtacgagctggagagccacagagaccagatgatcgccgaggacaagagcatcggcagccccatggaggagagagagaagctgctgaagcagatcaaggacgacaaccaggagatcgccagcatggagagacagctgaccgacaccaaggagaagatcaaccagttcatcgaggagatcagacagctggacatggacctggaggagcaccagggcgagatgaaccagaagtacaaggagctgaagaagagagaggagcacatggacaccttcatcgagaccttcgaggagaccaagaaccaggagctgaagagaaaggcccagatcgaggccaacatcgtggccctgctggagcactgcagcagaaacatcaacagaatcgagcagatcagcagcatcaccaaccaggagctgaagatgatgcaggacgacctgaacttcaagagcaccgaggtgcagaagagccagagcaccgcccagaacctgaccagcgacatccagagactgcagctggacctgcagaagatggagctgctggagagcaagatgaccgaggagcagcacagcctgaagagcaagatcaagcagatgaccaccgacctggagatctacaacgacctgcccgccctgaagagcagcggcgagaagaagaagaagaagaagaagaagtag

SEQ ID NO: 309569 - DNA, 1512 bp, Artificial Sequence
  derived and/or modified sequence
atggctagtaaccacaagtcgagtgctgcgcgccccgttagccggggcggggtcgggttgaccgggcgtcccccaagcggcatacggccgctgtctggaaacatcagagtagcaaccgctatgcctccgggcaccgctcggcccggcagcagagggtgcccgatcggaacgggcggggtcctgagcagccagatcaaagtcgctcatcggccggttacgcagcaaggactcacaggcatgaagactggtactaagggaccacaacgccagatcctagacaagtcttactaccttggacttttaaggagcaagatttcagagctgaccactgaagtcaataagctacagaagggtatcgagatgtataaccaggaaaacagcgtatacttatcatatgaaaagagagctgaaacattggctgtggagatcaaagaactccagggacagctcgcagactataacatgctcgtggacaagctaaacacaaataccgagatggaagaggtgatgaacgactataatatgcttaaggcacagaacgatagggagacacaatctcttgatgtgatatttactgagcggcaggcaaaagaaaaacagatacgctctgtggaagaggaaatcgaacaagaaaaacaagcaaccgacgacatcattaaaaacatgtcttttgagaatcaggtcaagtatttggagatgaaaactacaaacgaaaagctcctccaggaactggatactttgcagcagcaactggactcccagaacatgaagaaggaatcactcgaggctgaaatagcacattctcaagttaagcaggaggcagtgctcttgcacgagaagctttatgagctcgagtcccatagagatcaaatgattgcagaggacaagtctataggctctcctatggaggagagggagaaattgctcaagcagattaaagatgacaatcaggagattgcaagtatggaaaggcaacttacagatacaaaagagaaaattaaccagttcattgaggagattcgtcaactggacatggaccttgaggagcatcaaggggaaatgaatcagaagtacaaagagctaaagaagagggaggagcatatggacacgttcatcgaaaccttcgaggagacaaagaatcaagagctcaagcgcaaagcacagatagaagctaacatcgtggccttgttagagcactgcagcagaaatatcaacagaattgaacagataagcagcatcactaatcaggagttaaaaatgatgcaggacgatttaaatttcaagtccaccgaggttcagaagtcacagagcacagcacagaacctgacctccgacatccagcgtctgcaattggatctccagaaaatggaactcctggagagcaaaatgaccgaagagcagcattctttgaaatctaaaataaaacaaatgacaacagacttggaaatctataacgacctgcccgcgcttaagtcatccggcgagaaaaagaaaaagaagaaaaaaaagtag

SEQ ID NO: 309570 - DNA, 1512 bp, Artificial Sequence
  derived and/or modified sequence
atggccagcaaccacaagagcagcgctgcccggcctgtgtcccggggcggcgtgggcctgaccggccggccccccagcggcatccggcccctgagcggcaacatccgggtggccacagccatgcctcctggaacagcccggcccggcagccggggctgccccatcggcactggaggagtgctgagcagccagatcaaggtggcccacaggcctgtgacccagcagggcctgaccggcatgaagacaggcaccaagggcccccagaggcagatcctggacaagagctactacctgggcctgctgcggagcaagatcagcgagctgaccacagaggtgaacaagctgcagaagggcatcgagatgtacaaccaggagaacagcgtgtacctgtcctatgagaagagagctgagaccctggccgtggagatcaaggagctgcagggccagctggccgactacaacatgctggtggacaagctgaacaccaacacagagatggaggaggtgatgaatgactacaacatgctgaaggcccagaatgaccgggagacccagagcctggatgtgatcttcacagagcggcaggccaaggagaagcagatccgctctgtggaggaggagattgagcaggagaagcaggccacagatgacatcatcaagaacatgagctttgagaaccaggtgaagtacctggagatgaagaccaccaatgagaagctgctgcaggagctggacaccctgcagcagcagctggacagccagaacatgaagaaggagagcctggaggccgagatcgcccacagccaggtgaagcaggaggccgtgctgctgcacgagaagctgtatgagctggagagccaccgggaccagatgattgctgaggacaagagcatcggcagccccatggaggagcgggagaagctgctgaagcagatcaaggatgacaaccaggagatcgcctccatggagcggcagctgacagacaccaaggagaagatcaaccagttcatcgaggagatccggcagctggacatggacctggaggagcaccagggcgagatgaaccagaagtacaaggagctgaagaagcgggaggagcacatggacaccttcatcgagacctttgaggagaccaagaaccaggagctgaagaggaaggcccagatcgaggccaacatcgtggccctgctggagcactgcagcaggaacatcaacagaattgagcagatcagcagcatcaccaaccaggagctgaagatgatgcaggatgacctgaacttcaagagcacagaggtgcagaagagccagagcacagcccagaacctgaccagtgacatccagaggctgcagctggacctgcagaagatggagctgctggagagcaagatgacagaggagcagcacagcctgaagagcaagatcaagcagatgaccacagacctggagatctacaatgacctgcctgccctgaagagcagtggagagaagaagaagaagaagaagaagaagtag

SEQ ID NO: 309571 - DNA, 1512 bp, Artificial Sequence
  derived and/or modified sequence
atggccagcaaccacaagagcagcgccgcccggcccgtgagccggggcggtgtgggactgacaggtcggccacccagcggtatccgacccctgtccggcaatattagggtcgccactgcgatgccccctggcactgcaagaccaggaagccgcggctgcccaatcggtaccggtggggttctctcttcacagattaaagttgctcataggcctgtgacacagcaggggctgaccgggatgaagaccgggacaaaagggccgcagagacaaattttagacaaatcatactaccttggcctgcttcgctcaaaaatctccgaactgactaccgaggttaacaaactacagaaggggattgagatgtacaaccaggagaacagtgtctatctatcgtacgaaaagcgcgctgaaactctcgccgtagaaatcaaggagctccagggtcagcttgctgattacaacatgttggtggataagttgaataccaacactgaaatggaagaggtgatgaacgattacaatatgttaaaggcccagaatgaccgtgaaacacaatcactcgacgtcatctttacagagcggcaagccaaagagaagcagatcaggtctgtagaggaggagatcgaacaggagaaacaagctaccgacgacatcatcaaaaacatgtcttttgagaatcaggtgaaatacttggaaatgaagacgacgaacgagaagctgcttcaagagctagacaccctgcaacagcagttggatagccagaacatgaagaaagagtcactagaggcagaaattgcccactctcaggtcaaacaggaggcggttctgctccacgagaagttgtatgaactggagtcacacagggaccaaatgatcgcagaggataaatccattggtagtccgatggaggagcgcgagaagctgctgaaacagattaaagatgataaccaggagatagccagtatggagaggcagctgacagacaccaaagaaaagatcaatcagttcattgaagagatccggcagttagacatggatctagaagagcaccaaggagagatgaatcagaagtacaaggagttgaagaagcgcgaggaacacatggacaccttcatcgagacctttgaagagacaaagaaccaagagttaaagaggaaggcgcaaatcgaggctaatatagtggccctgctggagcactgttctaggaatataaaccgcatcgaacaaatctcctcgatcacgaaccaggaactcaagatgatgcaggacgatcttaactttaagagcaccgaggttcagaagagccagagcacagcccagaacctcacaagtgatattcagcggctccagctggatctgcagaaaatggagctcttggagtctaaaatgaccgaagaacagcactcacttaagtctaaaattaaacagatgaccacagacctcgagatctataatgatctacccgcacttaagtctagcggggagaaaaagaagaagaaaaagaagaaatag

SEQ ID NO: 309572 - DNA, 1512 bp, Artificial Sequence
  derived and/or modified sequence
atggctagtaaccataaaagctcggcagcccgtcccgtgagccgtggcggtgtcggactcactggccgaccaccttctggcatacgcccattgagcggcaacatacgagtggctaccgcaatgcctcctggtaccgccagacctggatcacgtgggtgcccgattggcacaggcggagtcttgtcgtcccagataaaggtggctcatcggcctgttactcagcagggtctgaccggaatgaaaactggaactaagggcccacagcgccagatattggataaatcctactacctgggtctcctgagatctaagatatctgaactcacaaccgaagttaataagttacagaaggggattgaaatgtataaccaggagaattccgtctacttatcgtacgagaagcgcgctgagactttagctgtggagattaaagagttgcagggccagcttgctgattataacatgctcgttgacaagttgaacacaaacacagaaatggaggaggtcatgaacgactacaacatgctcaaggcacagaatgatcgggaaactcagtctttagatgtaatctttacagagaggcaggctaaggaaaaacaaatccggtcagtggaagaagaaatagagcaggagaagcaagctacagatgatataatcaagaatatgagtttcgagaatcaggttaagtacctcgagatgaagacaactaacgaaaaattacttcaggagctcgacaccctgcagcagcaacttgactctcagaacatgaagaaggaatcgctggaggcagagatcgctcattcgcaggtcaagcaggaggcagtactgctccatgagaaactctatgagcttgagtctcatagagatcagatgatcgctgaagacaaatcaatcggctcacctatggaggagagggagaagctcttgaaacaaatcaaggacgataatcaggagattgcctccatggagcgccagctgaccgacaccaaagagaagattaatcaattcattgaggaaatacgtcaactcgacatggatctcgaggagcaccagggagagatgaatcagaaatacaaagagcttaaaaaaagggaagagcacatggacacctttattgagactttcgaagagacgaaaaaccaagagttaaagaggaaggcccagatcgaggccaatatcgtcgcactattggagcactgctcgagaaacataaatcgcattgaacagatcagcagcatcaccaatcaagaattgaaaatgatgcaggacgaccttaattttaaatccaccgaagttcagaagtcccagagtaccgctcaaaacctaacttctgatatccagcgcctgcaactcgatttacaaaagatggagctcctagaaagcaagatgactgaggaacagcatagcttgaaatctaagatcaagcagatgaccaccgatctggagatctacaatgatctgccagcactgaagtccagcggggagaagaagaaaaagaagaagaaaaaatag

SEQ ID NO: 309573 - DNA, 1672 bp, Artificial Sequence
  derived and/or modified sequence
atcccgcccccgttgccgggatacgccgcggcgcacggcagttagtgggtaggcctgagagccgaggaaaactgagcgtgggcctcagaaagaagttaaggcacccgcgagccgggcaactgccctccttccgcgccggcggagcgattaaagtgaagaaacaatggccagcaatcacaaatcttcagcagctcgccctgtttcaagaggtggagttgggttaacaggaaggcctccttctgggatacgacccctatcaggaaatattcgagtggcaactgcaatgccacctgggacagcaagaccaggttctcgtggttgtcccatagggactggtggagttctgtcttctcaaatcaaagttgcccatcgccctgtaacacaacaaggtttgactggaatgaaaactgggacgaaaggtccccagaggcaaattttagacaaatcttactatcttgggcttcttagaagtaaaataagtgaacttacaactgaagttaataaacttcagaagggaatagaaatgtacaatcaagagaattcagtatatttgtcatatgaaaagagggctgagactttagctgttgagataaaagagcttcaaggacaactagcagactacaacatgttggtagataaacttaataccaacactgaaatggaagaagtaatgaatgattacaatatgcttaaagctcaaaatgatcgagaaacacaaagtttggatgtcatatttactgaaagacaagcgaaagaaaaacaaatcagaagtgtcgaagaagaaattgaacaggaaaaacaagcaacagatgacattatcaaaaatatgtcttttgaaaaccaagtcaagtacctagagatgaaaaccacaaatgagaaactgttacaggaattagatacacttcaacaacaattggattcacagaacatgaaaaaagagagcctggaagcagaaatagctcactcccaggtgaaacaggaggcggtattgctgcatgaaaaactttatgagttggagtcccatcgagatcaaatgattgcagaagacaaaagcataggatctccaatggaagagagagagaaattacttaagcagattaaagatgataatcaggaaatagccagcatggaaagacagttaacagatacaaaagaaaagataaatcagtttattgaagaaattagacaacttgacatggatttagaggaacaccaaggtgaaatgaaccagaaatacaaggagctaaagaaaagggaggaacatatggacacttttattgagacttttgaggaaacaaagaatcaggaactgaaacgaaaggcacagatagaagccaacattgttgcactcttggagcactgcagtcgaaatataaatcgtatagaacagatatcctctatcaccaatcaagagctaaagatgatgcaggatgacctcaattttaaatctactgaagtgcagaaatcacaaagtacagctcagaatttgacttcagacattcaacgtctgcagttggatctgcagaaaatggagcttctagaaagtaagatgactgaagaacagcattctctaaaaagcaaaattaagcaaatgacaactgatctggagatatataatgatttgccagctttaaaatcatcaggtgaaaaaaaaaaaaaaaaaaaaaaaaaa

SEQ ID NO: 309574 - protein, 1999 aa, Artificial Sequence
  derived and/or modified sequence
MTHLNSLDVQLAQELGDFTDDDLDVVFTPKECRTLQPSLPEEGVELDPHVRDCVQTYIREWLIVNRKNQGSPEICGFKKTGSRKDFHKTLPKQTFESETLECSEPAAQAGPRHLNVLCDVSGKGPVTACDFDLRSLQPDKRLENLLQQVSAEDFEKQNEEARRTNRQAELFALYPSVDEEDAVEIRPVPECPKEHLGNRILVKLLTLKFEIEIEPLFASIALYDVKERKKISENFHCDLNSDQFKGFLRAHTPSVAASSQARSAVFSVTYPSSDIYLVVKIEKVLQQGEIGDCAEPYTVIKESDGGKSKEKIEKLKLQAESFCQRLGKYRMPFAWAPISLSSFFNVSTLEREVTDVDSVVGRSSVGERRTLAQSRRLSERALSLEENGVGSNFKTSTLSVSSFFKQEGDRLSDEDLFKFLADYKRSSSLQRRVKSIPGLLRLEISTAPEIINCCLTPEMLPVKPFPENRTRPHKEILEFPTREVYVPHTVYRNLLYVYPQRLNFVNKLASARNITIKIQFMCGEDASNAMPVIFGKSSGPEFLQEVYTAVTYHNKSPDFYEEVKIKLPAKLTVNHHLLFTFYHISCQQKQGASVETLLGYSWLPILLNERLQTGSYCLPVALEKLPPNYSMHSAEKVPLQNPPIKWAEGHKGVFNIEVQAVSSVHTQDNHLEKFFTLCHSLESQVTFPIRVLDQKISEMALEHELKLSIICLNSSRLEPLVLFLHLVLDKLFQLSVQPMVIAGQTANFSQFAFESVVAIANSLHNSKDLSKDQHGRNCLLASYVHYVFRLPEVQRDVPKSGAPTALLDPRSYHTYGRTSAAAVSSKLLQARVMSSSNPDLAGTHSAADEEVKNIMSSKHFHEELALQMVVSTGMVRETVFKYAWFFFELLVKSMAQHVHNMDKRDSFRRTRFSDRFMDDITTIVNVVTSEIAALLVKPQKENEQAEKMNISLAFFLYDLLSLMDRGFVFNLIRHYCSQLSAKLSNLPTLISMRLEFLRILCSHEHYLNLNLFFMNADTAPTSPCPSISSQNSSSCSSFQDQKIASMFDLTSEYRQQHFLTGLLFTELAAALDAEGEGISKVQRKAVSAIHSLLSSHDLDPRCVKPEVKVKIAALYLPLVGIILDALPQLCDFTVADTRRYRTSGSDEEQEGAGAINQNVALAIAGNNFNLKTSGIVLSSLPYKQYNMLNADTTRNLMICFLWIMKNADQSLIRKWIADLPSTQLNRILDLLFICVLCFEYKGKQSSDKVSTQVLQKSRDVKARLEEALLRGEGARGEMMRRRAPGNDRFPGLNENLRWKKEQTHWRQANEKLDKTKAELDQEALISGNLATEAHLIILDMQENIIQASSALDCKDSLLGGVLRVLVNSLNCDQSTTYLTHCFATLRALIAKFGDLLFEEEVEQCFDLCHQVLHHCSSSMDVTRSQACATLYLLMRFSFGATSNFARVKMQVTMSLASLVGRAPDFNEEHLRRSLRTILAYSEEDTAMQMTPFPTQVEELLCNLNSILYDTVKMREFQEDPEMLMDLMYRIAKSYQASPDLRLTWLQNMAEKHTKKKCYTEAAMCLVHAAALVAEYLSMLEDHSYLPVGSVSFQNISSNVLEESVVSEDTLSPDEDGVCAGQYFTESGLVGLLEQAAELFSTGGLYETVNEVYKLVIPILEAHREFRKLTLTHSKLQRAFDSIVNKDHKRMFGTYFRVGFFGSKFGDLDEQEFVYKEPAITKLPEISHRLEAFYGQCFGAEFVEVIKDSTPVDKTKLDPNKAYIQITFVEPYFDEYEMKDRVTYFEKNFNLRRFMYTTPFTLEGRPRGELHEQYRRNTVLTTMHAFPYIKTRISVIQKEEFVLTPIEVAIEDMKKKTLQLAVAINQEPPDAKMLQMVLQGSVGATVNQGPLEVAQVFLAEIPADPKLYRHHNKLRLCFKEFIMRCGEAVEKNKRLITADQREYQQELKKNYNKLKENLRPMIERKIPELYKPIFRVESQKRDSFHRSSFRKCETQLSQGS

SEQ ID NO: 309575 - DNA, 6000 bp, Artificial Sequence
  derived and/or modified sequence
atgacccacttgaactccttagacgtccagcttgcccaagaactcggcgactttaccgatgatgatctcgacgtggtttttacgcctaaagagtgtcggacgctgcagccatccctccctgaggagggcgtggaacttgatccacatgttagagactgtgtgcaaacatacattcgggaatggctcattgtgaacagaaaaaatcaggggagtcccgagatttgtggtttcaaaaagaccgggtctcgcaaagacttccataaaacactgcctaaacagacattcgaatcagaaactctcgaatgctctgaacctgcagcccaagccggtcccaggcacctgaacgtgctttgcgatgtcagtggaaaggggcctgtcacagcatgcgattttgacctaagaagcctccaacctgacaaacgactggagaacctactccagcaggtctcagctgaggactttgaaaagcaaaacgaggaggctagaagaaccaatcgtcaagccgagctgtttgccctctacccttccgtcgacgaagaggatgctgtggagattcgacccgtgcccgagtgtcccaaagagcatctgggaaatcgcatcctggtgaaactgttgacattgaaatttgaaatcgaaattgaaccacttttcgcatcaatcgcactatatgacgtgaaggagcggaaaaagatatcggaaaacttccattgtgacttgaactctgaccaattcaagggtttcctgcgggcacataccccatcagtagcggcgtccagccaggccagatcagcagtctttagcgtcacgtatccaagctccgatatctatctggtagtgaaaatcgaaaaagttcttcagcagggggaaattggcgattgcgccgagccctacaccgtgatcaaagaatcagatggggggaaatcaaaagaaaagattgaaaaactgaaactgcaggcagagtcgttttgccagcgcctgggtaaatataggatgccttttgcgtgggcccccatatctttgtcctctttcttcaacgtgtctaccttggagcgcgaggttaccgacgttgacagtgtggttggtaggtcatcggtcggcgaacgccgtaccctggcccagtccaggcggctcagcgagagagccctgagtttggaagagaacggagtcggaagcaattttaaaaccagtactctgagcgtctcctccttcttcaagcaggaaggtgacaggctgtccgatgaagatctgtttaagttcttggctgattacaagcgatctagctcactacagcggcgggtgaaatctatcccgggcttactgcgtctagagataagcaccgcccccgaaattatcaactgttgtcttacaccggaaatgttgccggtgaaacccttcccggagaatcgaactaggccgcataaggagatcttggagtttcctacccgagaggtctatgtcccacacactgtgtatcggaacctgctttatgtgtatccgcagcggttaaacttcgtgaacaaattagcatcggcacggaacataacaattaagatccagttcatgtgcggagaagacgcaagcaatgctatgccagtgatctttggtaagtcttctggcccagaattccttcaggaggtgtatacggcggtcacgtatcacaacaagtcaccagatttttacgaagaagttaaaatcaagttgcctgccaagctgaccgtgaatcatcacttgttgtttacattctatcatattagctgtcagcagaagcagggcgcatccgtggagactttactgggatatagttggcttcccatcctgctcaatgagaggctccagacaggcagctattgcttgccggtcgccctcgaaaaattgccccccaactacagcatgcactccgcggagaaagtaccactgcagaatcccccgataaagtgggctgaaggtcataaaggcgttttcaatattgaggtgcaggctgtttctagcgttcatacccaggacaatcacctcgagaagtttttcactctctgccatagcctcgagagccaagtgaccttcccaatcagagtgcttgatcagaaaatttcagaaatggccctggagcatgagctcaagctgtcaatcatttgccttaatagctcccgacttgagcccctggtgctcttcctgcaccttgtcctcgacaaacttttccagctgtctgtacagccgatggtgatcgccggtcaaactgccaacttttcccaattcgctttcgaatcagtggtggcaatcgcaaactccctgcacaatagcaaggatttgtctaaagatcaacatggcagaaattgtctgttagcatcctatgtgcactacgtgttccggttgcctgaggtacagcgcgacgtgccaaaatctggtgctcctacagcattgctggatccgcgttcctaccatacgtatggtcgcacctcggcggcagccgtttcctccaagcttctgcaggcacgcgtaatgagctctagtaaccccgacctggccggaactcattctgccgcagacgaagaggtgaaaaacattatgagttcaaagcatttccacgaggagctggctctgcagatggtagtctctaccgggatggtaagggaaaccgtttttaaatatgcctggttcttttttgagctgcttgtaaaaagcatggctcagcacgtccacaatatggataaacgggacagcttccgaaggacaaggttcagtgacaggtttatggacgacattactactatagtcaacgtcgttacttctgaaattgcggctctgctggttaagcctcagaaagagaatgagcaggctgagaagatgaacattagcctggctttcttcctgtacgatctgttgagcctaatggacagaggttttgtgttcaacttgatcagacactattgttcacagctaagcgctaagttatccaacctgcccacgctgatctcgatgcgcctggagtttctcaggattttatgttcacacgagcattatttgaacctcaatcttttctttatgaacgcagataccgcacccactagtccatgccccagcatctcttcccaaaactctagctcctgcagcagtttccaggatcagaaaattgcctcaatgttcgatttgacttcagagtacaggcagcaacatttcctgaccggcctactcttcaccgagctcgccgctgcgctcgacgcagagggagagggaatttctaaggtacagcggaaagcggttagtgctatacacagcctgcttagttcccatgacctagatccaagatgcgtcaaacccgaagtaaaggtaaaaatcgccgcactatacctgcctcttgtgggcattattttagatgcactgccgcaactgtgtgacttcaccgtcgccgatacacgcaggtatcgtacctctgggagtgacgaggaacaggagggagcaggagcaataaatcagaacgtcgcactcgctatcgctggtaacaattttaacctgaagacatctggcatcgtcctgtcttcactcccctacaagcagtacaacatgctgaacgccgatactacacgcaacctgatgatctgttttctatggattatgaaaaacgccgaccagtccctcatccgcaaatggattgctgacctgcctagcacccaactaaataggatcttggatctcctattcatttgcgtgctatgcttcgaatataagggtaagcagagtagcgacaaagtaagtacacaggtactgcaaaagtctcgcgacgtgaaggcaaggctcgaagaagccctgttgagaggggaaggtgctagaggcgagatgatgcggcgccgtgcccctgggaatgatagattcccaggtttgaatgagaacttgcggtggaagaaggaacagacgcattggcggcaggctaatgaaaaactggataaaacgaaggccgagttggaccaagaagcactcattagcggaaacctggccaccgaagcccaccttatcatcctcgatatgcaggagaacattattcaggcctcatcagcgctggattgtaaagatagccttctggggggcgtgctaagggtgctggtgaacagtctgaactgcgatcagtctaccacctatctgacccactgcttcgccaccctgcgagcgctgattgctaagttcggggacctgctgttcgaagaggaggtcgagcagtgcttcgatctctgtcatcaggtcctgcaccattgctcttcttcgatggatgtgactaggagccaggcttgcgccacgctgtacctgttaatgcgatttagcttcggtgctacatccaatttcgctagagtgaagatgcaggtgactatgtctctggctagcctcgttggccgcgcccccgactttaatgaggaacatctgaggcgttccctgcgcacaattctggcctatagtgaggaggacaccgcaatgcagatgacccccttcccaactcaggttgaggaacttctgtgcaatctgaattccatcctgtacgacacggtgaagatgcgggaatttcaggaagacccggagatgctgatggatcttatgtaccggatcgccaagtcgtaccaagccagccccgatcttagactgacatggctgcaaaatatggcagagaagcacactaaaaaaaagtgttacactgaggcagccatgtgccttgtccatgcagctgcattggttgctgaatatctctctatgttggaagatcatagttatcttccagtgggtagcgtatctttccagaatatttcgtctaatgtgctcgaggaatcggttgtttcggaggacacgttgagccccgacgaggatggcgtctgcgccggtcagtacttcacagagagcggcttggtggggctcctggagcaggcggcagaattgttctcaactggggggctgtacgagaccgtaaacgaggtgtataagctggtgattcctattttggaggcacatcgcgagtttagaaagctcactctgacacactcgaaactccagcgcgccttcgactcaatcgtgaataaagaccacaagcggatgtttgggacatatttccgtgtcggattttttggatcaaagttcggtgatctggacgagcaggagttcgtgtacaaagaacccgctattacaaagcttccagaaatctcccaccgcctagaagctttctacgggcagtgcttcggcgccgaatttgtggaggtcataaaggactccaccccagtggataaaacaaagctcgatccgaacaaagcctatatccaaatcacgtttgtcgagccatattttgatgagtacgaaatgaaggatcgagtgacctatttcgagaagaatttcaaccttcgtcgcttcatgtacaccaccccattcactctggaaggaagacctcggggcgaactgcacgagcagtatagacgcaacactgtcctgaccacaatgcacgcattcccctacattaagactcgaatttctgtcatccagaaagaggagttcgtcctgaccccaatcgaggtggcgattgaggatatgaaaaagaaaactctgcaactggccgtggctatcaatcaagaacctcccgacgcgaagatgctgcaaatggtcctgcagggaagcgtgggcgccactgtgaaccaaggtcccctggaagtcgcacaggtgttcttggccgaaatccctgcagatcctaagctttataggcatcataataaattgaggctctgcttcaaagagttcatcatgcggtgcggcgaggcagtggagaagaataaacggttaattactgcagatcagcgcgagtatcagcaagagcttaaaaagaactacaacaagctgaaagaaaatctccggccaatgatcgagcgcaagatccctgagttgtacaaacctatttttcgagtggaaagtcagaagcgggacagcttccacagaagctccttccgcaaatgcgagactcagctgtcccaggggagctag

SEQ ID NO: 309576 - DNA, 6000 bp, Artificial Sequence
  derived and/or modified sequence
atgacccacctgaacagcctggatgtgcagctggcccaggagctgggggacttcacagatgatgacctggatgtggtgttcacccccaaggaatgtaggaccctgcagcccagcctgcctgaggagggcgtggagctggacccccacgtgcgggactgtgtgcagacctacatccgggagtggctgattgtgaacaggaagaaccagggcagccctgagatctgtggcttcaagaagacaggcagcaggaaggacttccacaagaccctgcccaagcagacctttgaaagtgagaccctggagtgcagcgagcctgctgcccaggccggccccaggcacctgaatgtgctgtgtgatgtgtctggaaaaggacctgtgacagcctgtgactttgacctgcggagcctgcagcctgacaagaggctggagaacctgctgcagcaggtgtctgctgaggactttgagaagcagaatgaggaggcccggaggaccaaccggcaggccgagctgtttgccctgtaccccagcgtggatgaggaggatgctgtggagatccggcctgtgcctgagtgccccaaggagcacctgggcaaccgcatcctggtgaagctgctgaccctgaagtttgaaattgaaattgagcccctgtttgccagcatcgccctgtatgatgtgaaggagaggaagaagatcagcgagaacttccactgtgacctgaacagcgaccagttcaagggcttcctgcgggcccacacccccagcgtggccgccagcagccaggcccggtctgctgtgttttctgtgacctaccccagcagtgacatctacctggtggtgaagattgagaaggtgctgcagcagggcgagatcggggactgtgccgagccctacaccgtcatcaaggagagtgatggcggcaagagcaaggagaagattgagaagctgaagctgcaggccgagagcttctgccagaggctgggcaagtacaggatgccctttgcctgggcccccatcagcctgagcagcttcttcaacgtgtccaccctggagcgggaggtgacagatgtggacagcgtggtgggccgcagctctgtgggggagaggaggaccctggcccagagccggcggctgtctgagcgggccctgagcctggaggagaatggagtgggcagcaacttcaagaccagcaccctgtctgtgagcagcttcttcaagcaggagggggaccggctgagtgatgaggacctcttcaagttcctggccgactacaagaggagcagcagcctgcagaggagagtgaagagcatccctggcctgctgcggctggagatcagcacagcccctgagatcatcaactgctgcctgaccccagagatgctgcctgtgaagcccttcccagaaaatagaacccggccccacaaggagatcctggagttccccacccgggaggtgtatgtgccccacacagtgtacagaaacctgctgtatgtgtacccccagaggctgaactttgtgaacaagctggccagcgccaggaacatcaccatcaagatccagttcatgtgtggggaggatgccagcaatgccatgcctgtgatctttgggaagagcagcggccctgagttcctgcaggaggtgtacacagctgtgacctaccacaacaagagcccagacttctatgaggaggtgaagatcaagctgcctgccaagctgactgtgaaccaccacctgctcttcaccttctaccacatcagctgccagcagaagcagggcgcctctgtggagaccctgctgggctacagctggctgcccatcctgctgaatgaaaggctgcagacaggcagctactgcctgcctgtggccctggagaagctgccccccaactacagcatgcacagcgctgagaaggtgcccctgcagaacccccccatcaagtgggccgagggccacaagggcgtcttcaacatcgaggtgcaggccgtgtcctctgtgcacacccaggacaaccacctggagaagttcttcaccctgtgccacagcctggagagccaggtgaccttccccatccgggtgctggaccagaagatcagcgagatggccctggagcacgagctgaagctgagcatcatctgcctgaacagcagccggctggagcccctggtgctcttcctgcacctggtgctggacaagctgttccagctgtctgtgcagcccatggtgattgctggccagacagccaacttcagccagtttgcctttgaatctgtggtggccatcgccaacagcctgcacaacagcaaggacctgagcaaggaccagcacggcaggaactgcctgctggccagctatgtgcactacgtgttccggctgcctgaggtgcagagagatgtgcccaagagcggggcccccacagccctgctggaccccaggagctaccacacctacggccgcaccagcgctgctgctgtgagcagcaagctgctgcaggcccgggtgatgagcagcagcaacccagacctggccggcacccacagcgctgctgatgaggaggtgaagaacatcatgagcagcaagcacttccacgaggagctggccctgcagatggtggtgtccacaggcatggtgcgggagaccgtcttcaagtatgcctggttcttctttgagctgctggtgaagtccatggcccagcacgtgcacaacatggacaagagggacagcttccggaggacccgcttcagtgaccgcttcatggatgacatcaccaccatcgtgaatgtggtgaccagcgagattgctgccctgctggtgaagccccagaaggaaaatgagcaggccgagaagatgaacatcagcctggccttcttcctgtatgacctgctgagcctgatggaccggggctttgtgttcaacctgatccgccactactgcagccagctgagcgccaagctgagcaacctgcccaccctcatctccatgaggctggagttcctgcgcatcctgtgcagccatgagcactacctgaacctgaacctcttcttcatgaatgctgacacagcccccaccagcccctgccccagcatcagcagccagaacagcagcagctgcagcagcttccaggaccagaagatcgcctccatgtttgacctgaccagcgagtaccggcagcagcacttcctgaccggcctgctcttcacagagctggccgccgccctggatgctgagggggagggcatcagcaaggtgcagaggaaggctgtgtctgccatccacagcctgctgagcagccatgacctggacccccgctgtgtgaagccagaggtgaaggtgaagattgctgccctgtacctgcccctggtgggcatcatcctggatgccctgccccagctgtgtgacttcaccgtggccgacacccggcgctaccgcaccagcggcagtgatgaggagcaggagggcgctggggccatcaaccagaatgtggccctggccatcgccggcaacaacttcaacctgaagaccagcggcatcgtgctgagcagcctgccctacaagcagtacaacatgctgaatgctgacaccaccaggaacctgatgatctgcttcctgtggatcatgaagaatgctgaccagagcctcatcaggaagtggattgctgacctgcccagcacccagctgaaccgcatcctggacctgctcttcatctgtgtgctgtgctttgagtacaagggcaagcagagcagtgacaaggtgtccacccaggtgctgcagaagagcagagatgtgaaggcccggctggaggaggccctgctgcggggggagggcgcccggggggagatgatgagaagaagagcccctggaaatgaccgcttccctggcctgaatgaaaacctgcgctggaagaaggagcagacccactggaggcaggccaatgagaagctggacaagaccaaggccgagctggaccaggaggccctgatcagcggcaacctggccacagaggcccacctgatcatcctggacatgcaggagaacatcatccaggccagcagcgccctggactgcaaggacagcctgctgggcggcgtgctgcgggtgctggtgaacagcctgaactgtgaccagagcaccacctacctgacccactgctttgccaccctgcgggccctgattgccaagtttggagacctgctgtttgaggaggaggtggagcagtgctttgacctgtgccaccaggtgctgcaccactgcagcagctccatggatgtgaccaggagccaggcctgtgccaccctgtacctgctgatgaggttctcctttggagccaccagcaactttgcccgggtgaagatgcaggtgaccatgagcctggccagcctggtgggccgggccccagacttcaatgaggagcacctgcggcgcagcctgcggaccatcctggcctacagcgaggaggacacagccatgcagatgacccccttccccacccaggtggaggagctgctgtgcaacctgaacagcatcctgtatgacacagtgaagatgagggagttccaggaggaccctgagatgctgatggacctgatgtaccgcatcgccaagagctaccaggccagcccagacctgcggctgacctggctgcagaacatggccgagaagcacaccaagaagaagtgctacacagaagctgccatgtgcctggtgcacgccgccgccctggtggccgagtacctgtccatgctggaggaccacagctacctgcctgtgggctctgtgtccttccagaacatcagcagcaatgtgctggaggagagcgtggtgtctgaggacaccctgagcccagatgaagatggagtgtgtgccggccagtacttcacagagagcggcctggtgggcctgctggagcaggccgctgagctgttcagcactggaggcctgtatgaaacagtgaatgaggtgtacaagctggtgatccccatcctggaggcccaccgggagttcaggaagctgaccctgacccacagcaagctgcagagggcctttgacagcatcgtgaacaaggaccacaagaggatgtttggcacctacttccgggtgggcttcttcggcagcaagtttggagacctggatgagcaggagtttgtgtacaaggagcccgccatcaccaagctgcctgagatcagccaccggctggaggccttctacggccagtgctttggagctgagtttgtggaggtgatcaaggacagcacccctgtggacaagaccaagctggaccccaacaaggcctacatccagatcacctttgtggagccctactttgatgaatatgagatgaaggacagagtgacctactttgagaagaacttcaacctgcggcgcttcatgtacaccacccccttcaccctggagggccggcccagaggagagctgcacgagcagtacagaagaaacacagtgctgaccaccatgcacgccttcccctacatcaagacccgcatcagcgtcatccagaaggaggagtttgtgctgacccccatcgaggtggccatcgaggacatgaagaagaagaccctgcagctggccgtggccatcaaccaggagcccccagatgccaagatgctgcagatggtgctgcagggctctgtgggcgccaccgtgaaccagggccccctggaggtggcccaggtgttcctggccgagatcccagctgaccccaagctgtaccgccaccacaacaagctgcggctgtgcttcaaggagttcatcatgagatgtggggaggccgtggagaagaacaagaggctcatcacagctgaccagcgggagtaccagcaggagctgaagaagaactacaacaagctgaaggagaacctgcggcccatgattgaaaggaagatccctgagctgtacaagcccatcttccgggtggagagccagaagagggacagcttccacaggagcagcttcagaaaatgtgagacccagctgagccagggcagctag

SEQ ID NO: 309577 - DNA, 6000 bp, Artificial Sequence
  derived and/or modified sequence
atgacccacctgaacagcctggacgtgcagctggcccaggagctgggcgacttcaccgatgacgacttggacgtggttttcactcctaaagagtgcagaacccttcagcctagcctcccggaggaaggagttgagctggatccacacgtcagggattgtgtgcagacgtacatcagggaatggctcatagtcaaccgtaagaaccagggatcccctgaaatttgcggcttcaagaaaactgggtcccgcaaggatttccacaagacactgcctaagcagacattcgagagtgagaccctggaatgtagcgagccagccgcccaggctggtccgagacatcttaacgttctatgtgatgtcagtggaaagggtccagtgacagcctgcgacttcgacctccgcagcctgcaacccgataagaggctggagaatctgctacagcaagtgagtgccgaggatttcgagaagcagaacgaagaggcccgacgaacaaatagacaggcggagctctttgccttgtatccatcggtggatgaagaagacgcagtggagatcagacccgtgcccgagtgccctaaggaacacttgggaaacaggattttagttaagttattgaccctgaagtttgaaattgagatcgagccactcttcgccagcatcgctctctatgacgtgaaagagcggaagaagatttctgaaaactttcattgcgacctcaacagcgatcagttcaaggggttcctccgggcccacacaccatctgttgccgcgagcagtcaagcccgaagtgctgttttctcagtcacgtaccccagctccgatatatatttggttgtgaaaatagaaaaagttttacagcaaggtgaaattggggactgcgcggagccttatacagtgattaaggaatcagatgggggcaaaagcaaggagaagatagaaaaattgaagcttcaggctgagagtttctgtcagagattagggaaatatcgcatgccttttgcttgggcgcccatctccctttcctccttctttaacgttagcaccctggagcgtgaggtcacggatgtagattctgttgtgggccgatctagtgtgggcgagagacgcacactcgcgcagtcacggcgcttaagtgagagggccctgtccctcgaagagaacggcgtcggctcaaactttaagaccagtacgctatctgtctcctccttttttaagcaagaaggcgacagactcagcgatgaagaccttttcaagtttctggcggactataaaaggtcttcaagcctgcagcggagggtgaagtccattcccgggctcctccggctggaaatctccaccgcccccgagataatcaattgctgcctgacccctgaaatgctgcccgtcaaacccttcccagagaaccgtaccagaccacacaaggaaatattggagttccccacgagggaagtttacgtcccccacactgtctacagaaacctcctctacgtctatcctcaacgacttaattttgtgaataagctggcttctgctcggaatatcacaatcaaaattcagttcatgtgcggcgaggacgcctccaatgcaatgcccgttatattcggtaagagttctgggcctgaatttctgcaagaggtatacactgccgtgacctaccataacaagagccctgatttttacgaggaggtgaagattaagttgcccgctaaactgaccgtcaatcatcatcttctcttcactttttaccacatttcttgccagcagaaacaaggcgcctctgtcgagacgcttctgggatacagctggctacccatattattgaacgaaaggctgcagaccggtagctattgtctcccggtcgcactggaaaaactaccaccaaattattcaatgcatagtgcagaaaaagtgccattacaaaacccaccaatcaagtgggccgagggacataagggcgtgtttaatatagaagtgcaggcagtgtcaagcgtacatacgcaggacaatcacctggagaagtttttcacgctctgccacagcctcgaatctcaggtcacatttcccatccgagtgcttgatcagaagatcagtgagatggctttggagcacgaattgaagctctcgattatctgcctgaactcttcccggctggaaccactggtcctatttctgcacttggtgctcgacaagttattccagttgagtgtgcagccaatggtgattgcaggacaaacagccaacttctctcagttcgcctttgagtctgtggtggcgatcgccaatagcctgcataattctaaggatctgagcaaagatcagcatgggcgtaattgccttctcgcctcatacgtccactatgtgttcagacttcctgaagtgcaacgcgatgtgcccaagtccggagcacccaccgccctgttagaccccaggtcataccatacgtatggacgaacgagcgcagcagccgtctctagcaagctgctccaggcaagggtgatgtcctctagcaaccccgacctagcgggaacgcatagcgcggcagacgaggaagtaaagaatataatgagcagcaagcattttcacgaagaactagcactgcagatggttgtctctacaggtatggtgagggagactgtttttaaatatgcttggttctttttcgaactgttggttaaatccatggcccagcatgttcacaacatggacaagcgcgacagtttcagacgcacgcgcttcagcgatagattcatggatgacattacaacaattgtcaacgtggtgacgagcgagattgcagcactgctggttaagccacagaaagagaatgagcaggctgaaaagatgaatatttccctcgcatttttcctttatgatctgctgtccctaatggacagggggtttgtgtttaatctcatccgccattattgctcccagctgtcagccaagctctcaaatcttccaaccctaataagcatgagactggagttcctcaggatactgtgctctcacgagcattaccttaaccttaacctctttttcatgaatgccgacaccgccccgacatcaccttgcccctctatcagctctcagaactctagctcctgtagctcctttcaggaccagaaaattgccagcatgtttgaccttacatctgagtatcggcagcagcattttttgactgggctgctgtttaccgagctcgctgcggctctggacgcagaaggggagggcatcagcaaggtgcaacgcaaagctgtgagcgcaattcattcgctgctgagtagccatgatctcgacccgcgctgcgtgaagcccgaggtgaaggtcaaaatcgccgccttatatctgccgttagtcgggataatcttagacgcactgccccagctatgcgattttactgtcgctgatacgcggaggtatcgaacatccgggagtgacgaagagcaggaaggtgccggggcaattaaccaaaatgtagcattagctatcgcaggtaataattttaatcttaagacttctgggattgtgctttcctcactgccatacaagcagtacaatatgctgaacgcagacactaccagaaacctgatgatatgcttcctttggattatgaagaacgcggaccaatctttaatccgtaagtggattgctgacctcccttccacacaactgaaccggatcctcgatctcctgttcatttgcgtgctgtgctttgagtacaaaggtaaacaaagctctgacaaggtgtctactcaggtcctccaaaagagccgtgatgttaaagcccgactggaagaagccttgctgaggggcgagggagcccgcggcgaaatgatgcggcggagggcaccagggaacgatagatttcccggtctgaacgagaatttgcgatggaaaaaggaacagacccactggcgccaggcaaacgagaaattagacaagaccaaggcagagcttgaccaggaggccctgatcagcgggaacttagcaactgaagcccaccttatcattctggacatgcaggaaaacatcattcaggctagctccgccctggattgtaaagactcactgttgggtggggtgctgcgagttctcgtcaacagtttgaattgcgaccaatcaactacgtacctgactcactgtttcgctacactgagggctctcattgccaagttcggcgatctgctgtttgaagaagaagttgagcagtgttttgacttatgccaccaggtgctccaccactgcagctcttccatggatgtcacccgatctcaggcctgcgccacactgtatctgctcatgcggttctctttcggggcgacgagcaatttcgcaagagtcaagatgcaggtgaccatgagtcttgcatctctggttggtagggcaccagacttcaacgaggagcacctgcgtaggtcactgcgtacaatcctggcttactccgaggaggataccgccatgcagatgacgccttttcctacccaggtagaggaactgctttgcaacctgaatagtatcctgtacgacaccgtaaagatgcgcgaattccaggaggatcctgagatgctcatggacctcatgtacaggatcgccaaaagctaccaggctagccccgatttgagactaacttggctgcaaaatatggcagagaagcatacgaagaaaaagtgctatacagaagccgctatgtgcctcgtgcacgcagccgctctagtcgcggagtacttaagtatgctggaggatcactcgtacctgcctgttggctcagttagtttccagaatatttcgagtaacgtgctggaggagagtgtagtctctgaggacaccctaagccccgacgaagacggggtgtgcgcaggtcagtacttcacagagagcggtttagtgggattgctggaacaggccgcggaactgttctctaccggggggctctacgagacagtcaacgaggtgtacaagttggtgatacccattttggaggctcatcgagagttccgcaaactcacactgactcattctaaattacagcgagcctttgactctatcgtaaacaaggaccacaaaaggatgtttggaacttatttccgggtcggctttttcggaagcaagttcggcgatttagatgagcaggagttcgtttataaagaacccgccatcacaaagctgcctgagatttcccaccgcctggaagccttttatggtcagtgcttcggggcggagttcgtcgaggtcataaaagattccacaccggtagacaaaactaagctagatcctaataaagcctatatccagatcacctttgtggagccttattttgacgaatatgagatgaaggaccgcgtaacatattttgagaaaaactttaaccttcgccggttcatgtacaccacacccttcaccctggagggccggccaaggggagagcttcacgagcaataccgaagaaacaccgtgctgacaacgatgcatgccttcccatacattaaaactcgcatctccgtgatacaaaaggaggagttcgtgctgacaccgatcgaggtcgctatcgaagatatgaagaaaaaaactttgcagctggccgtggccattaaccaggaaccccctgatgcaaaaatgttacagatggttctgcaaggtagtgtcggtgcaaccgttaatcagggaccacttgaagtggctcaggttttcttggcagagatcccagctgaccctaagctttatcggcatcataataagcttcggctgtgtttcaaagaatttatcatgagatgtggggaagctgtggaaaagaacaaaagattgatcaccgccgatcaaagggaataccaacaggagcttaaaaaaaactacaataagctgaaggaaaacttaagaccaatgatagagcgcaagatacctgagctatacaagcccattttcagggtggagagtcagaaaagggactcgtttcaccgctcctcattccggaaatgcgagacccagctgtcccagggaagttag

SEQ ID NO: 309578 - DNA, 5999 bp, Artificial Sequence
  derived and/or modified sequence
atgacacatctgaatagtctcgatgtccagctcgcacaggagttgggcgacttcacggatgacgacctggatgtggtgtttaccccaaaagaatgccgcactctgcagcctagcctcccagaggagggcgtagaattagacccccatgttcgcgactgcgtccagacatacatccgcgagtggctgattgtgaatcggaaaaaccaggggtccccggaaatttgcggcttcaagaagaccggatcgcggaaggactttcacaagacacttcccaaacagacttttgaatcagagaccctagaatgctccgagcccgctgcacaagctggacctagacacctcaacgtactgtgtgacgtgtcaggcaaggggcctgtcaccgcctgcgatttcgatttgcggagtcttcagccggacaagaggctcgagaaccttttgcagcaggtttccgctgaggatttcgaaaaacagaatgaggaggcccgaagaacaaatagacaggcagagctgtttgctttatatccttcggtggatgaggaagacgcagtggagatcagaccagtgccagaatgccctaaggaacacctggggaatcggatactcgtgaaacttctgaccctcaagtttgaaatcgaaattgaaccactgtttgccagcattgcactgtatgatgttaaagagaggaagaaaatctcagaaaactttcactgcgatctgaacagcgatcagttcaagggttttcttagggctcacaccccctccgttgctgcaagctcccaagcgaggtcagcggtcttttctgtgacttatccttcatcagacatctacctggttgtcaagatagagaaagtgctgcaacaaggggaaattggcgactgtgcggaaccttatactgtgatcaaggagtcagacggcggaaaatccaaagagaagattgagaaactcaagttacaagccgagagcttttgccagcgtctcggcaagtacagaatgcccttcgcttgggccccaataagtttgtcatcttttttcaacgtatctacgctggaaagggaagttacagatgtggattcagttgttggtcgtagttccgtcggcgagcgccgtactcttgcgcaatccagacgactctctgagcgagcattgagcctcgaggaaaacggagttggctctaactttaagacctccacattatcagtcagctcattctttaagcaggagggtgaccgtctttctgacgaggatctgttcaagttcttggccgactacaagcgctcctcctccctccaaaggagggtgaagagcattcctgggcttcttagactcgaaatttcaacagccccagaaattattaattgttgtctaacccccgagatgctgcccgtcaagcccttccctgaaaaccggaccagaccacacaaggagatccttgaattcccgacccgggaagtgtatgttccacataccgtgtacagaaacctgctgtatgtctatccccagcggctgaacttcgtaaacaaactagccagtgctcggaacatcacgattaagatccagtttatgtgcggcgaagacgcgtccaatgctatgccggtgattttcggtaagagctccggcccagaattcctgcaggaagtctacaccgccgtaacatatcacaataagtcaccagatttctatgaggaggtcaaaattaaattgcccgctaaactgactgttaatcatcacctgctgttcaccttttaccatatatcttgccagcagaagcaaggagcatccgtcgagactctgcttggctactcctggttacccatactgcttaatgaaaggctgcagacaggtagctattgcttaccagtggcgctggagaagctccctccaaattattctatgcatagtgcagaaaaagtgccccttcagaatcccccaattaaatgggccgagggtcacaagggggtgttcaatatagaggtccaggctgtctcaagtgttcacacgcaggacaatcacttggagaagttctttactctgtgccactccttggaaagccaagtgaccttccccatcagagtgctcgaccagaagatttcagaaatggccttagagcacgaactgaagctgtctatcatctgcctgaacagttctagacttgagcccctggtccttttccttcatctggtgttggacaagttattccagctgagcgtgcagcctatggtcatagccggtcaaactgcaaatttttctcagtttgcttttgaatctgtcgtagccatagcaaacagcctccataacagcaaagacttgagtaaagatcagcatggcaggaactgtcttttagcaagctatgtgcactacgtattccggttgccggaggtgcagcgagacgtcccaaagagcggtgcaccaacagctttgttggatcccagatcctatcatacctatggaagaactagtgcggcagctgtgtctagcaaattgttacaggcacgagtcatgagtagtagcaaccccgatttggccggtactcactcggccgctgatgaggaagtgaagaatatcatgtcctccaaacacttccatgaagagttggcgctgcaaatggttgtaagcactggcatggtgcgtgagactgtcttcaaatacgcatggttttttttcgagttgctggtcaagtctatggctcaacatgtgcacaatatggataaaagggacagtttccgaagaacccggtttagcgacaggtttatggatgacatcacaacaatcgttaacgtcgttacctccgagattgcagccctacttgtgaaaccacagaaagagaatgagcaggctgagaagatgaacatctctttggccttttttctctatgatctgctctccctgatggaccgtggttttgtcttcaatctcataagacactactgctctcaactctctgcaaagctgtccaacctaccgacccttatttctatgagactggaatttctcagaattctatgttctcacgagcactacctcaatctgaaccttttctttatgaatgctgataccgcaccgaccagtccgtgtccatcgatctccagtcaaaacagtagtagctgctccagcttccaggaccagaaaatagcatctatgtttgacctgaccagcgagtataggcagcagcatttccttaccggtcttctctttactgaattggctgccgcactggatgccgagggcgagggaataagcaaagtccagcggaaagccgtctccgccatccatagcctcttatcttctcacgatttagacccacggtgcgtgaaaccagaggtcaaggttaagattgcagccctctacctgccgctcgtgggaattattctggacgctttgcctcagctctgcgacttcacagtggccgacacgcgaagataccgaacgtccggttcagatgaagagcaggaaggggcaggagctatcaaccaaaatgtggccctagccatcgcaggtaacaacttcaatctcaaaacttccggcatagttctctcatctctgccgtacaaacagtacaatatgctcaatgccgacacaacgcgaaacctgatgatctgtttcttatggataatgaagaacgcagatcagtcactgattaggaagtggatagcagacctccccagtacacagttgaaccgaatcctcgatcttctatttatatgtgtgctgtgctttgagtataaaggaaagcagtcctccgataaagtgtcaacccaggtcctgcaaaaatccagagatgtgaaagccagactcgaggaggccttgctgcggggtgaaggagcccgtggagagatgatgcgacggagggcccctggtaatgacagatttcctggtctcaacgaaaacctgcggtggaagaaggagcaaactcattggcgtcaggccaacgaaaagctggacaagacgaaagccgaactagatcaggaggccctgatatcaggaaatcttgcaaccgaggcccatctgatcattttggatatgcaggaaaatataattcaggcgtcatctgccctagactgcaaagatagcttgctggggggagtccttagggtgttagtgaacagcctgaactgtgatcaaagcacgacatacttgacacactgctttgcaaccctgagggccctcattgctaagttcggtgatttgttgttcgaagaagaagtggagcagtgcttcgacttgtgtcaccaggtcttgcatcactgctctagctccatggatgtgacccggagccaggcctgtgcaacgctgtatctgctgatgcggttcagtttcggagctacttcgaattttgcgcgagtcaaaatgcaggtcaccatgtcccttgcatccctggtcggtagagcacctgatttcaatgaggagcatttacgtcggagcctgcgcaccattctcgcctactcggaagaggataccgccatgcagatgaccccttttcccactcaggttgaagaattattatgcaacctgaattctatcctctatgatactgtgaagatgagggaattccaggaggacccagaaatgctgatggatctgatgtatagaatcgctaagtcataccaggcctcccccgatctgaggctaacatggctccagaacatggctgaaaaacacaccaaaaaaaaatgctacaccgaggctgctatgtgtctcgtacacgcggctgcactggtagcggagtaccttagtatgctcgaggaccattcgtatctgcctgtggggtccgtgagttttcagaacatctctagtaatgtgctggaagagtcagtggtttccgaagacaccctgagccccgacgaagacggagtttgcgccggacagtacttcaccgaaagtggactggtcggtctattggagcaggcggctgagctattttccaccggcggactttatgagaccgtgaatgaggtgtataagctcgtgataccaatcctcgaagcccatcgtgagttccgcaaactaaccctgacccactcaaagttgcagcgggcttttgattccatcgtcaacaaagatcacaaacggatgtttggcacttattttcgtgtggggttttttgggagtaagttcggcgacttagacgagcaggagtttgtctacaaggagcctgccataaccaaactgccagagatttctcaccggctggaggcattttacggacagtgtttcggcgctgagtttgttgaagtcatcaaagactccactccagtggataagaccaaactggatccaaacaaggcctacatccagatcacctttgtggagccctacttcgacgaatacgaaatgaaagaccgtgttacgtattttgaaaagaattttaatctgagaagatttatgtacacaacccccttcaccctggaagggcgtcccaggggagaattgcatgagcagtatagaaggaatacagtgctgaccaccatgcacgccttcccatacattaaaacgcggatctcagtgatccagaaggaggaatttgttcttactcccattgaggtggcaatcgaagacatgaagaagaagactttacagctcgcggtggccatcaaccaagaaccacctgacgctaaaatgctccagatggtcctccagggctccgtcggtgcaactgtgaaccaaggccctttggaagtagcacaggttttcctggcagagattcccgcagaccctaagctctatcgacaccacaataagcttcggctgtgctttaaagagttcattatgcgctgcggagaagctgtcgaaaaaaacaaaagattaataaccgcagaccagcgtgaataccagcaggaactcaagaagaattacaacaaactcaaggagaatctgcgccctatgattgagagaaaaatcccagaattgtacaagccaatttttagagtagaatctcagaaacgggattcctttcatcggagttcctttcggaaatgtgaaactcagctgtctcagggcagtta

SEQ ID NO: 309579 - DNA, 6000 bp, Artificial Sequence
  derived and/or modified sequence
atgacccacctgaacagcctggacgtgcagctggcccaggagctgggcgacttcaccgacgacgacctggacgtggtgttcacccccaaggagtgcagaaccctgcagcccagcctgcccgaggagggcgtggagctggacccccacgtgagagactgcgtgcagacctacatcagagagtggctgatcgtgaacagaaagaaccagggcagccccgagatctgcggcttcaagaagaccggcagcagaaaggacttccacaagaccctgcccaagcagaccttcgagagcgagaccctggagtgcagcgagcccgccgcccaggccggccccagacacctgaacgtgctgtgcgacgtgagcggcaagggccccgtgaccgcctgcgacttcgacctgagaagcctgcagcccgacaagagactggagaacctgctgcagcaggtgagcgccgaggacttcgagaagcagaacgaggaggccagaagaaccaacagacaggccgagctgttcgccctgtaccccagcgtggacgaggaggacgccgtggagatcagacccgtgcccgagtgccccaaggagcacctgggcaacagaatcctggtgaagctgctgaccctgaagttcgagatcgagatcgagcccctgttcgccagcatcgccctgtacgacgtgaaggagagaaagaagatcagcgagaacttccactgcgacctgaacagcgaccagttcaagggcttcctgagagcccacacccccagcgtggccgccagcagccaggccagaagcgccgtgttcagcgtgacctaccccagcagcgacatctacctggtggtgaagatcgagaaggtgctgcagcagggcgagatcggcgactgcgccgagccctacaccgtgatcaaggagagcgacggcggcaagagcaaggagaagatcgagaagctgaagctgcaggccgagagcttctgccagagactgggcaagtacagaatgcccttcgcctgggcccccatcagcctgagcagcttcttcaacgtgagcaccctggagagagaggtgaccgacgtggacagcgtggtgggcagaagcagcgtgggcgagagaagaaccctggcccagagcagaagactgagcgagagagccctgagcctggaggagaacggcgtgggcagcaacttcaagaccagcaccctgagcgtgagcagcttcttcaagcaggagggcgacagactgagcgacgaggacctgttcaagttcctggccgactacaagagaagcagcagcctgcagagaagagtgaagagcatccccggcctgctgagactggagatcagcaccgcccccgagatcatcaactgctgcctgacccccgagatgctgcccgtgaagcccttccccgagaacagaaccagaccccacaaggagatcctggagttccccaccagagaggtgtacgtgccccacaccgtgtacagaaacctgctgtacgtgtacccccagagactgaacttcgtgaacaagctggccagcgccagaaacatcaccatcaagatccagttcatgtgcggcgaggacgccagcaacgccatgcccgtgatcttcggcaagagcagcggccccgagttcctgcaggaggtgtacaccgccgtgacctaccacaacaagagccccgacttctacgaggaggtgaagatcaagctgcccgccaagctgaccgtgaaccaccacctgctgttcaccttctaccacatcagctgccagcagaagcagggcgccagcgtggagaccctgctgggctacagctggctgcccatcctgctgaacgagagactgcagaccggcagctactgcctgcccgtggccctggagaagctgccccccaactacagcatgcacagcgccgagaaggtgcccctgcagaacccccccatcaagtgggccgagggccacaagggcgtgttcaacatcgaggtgcaggccgtgagcagcgtgcacacccaggacaaccacctggagaagttcttcaccctgtgccacagcctggagagccaggtgaccttccccatcagagtgctggaccagaagatcagcgagatggccctggagcacgagctgaagctgagcatcatctgcctgaacagcagcagactggagcccctggtgctgttcctgcacctggtgctggacaagctgttccagctgagcgtgcagcccatggtgatcgccggccagaccgccaacttcagccagttcgccttcgagagcgtggtggccatcgccaacagcctgcacaacagcaaggacctgagcaaggaccagcacggcagaaactgcctgctggccagctacgtgcactacgtgttcagactgcccgaggtgcagagagacgtgcccaagagcggcgcccccaccgccctgctggaccccagaagctaccacacctacggcagaaccagcgccgccgccgtgagcagcaagctgctgcaggccagagtgatgagcagcagcaaccccgacctggccggcacccacagcgccgccgacgaggaggtgaagaacatcatgagcagcaagcacttccacgaggagctggccctgcagatggtggtgagcaccggcatggtgagagagaccgtgttcaagtacgcctggttcttcttcgagctgctggtgaagagcatggcccagcacgtgcacaacatggacaagagagacagcttcagaagaaccagattcagcgacagattcatggacgacatcaccaccatcgtgaacgtggtgaccagcgagatcgccgccctgctggtgaagccccagaaggagaacgagcaggccgagaagatgaacatcagcctggccttcttcctgtacgacctgctgagcctgatggacagaggcttcgtgttcaacctgatcagacactactgcagccagctgagcgccaagctgagcaacctgcccaccctgatcagcatgagactggagttcctgagaatcctgtgcagccacgagcactacctgaacctgaacctgttcttcatgaacgccgacaccgcccccaccagcccctgccccagcatcagcagccagaacagcagcagctgcagcagcttccaggaccagaagatcgccagcatgttcgacctgaccagcgagtacagacagcagcacttcctgaccggcctgctgttcaccgagctggccgccgccctggacgccgagggcgagggcatcagcaaggtgcagagaaaggccgtgagcgccatccacagcctgctgagcagccacgacctggaccccagatgcgtgaagcccgaggtgaaggtgaagatcgccgccctgtacctgcccctggtgggcatcatcctggacgccctgccccagctgtgcgacttcaccgtggccgacaccagaagatacagaaccagcggcagcgacgaggagcaggagggcgccggcgccatcaaccagaacgtggccctggccatcgccggcaacaacttcaacctgaagaccagcggcatcgtgctgagcagcctgccctacaagcagtacaacatgctgaacgccgacaccaccagaaacctgatgatctgcttcctgtggatcatgaagaacgccgaccagagcctgatcagaaagtggatcgccgacctgcccagcacccagctgaacagaatcctggacctgctgttcatctgcgtgctgtgcttcgagtacaagggcaagcagagcagcgacaaggtgagcacccaggtgctgcagaagagcagagacgtgaaggccagactggaggaggccctgctgagaggcgagggcgccagaggcgagatgatgagaagaagagcccccggcaacgacagattccccggcctgaacgagaacctgagatggaagaaggagcagacccactggagacaggccaacgagaagctggacaagaccaaggccgagctggaccaggaggccctgatcagcggcaacctggccaccgaggcccacctgatcatcctggacatgcaggagaacatcatccaggccagcagcgccctggactgcaaggacagcctgctgggcggcgtgctgagagtgctggtgaacagcctgaactgcgaccagagcaccacctacctgacccactgcttcgccaccctgagagccctgatcgccaagttcggcgacctgctgttcgaggaggaggtggagcagtgcttcgacctgtgccaccaggtgctgcaccactgcagcagcagcatggacgtgaccagaagccaggcctgcgccaccctgtacctgctgatgagattcagcttcggcgccaccagcaacttcgccagagtgaagatgcaggtgaccatgagcctggccagcctggtgggcagagcccccgacttcaacgaggagcacctgagaagaagcctgagaaccatcctggcctacagcgaggaggacaccgccatgcagatgacccccttccccacccaggtggaggagctgctgtgcaacctgaacagcatcctgtacgacaccgtgaagatgagagagttccaggaggaccccgagatgctgatggacctgatgtacagaatcgccaagagctaccaggccagccccgacctgagactgacctggctgcagaacatggccgagaagcacaccaagaagaagtgctacaccgaggccgccatgtgcctggtgcacgccgccgccctggtggccgagtacctgagcatgctggaggaccacagctacctgcccgtgggcagcgtgagcttccagaacatcagcagcaacgtgctggaggagagcgtggtgagcgaggacaccctgagccccgacgaggacggcgtgtgcgccggccagtacttcaccgagagcggcctggtgggcctgctggagcaggccgccgagctgttcagcaccggcggcctgtacgagaccgtgaacgaggtgtacaagctggtgatccccatcctggaggcccacagagagttcagaaagctgaccctgacccacagcaagctgcagagagccttcgacagcatcgtgaacaaggaccacaagagaatgttcggcacctacttcagagtgggcttcttcggcagcaagttcggcgacctggacgagcaggagttcgtgtacaaggagcccgccatcaccaagctgcccgagatcagccacagactggaggccttctacggccagtgcttcggcgccgagttcgtggaggtgatcaaggacagcacccccgtggacaagaccaagctggaccccaacaaggcctacatccagatcaccttcgtggagccctacttcgacgagtacgagatgaaggacagagtgacctacttcgagaagaacttcaacctgagaagattcatgtacaccacccccttcaccctggagggcagacccagaggcgagctgcacgagcagtacagaagaaacaccgtgctgaccaccatgcacgccttcccctacatcaagaccagaatcagcgtgatccagaaggaggagttcgtgctgacccccatcgaggtggccatcgaggacatgaagaagaagaccctgcagctggccgtggccatcaaccaggagccccccgacgccaagatgctgcagatggtgctgcagggcagcgtgggcgccaccgtgaaccagggccccctggaggtggcccaggtgttcctggccgagatccccgccgaccccaagctgtacagacaccacaacaagctgagactgtgcttcaaggagttcatcatgagatgcggcgaggccgtggagaagaacaagagactgatcaccgccgaccagagagagtaccagcaggagctgaagaagaactacaacaagctgaaggagaacctgagacccatgatcgagagaaagatccccgagctgtacaagcccatcttcagagtggagagccagaagagagacagcttccacagaagcagcttcagaaagtgcgagacccagctgagccagggcagctag

SEQ ID NO: 309580 - DNA, 6386 bp, Artificial Sequence
  derived and/or modified sequence
tacgcgccgtgtaactgtgaatctttcaaagcctcagttttatgaccctgtggagccagtggactttgaaggacttctgatgacacacctgaacagcctggatgtgcagcttgcccaggagctcggggacttcactgatgacgacttggacgtggtgttcacgccaaaggaatgtaggactttgcagccctctttgccggaggaaggggttgaactggaccctcatgtcagggactgtgttcagacctacatccgtgagtggctaatcgtgaaccggaaaaaccaaggaagtccagaaatctgtggctttaaaaagactggatctcgaaaagattttcacaagacgcttccgaaacagacgtttgagtcggaaaccttggagtgcagtgaacccgctgctcaggcaggcccccgccacttaaacgtgctgtgcgacgtgtctgggaaaggccccgtcactgcctgtgactttgacctccgcagcctgcagcctgacaagcggctagaaaacctcctgcagcaagtgagtgccgaggactttgagaagcagaacgaggaggcccggaggaccaataggcaggccgagctctttgccctttacccatcagtggacgaggaggatgctgtggaaatacgtccagtaccagaatgtcccaaggaacacctgggcaacagaatattggtcaagttgctgaccttgaagttcgagattgaaattgagcccctgtttgccagcattgccctctacgatgttaaagaaaggaaaaagatctcagaaaattttcactgtgacctgaactctgaccagttcaaaggatttctgcgagctcacacgccttcagtggccgcatcaagtcaggcgagatctgcagtcttctcagtcacctacccgtcctcagacatctacctggtagtcaagattgaaaaagtcctgcagcagggagagattggagactgtgcagagccctacacggttatcaaagaaagtgatggtggaaagagtaaagaaaagattgaaaaactaaaactccaagctgaatccttctgccagcgtttggggaaataccggatgccctttgcctgggcacccataagcttatcaagcttcttcaatgtctccacccttgagagggaggtaactgatgtggactctgtggttgggagaagctcagtgggtgaacggaggacattggcccaatctagaaggctttctgaaagagccctctccttggaggaaaatggggttggatccaacttcaaaacctccactctgagcgttagcagctttttcaagcaggaaggagatcgccttagcgatgaagacttattcaagtttttagctgactacaaaagatcatcatccttacagagacgagtcaagtcaattccaggcttgctaagactggagatttctacagctccagagatcatcaattgctgtctgactcctgaaatgctgcccgtgaaaccctttcctgaaaaccggacacgcccgcacaaagagattttggaatttccaacacgagaagtatatgtccctcacactgtgtacagaaaccttctctatgtctacccacagaggctgaactttgtaaacaaactagcatcagcccggaacattacaataaagatccagtttatgtgtggagaagatgctagcaatgcgatgccggtcatctttggaaaatccagcgggcctgaatttctgcaggaagtgtacacagctgttacataccataataagtctcctgacttttatgaagaagtgaaaattaagctccccgctaagctcacagtaaatcaccacctcctgttcaccttctaccatatcagctgtcagcagaagcaaggagcctccgtggaaactctcctgggatattcatggctgccaattctcttaaatgaacgtcttcaaactggatcctactgtctcccagttgccttggaaaaattgccacccaactactccatgcattctgctgagaaagtcccattacagaatcctcccattaagtgggctgaaggacataagggagtatttaatattgaagtgcaagctgtttcttctgtacacacccaggacaaccacctggagaagttcttcaccctctgccactccctggagagccaggtgaccttccccatccgcgtgctggatcagaaaatcagcgagatggcgctggagcatgagctgaagctcagcatcatctgcctgaactcctcccgcctggagccgctcgtgctcttcctgcacctggtgctggacaagctcttccagctgtccgtgcagcccatggtcatcgctggccagacagccaacttctcccagtttgccttcgagtccgtggtggccatcgccaacagtctgcacaacagcaaggacctgagcaaggaccagcatgggaggaactgcctgctggcttcctacgtgcactacgtcttccgcctgccagaggtgcaaagggatgtgcccaagtcaggcgctcccactgccctcctagaccctcggagctaccacacgtatggccgcacatcagctgctgctgtgagttcaaagctgctgcaggcccgggtgatgagcagcagtaacccagacctcgcggggacacactccgcagcagacgaggaagtgaagaacatcatgtcttcaaagcatttccatgaggagcttgcccttcagatggtggtcagcaccggaatggtgagagaaacagtcttcaagtatgcctggttcttctttgagcttctggtgaaaagcatggcccagcacgtacataacatggacaaacgggacagttttcggaggactcgtttttctgaccgtttcatggatgacataactactattgttaatgtggtcacctcggaaattgcagcccttttagtaaaaccacagaaggaaaatgaacaggcggaaaagatgaacatcagcctggctttcttcttgtatgaccttctctccctcatggatcggggctttgtgtttaacctcatcagacattattgcagccagctgtcagccaagctcagtaaccttccaacgctcatttccatgaggctagagttcctgagaatcctctgtagccatgagcattacctcaatctgaaccttttttttatgaatgctgatactgctccaacatctccttgtccttccatatcttcccagaactcaagctcctgctccagcttccaggaccagaagatcgccagcatgttcgatctgacttccgagtaccgccagcagcacttcctcaccgggctcctcttcacagaactggctgctgccctggatgccgaaggggaaggaatcagcaaagtacaaaggaaagctgtcagtgcaattcacagcctgctaagttctcacgacctggacccacgctgtgtcaaaccagaggtgaaggtcaaaatcgccgccctttacctacctttagttggcatcattttggatgctttgccacagctctgtgactttacagttgcagatactcgcagataccgcaccagtggctcggatgaagaacaagaaggagccggtgccattaaccagaatgtggctctggccatagcagggaataatttcaatttgaaaacaagtggaatagtgctgtcttccttgccctataagcagtacaacatgctgaacgcggacactactcgcaacctcatgatctgcttcctctggatcatgaaaaatgctgatcagagcctcattaggaagtggattgctgacctgccatcaacgcagctcaacaggattttagatctacttttcatctgtgtgttatgttttgagtataagggaaaacagagttctgacaaagtcagtacccaagtcctgcagaagtcaagggatgtcaaggcccggctggaagaggctttgctccgtggggaaggggccagaggggagatgatgcgccgccgggctccagggaacgaccgatttccaggcctaaatgaaaatttgagatggaagaaagagcagacacattggcggcaagctaatgagaagctagataaaacaaaggccgagttagatcaagaagccttgatcagtggcaatctggctacagaagcacatttaatcatcctggatatgcaggaaaacattatccaggcgagctcggctctggactgtaaagacagcctgctgggaggtgttctgagggtgctggtgaattctctgaactgtgatcagagtaccacctacctgactcactgctttgcaacactccgtgctctcatcgccaagtttggagacttactctttgaagaggaggtggaacagtgtttcgacctatgtcaccaagtcctgcaccactgcagcagcagcatggatgtcacccggagccaagcctgtgccaccctttacctcctcatgaggttcagttttggagccaccagtaattttgcaagagtaaagatgcaagtaaccatgtccctggcatctttggtgggaagagcaccagactttaatgaagagcacctgagaagatccttgaggacaattttggcctattcagaagaggacacagccatgcagatgactccttttcccacccaggtggaggaacttctctgtaatctgaatagcatcttatatgacacagtgaaaatgagggaatttcaggaagatcctgagatgcttatggatctcatgtacagaattgccaagagttaccaggcatctcctgatctgcggctgacctggctccagaacatggcagagaaacacaccaagaagaagtgctacacggaggctgccatgtgcctggtgcacgccgctgcgttagtggctgagtatctgagcatgctggaggaccacagctacctgcccgtgggcagtgtcagcttccagaatatttcttccaatgtgctggaggagtctgtggtctctgaggacaccctgtcacctgacgaggatggggtgtgcgcaggccagtacttcaccgagagtggcctggtaggcctcctggagcaggccgcggagctcttcagcacgggaggcttatatgagacagttaatgaggtctacaagctggtcatccccatcctagaagcgcatcgagaattccggaagctgacactcactcacagcaagctgcagagagccttcgacagcatcgttaacaaggatcataagagaatgtttggaacctacttccgagttggtttctttggatccaaatttggggatttggatgaacaggagtttgtctacaaagagcctgcaattaccaagcttcctgagatctcacatagactagaggcattttatggtcaatgttttggtgcagaatttgtggaagtgattaaagactccactcctgtggacaaaaccaagttggatcctaacaaggcctacatacagatcacttttgtggagccctactttgatgagtatgagatgaaagacagggtcacatactttgagaagaatttcaacctccggaggttcatgtacaccaccccgttcaccctggaggggcggcctcggggagagctgcatgagcagtacagaaggaacacagtcctgaccactatgcacgccttcccctacatcaagaccaggatcagcgtcatccagaaggaggagtttgttttgacaccgattgaagttgccattgaagacatgaagaagaagaccctgcagttagcagttgccattaaccaggagccgcctgatgcaaagatgcttcagatggtgctgcaaggctctgtgggagctactgtaaatcagggaccactggaagtagcccaagtgtttttggctgaaattcctgctgatccaaaactctatcgacatcacaacaagttgaggttatgctttaaggaattcatcatgagatgtggtgaagctgtagagaaaaacaagcgtctcatcacggcagaccagagggaatatcagcaggaactcaaaaagaactataacaagctaaaagagaacctcaggccaatgatcgagcggaaaattccagaactgtacaagccaatattcagagttgagagtcaaaagagggactccttccacagatctagtttcaggaaatgtgaaacccagttgtcacagggcagctaagaaaagccatcttcattcgtggagactgtggccctgcaaccctggagaaggacttgctggtacttaaaaaatgggacatttgccacccaggactgactgtacactccctgatcagccagcactctggaagctttgggatcccaggaaccatggaattattcccaaatggactctgaccagatttttgccatactggggggtggcgggatggaggatgggtactcaggcatgactgcgtatttattaaagtgtgtttttccacaatgtaccaaacaaggcataagcagcttctcctgctgactggcca

SEQ ID NO: 309581 - protein, 2031 aa, Artificial Sequence
  derived and/or modified sequence
MTHLNSLDVQLAQELGDFTDDDLDVVFTPKECRTLQPSLPEEGVELDPHVRDCVQTYIREWLIVNRKNQGSPEICGFKKTGSRKDFHKTLPKQTFESETLECSEPAAQAGPRHLNVLCDVSGKGPVTACDFDLRSLQPDKRLENLLQQVSAEDFEKQNEEARRTNRQAELFALYPSVDEEDAVEIRPVPECPKEHLGNRILVKLLTLKFEIEIEPLFASIALYDVKERKKISENFHCDLNSDQFKGFLRAHTPSVAASSQARSAVFSVTYPSSDIYLVVKIEKVLQQGEIGDCAEPYTVIKESDGGKSKEKIEKLKLQAESFCQRLGKYRMPFAWAPISLSSFFNVSTLEREVTDVDSVVGRSSVGERRTLAQSRRLSERALSLEENGVGSNFKTSTLSVSSFFKQEGDRLSDEDLFKFLADYKRSSSLQRRVKSIPGLLRLEISTAPEIINCCLTPEMLPVKPFPENRTRPHKEILEFPTREVYVPHTVYRNLLYVYPQRLNFVNKLASARNITIKIQFMCGEDASNAMPVIFGKSSGPEFLQEVYTAVTYHNKSPDFYEEVKIKLPAKLTVNHHLLFTFYHISCQQKQGASVETLLGYSWLPILLNERLQTGSYCLPVALEKLPPNYSMHSAEKVPLQNPPIKWAEGHKGVFNIEVQAVSSVHTQDNHLEKFFTLCHSLESQVTFPIRVLDQKISEMALEHELKLSIICLNSSRLEPLVLFLHLVLDKLFQLSVQPMVIAGQTANFSQFAFESVVAIANSLHNSKDLSKDQHGRNCLLASYVHYVFRLPEVQRDVPKSGAPTALLDPRSYHTYGRTSAAAVSSKLLQARVMSSSNPDLAGTHSAADEEVKNIMSSKIADRNCSRMSYYCSGSSDAPSSPAAPRPASKKHFHEELALQMVVSTGMVRETVFKYAWFFFELLVKSMAQHVHNMDKRDSFRRTRFSDRFMDDITTIVNVVTSEIAALLVKPQKENEQAEKMNISLAFFLYDLLSLMDRGFVFNLIRHYCSQLSAKLSNLPTLISMRLEFLRILCSHEHYLNLNLFFMNADTAPTSPCPSISSQNSSSCSSFQDQKIASMFDLTSEYRQQHFLTGLLFTELAAALDAEGEGISKVQRKAVSAIHSLLSSHDLDPRCVKPEVKVKIAALYLPLVGIILDALPQLCDFTVADTRRYRTSGSDEEQEGAGAINQNVALAIAGNNFNLKTSGIVLSSLPYKQYNMLNADTTRNLMICFLWIMKNADQSLIRKWIADLPSTQLNRILDLLFICVLCFEYKGKQSSDKVSTQVLQKSRDVKARLEEALLRGEGARGEMMRRRAPGNDRFPGLNENLRWKKEQTHWRQANEKLDKTKAELDQEALISGNLATEAHLIILDMQENIIQASSALDCKDSLLGGVLRVLVNSLNCDQSTTYLTHCFATLRALIAKFGDLLFEEEVEQCFDLCHQVLHHCSSSMDVTRSQACATLYLLMRFSFGATSNFARVKMQVTMSLASLVGRAPDFNEEHLRRSLRTILAYSEEDTAMQMTPFPTQVEELLCNLNSILYDTVKMREFQEDPEMLMDLMYRIAKSYQASPDLRLTWLQNMAEKHTKKKCYTEAAMCLVHAAALVAEYLSMLEDHSYLPVGSVSFQNISSNVLEESVVSEDTLSPDEDGVCAGQYFTESGLVGLLEQAAELFSTGGLYETVNEVYKLVIPILEAHREFRKLTLTHSKLQRAFDSIVNKDHKRMFGTYFRVGFFGSKFGDLDEQEFVYKEPAITKLPEISHRLEAFYGQCFGAEFVEVIKDSTPVDKTKLDPNKAYIQITFVEPYFDEYEMKDRVTYFEKNFNLRRFMYTTPFTLEGRPRGELHEQYRRNTVLTTMHAFPYIKTRISVIQKEEFVLTPIEVAIEDMKKKTLQLAVAINQEPPDAKMLQMVLQGSVGATVNQGPLEVAQVFLAEIPADPKLYRHHNKLRLCFKEFIMRCGEAVEKNKRLITADQREYQQELKKNYNKLKENLRPMIERKIPELYKPIFRVESQKRDSFHRSSFRKCETQLSQGS

SEQ ID NO: 309582 - DNA, 6096 bp, Artificial Sequence
  derived and/or modified sequence
atgacacacctcaactccttagacgtccagctggctcaagagctaggtgatttcactgacgatgatctcgatgtcgttttcacacctaaggagtgtcgtaccctccaaccatctctccccgaggagggcgtggagctggacccccacgtgcgcgactgtgtgcaaacgtacataagagagtggttgatcgtaaatagaaagaaccaaggcagtccggaaatctgcggtttcaaaaaaaccgggagccgaaaagactttcacaaaacactgccaaagcagactttcgagagcgaaaccttagaatgctcggagcctgcagcccaggccggaccccgccatctaaatgtgctgtgtgacgtgtccggtaaagggcctgtgaccgcttgcgactttgacctgagaagcctccaacccgataagcgtctagagaatttgctccagcaggtgagcgcagaagactttgaaaagcaaaacgaggaggctcggaggacgaatcgccaagctgaactgttcgcactctacccctctgtcgacgaagaggatgccgtcgagatccgacccgtgcctgaatgtcccaaggagcacctcgggaatcggattcttgttaagctgcttactcttaagtttgagattgagattgaacccctttttgcttccatcgccctgtatgatgtaaaggagcgcaaaaaaatcagcgaaaatttccattgcgatctgaactccgatcagttcaagggatttctcagggcacacaccccaagcgtggctgctagtagccaagcaagatctgctgtctttagcgtgacatatccctcgtccgacatctatttagtcgtgaagatcgaaaaagtgctccaacagggagagatcggagactgtgccgaaccttataccgtgattaaggagtcggatggcggcaagtcaaaagagaagatcgagaaactgaaactacaggctgagtctttctgtcagcgcctggggaagtatagaatgccatttgcgtgggcacccatcagtctgtcatcattcttcaacgtgtcaacgttagagagagaagttaccgatgtcgattcagtggttggcagaagctccgttggggaaaggcgcacactagctcaatcacgacgcttgagcgagcgggcactctctctggaggagaatggcgtaggctcaaattttaagaccagtaccctgtctgtgagttcgttttttaaacaggaaggcgaccgcctatctgatgaagatctgtttaagttccttgctgattacaaacggtctagtagtttgcaacgcagagtgaaatctattccagggctgttaagactggaaatcagcaccgcccccgagattatcaattgctgtttgaccccggagatgcttcctgtgaagccatttcccgaaaaccgcacaagaccacataaggaaatcctggaatttcccacgagggaagtgtatgtgccacatacagtttaccggaatctgctctacgtatacccacaaaggttaaactttgtcaacaaacttgcttctgctaggaacattaccataaaaattcagtttatgtgtggcgaggacgcttcaaacgccatgccggtgatttttggtaaatcttccggacccgagtttctccaggaggtgtacactgccgtaacatatcataacaagagtcctgatttttatgaggaagtgaaaattaagctaccagccaagctgaccgtcaaccatcacctcctgttcaccttctaccacatcagctgccagcaaaagcagggggcttcagtggagacccttcttggctacagctggctgcccatactactcaacgaaaggctccagacaggcagctactgtctgcctgtggcactggagaagctcccccctaattactccatgcacagtgcagagaaggttcctctccaaaatccccctattaagtgggcagaggggcataaaggggtgtttaatattgaggtccaggccgtgagttctgtccacacgcaggataaccacctggagaagttttttactctgtgccactcattggaaagccaagtgactttcccgattcgtgtgctggaccaaaagatcagcgagatggcattagaacacgagcttaaactctctatcatctgcctaaacagctctaggctggaacccctggtactcttcctccacctggtgctagacaagctcttccaactcagcgtacaacccatggtgatcgccgggcagaccgctaatttctctcagtttgcttttgagtcggtcgtcgctatcgctaactctctgcataattctaaagacctgtctaaagatcagcacggccgcaactgtctgctggcctcttacgttcactacgtgtttcgtctgcccgaggtccagcgcgatgtccccaaatctggggcccctacggccctcctcgatccacgttcttatcacacatacggacggacaagcgcagctgccgtcagcagcaagctcctccaagctcgggtgatgtcgagtagtaaccctgatttggctggaacccacagcgccgccgatgaggaggtgaaaaacatcatgtcctctaagatcgcggaccggaattgctcaaggatgagttattactgctctggctcaagcgatgccccttcaagcccagcagccccacgtcccgcctccaaaaagcacttccacgaggagctagctcttcagatggtggtgtctaccggaatggtccgtgaaacagtgtttaaatacgcctggtttttttttgagctcctggtgaagtccatggcgcagcacgtccataatatggataaacgagatagctttcggcggactaggttcagcgacagattcatggatgacatcaccactatcgtaaacgtcgtgacctcagagatagcagctttgctcgtgaaacctcaaaaggagaatgagcaggcggagaagatgaatatcagtttagcattttttctgtacgacctgctgagtcttatggatcggggatttgtgttcaacttgatccgacactactgcagccagctgtctgccaagctctctaatttgcccacattgatctcaatgcgactggagtttctgcgaatcctctgctctcacgaacactatctgaatctgaacctcttcttcatgaatgccgatactgcacccacttctccatgcccatctatatcaagccagaactcgtcctcctgttcctcatttcaggatcagaaaatcgccagtatgtttgatctgacgtctgaatatcggcagcagcattttctgaccgggctgttgttcacagaattggccgccgctctggacgcggagggggagggcatcagtaaggtgcaacggaaagccgtctcagcaatccatagtttgctgtccagccacgacctggaccctaggtgcgtgaagccagaagtgaaagtgaaaatcgccgccctatatcttccccttgtggggatcattcttgatgccctcccccaactgtgtgatttcacagtcgctgacaccaggcgataccgcacctcagggtcagatgaggagcaggagggagcgggtgcaattaaccagaatgtggctctggctatcgccggcaataattttaatctgaagacttcgggaatcgtgttatcctcccttccgtataaacagtacaatatgcttaacgcggatactacacgcaacctgatgatatgttttctttggattatgaaaaatgccgaccagagcttaattcgcaaatggattgccgacttgccgtctactcagctcaataggatcctcgatctgttattcatctgtgttttgtgcttcgagtataagggcaaacagtcctcggataaagtctcaacccaagtgctgcagaaatcaagggatgtgaaagccagactcgaggaagcactgcttaggggcgaaggagcccggggggagatgatgcgacgccgagcaccaggcaatgaccgctttcctggccttaatgagaacctccgttggaaaaaggaacagacccattggcgtcaggctaatgagaagctcgataagaccaaggccgaattggaccaggaggctctgatctcgggtaatctagctacagaggcacacttgattatacttgacatgcaggagaatattatccaggcatctagtgcactggactgcaaagatagcctcctaggaggagtgctgagagtgctggtgaactctctaaactgcgatcagtcaaccacatacctgacacattgtttcgccacactgagagcgctgatcgcgaaatttggtgatctcctgttcgaggaagaagttgagcagtgcttcgatctgtgccatcaggtgctgcatcattgtagcagctccatggacgtgacacgctctcaggcctgcgctaccttatacttgctgatgagattctcattcggcgcgacttctaatttcgcccgcgtcaaaatgcaggtcaccatgtcgttggcgtctctcgttgggagagccccagactttaatgaagaacatctgcggcggagcctgagaactatactggcttattcagaggaggatactgctatgcagatgacaccctttccgacacaggtggaagagcttctgtgtaacctaaatagtattttgtatgacacggtgaaaatgcgggaatttcaggaggacccagagatgctgatggatctcatgtatcgaatcgcgaagagctaccaggctagccccgacctgaggctaacatggctccaaaatatggccgagaagcatacgaagaaaaaatgttacacagaagcagctatgtgtctggtccacgcagctgcccttgtggcggagtatctgagcatgctggaggatcattcgtacctgcctgtggggagcgtgagttttcagaacatttctagcaatgtgttggaggagtccgtagtgtccgaagatacactgagcccggacgaggatggcgtgtgtgccggccagtactttactgagtccggactggtcggcttactggagcaagctgccgagctcttctcaaccggcggattatatgagacggtcaatgaagtctataagctcgtgatacctattctggaggcacatagggagtttcgaaagttgaccctcacacactccaagctacagcgtgcattcgacagcatcgttaacaaagatcataagagaatgttcgggacatatttccgggtgggattttttgggtccaaattcggagatcttgacgagcaagagtttgtgtataaggagccggccatcaccaaactcccagaaatctcgcacaggctggaggctttctacggccagtgttttggagctgagtttgttgaggtgataaaggattcaacgccagttgacaagaccaagttggacccaaacaaggcatatatccaaattacttttgtcgaaccgtatttcgatgaatacgaaatgaaagaccgcgtcacatactttgaaaagaatttcaacctgcggagatttatgtacacgactccttttactttggagggacgcccacgtggcgaactccacgaacagtacagacggaataccgtgctcacaaccatgcatgcgtttccatatatcaaaactcgaatctctgtcatacagaaggaagaattcgtcctcacacctatcgaggtggccattgaggatatgaagaagaaaaccctgcaattggccgttgcgattaaccaggaacccccagacgctaagatgctgcagatggtgcttcaggggagcgtgggtgctaccgtgaatcaaggaccgcttgaagtcgcccaggtctttctcgctgaaatccctgcggaccctaagctgtatcgccaccataacaagcttaggctctgcttcaaggagtttataatgcggtgtggggaggccgttgagaaaaacaagcgcttgattactgctgaccaaagggaatatcagcaggagctgaagaaaaattacaacaagctcaaggagaaccttagacccatgattgaacggaaaatccctgagttatacaaacccatattccgggtggagagtcaaaagagagatagtttccaccgttccagttttcgaaagtgtgaaacccaattaagccagggatcctag

SEQ ID NO: 309583 - DNA, 6096 bp, Artificial Sequence
  derived and/or modified sequence
atgacccacctgaacagcctggatgtgcagctggcccaggagctgggggacttcacagatgatgacctggatgtggtgttcacccccaaggaatgtaggaccctgcagcccagcctgcctgaggagggcgtggagctggacccccacgtgcgggactgtgtgcagacctacatccgggagtggctgattgtgaacaggaagaaccagggcagccctgagatctgtggcttcaagaagacaggcagcaggaaggacttccacaagaccctgcccaagcagacctttgaaagtgagaccctggagtgcagcgagcctgctgcccaggccggccccaggcacctgaatgtgctgtgtgatgtgtctggaaaaggacctgtgacagcctgtgactttgacctgcggagcctgcagcctgacaagaggctggagaacctgctgcagcaggtgtctgctgaggactttgagaagcagaatgaggaggcccggaggaccaaccggcaggccgagctgtttgccctgtaccccagcgtggatgaggaggatgctgtggagatccggcctgtgcctgagtgccccaaggagcacctgggcaaccgcatcctggtgaagctgctgaccctgaagtttgaaattgaaattgagcccctgtttgccagcatcgccctgtatgatgtgaaggagaggaagaagatcagcgagaacttccactgtgacctgaacagcgaccagttcaagggcttcctgcgggcccacacccccagcgtggccgccagcagccaggcccggtctgctgtgttttctgtgacctaccccagcagtgacatctacctggtggtgaagattgagaaggtgctgcagcagggcgagatcggggactgtgccgagccctacaccgtcatcaaggagagtgatggcggcaagagcaaggagaagattgagaagctgaagctgcaggccgagagcttctgccagaggctgggcaagtacaggatgccctttgcctgggcccccatcagcctgagcagcttcttcaacgtgtccaccctggagcgggaggtgacagatgtggacagcgtggtgggccgcagctctgtgggggagaggaggaccctggcccagagccggcggctgtctgagcgggccctgagcctggaggagaatggagtgggcagcaacttcaagaccagcaccctgtctgtgagcagcttcttcaagcaggagggggaccggctgagtgatgaggacctcttcaagttcctggccgactacaagaggagcagcagcctgcagaggagagtgaagagcatccctggcctgctgcggctggagatcagcacagcccctgagatcatcaactgctgcctgaccccagagatgctgcctgtgaagcccttcccagaaaatagaacccggccccacaaggagatcctggagttccccacccgggaggtgtatgtgccccacacagtgtacagaaacctgctgtatgtgtacccccagaggctgaactttgtgaacaagctggccagcgccaggaacatcaccatcaagatccagttcatgtgtggggaggatgccagcaatgccatgcctgtgatctttgggaagagcagcggccctgagttcctgcaggaggtgtacacagctgtgacctaccacaacaagagcccagacttctatgaggaggtgaagatcaagctgcctgccaagctgactgtgaaccaccacctgctcttcaccttctaccacatcagctgccagcagaagcagggcgcctctgtggagaccctgctgggctacagctggctgcccatcctgctgaatgaaaggctgcagacaggcagctactgcctgcctgtggccctggagaagctgccccccaactacagcatgcacagcgctgagaaggtgcccctgcagaacccccccatcaagtgggccgagggccacaagggcgtcttcaacatcgaggtgcaggccgtgtcctctgtgcacacccaggacaaccacctggagaagttcttcaccctgtgccacagcctggagagccaggtgaccttccccatccgggtgctggaccagaagatcagcgagatggccctggagcacgagctgaagctgagcatcatctgcctgaacagcagccggctggagcccctggtgctcttcctgcacctggtgctggacaagctgttccagctgtctgtgcagcccatggtgattgctggccagacagccaacttcagccagtttgcctttgaatctgtggtggccatcgccaacagcctgcacaacagcaaggacctgagcaaggaccagcacggcaggaactgcctgctggccagctatgtgcactacgtgttccggctgcctgaggtgcagagagatgtgcccaagagcggggcccccacagccctgctggaccccaggagctaccacacctacggccgcaccagcgctgctgctgtgagcagcaagctgctgcaggcccgggtgatgagcagcagcaacccagacctggccggcacccacagcgctgctgatgaggaggtgaagaacatcatgagcagcaagattgctgacaggaactgcagcaggatgagctactactgcagcggcagcagtgatgcccccagcagccctgctgcccccaggcctgccagcaagaagcacttccacgaggagctggccctgcagatggtggtgtccacaggcatggtgcgggagaccgtcttcaagtatgcctggttcttctttgagctgctggtgaagtccatggcccagcacgtgcacaacatggacaagagggacagcttccggaggacccgcttcagtgaccgcttcatggatgacatcaccaccatcgtgaatgtggtgaccagcgagattgctgccctgctggtgaagccccagaaggaaaatgagcaggccgagaagatgaacatcagcctggccttcttcctgtatgacctgctgagcctgatggaccggggctttgtgttcaacctgatccgccactactgcagccagctgagcgccaagctgagcaacctgcccaccctcatctccatgaggctggagttcctgcgcatcctgtgcagccatgagcactacctgaacctgaacctcttcttcatgaatgctgacacagcccccaccagcccctgccccagcatcagcagccagaacagcagcagctgcagcagcttccaggaccagaagatcgcctccatgtttgacctgaccagcgagtaccggcagcagcacttcctgaccggcctgctcttcacagagctggccgccgccctggatgctgagggggagggcatcagcaaggtgcagaggaaggctgtgtctgccatccacagcctgctgagcagccatgacctggacccccgctgtgtgaagccagaggtgaaggtgaagattgctgccctgtacctgcccctggtgggcatcatcctggatgccctgccccagctgtgtgacttcaccgtggccgacacccggcgctaccgcaccagcggcagtgatgaggagcaggagggcgctggggccatcaaccagaatgtggccctggccatcgccggcaacaacttcaacctgaagaccagcggcatcgtgctgagcagcctgccctacaagcagtacaacatgctgaatgctgacaccaccaggaacctgatgatctgcttcctgtggatcatgaagaatgctgaccagagcctcatcaggaagtggattgctgacctgcccagcacccagctgaaccgcatcctggacctgctcttcatctgtgtgctgtgctttgagtacaagggcaagcagagcagtgacaaggtgtccacccaggtgctgcagaagagcagagatgtgaaggcccggctggaggaggccctgctgcggggggagggcgcccggggggagatgatgagaagaagagcccctggaaatgaccgcttccctggcctgaatgaaaacctgcgctggaagaaggagcagacccactggaggcaggccaatgagaagctggacaagaccaaggccgagctggaccaggaggccctgatcagcggcaacctggccacagaggcccacctgatcatcctggacatgcaggagaacatcatccaggccagcagcgccctggactgcaaggacagcctgctgggcggcgtgctgcgggtgctggtgaacagcctgaactgtgaccagagcaccacctacctgacccactgctttgccaccctgcgggccctgattgccaagtttggagacctgctgtttgaggaggaggtggagcagtgctttgacctgtgccaccaggtgctgcaccactgcagcagctccatggatgtgaccaggagccaggcctgtgccaccctgtacctgctgatgaggttctcctttggagccaccagcaactttgcccgggtgaagatgcaggtgaccatgagcctggccagcctggtgggccgggccccagacttcaatgaggagcacctgcggcgcagcctgcggaccatcctggcctacagcgaggaggacacagccatgcagatgacccccttccccacccaggtggaggagctgctgtgcaacctgaacagcatcctgtatgacacagtgaagatgagggagttccaggaggaccctgagatgctgatggacctgatgtaccgcatcgccaagagctaccaggccagcccagacctgcggctgacctggctgcagaacatggccgagaagcacaccaagaagaagtgctacacagaagctgccatgtgcctggtgcacgccgccgccctggtggccgagtacctgtccatgctggaggaccacagctacctgcctgtgggctctgtgtccttccagaacatcagcagcaatgtgctggaggagagcgtggtgtctgaggacaccctgagcccagatgaagatggagtgtgtgccggccagtacttcacagagagcggcctggtgggcctgctggagcaggccgctgagctgttcagcactggaggcctgtatgaaacagtgaatgaggtgtacaagctggtgatccccatcctggaggcccaccgggagttcaggaagctgaccctgacccacagcaagctgcagagggcctttgacagcatcgtgaacaaggaccacaagaggatgtttggcacctacttccgggtgggcttcttcggcagcaagtttggagacctggatgagcaggagtttgtgtacaaggagcccgccatcaccaagctgcctgagatcagccaccggctggaggccttctacggccagtgctttggagctgagtttgtggaggtgatcaaggacagcacccctgtggacaagaccaagctggaccccaacaaggcctacatccagatcacctttgtggagccctactttgatgaatatgagatgaaggacagagtgacctactttgagaagaacttcaacctgcggcgcttcatgtacaccacccccttcaccctggagggccggcccagaggagagctgcacgagcagtacagaagaaacacagtgctgaccaccatgcacgccttcccctacatcaagacccgcatcagcgtcatccagaaggaggagtttgtgctgacccccatcgaggtggccatcgaggacatgaagaagaagaccctgcagctggccgtggccatcaaccaggagcccccagatgccaagatgctgcagatggtgctgcagggctctgtgggcgccaccgtgaaccagggccccctggaggtggcccaggtgttcctggccgagatcccagctgaccccaagctgtaccgccaccacaacaagctgcggctgtgcttcaaggagttcatcatgagatgtggggaggccgtggagaagaacaagaggctcatcacagctgaccagcgggagtaccagcaggagctgaagaagaactacaacaagctgaaggagaacctgcggcccatgattgaaaggaagatccctgagctgtacaagcccatcttccgggtggagagccagaagagggacagcttccacaggagcagcttcagaaaatgtgagacccagctgagccagggcagctag

SEQ ID NO: 309584 - DNA, 6096 bp, Artificial Sequence
  derived and/or modified sequence
atgacccacctgaacagcctggacgtgcagctggcccaggagctgggagacttcactgacgacgacctggacgtggtgttcactccgaaagagtgcagaaccctgcagccttctctccccgaggaaggagtcgaactcgaccctcacgttagagattgcgtacagacatatatccgagaatggctgattgtcaacaggaagaaccaagggtctccggaaatttgcggcttcaagaagaccgggtcccggaaggactttcacaaaacactacccaaacagacatttgagtccgagaccttggagtgctccgaaccggccgcccaagctggcccacgccatttaaatgtgctctgcgatgtgtccggtaagggccccgtgacagcttgtgattttgacctgagatctttgcagcccgataagagactggagaatttgttgcagcaggtgagtgctgaggactttgaaaaacagaacgaggaggcgcgaagaacgaacaggcaggccgaactcttcgctctctaccctagtgtggacgaggaggacgccgtagagatacgccctgttccagaatgtccaaaggaacaccttggtaatcgtattctggtaaaacttctgacactgaagtttgaaatcgaaattgagcccctgttcgcaagtatagccctgtatgacgtgaaagaaaggaagaaaatatctgagaacttccattgcgatctgaactcagatcagttcaaaggtttcctacgtgcccacactccaagcgttgctgcaagctcacaggcacgaagcgctgtgttctccgttacctatccaagtagcgatatttacctggttgtaaaaattgagaaggtgcttcaacagggtgagataggcgactgtgccgagccgtacaccgtgattaaggagtctgacgggggaaaatccaaagaaaagatagaaaagttgaagttgcaggccgaatccttctgtcagcggcttggaaagtacaggatgccatttgcctgggcacccattagcttaagcagcttcttcaacgttagtactttagagagggaagtgactgatgttgactctgtggttggcaggagcagcgtgggagagcgacggaccctagctcagtcgcgacgcctcagcgagcgggctcttagcttggaagaaaacggtgtggggtccaacttcaagacatcaacactcagcgtgtccagcttctttaagcaggagggagacagactgagcgacgaagatctatttaagtttttggcagactacaaacgctcttctagtctgcagagaagggtcaaatccatacccgggctcctgagactagagatcagcaccgcaccggaaatcatcaactgctgcctgactccggaaatgctgcccgtcaaaccctttccagaaaatcgcacgcgtcctcacaaagaaatccttgaatttcccacacgcgaggtgtatgtgccgcacaccgtatacagaaatctactgtatgtttatccacaacggctcaattttgtgaataagttagcctccgctagaaacattaccattaagatccaatttatgtgcggtgaggatgcctcgaacgccatgcctgtcatctttggaaagagctccggcccagagtttttgcaggaagtgtatacagcggtgacctaccataacaaaagccccgacttttacgaggaggtgaagataaaactgcctgcaaagttgacggtcaaccaccacctgttgttcactttctatcacatcagctgccaacagaagcagggtgcttctgtggagacactcctgggatattcctggcttccaatcctgctgaacgaacgcctccagaccggatcttactgtttacccgtcgccctggaaaagctgccccccaactattccatgcactcggcggagaaagtgcctctgcaaaacccaccaatcaagtgggctgagggtcataaaggggtgttcaacattgaagtgcaggcagtaagtagcgtacacacacaggataatcaccttgaaaagttttttaccctgtgtcactcactggaatcccaagtaacgtttcccattagagtgctggatcagaagatcagcgaaatggccctcgaacacgagctgaagctctccatcatatgtctcaatagttcccgattggagcccctcgttctcttcctgcacctggtcctcgacaaactttttcagctgtccgtgcagcctatggtcatcgctggacagacggcaaacttcagccagttcgcctttgaatccgtcgttgccatcgctaactcactgcataacagcaaggacttgtccaaggaccaacacggcaggaattgcctgctagcaagttacgttcactacgtgtttcggctcccagaagtgcagcgcgacgtgccaaaaagcggtgcgcctacagcactgcttgatcctcgctcctatcacacctatggaagaacgtctgcagctgctgtgagttcgaagcttctgcaggcgcgggttatgtctagttcaaaccccgatctggcaggcacgcattccgcagctgatgaggaagttaagaatatcatgagttctaagatagcagacagaaactgctcacgaatgtcctattactgctcaggttccagtgacgcaccaagtagtcccgcagctcccaggcccgcaagcaagaagcatttccacgaggaactggctctgcagatggtggtgtctacagggatggtgagggagactgttttcaagtacgcatggtttttcttcgagctgctggtcaagtctatggcccaacatgtgcacaacatggacaaaagagactcttttcgaagaaccagatttagcgaccgctttatggacgacataaccaccattgtgaacgtcgtgaccagcgaaatcgccgcccttttagttaaaccgcagaaagagaatgagcaggccgaaaaaatgaatatctctctggccttcttcctttacgatctgttgagcctgatggatcgcggatttgtgttcaacctgatcagacattactgcagccaactatcagccaagctgtctaatcttccaacccttatctctatgcggctcgaatttctgagaattctgtgttcccatgagcactacttaaatctgaatctgttctttatgaatgccgatactgcccctacttccccctgcccctcgatatcttcccaaaactcgtcatcgtgttcatcgtttcaggaccagaaaattgcaagtatgttcgatttaaccagtgaataccgtcagcaacacttcctgacggggttgctgttcaccgaactggcagcagccttagacgctgaaggcgaggggataagcaaggttcagcgaaaagcagttagcgccatccattctctgctctccagtcacgatttggatcctagatgcgtcaagcccgaggtcaaggttaagattgctgccctgtacttgcctctggttgggatcattctggatgcgctcccgcaactgtgtgactttaccgttgccgacacccgacggtatcgaacgagcggatcagatgaagagcaggagggtgccggggccattaatcagaatgtggctttagccatcgctggtaataatttcaacctcaaaacctctggaattgtcctttcttcactgccttataagcagtacaacatgctgaatgctgacaccactaggaatctgatgatttgcttcctgtggatcatgaaaaacgcagaccaatctctgattcgcaaatggatagcggaccttccatccacccagctcaaccgaatcctcgatctgcttttcatctgcgtgctctgtttcgaatataaagggaagcaaagctctgacaaagtaagtactcaggtgctgcaaaaatcccgggatgttaaggcccgccttgaagaagccctcctgcggggagagggggcccgaggagaaatgatgcgaaggcgagctccaggcaatgatcgttttccgggactcaatgagaatctgcggtggaagaaagaacagacgcattggcgtcaggccaatgagaagctagacaaaacaaaggccgagctcgaccaggaggctttgatctccggaaaccttgccacagaagcacacctgatcattcttgacatgcaggaaaacatcattcaagcgagctcagccttggattgcaaggatagtcttctgggcggggtgcttcgggtactggtgaactcactgaattgcgatcagagcacgacctatctcacacactgcttcgctaccctccgcgccttgatagccaagttcggagacttactgtttgaggaagaagtggagcagtgtttcgacttatgccatcaggtgttgcatcactgttcgtcctccatggacgtgactagatctcaggcatgtgcaacattgtatctcctcatgcggttctctttcggcgccactagtaattttgctcgggtgaaaatgcaagtgactatgtcgctcgcctctctcgtgggaagagcacctgatttcaacgaggaacatttacgcagaagcctacggaccatcctggcatactctgaagaggataccgctatgcagatgacgccctttccaacacaggttgaggaactattgtgcaatctgaattcaatcctgtatgacactgtgaagatgcgggagtttcaggaggacccagaaatgctcatggaccttatgtatagaatcgccaagagctaccaggcctcaccagacctgaggctaacctggctgcagaacatggccgagaagcataccaaaaagaaatgttatactgaggccgcaatgtgtttggtgcacgccgccgcgctcgtagctgaatacctgtctatgctagaggatcactcttatcttccagtagggtccgtcagctttcagaacatctcctccaacgttttggaggagagcgtggtgagcgaagacactctctcaccagacgaggacggcgtttgtgccggtcagtatttcacagagagtggtctggtcggactgttagaacaagctgcagagctgttctccaccggagggctgtatgagactgtcaacgaagtttataagcttgttataccaatcctggaagctcatagagagttccggaaattgactttgactcactccaagctgcagagggcctttgatagcatcgtgaataaagatcataaaagaatgtttggtacatatttccgcgtgggcttcttcggcagcaaattcggagatttggacgagcaggagttcgtctataaggaaccggcaattacaaaactgcccgaaattagccatcgtctggaggcgttttacggtcagtgcttcggagccgaattcgttgaggtcattaaggactcaacccccgtggacaagaccaagttggaccccaacaaggcgtacatccagatcacattcgtcgaaccttacttcgacgagtatgagatgaaagatagggtcacatatttcgagaagaactttaacctgcgtcgtttcatgtacactaccccctttaccttggaggggcgcccccgaggtgagctccacgagcagtatcggcgcaacactgtgcttaccaccatgcacgcttttccgtacatcaagacgcgcatttccgtgattcagaaggaggagtttgtgttgactcctattgaggtggccatcgaggatatgaaaaagaagacactacagcttgccgtggcaatcaatcaggaacctcctgatgctaaaatgctccagatggtgctgcagggctcagtcggggctactgtcaaccaaggcccgctggaggttgcacaggtatttctggctgagatccctgccgaccctaagctctatcgccaccacaataaactcagactgtgttttaaggagtttatcatgaggtgtggcgaggccgtggagaagaacaagcgtttgattactgctgaccaaagagagtaccagcaggagttgaagaagaactacaacaagttaaaagaaaatctgagacccatgatcgaacggaagatcccagagctgtataaacccatctttagggtggagtctcaaaagagagattcttttcaccgcagcagctttaggaagtgcgaaacacagctatcacagggctcctag

SEQ ID NO: 309585 - DNA, 6095 bp, Artificial Sequence
  derived and/or modified sequence
atgacacaccttaactcactggacgtacaattagctcaggagcttggggatttcacagatgacgatctcgacgtggtgttcacgccaaaggaatgtagaacactgcagccatccttgccggaagagggagtggagctggatccccacgtccgagattgcgtgcaaacgtatatccgggagtggctgattgtgaatcgaaagaatcaaggcagcccagagatctgcggcttcaagaagaccggaagcagaaaggacttccataaaacactccctaagcagacgtttgagtccgaaaccctggaatgcagtgaacctgcagcacaggccggaccccgacacctgaatgttctctgcgacgtatccggtaaagggccagtgaccgcctgcgattttgacctgaggtctcttcagccggacaagcgtctcgaaaatctcttgcagcaggtatcggccgaagattttgagaaacagaatgaagaagccaggcgaacaaataggcaggccgagctattcgcgctgtacccctctgttgacgaggaggacgcggtggaaataaggccggtgcccgagtgtccaaaggaacacctcggtaataggatactggtgaaactgcttacgctaaagtttgagatcgagatcgagcccctgttcgcaagcatagccctctatgacgttaaagagcggaagaaaatctctgaaaattttcattgtgaccttaattccgatcagttcaaaggctttttgagagcccatacaccttctgttgccgcaagctcacaggctagaagcgcggtgtttagcgttacctacccatcatctgatatctatctcgtcgtcaagatagagaaagtgctacagcaaggcgagattggtgattgtgcagagccctatactgttattaaggaatcagatgggggtaaatctaaggaaaaaatagaaaagctgaagctgcaggccgaatctttctgtcagcggctggggaaatataggatgccgtttgcttgggcacctatctctctttcatcattcttcaatgtctccacactggagcgtgaggtgaccgacgttgactcagttgtgggcagaagctccgtgggtgaacgcaggacgttggcacagtcacgcagacttagcgagagagcgctgagccttgaggaaaatggcgtagggagtaactttaagacttctacgcttagcgtgtccagcttcttcaaacaggaaggcgatagactaagcgacgaggacctctttaaattcttagcagactacaagcgcagcagttctttgcagaggcgggttaaatcgattccaggcttgttgaggctagagatatccacagcacccgagatcataaactgctgtttgacccctgaaatgctccctgtcaaaccctttcccgaaaatcggacaagaccccataaagagatcctggagtttccgacaagggaggtctatgttccccacacagtttatcgtaacttactgtacgtgtatccacagagactcaattttgtcaacaagctggcctcagctcggaacatcactatcaagatccagttcatgtgcggagaagatgcgtctaacgcaatgcccgtgatttttggcaagtcttccggcccagaattcctccaagaagtttatacggcggtgacctatcacaacaaatcacctgacttctacgaggaagtgaagatcaaactccccgctaaattaactgttaaccaccatctgctgttcacattctaccatatttcttgccagcagaagcagggagcttcggtggagactctcctcggctactcgtggcttccaatcctgctgaatgagcgccttcagactggaagctactgtctccctgtcgctctggagaaacttccccctaattactcaatgcatagtgctgaaaaggtgccactccagaaccctcctatcaaatgggcagagggccataaaggcgtgttcaacatcgaggtgcaagctgtgagctcagtgcatacccaggacaatcatctggagaagttttttacactttgtcattcattggaaagccaagtcactttccctattagggtgttagatcagaagatttctgagatggctctggagcatgagctgaaacttagcataatttgcttgaatagctcccgtctcgaacctctggtactgttcttacacctcgtactagataagctgttccagctttctgtccagcccatggtgattgccggacagaccgcaaacttctctcagtttgcatttgagtccgtcgtggcaatcgctaactctttacacaattccaaggacctgagcaaggatcagcatggtaggaactgccttttggcgagctacgtgcactatgtcttccgcctgcccgaagtgcagagagatgtaccgaaaagtggcgcaccaaccgcgctgctggacccgagatcatatcatacctacggaaggacttccgccgctgcagtgtccagtaaacttctgcaagcccgagtgatgagcagctcaaaccctgacctggccggaacccattccgcagccgatgaggaggtgaagaatattatgtcaagcaagattgccgacagaaactgtagcagaatgtcctattattgttcaggttcttctgacgccccatcttctcccgctgcccctcggccagcaagcaaaaagcactttcacgaggagcttgctctccaaatggtggtctccactgggatggtaagagaaactgtgtttaaatatgcatggttctttttcgagctcctggtcaagagcatggctcagcacgtgcacaacatggataagcgcgactcctttcggaggacccgcttcagcgataggttcatggacgatattaccactatagtgaacgtcgtgacaagtgagatcgcagcgctccttgtgaagccccagaaggaaaatgagcaggcagagaaaatgaacattagtttggccttttttctatacgatctgctgtcgctgatggatcggggtttcgtgtttaatttgatccgccattactgcagtcaactgtccgcaaaactatctaacttaccaactttgatttctatgagactcgaattcctgaggatcttatgtagccatgagcattaccttaatctgaaccttttttttatgaacgctgataccgcccctacatctccctgccctagcattagtagccagaactccagcagctgttccagtttccaggaccagaaaatcgccagtatgttcgacttaacatctgagtatagacaacagcactttttaacagggctgctgtttaccgagcttgctgctgccttggatgctgagggcgaggggatctccaaagttcagcgcaaagcagtaagcgccatccactccctcctctccagtcacgacctggaccccagatgtgtgaagcctgaagtaaaggtgaaaattgcggcattgtatctccctctggttgggataattctcgatgccctgcctcagctgtgcgattttaccgtcgccgacacccgccgttatcgaacatcaggcagcgatgaagagcaagagggagcaggtgcaattaatcagaacgttgcattggccatcgctggaaacaatttcaatctcaaaacttcaggaattgtgctgtctagcttgccatacaagcaatataatatgctgaacgcagacacaacccgcaatctaatgatttgttttctctggatcatgaaaaacgcagaccagtccctgatcaggaagtggatcgctgacctccctagtacacaactgaacagaatacttgatctgctgtttatctgcgtcttatgcttcgagtataaaggaaaacagagtagcgataaggtgagtacacaggtgctgcaaaagtctcgagatgtgaaggcacgactggaagaggcgctcttaagaggtgagggggcacgtggggagatgatgcgtcggcgtgcacctgggaacgaccgttttcctggcttgaatgaaaatctgcgctggaagaaggaacagactcattggaggcaggcaaacgagaagctggacaagactaaggctgagctcgatcaggaggctctgatatcagggaacctggcaactgaggcacacctcatcatcctggacatgcaggagaacattatccaggcctctagcgccctcgactgtaaagactccctcttgggcggagtgctgagggtcttagttaacagcttaaactgtgatcaaagcaccacttacctcacccattgttttgccactttgcgtgcactgatagccaagttcggagacctgctgttcgaagaggaagtggaacagtgctttgatctgtgccaccaggtgctgcaccactgctcctcgagcatggatgtaacacgtagtcaggcctgcgcaaccctgtatctgctgatgcgattctcttttggtgctacttcaaattttgcccgtgtgaaaatgcaggtcacaatgagcttggcctccctggtggggagggctcctgatttcaacgaggaacatctgaggcgatctcttaggactattctggcgtattccgaagaagacaccgccatgcagatgaccccattccccacacaagtcgaagagctgctctgcaacctcaatagcatactttatgatacagttaagatgcgggagttccaggaagatccagaaatgttgatggatctgatgtacaggattgccaaaagctatcaagctagcccagacctgagactgacttggctccaaaatatggcagaaaagcataccaagaagaagtgttatactgaggccgcaatgtgcctggtgcacgccgcagcgctggtggccgagtatttgagtatgctggaagatcatagttatctgccagtgggtagtgtctcctttcaaaacatctcctctaatgtcttagaagaatctgtagtaagcgaggatactctatcaccagacgaagatggcgtctgcgccggtcagtactttacagagagtggacttgtgggactgctggaacaagctgctgagctatttagtaccggtggactgtacgagaccgtgaacgaagtatataaacttgttatcccaattctggaggctcatcgcgaatttagaaagttgacactcacacatagtaaactgcaacgagccttcgatagcatcgtcaacaaagatcataaacggatgtttggcacatattttcgcgttggtttctttggctccaaattcggggacctcgacgagcaagaatttgtgtacaaggagccggcaatcacaaaattacccgagatttctcacagacttgaagcgttctacggccagtgtttcggtgctgaattcgttgaggttatcaaagactcaactcccgttgataaaactaaactcgacccgaataaagcatacattcagatcacatttgtagagccctacttcgacgagtatgaaatgaaagatagggtgacctactttgagaaaaacttcaacctgaggagatttatgtatactactccgtttacactggaggggcgacccagaggagagctccatgagcagtacagacgcaacacagtgttgaccaccatgcacgcttttccatatattaagacacgtatcagtgtcattcagaaagaggagtttgtacttactccaattgaggtcgccattgaagacatgaaaaaaaagacattgcaattggccgttgctatcaatcaggaacccccagatgctaagatgcttcagatggtcctccagggaagcgtgggggcaacggtcaaccagggccctctcgaggtggcacaggtgttcctggcagagatccccgcagaccctaagctgtatcggcatcacaacaagcttaggttatgtttcaaggagtttatcatgaggtgcggcgaggcagtggagaaaaacaagcgactgatcactgctgatcaaagggagtaccagcaggaattaaagaagaactataacaagctcaaggagaatctccgacccatgattgaacggaaaatcccagagctatacaaacccattttcagggtagagagccaaaaaagggactccttccatcggtcctcatttcggaagtgtgaaacacagttatctcaggggtctta

SEQ ID NO: 309586 - DNA, 6096 bp, Artificial Sequence
  derived and/or modified sequence
atgacccacctgaacagcctggacgtgcagctggcccaggagctgggcgacttcaccgacgacgacctggacgtggtgttcacccccaaggagtgcagaaccctgcagcccagcctgcccgaggagggcgtggagctggacccccacgtgagagactgcgtgcagacctacatcagagagtggctgatcgtgaacagaaagaaccagggcagccccgagatctgcggcttcaagaagaccggcagcagaaaggacttccacaagaccctgcccaagcagaccttcgagagcgagaccctggagtgcagcgagcccgccgcccaggccggccccagacacctgaacgtgctgtgcgacgtgagcggcaagggccccgtgaccgcctgcgacttcgacctgagaagcctgcagcccgacaagagactggagaacctgctgcagcaggtgagcgccgaggacttcgagaagcagaacgaggaggccagaagaaccaacagacaggccgagctgttcgccctgtaccccagcgtggacgaggaggacgccgtggagatcagacccgtgcccgagtgccccaaggagcacctgggcaacagaatcctggtgaagctgctgaccctgaagttcgagatcgagatcgagcccctgttcgccagcatcgccctgtacgacgtgaaggagagaaagaagatcagcgagaacttccactgcgacctgaacagcgaccagttcaagggcttcctgagagcccacacccccagcgtggccgccagcagccaggccagaagcgccgtgttcagcgtgacctaccccagcagcgacatctacctggtggtgaagatcgagaaggtgctgcagcagggcgagatcggcgactgcgccgagccctacaccgtgatcaaggagagcgacggcggcaagagcaaggagaagatcgagaagctgaagctgcaggccgagagcttctgccagagactgggcaagtacagaatgcccttcgcctgggcccccatcagcctgagcagcttcttcaacgtgagcaccctggagagagaggtgaccgacgtggacagcgtggtgggcagaagcagcgtgggcgagagaagaaccctggcccagagcagaagactgagcgagagagccctgagcctggaggagaacggcgtgggcagcaacttcaagaccagcaccctgagcgtgagcagcttcttcaagcaggagggcgacagactgagcgacgaggacctgttcaagttcctggccgactacaagagaagcagcagcctgcagagaagagtgaagagcatccccggcctgctgagactggagatcagcaccgcccccgagatcatcaactgctgcctgacccccgagatgctgcccgtgaagcccttccccgagaacagaaccagaccccacaaggagatcctggagttccccaccagagaggtgtacgtgccccacaccgtgtacagaaacctgctgtacgtgtacccccagagactgaacttcgtgaacaagctggccagcgccagaaacatcaccatcaagatccagttcatgtgcggcgaggacgccagcaacgccatgcccgtgatcttcggcaagagcagcggccccgagttcctgcaggaggtgtacaccgccgtgacctaccacaacaagagccccgacttctacgaggaggtgaagatcaagctgcccgccaagctgaccgtgaaccaccacctgctgttcaccttctaccacatcagctgccagcagaagcagggcgccagcgtggagaccctgctgggctacagctggctgcccatcctgctgaacgagagactgcagaccggcagctactgcctgcccgtggccctggagaagctgccccccaactacagcatgcacagcgccgagaaggtgcccctgcagaacccccccatcaagtgggccgagggccacaagggcgtgttcaacatcgaggtgcaggccgtgagcagcgtgcacacccaggacaaccacctggagaagttcttcaccctgtgccacagcctggagagccaggtgaccttccccatcagagtgctggaccagaagatcagcgagatggccctggagcacgagctgaagctgagcatcatctgcctgaacagcagcagactggagcccctggtgctgttcctgcacctggtgctggacaagctgttccagctgagcgtgcagcccatggtgatcgccggccagaccgccaacttcagccagttcgccttcgagagcgtggtggccatcgccaacagcctgcacaacagcaaggacctgagcaaggaccagcacggcagaaactgcctgctggccagctacgtgcactacgtgttcagactgcccgaggtgcagagagacgtgcccaagagcggcgcccccaccgccctgctggaccccagaagctaccacacctacggcagaaccagcgccgccgccgtgagcagcaagctgctgcaggccagagtgatgagcagcagcaaccccgacctggccggcacccacagcgccgccgacgaggaggtgaagaacatcatgagcagcaagatcgccgacagaaactgcagcagaatgagctactactgcagcggcagcagcgacgcccccagcagccccgccgcccccagacccgccagcaagaagcacttccacgaggagctggccctgcagatggtggtgagcaccggcatggtgagagagaccgtgttcaagtacgcctggttcttcttcgagctgctggtgaagagcatggcccagcacgtgcacaacatggacaagagagacagcttcagaagaaccagattcagcgacagattcatggacgacatcaccaccatcgtgaacgtggtgaccagcgagatcgccgccctgctggtgaagccccagaaggagaacgagcaggccgagaagatgaacatcagcctggccttcttcctgtacgacctgctgagcctgatggacagaggcttcgtgttcaacctgatcagacactactgcagccagctgagcgccaagctgagcaacctgcccaccctgatcagcatgagactggagttcctgagaatcctgtgcagccacgagcactacctgaacctgaacctgttcttcatgaacgccgacaccgcccccaccagcccctgccccagcatcagcagccagaacagcagcagctgcagcagcttccaggaccagaagatcgccagcatgttcgacctgaccagcgagtacagacagcagcacttcctgaccggcctgctgttcaccgagctggccgccgccctggacgccgagggcgagggcatcagcaaggtgcagagaaaggccgtgagcgccatccacagcctgctgagcagccacgacctggaccccagatgcgtgaagcccgaggtgaaggtgaagatcgccgccctgtacctgcccctggtgggcatcatcctggacgccctgccccagctgtgcgacttcaccgtggccgacaccagaagatacagaaccagcggcagcgacgaggagcaggagggcgccggcgccatcaaccagaacgtggccctggccatcgccggcaacaacttcaacctgaagaccagcggcatcgtgctgagcagcctgccctacaagcagtacaacatgctgaacgccgacaccaccagaaacctgatgatctgcttcctgtggatcatgaagaacgccgaccagagcctgatcagaaagtggatcgccgacctgcccagcacccagctgaacagaatcctggacctgctgttcatctgcgtgctgtgcttcgagtacaagggcaagcagagcagcgacaaggtgagcacccaggtgctgcagaagagcagagacgtgaaggccagactggaggaggccctgctgagaggcgagggcgccagaggcgagatgatgagaagaagagcccccggcaacgacagattccccggcctgaacgagaacctgagatggaagaaggagcagacccactggagacaggccaacgagaagctggacaagaccaaggccgagctggaccaggaggccctgatcagcggcaacctggccaccgaggcccacctgatcatcctggacatgcaggagaacatcatccaggccagcagcgccctggactgcaaggacagcctgctgggcggcgtgctgagagtgctggtgaacagcctgaactgcgaccagagcaccacctacctgacccactgcttcgccaccctgagagccctgatcgccaagttcggcgacctgctgttcgaggaggaggtggagcagtgcttcgacctgtgccaccaggtgctgcaccactgcagcagcagcatggacgtgaccagaagccaggcctgcgccaccctgtacctgctgatgagattcagcttcggcgccaccagcaacttcgccagagtgaagatgcaggtgaccatgagcctggccagcctggtgggcagagcccccgacttcaacgaggagcacctgagaagaagcctgagaaccatcctggcctacagcgaggaggacaccgccatgcagatgacccccttccccacccaggtggaggagctgctgtgcaacctgaacagcatcctgtacgacaccgtgaagatgagagagttccaggaggaccccgagatgctgatggacctgatgtacagaatcgccaagagctaccaggccagccccgacctgagactgacctggctgcagaacatggccgagaagcacaccaagaagaagtgctacaccgaggccgccatgtgcctggtgcacgccgccgccctggtggccgagtacctgagcatgctggaggaccacagctacctgcccgtgggcagcgtgagcttccagaacatcagcagcaacgtgctggaggagagcgtggtgagcgaggacaccctgagccccgacgaggacggcgtgtgcgccggccagtacttcaccgagagcggcctggtgggcctgctggagcaggccgccgagctgttcagcaccggcggcctgtacgagaccgtgaacgaggtgtacaagctggtgatccccatcctggaggcccacagagagttcagaaagctgaccctgacccacagcaagctgcagagagccttcgacagcatcgtgaacaaggaccacaagagaatgttcggcacctacttcagagtgggcttcttcggcagcaagttcggcgacctggacgagcaggagttcgtgtacaaggagcccgccatcaccaagctgcccgagatcagccacagactggaggccttctacggccagtgcttcggcgccgagttcgtggaggtgatcaaggacagcacccccgtggacaagaccaagctggaccccaacaaggcctacatccagatcaccttcgtggagccctacttcgacgagtacgagatgaaggacagagtgacctacttcgagaagaacttcaacctgagaagattcatgtacaccacccccttcaccctggagggcagacccagaggcgagctgcacgagcagtacagaagaaacaccgtgctgaccaccatgcacgccttcccctacatcaagaccagaatcagcgtgatccagaaggaggagttcgtgctgacccccatcgaggtggccatcgaggacatgaagaagaagaccctgcagctggccgtggccatcaaccaggagccccccgacgccaagatgctgcagatggtgctgcagggcagcgtgggcgccaccgtgaaccagggccccctggaggtggcccaggtgttcctggccgagatccccgccgaccccaagctgtacagacaccacaacaagctgagactgtgcttcaaggagttcatcatgagatgcggcgaggccgtggagaagaacaagagactgatcaccgccgaccagagagagtaccagcaggagctgaagaagaactacaacaagctgaaggagaacctgagacccatgatcgagagaaagatccccgagctgtacaagcccatcttcagagtggagagccagaagagagacagcttccacagaagcagcttcagaaagtgcgagacccagctgagccagggcagctag

SEQ ID NO: 309587 - protein, 261 aa, Artificial Sequence
  derived and/or modified sequence
MCLTDEWGFFFFFFLGVPEAEVTWFRNKSKLGSPHHLHEGSLLLTNVSSSDQGLYSCRAANLHGELTESTQLLILDPPQVPTQLEDIRALLAATGPNLPSVLTSPLGTQLVLDPGNSALLGCPIKGHPVPNITWFHGGQPIVTATGLTHHILAAGQILQVANLSGGSQGEFSCLAQNEAGVLMQKASLVIQDYWWSVDRLATCSASCGNRGVQQPRLRCLLNSTEVNPAHCAGKVRPAVQPIACNRRDCPSRAMGLASGLT

SEQ ID NO: 309588 - protein, 466 aa, Artificial Sequence
  derived and/or modified sequence
MCLTDEWGFFFFFFLGVPEAEVTWFRNKSKLGSPHHLHEGSLLLTNVSSSDQGLYSCRAANLHGELTESTQLLILDPPQVPTQLEDIRALLAATGPNLPSVLTSPLGTQLVLDPGNSALLGCPIKGHPVPNITWFHGGQPIVTATGLTHHILAAGQILQVANLSGGSQGEFSCLAQNEAGVLMQKASLVIQDYWWSVDRLATCSASCGNRGVQQPRLRCLLNSTEVNPAHCAGKVRPAVQPIACNRRDCPSRWMVTSWSACTRSCGGGVQTRRVTCQKLKASGISTPVSNDMCTQVAKRPVDTQACNQQLCVEWAFSSWGQCNGPCIGPHLAVQHRQVFCQTRDGITLPSEQCSALPRPVSTQNCWSEACSVHWRVSLWTLCTATCGNYGFQSRRVECVHARTNKAVPEHLCSWGPRPANWQRCNITPCENMECRDTTRYCEKVKQLKLCQLSQFKSRCCGTCGKA

SEQ ID NO: 309589 - DNA, 330 bp, Artificial Sequence
  derived and/or modified sequence
cccatggtgggcctgctggtgcacaccgccgccaccttcaactacagctttcggaaaattaggggtctgctgtgtccgcaacacaagcagagaggggtccaagctaatcagacacctgtgctctttttgcatatcagctgtgtatactactcactgtacctcttctttttgttctgttgtttatttcttatccccctggagcagaagatgacaaccagcccactcccatacccgtgcgataacatccacgttactgtgtggcctctcggggaggttttgatggagaccagaatgtgggaaagtaagatcgggttggagatgagactgtag

SEQ ID NO: 309590 - DNA, 3592 bp, Artificial Sequence
  derived and/or modified sequence
atgtgtttgactgatgagtggggtttttttttttttttcttcctaggagtgcctgaagctgaagtcacttggttcaggaataaaagcaaactgggctccccgcaccatctgcacgaaggctccttgctgctcacaaacgtgtcctcctcggatcagggcctgtactcctgcagggcggccaatcttcatggagagctgactgagagcacccagctgctgatcctagatcccccccaagtccccacacagttggaagacatcagggccttgctcgctgccactggaccgaaccttccttcagtgctgacgtctcctctgggaacacagctggtcctggatcctgggaattctgctctccttggctgccccatcaaaggtcaccctgtccctaatatcacctggtttcatggtggtcagccaattgtcactgccacaggactgacgcatcacatcttggcagctggacagatccttcaagttgcaaaccttagcggtgggtctcaaggggaattcagctgccttgctcagaatgaggcaggggtgctcatgcagaaggcatctttagtgatccaagattactggtggtctgtggacagactggcaacctgctcagcctcctgtggtaaccggggggttcagcagccccgcttgaggtgcctgctgaacagcacggaggtcaaccctgcccactgcgcagggaaggttcgccctgcggtgcagcccatcgcgtgcaaccggagagactgcccttctcgtgcaatgggccttgcatcgggcctcacctagctgtgcaacacagacaagtcttctgccagacacgggatggcatcaccttaccatcagagcagtgcagtgctcttccgaggcctgtgagcacccagaactgctggtcagaggcctgcagtgtacactggagagtcagcctgtggaccctgtgcacagctacctgtggcaactacggcttccagtcccggcgtgtggagtgtgtgcatgcccgcaccaacaaggcagtgcctgagcacctgtgctcctgggggccccggcctgccaactggcagcgctgcaacatcaccccatgtgaaaacatggagtgcagagacaccaccaggtactgcgagaaggtgaaacagctgaaactctgccaactcagccagtttaaatctcgctgctgtggaacttgtggcaaagcgtgaagatagggtgtggggaaaaactctaccctggccacacgaaggactcacgcaaccacctcggacagaacctaagctttcttcattttatttatttatttccccctccccactccacacacacccttccaacctcctccacctccaccttcaagcataaggacgtccgcgtgttttctctttcagttagctggaggacaggatgttgggaaaggaaaggacagatgtctaaaggaggttgcagagcaggccaggcagacagtgggggctcccttgaagagcttcctccctcccaaacctgggtctcaaagacctagaaagaggcaggcacagcccctgcggacagcagggagccagaaggtttgtagcctattggtgcaaacattggacaaattcctgtgtctttcctagaagcgcactatcacaaacacaggagtgttttgctcctttgtctcctcttccccatctatgtccctttagtcacagttaggacaaatggggaggggacaccatgctgaggcagaaactagcccagaactcactcagttcttctagtgggtgagtgcagagagagaagaactcagatcaccagtagggagaggtaaaaaagcaaacaaagcaggctctaaggcacacaacattgcagaaaatgaggaagggaggggagggaagggacagaagcaaaaaggagcctgtggtgttccccagtggggcagggtgagcaggggcttccaggctgcatgaggctcatggaccagctctgatcccatgcatgtgcgcatgctcagagccctgctgcccacaacagagcactgcgctgcgtgggagtccccacttcccaagctatcagagtcaacgtcctgcctgtgcagctgcagcaaagccagtgagaggtgggtctcgccatgcagtaaggccaccctggcacctctttatctaaatccgaagtcccctagccccgcactaactaactgctgctgtgggccagggccattttgagcatgaatggcccaggttttttgccttctaggacctttgctgctccaccgaagggccagggactatggttaacttatcaacatcaacccattaactagtcactgtgccagagagtatctgtcaggctgtcaggttgtagcaacctcttcattccagagctggcccagggaccggggtgggacaatgggtttatgcgtgtccacagtacaccctccctctcccagcctccaccccagggtctgcaggtcctccggcatgtagtatttatctagcaaggcggggtggtggaggcagcaccctggcaaagcagctcacacactgcagccacactcatcagctgtggtgaggcggctggagcaaagtcaaagtcatgcagcaaaatgaaaactctgggactcttcggcaaaatcctcattaagccgagcagctttggccaagtaatttttgcctccttccctcgcgtggcctgagtttaggagcaagggtggccagagtcccttacccacagataagcctcccctcatgaaatgccactcaccccgggctaccattgacatcagggctgcatttccagccagcctggaagtaaaatttgagaggaagacaatattaatctgtgtccccacctagtgagctgtggacaggtttaagttgggtctccttcttcttcaccacaaaaacaggctctaagaaatcatgttactaaaaaatcagtgtaaagtctgtttaaaataaaaaagaatgttttctatgtctgtatatcttttgtgaatatttattaggatttcttattaaaaaagtgcaatattaataattgtacattgtcatccagaaacaaaactattggggggactttattaactaacttcctgcagttgtgttcctgtaaactcagtagtgattattatatttttcctatttttaatagaacctggtgtttaactctggatccattcactgtacaggatgtgttgtaaaaactaacatgggatgctgaggcagtaagagggaattcatttgtggcataatagttatgcatggaatgataaagacagacaaattccatactactactaatgtggttaattatttctagttcgatagtgattgaaaatcagtggtcactatttacatttcctaaagagcaagcatcctccagctccatgttgggttggagcagttggcagtgggtctcagtgagctggcagaacctaggtttgggtgggaagcagaatgctcgttgcatgaaatgaatgtacatttaatgtttgttctgtgaattgcaactcagcagcaccacaagacaatgaaggctgctggctaatgtggaaggaggcactttctcctctaaaacacaaaactgtatttgtattttttgtacagataatacagcttatttattt

SEQ ID NO: 309591 - DNA, 786 bp, Artificial Sequence
  derived and/or modified sequence
atgtgcctgactgacgaatggggcttctttttcttcttttttctgggtgtacccgaagctgaagtgacatggtttcgtaataaatcaaagctgggcagcccccatcacttacacgagggctcattgcttttgaccaacgtgtcatctagcgaccagggattgtacagctgccgtgcagccaacctgcatggcgaactcacagagtccacgcagctattgattctggatccgccccaggtccccacccagcttgaagacattagggcactattggccgccaccgggccaaatctaccttccgtcctcacaagcccccttgggactcagctcgtgttggatccgggaaattccgctctgctgggctgtccaatcaaggggcatcctgtgcccaatataacctggttccatggaggacagcctatcgtaactgcaactggtctaacacaccacatcctggccgccggtcagatcctgcaagtggctaacctcagtggggggtctcagggggaattcagctgtctggcacagaatgaggccggcgtgctgatgcagaaggcctcactggtcatccaggattactggtggtcagtcgatagactagctacatgttctgccagctgcggtaaccgaggcgtgcagcagcccagattgcggtgtctccttaatagcaccgaggtaaaccctgcacattgtgcagggaaggtcagacctgccgtgcaaccaatcgcctgtaacagacgggattgtcctagtcgggctatgggcctggcttctggtcttacctag

SEQ ID NO: 309592 - DNA, 786 bp, Artificial Sequence
  derived and/or modified sequence
atgtgcctgacagatgagtggggcttcttcttcttcttcttcctgggcgtgcctgaggccgaggtgacctggttcaggaacaagagcaagctgggcagcccccaccacctgcacgagggcagcctgctgctgaccaacgtgagcagcagtgaccagggcctgtacagctgcagagctgccaacctgcatggagagctgacagagagcacccagctgctgatcctggaccccccccaggtgcccacccagctggaggacatccgggccctgctggccgccaccggccccaacctgcccagcgtgctgaccagccccctgggcacccagctggtgctggaccccggcaacagcgccctgctgggctgccccatcaagggccaccctgtgcccaacatcacctggttccacggcggccagcccatcgtgacagccaccggcctgacccaccacatcctggccgccggccagatcctgcaggtggccaacctgagcggcggcagccagggcgagttcagctgcctggcccagaatgaagctggggtgctgatgcagaaggccagcctggtgatccaggactactggtggagcgtggaccggctggccacctgcagcgccagctgtggcaacagaggagtgcagcagccccggctgcgctgcctgctgaacagcacagaggtgaacccagcccactgtgccggcaaggtgcggcctgctgtgcagcccatcgcctgcaacagaagagactgccccagccgggccatgggcctggccagcggcctgacctag

SEQ ID NO: 309593 - DNA, 786 bp, Artificial Sequence
  derived and/or modified sequence
atgtgcctgaccgacgagtggggcttcttcttcttcttcttcctgggtgtgccagaggctgaggtgacatggttcagaaacaagagtaagctggggtcaccacatcaccttcacgaaggctccttgctgctgacaaatgtgtcctcctccgatcaagggctctacagctgcagagccgccaatctgcacggtgagctgacagagtcaactcagctgctgatacttgacccgccacaggtgcccacccaacttgaggacattcgcgcgctgctggcggctacaggtcctaatttgccctctgtccttacctccccactgggcacacagcttgtactggacccaggtaactccgcactgctcggctgcccaatcaaagggcatcccgtgcccaatatcacatggttccacgggggtcagcctatagttactgccacggggttgacccaccacatcttagcagctggccagatcttgcaggtggccaacctttctggaggtagtcagggagaattcagttgtcttgctcagaacgaagccggtgtgttgatgcagaaggcctcactggtcattcaagactattggtggtcggtcgaccggctcgcaacttgctcagcaagttgtggaaaccgcggcgtccagcagcctagactgcggtgcctgttgaattctaccgaggtgaatcccgcccactgcgccggcaaagtgaggccggctgttcagccaattgcttgcaatcgcagggattgcccaagtcgcgccatgggactggcttctgggttgacatag

SEQ ID NO: 309594 - DNA, 786 bp, Artificial Sequence
  derived and/or modified sequence
atgtgtctcaccgacgaatggggatttttctttttttttttcctcggggtccccgaggctgaagtaacatggttccggaacaaaagcaagctaggaagcccccaccatcttcacgaaggcagtctgttactcaccaatgtaagttccagcgatcagggtctctattcatgtcgggctgccaatttgcatggtgagttgacagagtccactcagttgttgatcctcgacccaccccaggtgccaacacagctcgaagatatacgcgctctgttagctgccactggacctaatctgcccagcgtgctgacctctccactaggaacgcagctggtactcgaccctgggaacagtgctttgctggggtgtcctataaagggccatcccgtgccgaacatcacttggtttcacggcggtcagcccattgtcacggcgacggggcttacacaccacatcctcgccgcagggcagatactgcaggtggcaaatctcagtggcggatcccagggggagtttagctgtttggcccagaatgaggccggagtgttgatgcagaaagccagtcttgtcattcaggattactggtggagcgttgacagactcgcaacatgttctgcgtcctgtggaaaccgtggcgtgcagcagccgaggcttaggtgcttactgaacagtactgaggtgaaccccgctcattgtgccggtaaggtcagacctgccgttcagcccatcgcttgcaacaggcgcgactgcccgtccagagccatggggctcgcttcaggactcacatag

SEQ ID NO: 309595 - DNA, 786 bp, Artificial Sequence
  derived and/or modified sequence
atgtgcctcaccgatgaatggggcttcttctttttttttttcctcggagtgcccgaagccgaagtcacttggttcagaaataaatctaaactcggttctccacatcacctacacgagggatctctgttattgacaaacgtctcctcctcagaccaaggactgtattcatgccgggcggccaaccttcacggagaactgacagagtcaactcaactgcttattctggaccccccccaagttcccacacaattggaggacatccgagcgctattggcagcaactggtcccaacctaccctccgtgctcacttctcctctcggaacgcagctagtactggaccccggcaacagcgcattactgggctgtcctatcaagggacatcccgtgcccaatatcacgtggttccacggggggcagccaatagtgactgcaacaggtcttacgcaccacattctagccgccgggcagatcttgcaggtggctaacctgtctggtggaagccagggtgagttttcatgtttagcccagaacgaagcaggcgtcttgatgcagaaagcttctctcgtgatccaggattactggtggtcggtggaccgcctagcgacatgctccgcctcatgtgggaacagaggcgtccagcagcccagactgaggtgcttgctcaactctacggaagttaatccagcccattgtgccgggaaggtccggcccgctgtacagccaattgcatgcaacaggcgcgattgtccttcgagagccatgggcctggccagtggtcttacctag

SEQ ID NO: 309596 - DNA, 786 bp, Artificial Sequence
  derived and/or modified sequence
atgtgcctcaccgatgaatggggcttcttctttttttttttcctcggagtgcccgaagccgaagtcacttggttcagaaataaatctaaactcggttctccacatcacctacacgagggatctctgttattgacaaacgtctcctcctcagaccaaggactgtattcatgccgggcggccaaccttcacggagaactgacagagtcaactcaactgcttattctggaccccccccaagttcccacacaattggaggacatccgagcgctattggcagcaactggtcccaacctaccctccgtactgacatcaccactgggtacccaactggtacttgatcctgggaacagtgctcttcttggctgcccaattaagggtcacccagtgcccaacatcacatggtttcacggaggccagcctattgtcactgccacgggcctgacccaccacatactcgcggccgggcaaatccttcaggtagcaaacttgtcaggcgggagccaaggggaattttcttgcctcgctcagaatgaagccggagtactcatgcagaaggcttctctcgttattcaggactattggtggtcagttgatcggctggctacttgttccgcttcctgcggcaacagaggcgtccaacaaccacggctaagatgcttattaaattccaccgaagtcaatcccgcccactgcgcaggtaaggttcggccagcagtgcagccaattgcgtgtaatcgtagagattgcccgagcagagccatgggactagcttctggcctgacctag

SEQ ID NO: 309597 - DNA, 786 bp, Artificial Sequence
  derived and/or modified sequence
atgtgcctgaccgacgagtggggcttcttcttcttcttcttcctgggcgtgcccgaggccgaggtgacctggttcagaaacaagagcaagctgggcagcccccaccacctgcacgagggcagcctgctgctgaccaacgtgagcagcagcgaccagggcctgtacagctgcagagccgccaacctgcacggcgagctgaccgagagcacccagctgctgatcctggaccccccccaggtgcccacccagctggaggacatcagagccctgctggccgccaccggccccaacctgcccagcgtgctgaccagccccctgggcacccagctggtgctggaccccggcaacagcgccctgctgggctgccccatcaagggccaccccgtgcccaacatcacctggttccacggcggccagcccatcgtgaccgccaccggcctgacccaccacatcctggccgccggccagatcctgcaggtggccaacctgagcggcggcagccagggcgagttcagctgcctggcccagaacgaggccggcgtgctgatgcagaaggccagcctggtgatccaggactactggtggagcgtggacagactggccacctgcagcgccagctgcggcaacagaggcgtgcagcagcccagactgagatgcctgctgaacagcaccgaggtgaaccccgcccactgcgccggcaaggtgagacccgccgtgcagcccatcgcctgcaacagaagagactgccccagcagagccatgggcctggccagcggcctgacctag

SEQ ID NO: 309598 - DNA, 192 bp, Artificial Sequence
  derived and/or modified sequence
cagcagcaggagaccaacctgctggccaacctgaccaccaatgatgcccgggacaacagcaaggacttccagaacagcaaggtgggcgctgctgccaccagcagagatgagggctgcaactgccccatcatcggggagatcgtcatcagctgctactggctgtttgagatccccccactcatcagcgagtag

SEQ ID NO: 309599 - DNA, 363 bp, Artificial Sequence
  derived and/or modified sequence
atggccgaagcaatcacttatgcggacctccgtttcgtgaaggcacctctgaagaaatctataagttctcgactgggccaggacccaggggccgatgatgatggtgagattacttatgagaatgtacaagtgcctgctgttcttggggtgccatcaagtctggcctcttctgtgttgggggataaggccgcggtgaaatccgagcagcctaccgcctcatggcgcgcagtgacatcgccggcagttggacggattctgccttgcgaatgtgcttgcgccggacaacctaggggtcaagttctggccccagtcccagctgccgatggggccggacctaggggcgtgcagctcctgccgggatag

SEQ ID NO: 309600 - DNA, 360 bp, Artificial Sequence
  derived and/or modified sequence
atggctgaagccatcacctatgctgacttacggttcgtcaaagctcctttgaaaaagagcatctctagccgattgggtcaggatccgggcgccgacgacgacggcgagataacctacgagaatgtccaggtgcccgccgtgctgggcgtgcctagttcactggcctcgagcgtgctgggggacaaggcggccgttaagtccgaacagcctaccgcaagctggagagcagtcacatcacctgccgtgggccgcattctgccctgcagaacaacgtgccttcgctacctgctcctagggctgttgctgacatgcctgctgttgggcgtgaccgctatttgtctgggcgtgcggtgcgaatag

SEQ ID NO: 309601 - DNA, 363 bp, Artificial Sequence
  derived and/or modified sequence
atggccgaggccatcacctacgccgacctgcgctttgtgaaggcccccctgaagaagagcatcagcagccggctgggccaggaccctggagcagatgatgatggagagatcacctatgaaaatgtgcaggtgcctgctgtgctgggcgtgcccagcagcctggccagctctgtgctgggggacaaggctgctgtgaagtctgagcagcccacagcctcctggagggctgtgaccagccctgctgtgggccgcatcctgccctgtgaatgtgcctgtgccggccagccccggggccaggtgctggcccctgtgcctgctgctgatggagctggcccccggggcgtgcagctgctgcctggatag

SEQ ID NO: 309602 - DNA, 360 bp, Artificial Sequence
  derived and/or modified sequence
atggccgaggccatcacctacgccgacctgcgctttgtgaaggcccccctgaagaagagcatcagcagccggctgggccaggaccctggagcagatgatgatggagagatcacctatgaaaatgtgcaggtgcctgctgtgctgggcgtgcccagcagcctggccagctctgtgctgggggacaaggctgctgtgaagtctgagcagcccacagcctcctggagggctgtgaccagccctgctgtgggccgcatcctgccctgcaggaccacctgcctgcgctacctgctgctgggcctgctgctgacctgcctgctgctgggcgtgacagccatctgcctgggcgtgcgctgtgagtag

SEQ ID NO: 309603 - DNA, 363 bp, Artificial Sequence
  derived and/or modified sequence
atggccgaggccatcacctacgccgacctgcggttcgtgaaggccccgttgaagaagagtatctcctctcgcctaggccaggacccaggggccgacgatgatggcgagatcacctatgaaaacgtgcaggtgccagctgttttgggcgtccccagtagcctcgcctcttctgtgctgggagacaaagcggccgtgaagtctgaacagcccacagcgagttggagggccgtgacctctcccgctgtggggagaatactcccttgtgagtgtgcatgcgccggccagccaaggggccaagttcttgcaccagtacccgctgccgatggagctggaccgaggggagtgcagttgctgcccgggtag

SEQ ID NO: 309604 - DNA, 360 bp, Artificial Sequence
  derived and/or modified sequence
atggccgaggccatcacctacgccgacctgcggttcgtgaaggccccgctcaagaagagcatttcaagccgacttggacaggacccgggggctgacgatgatggggaaattacctatgagaatgttcaagtacccgctgtgctgggcgtgcctagctctcttgcaagctcagtgctgggtgataaagccgcagtgaagtcggagcagcctaccgccagctggcgcgcggttacgtccccagcagtaggccgcatcctgccttgtaggacgacatgccttcgctacctgttgttgggtctgctcctgacatgcttgctgctgggcgtcactgctatttgcctgggggttaggtgtgaatag

SEQ ID NO: 309605 - DNA, 363 bp, Artificial Sequence
  derived and/or modified sequence
atggcggaggccattacttacgccgacctccggtttgtgaaggccccactgaaaaagtccataagtagcaggttgggccaagacccaggcgcagacgacgacggtgagataacttacgagaacgtccaagtgcccgcagttttgggggtgccttcttcacttgcaagtagtgtgctcggagacaaagccgctgtgaagagcgaacaacctaccgcctcatggagagccgtgacgagtcccgcagtgggccgaatacttccttgcgagtgcgcctgcgcgggacaaccgaggggacaggtgctggccccagtacccgcagctgatggagctggtccacgaggtgtccagctactccccggttag

SEQ ID NO: 309606 - DNA, 360 bp, Artificial Sequence
  derived and/or modified sequence
atggctgaggctatcacctatgcggacctgcgcttcgtgaaggccccactgaaaaagagtatttccagtcgccttggccaggacccaggcgcagatgacgatggagagattacttatgaaaatgtccaagtcccggctgtcctcggcgtcccatcatctcttgccagttccgtcttaggtgacaaggcagccgttaagagcgagcagcccacggcctcatggagggccgtaacgagcccagctgtgggacgaatacttccatgcagaaccacatgcctccggtaccttttactggggttactcctaacttgccttctcctgggtgtgactgcgatatgtcttggcgtcagatgcgagtag

SEQ ID NO: 309607 - DNA, 585 bp, Artificial Sequence
  derived and/or modified sequence
ctagttgtaaacggacagagacgagaggggcaagggaggacagtggatgacagggaagacgagtgggggcagagctgctcaggaccatggctgaggccatcacctatgcagatctgaggtttgtgaaggctcccctgaagaagagcatctccagccggttaggacaggacccaggggctgatgatgatggggaaatcacctacgagaatgttcaagtgcccgcagtcctaggggtgccctcaagcttggcttcttctgtactaggggacaaagcagcggtcaagtcggagcagccaactgcgtcctggagagccgtgacgtcaccagctgtcgggcggattctcccctgtgagtgtgcctgtgcggggcagccgcggggccaagtgctcgcgcctgtcccggctgcggatggcgctgggccccgcggggtgcagctccttccgggataaacccgggcgcagtccttccgacgcccgggctgccgtgccacattcaccttcatccggtgcgcctgaatccgacgtgcaccgcccccctgcggatggtcccaattcacctacctgccccccttcccctctctccgtc

SEQ ID NO: 309608 - DNA, 849 bp, Artificial Sequence
  derived and/or modified sequence
gacgagaggggcaagggaggacagtggatgacagggaagacgagtgggggcagagctgctcaggaccatggctgaggccatcacctatgcagatctgaggtttgtgaaggctcccctgaagaagagcatctccagccggttaggacaggacccaggggctgatgatgatggggaaatcacctacgagaatgttcaagtgcccgcagtcctaggggtgccctcaagcttggcttcttctgtactaggggacaaagcagcggtcaagtcggagcagccaactgcgtcctggagagccgtgacgtcaccagctgtcgggcggattctcccctgccgcacaacctgcctgcgatacctcctgctcggcctgctcctcacctgcctgctgttaggagtgaccgccatctgcctgggagtgcgctgtgagtaaggctgtccctacttcccacttacaccgaacgactttcgtcccgactctcgccccaaagctgatcttcctcagcagggatcatagtcactaccaccacctccttagctttgggtttggtttccagccagggctgttgtcttcctgaattgtcctcacctaatccagtacctccttacgctttagtcagtcaaatcttgtatttcagcctgtgatgcaaaaagttgcaagaagcagaaaaagggctgatgctgcagtctcagggcactagggcagggctggagaagacatccaccaaatctctgtggccaaacagatctgcaggtgtctcagcagctccagcagacgaacagggttctggaagtcactaacagcagcctgaggcagcagctccgcctcaagataacgcagctgggacagagtgc

SEQ ID NO: 309609 - DNA, 363 bp, Artificial Sequence
  derived and/or modified sequence
atggccgaggccatcacctacgccgacctgagattcgtgaaggcccccctgaagaagagcatcagcagcagactgggccaggaccccggcgccgacgacgacggcgagatcacctacgagaacgtgcaggtgcccgccgtgctgggcgtgcccagcagcctggccagcagcgtgctgggcgacaaggccgccgtgaagagcgagcagcccaccgccagctggagagccgtgaccagccccgccgtgggcagaatcctgccctgcgagtgcgcctgcgccggccagcccagaggccaggtgctggcccccgtgcccgccgccgacggcgccggccccagaggcgtgcagctgctgcccggctag

SEQ ID NO: 309610 - DNA, 360 bp, Artificial Sequence
  derived and/or modified sequence
atggccgaggccatcacctacgccgacctgagattcgtgaaggcccccctgaagaagagcatcagcagcagactgggccaggaccccggcgccgacgacgacggcgagatcacctacgagaacgtgcaggtgcccgccgtgctgggcgtgcccagcagcctggccagcagcgtgctgggcgacaaggccgccgtgaagagcgagcagcccaccgccagctggagagccgtgaccagccccgccgtgggcagaatcctgccctgcagaaccacctgcctgagatacctgctgctgggcctgctgctgacctgcctgctgctgggcgtgaccgccatctgcctgggcgtgagatgcgagtag

SEQ ID NO: 309611 - protein, 619 aa, Artificial Sequence
  derived and/or modified sequence
MMNFSNIMNYMKLLGQSDLPRIKTEIEALKNLRHQHICQLYHVLETANKIFMVLEYCPGGELFDYIISQDRLSEEETRVVFRQIVSAVAYVHSQGYAHRDLKPENLLFDEYHKLKLIDFGLCAKPKGNKDYHLQTCCGSLAYAAPELIQGKSYLGSEADVWSMGILLYVLMCGFLPFDDDNVMALYKKIMRGKYDVPKWLSPSSILLLQQMLQVDPKKRISMKNLLNHPWIMQDYNYPVEWQSKNPFIHLDDDCVTELSVHHRNNRQTMEDLISLWQYDHLTATYLLLLAKKARGKPVRLRLSSFSCGQASATPFTDIKSNNWSLEDVTASDKNYVAGLIDYDWCEDDLSTGAATPRTSQFTKYWTESNGVESKSLTPALCRTPANKLKNKENVYTPKSAVKNEEYFMFPEPKTPVNKNQHKREILTTPNRYTTPSKARNQCLKETPIKIPVNSTGTDKLMTGVISPERRCRSVELDLNQAHMEETPKRKGAKVFGSLERGLDKVITVLTRSKRKGSARDGPRRLKLHYNVTTTRLVNPDQLLNEIMSILPKKHVDFVQKGYTLKCQTQSDFGKVTMQFELEVCQLQKPDVVGIRRQRLKGDAWVYKRLVEDILSSCKV

SEQ ID NO: 309612 - DNA, 1860 bp, Artificial Sequence
  derived and/or modified sequence
atgatgaacttctcgaacatcatgaactatatgaagcttctgggacagtccgacttgcccaggatcaagaccgagatcgaggcacttaaaaatctgcgacaccagcacatttgtcaactctaccacgtcctggagacggcaaataagatcttcatggtgttggaatactgccccgggggcgagctctttgattatatcatctctcaggacagactcagtgaagaagagacaagagttgtgttccgtcagatcgtgtctgccgtagcttatgtgcattctcagggttacgcccatagggacctcaaaccagagaacctattgttcgacgaatatcacaaactgaagctgattgattttgggttatgcgccaaacccaagggcaacaaggattaccacctccaaacatgttgcggaagcctggcttatgccgctcctgaattgattcaagggaagagctacctgggcagtgaggcggacgtgtggtcaatgggcattctgctgtatgttttaatgtgcggatttttgcctttcgacgatgacaacgtgatggcgctgtataaaaaaatcatgagaggtaagtacgatgttccaaagtggctttctccaagttccattttactcctccagcagatgctccaagtggatcccaagaaacgtatttctatgaaaaacttgctaaatcacccttggatcatgcaggactacaactaccctgtggagtggcagtctaagaacccctttattcacctggatgatgactgcgtgacggagctgtctgtgcaccatcgcaataacaggcagaccatggaagatctaatttcactctggcagtacgatcacctgaccgctacttatctactgctccttgccaaaaaggcaagggggaaacctgtcagattgcgcctcagctcattttcgtgtggacaggcgagcgcgacacctttcaccgacatcaaaagcaacaattggagcctggaagacgtgaccgctagtgacaagaattacgtcgccggcttaattgactacgactggtgcgaggatgacctttcaactggggctgctacacctcgcaccagccagtttacaaagtattggacagaatccaatggggtggagtctaaatccctgacacccgctctttgtaggacacctgccaataaactcaagaacaaggagaatgtctacaccccgaagagcgctgtaaagaacgaggagtactttatgttcccagagccaaaaactcctgtgaataaaaaccagcacaaacgggaaattctgacaactcctaataggtacaccaccccctctaaggctcgcaaccagtgtctgaaggagactcctataaaaataccagtgaacagcaccgggaccgacaaattaatgacaggggtgattagcccagaacgacgctgcagaagtgtggaactggatctgaatcaggcccatatggaggagacacccaagcgtaagggcgcgaaggtctttggatctcttgagcgtggcctggataaggtcatcactgtcttgacccgctcaaagaggaaggggtctgcgcgggacggaccccgtagacttaaactgcactataatgttaccaccacgcgcctggtcaaccccgatcagctactgaatgaaatcatgtcgatcctgccaaagaaacacgtcgactttgtgcagaaagggtatacactgaaatgccagacacagagcgactttggaaaggtcacaatgcagttcgagctcgaggtgtgccaacttcagaaacccgacgtcgtggggattcgccgacaaagattgaagggggacgcttgggtctataaaaggttagtcgaggatatccttagctcctgcaaagtgtag

SEQ ID NO: 309613 - DNA, 1860 bp, Artificial Sequence
  derived and/or modified sequence
atgatgaacttcagcaacatcatgaactacatgaagctgctgggccagagcgacctgccccgcatcaagacagaaattgaggccctgaagaacctgcggcaccagcacatctgccagctgtaccacgtgctggagacagccaacaagatcttcatggtgctggagtactgccctggaggagagctgtttgactacatcatcagccaggaccggctgtctgaggaggagaccagggtggtgttccggcagatcgtgtctgctgtggcctacgtgcacagccagggctacgcccaccgggacctgaagccagagaacctgctgtttgatgagtaccacaagctgaagctgattgactttggcctgtgtgccaagcccaagggcaacaaggactaccacctgcagacctgctgcggcagcctggcctatgctgcccctgagctgatccagggcaagagctacctgggcagcgaggctgatgtgtggagcatgggcatcctgctgtatgtgctgatgtgtggcttcctgccctttgatgatgacaacgtgatggccctgtacaagaagatcatgaggggcaagtatgatgtgcccaagtggctgagccccagcagcatcctgctgctgcagcagatgctgcaggtggaccccaagaagaggatctccatgaagaacctgctgaaccacccctggatcatgcaggactacaactaccctgtggagtggcagagcaagaaccccttcatccacctggatgatgactgtgtgacagagctgtctgtgcaccacaggaacaaccggcagaccatggaggacctgatcagcctgtggcagtatgaccacctgacagccacctacctgctgctgctggccaagaaggcccggggcaagcctgtgcggctgcggctgagcagcttcagctgtggccaggccagcgccacccccttcacagacatcaagagcaacaactggagcctggaggatgtgacagccagtgacaagaactacgtggccggcctgattgattatgactggtgtgaagatgacctgagcactggagctgccacccccaggaccagccagttcaccaagtactggacagagagcaatggagtggagagcaagagcctgaccccagccctgtgcaggaccccagccaacaagctgaagaacaaggaaaatgtgtacacccccaagtctgctgtgaagaatgaggagtacttcatgtttcctgagcccaagacccctgtgaacaagaaccagcacaagcgggagatcctgaccacccccaaccgctacaccacccccagcaaggccaggaaccagtgcctgaaggagacccccatcaagatccctgtgaacagcactggaacagacaagctgatgactggagtcatcagccctgagcggcgctgccgctctgtggagctggacctgaaccaggcccacatggaggagacccccaagaggaagggggccaaggtgtttggcagcctggagcggggcctggacaaggtgatcaccgtgctgaccaggagcaagaggaaaggaagtgccagagatggcccccggcggctgaagctgcactacaacgtgaccaccacccggctggtgaacccagaccagctgctgaatgagatcatgagcatcctgcccaagaagcacgtggactttgtgcagaagggctacaccctgaagtgccagacccagagcgactttgggaaggtgaccatgcagtttgagctggaggtgtgccagctgcagaagccagatgtggtgggcatccggcggcagaggctgaagggagatgcctgggtgtacaagaggctggtggaggacatcctgagcagctgcaaggtgtag

SEQ ID NO: 309614 - DNA, 2268 bp, Artificial Sequence
  derived and/or modified sequence
agatttgattcccttggcgggcggaagcggccacaacccggcgatcgaaaagattcttaggaacgccgtaccagccgcgtctctcaggacagcaggcccctgtccttctgtcgggcgccgctcagccgtgccctccgcccctcaggttctttttctaattccaaataaacttgcaagaggactatgaaagattatgatgaacttctcaaatattatgaattacatgaaactattgggacagagtgatttgccccggatcaaaacggagattgaggccttgaagaacctgagacatcagcatatatgtcaactctaccatgtgctagagacagccaacaaaatattcatggttcttgagtactgccctggaggagagctgtttgactatataatttcccaggatcgcctgtcagaagaggagacccgggttgtcttccgtcagatagtatctgctgttgcttatgtgcacagccagggctatgctcacagggacctcaagccagaaaatttgctgtttgatgaatatcataaattaaagctgattgactttggtctctgtgcaaaacccaagggtaacaaggattaccatctacagacatgctgtgggagtctggcttatgcagcacctgagttaatacaaggcaaatcatatcttggatcagagacggagtttcgctcttgttgcccaggctggagtgcaatggtgtgatcttggctcactgcaacctctgcctcccgagttcaagcgattctcctgcctcagcctcccgaattgctggaattacaggcagatgtttggagcatgggcatactgttatatgttcttatgtgtggatttctaccatttgatgatgataatgtaatggctttatacaagaagattatgagaggaaaatatgatgttcccaagtggctctctcccagtagcattctgcttcttcaacaaatgctgcaggtggacccaaagaaacggatttctatgaaaaatctattgaaccatccctggatcatgcaagattacaactatcctgttgagtggcaaagcaagaatccttttattcacctcgatgatgattgcgtaacagaactttctgtacatcacagaaacaacaggcaaacaatggaggatttaatttcactgtggcagtatgatcacctcacggctacctatcttctgcttctagccaagaaggctcggggaaaaccagttcgtttaaggctttcttctttctcctgtggacaagccagtgctaccccattcacagacatcaagtcaaataattggagtctggaagatgtgaccgcaagtgataaaaattatgtggcgggattaatagactatgattggtgtgaagatgatttatcaacaggtgctgctactccccgaacatcacagtttaccaagtactggacagaatcaaatggggtggaatctaaatcattaactccagccttatgcagaacacctgcaaataaattaaagaacaaagaaaatgtatatactcctaagtctgctgtaaagaatgaagagtactttatgtttcctgagccaaagactccagttaataagaaccagcataagagagaaatactcactacgccaaatcgttacactacaccctcaaaagctagaaaccagtgcctgaaagaaactccaattaaaataccagtaaattcaacaggaacagacaagttaatgacaggtgtcattagccctgagaggcggtgccgctcagtggaattggatctcaaccaagcacatatggaggagactccaaaaagaaagggagccaaagtgtttgggagccttgaaagggggttggataaggttatcactgtgctcaccaggagcaaaaggaagggttctgccagagacgggcccagaagactaaagcttcactataacgtgactacaactagattagtgaatccagatcaactgttgaatgaaataatgtctattcttccaaagaagcatgttgactttgtacaaaagggttatacactgaagtgtcaaacacagtcagattttgggaaagtgacaatgcaatttgaattagaagtgtgccagcttcaaaaacccgatgtggtgggtatcaggaggcagcggcttaagggcgatgcctgggtttacaaaagattagtggaagacatcctatctagctgcaaggtataattgatggattcttccatcctgccggatgagtgtgggtgtgatacagcctacataaagactgttatgatcgctttgattttaaagttcattgg

SEQ ID NO: 309615 - DNA, 2347 bp, Artificial Sequence
  derived and/or modified sequence
aaagattcttaggaacgccgtaccagccgcgtctctcaggacagcaggcccctgtccttctgtcgggcgccgctcagccgtgccctccgcccctcaggttctttttctaattccaaataaacttgcaagaggactatgaaagattatgatgaacttctcaaatattatgaattacatgaaactattgggacagagtgatttgccccggatcaaaacggagattgaggccttgaagaacctgagacatcagcatatatgtcaactctaccatgtgctagagacagccaacaaaatattcatggttcttgagtactgccctggaggagagctgtttgactatataatttcccaggatcgcctgtcagaagaggagacccgggttgtcttccgtcagatagtatctgctgttgcttatgtgcacagccagggctatgctcacagggacctcaagccagaaaatttgctgtttgatgaatatcataaattaaagctgattgactttggtctctgtgcaaaacccaagggtaacaaggattaccatctacagacatgctgtgggagtctggcttatgcagcacctgagttaatacaaggcaaatcatatcttggatcagaggcagatgtttggagcatgggcatactgttatatgttcttatgtgtggatttctaccatttgatgatgataatgtaatggctttatacaagaagattatgagaggaaaatatgatgttcccaagtggctctctcccagtagcattctgcttcttcaacaaatgctgcaggtggacccaaagaaacggatttctatgaaaaatctattgaaccatccctggatcatgcaagattacaactatcctgttgagtggcaaagcaagaatccttttattcacctcgatgatgattgcgtaacagaactttctgtacatcacagaaacaacaggcaaacaatggaggatttaatttcactgtggcagtatgatcacctcacggctacctatcttctgcttctagccaagaaggctcggggaaaaccagttcgtttaaggctttcttctttctcctgtggacaagccagtgctaccccattcacagacatcaagtcaaataattggagtctggaagatgtgaccgcaagtgataaaaattatgtggcgggattaatagactatgattggtgtgaagatgatttatcaacaggtgctgctactccccgaacatcacagtttaccaagtactggacagaatcaaatggggtggaatctaaatcattaactccagccttatgcagaacacctgcaaataaattaaagaacaaagaaaatgtatatactcctaagtctgctgtaaagaatgaagagtactttatgtttcctgagccaaagactccagttaataagaaccagcataagagagaaatactcactacgccaaatcgttacactacaccctcaaaagctagaaaccagtgcctgaaagaaactccaattaaaataccagtaaattcaacaggaacagacaagttaatgacaggtgtcattagccctgagaggcggtgccgctcagtggaattggatctcaaccaagcacatatggaggagactccaaaaagaaagggagccaaagtgtttgggagccttgaaagggggttggataaggttatcactgtgctcaccaggagcaaaaggaagggttctgccagagacgggcccagaagactaaagcttcactataacgtgactacaactagattagtgaatccagatcaactgttgaatgaaataatgtctattcttccaaagaagcatgttgactttgtacaaaagggttatacactgaagtgtcaaacacagtcagattttgggaaagtgacaatgcaatttgaattagaagtgtgccagcttcaaaaacccgatgtggtgggtatcaggaggcagcggcttaagggcgatgcctgggtttacaaaagattagtggaagacatcctatctagctgcaaggtataattgatggattcttccatcctgccggatgagtgtgggtgtgatacagcctacataaagactgttatgatcgctttgattttaaagttcattggaactaccaacttgtttctaaagagctatcttaagaccaatatctctttgtttttaaacaaaagatattattttgtgtatgaatctaaatcaagcccatctgtcattatgttactgtcttttttaatcatgtggttttgtatattaataattgttgactttcttagattcacttccatatgtgaatgtaagctcttaactatgtctctttgtaatgtgtaatttctttctgaaataaaaccatttgtgaat

SEQ ID NO: 309616 - DNA, 1860 bp, Artificial Sequence
  derived and/or modified sequence
atgatgaacttcagcaacatcatgaactacatgaagctgctgggccagtctgacctcccaagaataaagacggagatcgaggctctgaagaacttgcggcaccaacacatctgccaactataccatgtactggagactgccaacaagatcttcatggttctggaatactgccctgggggtgagcttttcgactacatcatctcccaggatcggctgtccgaagaggaaacccgggtagtattccgccagatcgtgtctgccgtggcctacgtgcatagtcaggggtacgcccacagagatcttaagcccgagaacttgttgttcgatgaatatcacaagctgaagctgattgatttcggcttgtgtgctaaacccaagggcaacaaagactatcacctgcagacatgttgtggttcccttgcatatgcagcacctgagcttattcaaggcaaatcgtatctcgggtctgaagccgatgtttggtctatgggcattctgctgtacgtcctcatgtgcgggtttcttccgttcgatgacgataatgtgatggcactgtacaaaaagattatgcgtggcaaatatgacgtccccaagtggctcagtccaagttcaatactcctgctgcaacagatgttgcaggtcgacccaaagaagagaattagcatgaagaatctcctaaaccatccgtggattatgcaggactacaattaccccgtcgagtggcagtcaaaaaatccattcattcacctcgacgatgattgtgtcaccgaacttagcgtacaccatagaaataatcggcagacaatggaagacctgatttcactgtggcagtatgaccacctcacagcaacatatcttttgctcctggccaagaaggctcgcggaaagccagttcgcttgcgactgtcttcctttagttgtggccaagcatccgccaccccctttacggacatcaaaagcaacaattggagcctggaagacgtcaccgcaagtgacaagaactacgtcgcgggattgattgattacgattggtgtgaggatgacctttcgaccggcgccgctactcccagaacctctcagttcacgaagtactggaccgaatccaacggggtggaaagcaagagtctgactccggcattgtgcaggactcccgccaataaactgaagaataaagaaaacgtctatacgcccaagtctgcagtgaagaatgaggagtattttatgtttcctgaacctaagacccccgtcaataagaaccagcacaagcgtgagatccttaccacgccaaacagatatacgacgccctccaaagcaagaaaccagtgtcttaaggaaactccaattaaaatcccagtgaacagcacaggaacagacaagctcatgacaggagtgatctctcccgagaggcgctgccggtccgtcgagcttgatctgaaccaggctcacatggaggagacccctaagcgcaaaggcgctaaggtgttcgggtccctggagaggggattagataaggtgattacagtgttgacgaggtcaaaaaggaagggctctgctcgcgacggtccccgccgccttaagctgcactataacgtgaccactaccaggctggtgaatcccgatcaactgctgaatgaaattatgtctattctgcccaagaagcatgtggacttcgtgcaaaaggggtatacactgaagtgccagactcagtctgactttgggaaggtaacaatgcagttcgagcttgaggtttgtcaactgcaaaaacccgacgtggtgggcatcagacggcaacggctgaaaggggacgcatgggtgtacaaacgccttgtggaggacattttaagctcttgtaaggtgtag

SEQ ID NO: 309617 - DNA, 1860 bp, Artificial Sequence
  derived and/or modified sequence
atgatgaatttcagtaacatcatgaactatatgaagctcttgggccaaagcgacctgcccagaatcaaaactgaaatcgaagccctcaagaacctcagacaccagcatatctgccagttgtatcacgtcctagagacggccaacaaaattttcatggtgctcgaatattgccctggtggggaactgttcgattatatcatctcacaggatagactgagtgaagaagagacgagagtggtgtttaggcaaatagtcagcgccgtcgcctacgttcacagccaggggtatgcccacagagacttgaagccggagaacctgctgtttgacgagtatcacaagctgaaactaatcgattttggtttatgtgctaaacccaaaggtaataaagattaccacctgcagacctgttgcggctccctggcttacgctgcacccgaacttattcagggcaagagctatttaggaagcgaggccgacgtctggagcatggggatactgttgtacgtattaatgtgtggcttcttacccttcgatgacgataatgtcatggctctgtacaaaaaaatcatgagggggaaatacgacgtgccaaaatggctttctccgagcagcattttgcttctgcagcagatgcttcaggtggaccctaagaaaagaataagtatgaaaaatttgctgaatcacccttggataatgcaggattacaactaccctgtggaatggcagtctaaaaatcctttcattcacctggacgacgattgtgttacggagctgtccgtgcatcatagaaataaccggcagaccatggaagacctgatttcattgtggcagtatgatcacctgactgctacctatctgctgctgttggctaagaaggcccgtggcaaacctgtcagattacggctgagttcttttagctgtgggcaggcctccgcgacaccatttaccgatataaagagcaacaattggagtttagaagatgtcacagccagcgacaagaactacgtcgccggtctcattgattacgattggtgtgaggacgacctgagcaccggggcagctactccacggacatcccagtttaccaaatactggacagagtctaacggggtggaatccaaaagcctcacccctgctctgtgtaggacgccagccaacaagcttaagaacaaagagaacgtctacaccccaaagagcgctgtgaaaaacgaagagtatttcatgttcccagaacccaagaccccagtcaacaaaaatcagcacaagagggaaatcctaacaacaccgaacaggtataccacacccagtaaagctcgcaatcagtgtttaaaggaaacaccaatcaagattccagttaactcgactgggacagacaaactcatgactggcgtgataagcccagagcgtaggtgtagaagcgtggagcttgatttaaaccaggcccacatggaagagactcctaaacggaagggtgcgaaggtgtttggatccctcgaaagaggactggacaaggtgatcactgtactcaccaggtctaagcggaaaggttctgccagggacggccctagacgtttaaaacttcattataatgtgacaaccacaagattggttaacccggatcagctgttaaacgagattatgtcaattttgccgaaaaaacatgttgactttgtgcagaagggctacactctgaagtgccagacacagagcgattttggaaaagtcaccatgcagtttgaactcgaggtctgccagttacaaaagcctgatgtggtcggaattagacgccagcgccttaaaggggacgcttgggtgtataagaggctcgtcgaagacattttgtcatcttgtaaggtatag

SEQ ID NO: 309618 - DNA, 1860 bp, Artificial Sequence
  derived and/or modified sequence
atgatgaacttcagcaacatcatgaactacatgaagctgctgggccagagcgacctgcccagaatcaagaccgagatcgaggccctgaagaacctgagacaccagcacatctgccagctgtaccacgtgctggagaccgccaacaagatcttcatggtgctggagtactgccccggcggcgagctgttcgactacatcatcagccaggacagactgagcgaggaggagaccagagtggtgttcagacagatcgtgagcgccgtggcctacgtgcacagccagggctacgcccacagagacctgaagcccgagaacctgctgttcgacgagtaccacaagctgaagctgatcgacttcggcctgtgcgccaagcccaagggcaacaaggactaccacctgcagacctgctgcggcagcctggcctacgccgcccccgagctgatccagggcaagagctacctgggcagcgaggccgacgtgtggagcatgggcatcctgctgtacgtgctgatgtgcggcttcctgcccttcgacgacgacaacgtgatggccctgtacaagaagatcatgagaggcaagtacgacgtgcccaagtggctgagccccagcagcatcctgctgctgcagcagatgctgcaggtggaccccaagaagagaatcagcatgaagaacctgctgaaccacccctggatcatgcaggactacaactaccccgtggagtggcagagcaagaaccccttcatccacctggacgacgactgcgtgaccgagctgagcgtgcaccacagaaacaacagacagaccatggaggacctgatcagcctgtggcagtacgaccacctgaccgccacctacctgctgctgctggccaagaaggccagaggcaagcccgtgagactgagactgagcagcttcagctgcggccaggccagcgccacccccttcaccgacatcaagagcaacaactggagcctggaggacgtgaccgccagcgacaagaactacgtggccggcctgatcgactacgactggtgcgaggacgacctgagcaccggcgccgccacccccagaaccagccagttcaccaagtactggaccgagagcaacggcgtggagagcaagagcctgacccccgccctgtgcagaacccccgccaacaagctgaagaacaaggagaacgtgtacacccccaagagcgccgtgaagaacgaggagtacttcatgttccccgagcccaagacccccgtgaacaagaaccagcacaagagagagatcctgaccacccccaacagatacaccacccccagcaaggccagaaaccagtgcctgaaggagacccccatcaagatccccgtgaacagcaccggcaccgacaagctgatgaccggcgtgatcagccccgagagaagatgcagaagcgtggagctggacctgaaccaggcccacatggaggagacccccaagagaaagggcgccaaggtgttcggcagcctggagagaggcctggacaaggtgatcaccgtgctgaccagaagcaagagaaagggcagcgccagagacggccccagaagactgaagctgcactacaacgtgaccaccaccagactggtgaaccccgaccagctgctgaacgagatcatgagcatcctgcccaagaagcacgtggacttcgtgcagaagggctacaccctgaagtgccagacccagagcgacttcggcaaggtgaccatgcagttcgagctggaggtgtgccagctgcagaagcccgacgtggtgggcatcagaagacagagactgaagggcgacgcctgggtgtacaagagactggtggaggacatcctgagcagctgcaaggtgtag

SEQ ID NO: 309619 - DNA, 735 bp, Artificial Sequence
  derived and/or modified sequence
ggcagaggcagccccgacaccggcagcatcaccgtgagcggcagagagagcgagagcttcagaggcgtgggccccagcagagtgcagagaaccggcaagggcctgccctggctgagacccggccacttcgacagaatcagcctgttcttccccgaccccgtgagctaccccctggagctgcccagaggcgacgagatctgctgggccggcagcggcggctgctgcggcagaagcagacccagagaggccagcctgaccgagctgtggaccctgggcaccgccgtgagcggcctgggcagaagatacaccctgaccgtgcccggcgacagcccctgcgccagagtgggccacagctgcagctacctgccccccgtgggcaacgccaagagaggcaaggtgttcatcgtgggcggcgccaaccccaacagaagcttcagcgacgtgcacaccatggacctgggcaagcaccagtgggacctggacacctgcaagggcctgctgcccagatacgagcacgccagcttcatccccagctgcacccccgacagaatctgggtgttcggcggcgccaaccagagcggcaacagaaactgcctgcaggtgctgaaccccgagaccagaacctggaccacccccgaggtgaccagccccccccccagccccagaaccttccacaccagcagcgccgccatcggcaaccagctgtacgtgttcggcggcggcgagagaggctag

SEQ ID NO: 309620 - DNA, 735 bp, Artificial Sequence
  derived and/or modified sequence
gggaggggctcacccgacactggaagcatcactgtctccggccgggagagcgagtcatttagaggggtgggtccatctcgggtccagagaacaggcaaggggttgccatggctcagaccggggcacttcgatcgcattagtctctttttccctgatccagtaagctaccccctagagcttcctcggggcgatgagatatgttgggctggctccgggggatgttgcggtcgcagccggcctcgagaggcctccctgactgagctctggacgctaggcaccgcagtgagcgggctgggcagacgctatacgctaaccgtgcctggagactcaccatgcgccagggtggggcacagctgttcatacctaccccctgtgggtaacgccaagcgtgggaaagtgtttatcgttgggggtgcaaatcctaataggtccttctcagatgtccatactatggaccttggcaagcaccagtgggacctcgatacgtgtaaaggactgctgcctagatatgagcacgcgtcattcattccctcatgcacaccagacagaatctgggtgttcggcggcgcaaatcaaagtgggaaccggaactgcctgcaagtccttaaccccgagactcgtacctggacgacgccagaggtgaccagtcccccacctagcccaagaacctttcatactagttccgcggcaatcggtaatcagctatacgtgtttgggggcggagagcgcgggtag

SEQ ID NO: 309621 - DNA, 735 bp, Artificial Sequence
  derived and/or modified sequence
ggccggggcagcccagacaccggcagcatcaccgtgtctggccgggagagcgagagcttccggggcgtgggccccagccgggtgcagaggacaggcaagggcctgccctggctgcggcccggccactttgaccgcatcagcctcttcttcccagaccctgtgtcctaccccctggagctgcccagaggagatgagatctgctgggccggcagcggcggctgctgcggccgcagccggccccgggaggccagcctgacagagctgtggaccctgggcacagctgtgtctggcctgggccgccgctacaccctgactgtgcctggggacagcccctgtgcccgggtgggccacagctgcagctacctgccccctgtgggcaatgccaagaggggcaaggtgttcatcgtgggcggggccaaccccaacagaagcttcagtgatgtgcacaccatggacctgggcaagcaccagtgggacctggacacctgcaagggcctgctgcccaggtatgagcacgccagcttcatccccagctgcaccccagaccgcatctgggtgtttggaggagccaaccagagcggcaacagaaactgcctgcaggtgctgaaccctgagaccaggacctggaccaccccagaggtgaccagccccccacccagccccaggaccttccacaccagcagcgctgccatcggcaaccagctgtatgtgtttggaggaggagagcggggctag

SEQ ID NO: 309622 - DNA, 735 bp, Artificial Sequence
  derived and/or modified sequence
ggccggggcagccccgacaccggcagcatcaccgtgagcggccgggagagcgagagctttcggggagtcgggccgagccgggtgcaacgcactggcaagggtctgccctggctgaggcctggacatttcgataggataagtctgttcttccctgatcccgtgtcttatccgctggagctcccacgcggagacgaaatttgttgggcgggatcaggaggatgctgcggcagaagcagacccagggaagcttctctcactgagctgtggactcttggaacagccgtctccggtctcggacgtcgttacactctgactgtgcctggggactcaccttgtgcaagggtgggccactcttgtagttatctgcctccagtcggtaatgcaaagagaggaaaggtgttcatcgtcggaggcgcgaacccgaatcggtcgttctcggatgtgcacaccatggacctggggaaacatcagtgggacctggacacttgtaaaggcctcctcccccgctacgagcatgctagcttcattccatcctgtactcctgataggatttgggtatttgggggcgctaatcagagtgggaaccgcaattgccttcaggtgctcaatcctgagacacgcacctggaccacacccgaagtgacttcaccccccccaagtcctcggacctttcacacctcctccgccgccatcggcaatcagttgtacgtttttggtggaggagaaaggggctag

SEQ ID NO: 309623 - DNA, 735 bp, Artificial Sequence
  derived and/or modified sequence
ggacggggaagccctgacactggatctataaccgtgtccggacgggaatccgagtccttccgcggagtaggcccatcccgcgtacagcgaaccgggaaaggcctgccttggctgcgtccgggacactttgacaggatatcgctgttcttccccgatcctgtgtcttacccactggagctgccaaggggggacgaaatctgttgggctgggtctggcggttgttgtggcaggtccagacccagggaagcctctctgacagaactgtggactctgggtactgcggtgtccggactcggcagaaggtatactcttaccgtcccaggtgactcgccttgcgctcgcgtgggacatagctgcagttatctgcccccagtgggcaatgctaaacgcggaaaggttttcatagtgggaggagctaacccgaatcgaagcttctccgacgtccatacaatggacctgggtaagcaccagtgggatctggatacctgcaaagggttgctgccacgctacgagcatgccagctttattccatcatgtacgcctgaccggatttgggtgttcggcggagcaaatcagtccggaaatagaaattgtctccaggtcctgaaccctgagacacggacttggaccactcctgaggtgacctctcctccgccatcccctcgaactttccacacgagctccgcggctatcggtaatcagctatacgtttttggcggaggtgagagaggctag

SEQ ID NO: 309624 - DNA, 733 bp, Artificial Sequence
  derived and/or modified sequence
gggcgagggtccccggataccgggtctatcacggtctcgggcagggagtctgaatcttttaggggagtgggcccaagccgggtgcaaagaacggggaagggccttccctggctccgtcccggccactttgaccgaatcagcctgttctttcccgaccccgtctcctatcccctagaactgccacgtggggatgagatttgctgggctggtagcggcggctgctgcgggaggtcccgcccacgtgaagccagcctaactgagctctggactttggggacagctgtcagtggcctaggccgcaggtacaccttgactgtccctggagacagcccctgtgctcgagttggccacagctgttcatatttacccccagttggtaatgccaagagagggaaggtcttcattgttgggggagcaaatccaaacagaagcttctcagacgtgcacaccatggatctgggaaaacaccagtgggacttagatacctgcaagggcctcttgccccggtatgaacatgctagcttcattccctcctgcacacctgaccgtatctgggtatttggaggtgccaaccaatcaggaaatcgaaattgtctacaagtcctgaatcctgaaaccaggacgtggaccacgccagaagtgaccagccccccaccatccccaagaacattccacacatcatcggcagccattggaaaccagctatatgtctttgggggcggagagagaggtg

SEQ ID NO: 309625 - DNA, 285 bp, Artificial Sequence
  derived and/or modified sequence
atgcagcacagcctggtgttcttcttcgccgtgatcctgcacctgtcccacttgctgcacttggacgcctcaatccatcccttccgacttcccttcagcagcaaaccgtttctgcttattccaatgtcaaacaccactttgccgcacaccgcatggccattgagcttcctgcatcaaacggtgtctacactgaaggccgtggccgtgacccactctttgtggcacctccaaataccagtagattgccaggcgtgcaatagaaagtctaaaaaaatctactgttag

SEQ ID NO: 309626 - DNA, 126 bp, Artificial Sequence
  derived and/or modified sequence
atgggtctgggacgcgtcctgctctttttggcagtggccttcccctttgcccccccggccgcagcagctgtcgagatgggcttccacagagtgagccaggacggtctggacttgctgaccagctag

SEQ ID NO: 309627 - DNA, 126 bp, Artificial Sequence
  derived and/or modified sequence
atgggcctagggcgggtgctgctgttcctcgccgtggcttttcctttcgccccgccggcggcggccgcagtggagatgggcttccaccgggtaagccaggatggtttggacttgcttactagttag

SEQ ID NO: 309628 - DNA, 126 bp, Artificial Sequence
  derived and/or modified sequence
atgggacttgggagggttcttcttttccttgcagtcgcatttccctttgctccaccagcagcagcggccgttgagatggggtttcacagagtttctcaagacggcctcgatctgttaacctcctag

SEQ ID NO: 309629 - DNA, 126 bp, Artificial Sequence
  derived and/or modified sequence
atgggtctgggacgtgtgctgctgttcctagcagtggcttttccattcgccccccccgcggccgccgcagtggagatgggattccaccgggtgtcacaggacggactcgacctgctgactagctag

SEQ ID NO: 309630 - DNA, 126 bp, Artificial Sequence
  derived and/or modified sequence
atgggcttgggtcgcgtgttgttgttcctagcggtggccttccctttcgcccctccagctgcggccgctgtggagatggggttccacagagtgtctcaggatggcttggacctgctgacaagctag

SEQ ID NO: 309631 - DNA, 126 bp, Artificial Sequence
  derived and/or modified sequence
atgggcctgggacgagtgctcctattcctggccgtagcttttccttttgcccctcctgcagccgcggccgttgaaatggggttccatcgcgttagtcaagatggcctcgacctgctgacatcgtag

SEQ ID NO: 309632 - DNA, 126 bp, Artificial Sequence
  derived and/or modified sequence
atgggcctagggcgagtgctgcttttcctggctgtagctttcccctttgccccgcctgcagcagccgctgtggagatgggctttcacagggtgtcacaggatgggctggatctgttgacgtcctag

SEQ ID NO: 309633 - DNA, 126 bp, Artificial Sequence
  derived and/or modified sequence
atgggcctgggccgggtgctgctcttcctggccgtggccttcccctttgcccccccagctgctgctgctgtggagatgggcttccaccgggtgtcccaggacggcctggacctgctgaccagctag

SEQ ID NO: 309634 - DNA, 126 bp, Artificial Sequence
  derived and/or modified sequence
atgggcctgggccgggtgctgctgttcctggccgtggccttcccctttgcacccccggccgcagccgcggtggagatgggatttcaccgggtgtcccaggatggtttggacctgctcaccagctag

SEQ ID NO: 309635 - DNA, 126 bp, Artificial Sequence
  derived and/or modified sequence
atgggcctgggccgggtgctgctgttcctggccgtggccttcccctttgccccacccgccgccgccgccgtggaaatgggctttcatcgcgtatctcaggatgggctagatctgcttacaagctag

SEQ ID NO: 309636 - DNA, 126 bp, Artificial Sequence
  derived and/or modified sequence
atgggcctgggccgggtgctgctgttcctggccgtggccttccccttcgcgcctccagccgccgcagctgtcgagatgggctttcatcgtgtatctcaggacggtttggatctgttgacctcctag

SEQ ID NO: 309637 - DNA, 126 bp, Artificial Sequence
  derived and/or modified sequence
atgggcctgggccgggtgctgctgttcctggccgtggccttcccctttgcccccccagcagccgctgccgtagagatgggtttccaccgggtcagccaggatggtttggatctacttacatcttag

SEQ ID NO: 309638 - DNA, 126 bp, Artificial Sequence
  derived and/or modified sequence
atgggcctgggccgggtgctgctgttcctggccgtggccttcccctttgcaccccctgctgccgctgccgtcgagatggggttccaccgcgtttcccaggatggactcgacctcctcactagctag

SEQ ID NO: 309639 - DNA, 126 bp, Artificial Sequence
  derived and/or modified sequence
atgggcctgggccgggtgctgctgttcctggccgtggccttccccttcgcacctcctgcagctgctgctgtcgagatgggattccatcgcgtttcacaagatgggctagatctgctcacatcctag

SEQ ID NO: 309640 - DNA, 126 bp, Artificial Sequence
  derived and/or modified sequence
atgggcctgggccgggtgctgctgttcctggccgtggccttcccctttgccccccccgcagctgccgccgtggaaatgggtttccatcgcgtatcccaggacgggttggacctgctcacgtcctag

SEQ ID NO: 309641 - DNA, 126 bp, Artificial Sequence
  derived and/or modified sequence
atgggactgggcagggtgctattgttcctggcggtcgcattcccattcgcccctcccgctgccgctgccgtcgagatgggcttccatagggtgtcacaagatgggttggacttgttgacaagttag

SEQ ID NO: 309642 - DNA, 126 bp, Artificial Sequence
  derived and/or modified sequence
atgggactcgggagagttttactttttctcgccgttgcatttccatttgcaccgcctgccgcagcagcagtggagatgggatttcacagagtgtctcaggatggtctcgatctgctgactagttag

SEQ ID NO: 309643 - DNA, 126 bp, Artificial Sequence
  derived and/or modified sequence
atgggcctgggtcgggtgctgctctttttggcagttgctttccctttcgccccacccgcagctgccgctgttgagatgggcttccaccgtgtgtcacaagacggcttggacctcctcacaagctag

SEQ ID NO: 309644 - DNA, 126 bp, Artificial Sequence
  derived and/or modified sequence
atggggctggggagagtactattgttcttagccgttgcctttcctttcgcccctcctgccgctgccgctgtcgaaatggggtttcatagggtttctcaagacgggcttgacttactgacctcctag

SEQ ID NO: 309645 - DNA, 126 bp, Artificial Sequence
  derived and/or modified sequence
atgggcctcgggagggtgctgttgttcctagccgtagcctttccatttgcaccccctgcagcagcggctgttgagatgggttttcatcgtgtgagccaggatgggttggatttgctaacctcttag

SEQ ID NO: 309646 - DNA, 126 bp, Artificial Sequence
  derived and/or modified sequence
atggggttggggcgtgtgttgctgtttctggcagtcgcattccccttcgcgccacccgcagcggcagccgttgagatgggatttcatagggtttctcaggacgggttggatctcctgaccagttag

SEQ ID NO: 309647 - DNA, 126 bp, Artificial Sequence
  derived and/or modified sequence
atgggcctgggaagggtgctgctgttcttggccgtcgccttcccctttgccccacccgctgccgcagcggtagagatggggtttcaccgggtcagtcaggacgggcttgacttactcacttcctag

SEQ ID NO: 309648 - DNA, 126 bp, Artificial Sequence
  derived and/or modified sequence
atgggcctgggcagagtgctgctgttcctggccgtggccttccccttcgccccccccgccgccgccgccgtggagatgggcttccacagagtgagccaggacggcctggacctgctgaccagctag

SEQ ID NO: 309649 - protein, 529 aa, Artificial Sequence
  derived and/or modified sequence
MAAAALLLGLALLAPRAAGAGMGACYDGAGRPQRCLPVFENAAFGRLAQASHTCGSPPEDFCPHVGAAGAGAHCQRCDAADPQRHHNASYLTDFHSQDESTWWQSPSMAFGVQYPTSVNITLRLGKAYEITYVRLKFHTSRPESFAIYKRSRADGPWEPYQFYSASCQKTYGRPEGQYLRPGEDERVAFCTSEFSDISPLSGGNVAFSTLEGRPSAYNFEESPGLQEWVTSTELLISLDRLNTFGDDIFKDPKVLQSYYYAVSDFSVGGRCKCNGHASECGPDVAGQLACRCQHNTTGTDCERCLPFFQDRPWARGTAEAAHECLPCNCSGRSEECTFDRELFRSTGHGGRCHHCRDHTAGPHCERCQENFYHWDPRMPCQPCDCQSAGSLHLQCDDTGTCACKPTVTGWKCDRCLPGFHSLSEGGCRPCTCNPAGSLDTCDPRSGRCPCKENVEGNLCDRCRPGTFNLQPHNPAGRSCRSRASRVTSPRSAPTNRTWRPFCTACPRTVPAGSEGCPDPRHTLPHLLFT

SEQ ID NO: 309650 - protein, 738 aa, Artificial Sequence
  derived and/or modified sequence
MRMCTPIRGLLMALAVMFGTAMAFAPIPRITWEHREVHLVQFHEPDIYNYSALLLSEDKDTLYIGAREAVFAVNALNISEKQHEVYWKVSEDKKAKCAEKGKSKQTECLNYIRVLQPLSATSLYVCGTNAFQPACDHLNLTSFKFLGKNEDGKGRCPFDPAHSYTSVMVDGELYSGTSYNFLGSEPIISRNSSHSPLRTEYAIPWLNEPSFVFADVIRKSPDSPDGEDDRVYFFFTEVSVEYEFVFRVLIPRIARVCKGDQGGLRTLQKKWTSFLKARLICSRPDSGLVFNVLRDVFVLRSPGLKVPVFYALFTPQLNNVGLSAVCAYNLSTAEEVFSHGKYMQSTTVEQSHTKWVRYNGPVPKPRPGACIDSEARAANYTSSLNLPDKTLQFVKDHPLMDDSVTPIDNRPRLIKKDVNYTQIVVDRTQALDGTVYDVMFVSTDRGALHKAISLEHAVHIIEETQLFQDFEPVQTLLLSSKKGNRFVYAGSNSGVVQAPLAFCGKHGTCEDCVLARDPYCAWSPPTATCVALHQTESPSRGLIQEMSGDASVCPASSPKPLPPPGSSSLSCLGHVGDRRLSSPWTPWPASGAGPDSSSRVSLLPPFLSDQAQHVHALGNFYLFCQATGPADIRFVWEKNGRALETCVPVQTHALPDGRAHALSWLQDAIRESAEYRCSVLSSAGNKTSKVQVAVMRPEVTHQERWTRELSAWRAVAGEHDRMMQSWRKAWESCSKDTL

SEQ ID NO: 309651 - protein, 123 aa, Artificial Sequence
  derived and/or modified sequence
MWTQRWKRSVSPGPADIRFVWEKNGRALETCVPVQTHALPDGRAHALSWLQDAIRESAEYRCSVLSSAGNKTSKVQVAVMRPEVTHQERWTRELSAWRAVAGEHDRMMQSWRKAWESCSKDTL

SEQ ID NO: 309652 - DNA, 2217 bp, Artificial Sequence
  derived and/or modified sequence
atgagaatgtgcacccccatcagaggcctgctgatggccctggccgtgatgttcggcaccgccatggccttcgcccccatccccagaatcacctgggagcacagagaggtgcacctggtgcagttccacgagcccgacatctacaactacagcgccctgctgctgagcgaggacaaggacaccctgtacatcggcgccagagaggccgtgttcgccgtgaacgccctgaacatcagcgagaagcagcacgaggtgtactggaaggtgagcgaggacaagaaggccaagtgcgccgagaagggcaagagcaagcagaccgagtgcctgaactacatcagagtgctgcagcccctgagcgccaccagcctgtacgtgtgcggcaccaacgccttccagcccgcctgcgaccacctgaacctgaccagcttcaagttcctgggcaagaacgaggacggcaagggcagatgccccttcgaccccgcccacagctacaccagcgtgatggtggacggcgagctgtacagcggcaccagctacaacttcctgggcagcgagcccatcatcagcagaaacagcagccacagccccctgagaaccgagtacgccatcccctggctgaacgagcccagcttcgtgttcgccgacgtgatcagaaagagccccgacagccccgacggcgaggacgacagagtgtacttcttcttcaccgaggtgagcgtggagtacgagttcgtgttcagagtgctgatccccagaatcgccagagtgtgcaagggcgaccagggcggcctgagaaccctgcagaagaagtggaccagcttcctgaaggccagactgatctgcagcagacccgacagcggcctggtgttcaacgtgctgagagacgtgttcgtgctgagaagccccggcctgaaggtgcccgtgttctacgccctgttcaccccccagctgaacaacgtgggcctgagcgccgtgtgcgcctacaacctgagcaccgccgaggaggtgttcagccacggcaagtacatgcagagcaccaccgtggagcagagccacaccaagtgggtgagatacaacggccccgtgcccaagcccagacccggcgcctgcatcgacagcgaggccagagccgccaactacaccagcagcctgaacctgcccgacaagaccctgcagttcgtgaaggaccaccccctgatggacgacagcgtgacccccatcgacaacagacccagactgatcaagaaggacgtgaactacacccagatcgtggtggacagaacccaggccctggacggcaccgtgtacgacgtgatgttcgtgagcaccgacagaggcgccctgcacaaggccatcagcctggagcacgccgtgcacatcatcgaggagacccagctgttccaggacttcgagcccgtgcagaccctgctgctgagcagcaagaagggcaacagattcgtgtacgccggcagcaacagcggcgtggtgcaggcccccctggccttctgcggcaagcacggcacctgcgaggactgcgtgctggccagagacccctactgcgcctggagcccccccaccgccacctgcgtggccctgcaccagaccgagagccccagcagaggcctgatccaggagatgagcggcgacgccagcgtgtgccccgccagcagccccaagcccctgcccccccccggcagcagcagcctgagctgcctgggccacgtgggcgacagaagactgagcagcccctggaccccctggcccgccagcggcgccggccccgacagcagcagcagagtgagcctgctgccccccttcctgagcgaccaggcccagcacgtgcacgccctgggcaacttctacctgttctgccaggccaccggccccgccgacatcagattcgtgtgggagaagaacggcagagccctggagacctgcgtgcccgtgcagacccacgccctgcccgacggcagagcccacgccctgagctggctgcaggacgccatcagagagagcgccgagtacagatgcagcgtgctgagcagcgccggcaacaagaccagcaaggtgcaggtggccgtgatgagacccgaggtgacccaccaggagagatggaccagagagctgagcgcctggagagccgtggccggcgagcacgacagaatgatgcagagctggagaaaggcctgggagagctgcagcaaggacaccctgtag

SEQ ID NO: 309653 - DNA, 372 bp, Artificial Sequence
  derived and/or modified sequence
atgtggacccagagatggaagagaagcgtgagccccggccccgccgacatcagattcgtgtgggagaagaacggcagagccctggagacctgcgtgcccgtgcagacccacgccctgcccgacggcagagcccacgccctgagctggctgcaggacgccatcagagagagcgccgagtacagatgcagcgtgctgagcagcgccggcaacaagaccagcaaggtgcaggtggccgtgatgagacccgaggtgacccaccaggagagatggaccagagagctgagcgcctggagagccgtggccggcgagcacgacagaatgatgcagagctggagaaaggcctgggagagctgcagcaaggacaccctgtag

SEQ ID NO: 309654 - DNA, 2217 bp, Artificial Sequence
  derived and/or modified sequence
atgagaatgtgtacccccatccggggattgctgatggcgcttgccgtgatgttcggaaccgctatggcctttgcccctattccccggatcacatgggaacaccgagaggtccatctggtccagttccatgagccggatatttataattattctgcacttttgctgtctgaagacaaggatacactctacataggggctagggaggctgtctttgccgtgaacgccctgaatataagcgaaaagcagcatgaggtgtattggaaggtgagcgaggataaaaaagcaaaatgcgctgaaaaaggaaaaagcaagcagactgagtgcctgaactacatcagagtcttgcagccacttagtgcaacctctctttatgtgtgtgggaccaacgcatttcagccagcgtgtgaccatcttaaccttacatcattcaaattccttggaaaaaatgaagacggaaaagggagatgtcccttcgatccggcccattcatacaccagtgtcatggttgatggtgagctgtactcaggaacatcatacaacttcctggggagcgaaccaatcatctcccggaactcttcccattcccctttgaggaccgagtacgctatcccttggctcaacgagccctcctttgtttttgccgacgttatcagaaagagtcctgattcgcctgacggcgaagatgacagagtgtatttcttctttactgaggtgtccgtcgagtacgagttcgtcttcagagtgctgatccccagaatcgcaagagtgtgcaagggcgatcagggcggactaagaaccctgcagaagaagtggaccagtttcctcaaagccagactcatatgttctcggcctgatagcgggctggtttttaatgtcctcagggacgtgtttgtgctgagatctccgggcctgaaggtgcccgttttttacgccctgttcacacctcaactcaacaacgttggcctgagcgcggtctgcgcctacaatttgagcacagcagaagaagtgttttcccacggtaagtacatgcagtctaccacagtggagcagtcccacacaaagtgggtccgctataatgggcccgtccctaaacctcggcccggagcttgcatcgacagtgaggctagggcggccaattacaccagttcattaaacctcccagacaaaacacttcagttcgtcaaggaccatccattgatggacgattcagtcactcccatcgataataggccaaggctcatcaagaaggatgttaactatacccagatcgttgttgatcgaacacaggccctggacgggactgtctatgacgtcatgtttgttagcactgatagaggggccctccacaaagccatttcgctcgagcacgccgtgcacattatcgaggagacccaactctttcaggactttgagccggttcaaactctcctcttaagcagcaagaagggtaatcgtttcgtgtacgcagggtcaaatagcggggttgtgcaagcccctctggccttttgtgggaagcacggaacctgtgaggattgtgtgttggccagagacccctactgtgcttggtcgcccccaactgccacttgtgtggccttgcatcagaccgagtcacctagccgagggttgattcaggaaatgagtggagatgcatcagtatgcccagcatccagtcctaaacctctgcctccccccggatccagttctctcagctgtctaggacacgttggagatcgcagactcagcagcccttggactccttggcccgcctctggcgccggtcctgactcgtcctcaagagtgtcactcttaccccccttcttgtccgaccaggctcagcatgttcatgcattaggcaacttttaccttttctgccaggctacaggtccagctgatatcagatttgtgtgggaaaaaaacggccgcgccttagagacatgtgtacccgtccaaacccacgcactgcccgatggacgtgcacacgcgctctcctggctccaggacgcaattagggagagtgcagagtacagatgtagtgtgttatcctccgctggcaataagacctctaaagtgcaagtggcagtcatgcggccagaggtcacccatcaagaaagatggacacgggaattatcagcttggagagccgtggccggcgaacacgataggatgatgcagagctggcggaaagcctgggaatcctgctctaaagacacactttag

SEQ ID NO: 309655 - DNA, 372 bp, Artificial Sequence
  derived and/or modified sequence
atgtggacccagagatggaagcgcagcgtatcgcctggtcctgccgacattaggtttgtgtgggagaaaaacggtagggccctggagacctgtgtgcccgttcagactcacgcgctgcccgacggtagggcccacgctctcagttggcttcaggatgctattagagagtctgccgagtatagatgttcagtcctatctagcgctggtaataagacttccaaagttcaggtggcggtaatgagacctgaggttactcaccaagagcgatggactcgcgaactcagcgcttggcgcgccgtggccggcgaacacgatcggatgatgcagtcatggcgcaaagcatgggagagttgcagcaaggatacgctctag

SEQ ID NO: 309656 - DNA, 2217 bp, Artificial Sequence
  derived and/or modified sequence
atgcggatgtgcacccctataaggggcctgttaatggccctcgcagtgatgtttggaaccgccatggcctttgctcccatccctagaatcacttgggagcatagagaggtacatttggttcagttccacgagcccgacatttataattattcagccctacttctgtctgaagacaaagataccctctacatcggagcccgggaagccgtatttgctgtcaatgccctcaacattagcgagaaacagcatgaagtgtattggaaagtgtctgaagacaaaaaggccaaatgcgctgagaaaggcaagtcaaagcaaacagagtgtcttaattacatccgagtgctccagccgctgtcggccacttccctgtatgtgtgcgggactaacgcgtttcaaccagcttgtgaccatctcaacctgacatcctttaaatttcttgggaagaacgaggatggaaaaggtcgctgcccattcgatccggcccactcttacacatctgtcatggttgatggagagctgtactctggcaccagttataacttcctgggaagtgagcctattatctcgagaaatagcagtcactccccacttcggactgaatatgctataccctggttgaatgagccctctttcgtgttcgcagacgtgattcggaaatcacccgattccccggacggggaagacgatcgggtctactttttcttcaccgaagtgtctgtggagtacgagttcgttttcagggtgctgattcccagaattgctagggtttgtaaaggagatcagggggggctccggacccttcagaagaaatggacctctttcctcaaggcccggctgatctgttccaggcctgacagcggactcgtttttaacgtgcttagggatgtgttcgtcctgagatctccaggactgaaggttcctgtattttacgctctttttacaccgcaactgaacaacgtcggcctgtccgcagtctgcgcttacaatttgtcaaccgcagaagaagttttttctcacggaaagtatatgcagagtacaacagtagaacagtcccatacgaagtgggtgcgctacaacgggcccgtgcccaagccccgacctggagcttgtatcgattcagaggctagggccgctaattacacaagcagccttaatctcccggataagacactgcagttcgtcaaggaccatcccctgatggatgattccgtgacccccattgacaaccggccgagactcattaagaaggatgtgaattacacacaaatcgtcgtggatagaacgcaggccctggacggaacagtgtatgatgtgatgttcgtgtccactgatcgcggcgccctacataaagcaatttccctcgagcacgctgtgcacatcatcgaggaaacgcagcttttccaggactttgagcctgtacagaccctgctgctatcatcaaagaaagggaaccgatttgtgtacgcgggaagcaactcaggagtggtgcaagccccactggctttctgtggaaagcatggcacttgtgaagactgcgtgctagctcgagatccttattgcgcctggtctccacctacggctacatgcgtggctctgcatcaaaccgagtccccttcccgcgggctcatccaggaaatgtccggggacgccagcgtgtgccctgcgtccagcccgaaacctctgcccccaccaggttcttcgtccctgtcatgcctaggccacgtgggcgatcgccgtctctcttctccatggaccccctggcctgcctcaggagccggcccagactcttcttctcgagtgtcactcctccccccattcctgtctgaccaggctcagcatgtgcatgcactcggcaacttctaccttttctgccaggctaccggaccagctgatatccgatttgtatgggagaaaaatggacgggctttggagacctgtgtccctgtgcagactcatgctctgccagatggacgggctcacgccctgtcctggttgcaagatgcgatcagagagtcagccgagtaccgttgcagcgtactgagctccgctggaaacaagaccagcaaagtacaggtggcagtgatgagacctgaggtgacccatcaggaacgctggacccgtgagctcagtgcttggcgagccgtggccggagagcatgacagaatgatgcagagttggaggaaagcctgggaatcctgctccaaagacacattgtag

SEQ ID NO: 309657 - DNA, 2217 bp, Artificial Sequence
  derived and/or modified sequence
atgaggatgtgcacccccatccggggcctgctgatggccctggccgtgatgtttggaacagccatggcctttgcccccatcccccgcatcacctgggagcaccgggaggtgcacctggtgcagttccacgagccagacatctacaactacagcgccctgctgctgtctgaggacaaggacaccctgtacatcggggcccgggaggccgtgtttgctgtgaatgccctgaacatcagcgagaagcagcacgaggtgtactggaaggtgtctgaggacaagaaggccaagtgtgccgagaagggcaagagcaagcagacagaatgtctgaactacatccgggtgctgcagcccctgagcgccaccagcctgtatgtgtgtggcaccaatgccttccagcctgcctgtgaccacctgaacctgaccagcttcaagttcctgggcaagaatgaagatggcaagggccgctgcccctttgatcctgcccacagctacacctctgtgatggtggatggagagctgtacagcggcaccagctacaacttcctgggcagcgagcccatcatcagcaggaacagcagccacagccccctgaggacagaatatgccatcccctggctgaatgagcccagctttgtgtttgctgatgtgatcaggaagagcccagacagcccagatggagaagatgacagagtgtacttcttcttcacagaggtgtctgtggagtatgaatttgtgttccgggtgctgatccccagaattgcccgggtgtgcaagggggaccagggcggcctgcggaccctgcagaagaagtggaccagcttcctgaaggcccggctcatctgcagcaggccagacagcggcctggtgttcaacgtgctgagagatgtgtttgtgctgcggagccctggcctgaaggtgcctgtgttctacgccctcttcaccccccagctgaacaacgtgggcctgtctgctgtgtgtgcctacaacctgagcacagctgaggaggtgttcagccacggcaagtacatgcagagcaccaccgtggagcagagccacaccaagtgggtgcgctacaatggacctgtgcccaagcccaggcctggggcctgcattgattctgaggcccgggccgccaactacaccagcagcctgaacctgcctgacaagaccctgcagtttgtgaaggaccaccccctgatggatgattctgtgacccccatcgacaaccggcccaggctcatcaagaaggatgtgaactacacccagatcgtggtggacaggacccaggccctggatggcaccgtgtatgatgtgatgtttgtgtccacagacagaggagccctgcacaaggccatcagcctggagcacgctgtgcacatcatcgaggagacccagctgttccaggactttgagcctgtgcagaccctgctgctgagcagcaagaagggcaacagatttgtgtatgccggcagcaacagcggcgtggtgcaggcccccctggccttctgtgggaagcacggcacctgtgaggactgtgtgctggcccgggacccctactgtgcctggagccccccaacagccacctgtgtggccctgcaccagacagagagccccagccggggcctcatccaggagatgtctggagatgcctctgtgtgcccagccagcagccccaagcccctgcccccacctggcagcagcagcctgagctgcctgggccacgtgggggaccggcggctgagcagcccctggaccccctggccagccagcggggccggccctgacagcagcagccgggtgtccctgctgccccccttcctgagtgaccaggcccagcacgtgcacgccctgggcaacttctacctgttctgccaggccactggacctgctgacatccgctttgtgtgggagaagaatggccgggccctggagacctgtgtgcctgtgcagacccacgccctgcctgatggccgggcccacgccctgtcctggctgcaggatgccatccgggagagcgctgagtaccgctgcagcgtgctgagcagcgctggcaacaagaccagcaaggtgcaggtggccgtgatgaggcctgaggtgacccaccaggagcgctggacccgggagctgagcgcctggagggctgtggccggggagcatgacaggatgatgcagagctggaggaaggcctgggagagctgcagcaaggacaccctgtag

SEQ ID NO: 309658 - DNA, 372 bp, Artificial Sequence
  derived and/or modified sequence
atgtggacccagcgctggaagaggtctgtgtccccaggccctgctgacatccgctttgtgtgggagaagaatggccgggccctggagacctgtgtgcctgtgcagacccacgccctgcctgatggccgggcccacgccctgtcctggctgcaggatgccatccgggagagcgctgagtaccgctgcagcgtgctgagcagcgctggcaacaagaccagcaaggtgcaggtggccgtgatgaggcctgaggtgacccaccaggagcgctggacccgggagctgagcgcctggagggctgtggccggggagcatgacaggatgatgcagagctggaggaaggcctgggagagctgcagcaaggacaccctgtag

SEQ ID NO: 309659 - DNA, 2217 bp, Artificial Sequence
  derived and/or modified sequence
atgcggatgtgcacccccatccggggcctgctgatggccctggccgttatgtttggcacagcgatggctttcgcacccattcctcgaatcacatgggaacaccgggaggtgcaccttgtgcagtttcacgaacctgacatttacaactattccgctttgctcctgtctgaagacaaggataccctctacataggggcaagagaggccgtgttcgcagtgaatgctctcaacatatccgagaagcagcatgaggtgtattggaaagtcagcgaggataaaaaggcaaaatgcgccgagaagggtaagtccaaacagaccgagtgcctgaactatatacgggtgttacagcccctatccgcgacgtccctgtacgtgtgtggaaccaatgcttttcagcctgcctgtgaccatctgaatcttaccagcttcaagtttcttggtaaaaatgaagatggaaagggccgatgtccttttgaccccgctcacagttacacaagcgttatggtggatggggagctgtactcggggactagttacaatttcctcgggagcgagcccatcatcagtcgaaactcttcccactctcctcttcgtacagagtatgcaattccatggctaaatgaacctagctttgtatttgccgacgtgatccgcaaaagtcccgatagcccagacggggaggacgacagggtctattttttcttcaccgaggtgagcgtggaatacgagttcgtgttccgggtgctcatccctcggatcgccagagtttgtaagggtgatcaaggaggactaaggacccttcaaaaaaagtggacatcatttcttaaggctcggctgatatgctcgcggcccgatagtgggctcgtcttcaatgttctgcgcgatgtgtttgtactgcggtctccagggcttaaagttcccgtcttttacgctctgtttacaccccagctgaacaatgtggggctgagtgccgtttgtgcttacaacctgtcaacagctgaggaagtgtttagccacggcaaatacatgcagtccacaaccgtggagcaatctcacacgaagtgggttcgttacaacggtccagtgcccaagcccagaccaggtgcgtgcattgatagtgaagcccgcgccgccaattacacttcgtctttgaacttgccggataagactctccagtttgtgaaagatcaccccttaatggacgacagcgtcaccccaattgataaccgcccccgactgattaaaaaggatgtgaactacacacagattgtggtcgacaggactcaggccttagacggtaccgtctatgacgtaatgttcgtatctacagatagaggcgccttgcacaaagccatatccctggagcacgcagttcacataatcgaagaaacacaactcttccaggacttcgagcccgttcagaccctgctcctgtcgtctaaaaagggcaacaggttcgtgtatgctggcagtaattctggtgtggttcaggcgccattagccttctgtggaaagcatggaacctgtgaggattgcgtcctggcaagggacccatactgcgcttggtcccctccaacagctacctgcgtggctcttcatcaaaccgaaagtccgtctcgaggactgatacaagagatgagcggcgacgccagtgtctgccctgcgtctagtccgaagccattgcccccgcccgggtccagcagcctgtcgtgcctcgggcacgttggggatagacgactcagctccccatggaccccatggccagcgtccggcgccggtcctgactcctcgtcccgagtgtctctgttgccgcctttcttgagcgatcaggcccagcacgtgcatgcccttggcaatttttatctgttttgtcaggctactggcccagccgacatcaggtttgtttgggagaagaacggccgggcgttggagacctgcgtcccggttcaaacacatgcactgcccgatggaagggctcacgccttgtcttggttgcaggatgcaataagagaatctgcagaatatcgctgtagcgtcctaagttccgctggaaacaagacctccaaagttcaggttgccgtgatgagaccggaagtgacacatcaagagagatggacccgtgaactatccgcctggcgggccgttgccggggagcatgatcgcatgatgcagagttggaggaaggcttgggagagctgttcaaaggatacactatag

SEQ ID NO: 309660 - DNA, 372 bp, Artificial Sequence
  derived and/or modified sequence
atgtggacccagcggtggaagcggagcgtgagccccggccccgccgacatccggtttgtgtgggaaaaaaatgggcgggctctcgaaacctgtgtgccagtgcagactcacgccctgcctgatggccgagcccatgccctcagttggttgcaggatgccatcagggagagtgcggaatacagatgtagcgtgctcagcagtgcaggtaacaagacgtccaaagttcaggtggctgtcatgcgcccagaggtgacccatcaggagagatggacgcgggaactgtccgcatggcgggccgtggcaggggaacacgatagaatgatgcagtcttggcgtaaggcctgggagagctgctcaaaggacactctgtag

SEQ ID NO: 309661 - DNA, 2217 bp, Artificial Sequence
  derived and/or modified sequence
atgcggatgtgcacccccatccggggcctgctgatggccctggccgtcatgttcggtactgctatggcttttgcccccatccctcggatcacctgggaacatcgcgaggtccatctggttcagttccatgagccagacatttacaactattctgccttactcctctctgaggacaaagacaccttatatatcggggctcgcgaggccgtgtttgccgtgaatgctctgaacatctcagagaagcagcacgaagtttactggaaggtcagcgaggacaagaaggcaaaatgcgcagaaaagggtaaaagcaagcagaccgagtgtctgaactatattcgcgtgctgcagcctctatcagcaacctctctctatgtgtgcggcactaacgcattccagccagcttgtgatcatctaaaccttacctcattcaagtttttgggaaagaatgaggacgggaaggggagatgcccctttgatccggctcattcatatacttctgtgatggtggatggtgaattatattccgggacgagctataattttttaggcagcgaacccataattagtaggaacagctcacactccccattgagaactgaatacgcgatcccatggcttaacgagcctagcttcgtgtttgcagatgttattaggaaatcccccgacagccccgacggcgaggatgaccgagtctatttcttttttaccgaagtttctgtggagtacgagttcgtattccgggtactcatcccaagaattgccagagtgtgcaagggagaccagggcgggctcaggactttacaaaagaaatggacttcttttttaaaagctagactgatctgcagtagacccgattccgggctggtcttcaacgttttaagggatgtgtttgtgttgaggagtcctggtctcaaagttccggtgttctacgccctgttcaccccacaactgaacaatgtaggcctatccgcggtatgtgcctacaacctgtccactgccgaagaggtgttctcccacggtaagtacatgcaatctactacagtcgaacagtcccacactaagtgggtcaggtacaacggacctgtgccaaagccccgccctggggcgtgcattgattcagaagcccgggccgccaactacaccagttctctgaatcttcctgacaaaaccctgcagtttgtgaaagaccatcctctgatggacgatagcgtgacgcctattgataatcggcccaggctgataaaaaaagacgtgaactacactcagatcgtggtcgatcgcacccaagctttggacggcaccgtctatgacgtcatgttcgtgagtacagataggggggctttacacaaagctatttccttagagcacgccgttcatatcatcgaggagacccagctctttcaggactttgaaccagtccagaccttgcttctatccagcaagaagggaaatcgttttgtgtacgctggtagcaacagcggtgtggtgcaggcccccctggccttttgtggcaagcacggaacgtgtgaagactgtgtcctggcccgtgatccttattgcgcgtggtcaccacctacggcaacgtgcgtggccttgcatcagaccgagtcaccaagcaggggccttatccaagagatgtcgggcgatgcttccgtgtgccctgccagtagccctaagccactgccaccaccaggcagcagttccctatcttgtctgggtcatgttggcgatcgtcgactcagtagtccatggacaccttggccagcgagcggcgccggaccggattcctcatctcgagtttccctgcttcccccgtttctatccgatcaggctcagcatgttcacgcactgggaaacttctatctcttttgccaggccaccggacccgccgacataaggtttgtctgggaaaagaatggtcgggcactggagacctgcgtgccggtgcagacgcacgctctgcctgatgggagagctcatgcgctgtcttggttgcaggacgcaatccgcgagtctgcagagtaccgctgcagcgttctgagttccgccggcaacaagaccagtaaggtgcaagttgcggtgatgcgaccggaggtaacccatcaggagagatggacacgcgagctgtccgcctggagagccgtggccggtgagcacgatagaatgatgcagagttggcgcaaggcatgggaaagctgcagtaaagataccctgtag

SEQ ID NO: 309662 - DNA, 2217 bp, Artificial Sequence
  derived and/or modified sequence
atgcgcatgtgcacccctataagaggacttctcatggcgctggcagtaatgtttggtaccgcgatggcgttcgcccctatcccccgtatcacctgggagcatcgagaagttcacctggtccaatttcacgaacccgacatatacaattacagtgctctacttctcagtgaggataaagacacactttacataggggctagggaggcggtgtttgcagttaacgccctcaacatctcggaaaaacagcatgaggtctactggaaagtctctgaggataagaaggcaaaatgcgcagagaaaggaaagtcaaaacaaacggaatgtctgaactatataagagttctgcagccgctatcagccacctctctctacgtctgcggcactaatgcatttcaaccggcttgcgaccacctgaaccttaccagcttcaagttccttggaaagaacgaagacggtaagggtaggtgcccgtttgatcccgcacatagctatactagtgtaatggtcgatggcgaattatattctggcactagctataactttctcgggtccgagcctatcatcagccgcaattcctcccattctcctctaaggacagaatatgccatcccgtggctcaatgagccatcgttcgtgtttgctgatgtaattaggaagtccccagactcacccgatggcgaggacgatcgtgtctactttttctttacggaagtgagcgtggaatatgagttcgttttcagagtgctcattccaagaatcgccagagtctgtaaaggagaccagggcggactgagaacactgcagaagaagtggactagttttctgaaagccagattgatttgcagccggcctgatagcggcctcgtttttaacgtgttgagagatgtgttcgttttgcgatcacctggcctcaaagtgcctgttttttacgccctcttcacacctcagctgaataatgtgggactctctgctgtgtgcgcttataacctttccaccgcagaagaggtgttttctcacggcaagtatatgcagtctaccacggtggagcagagccacacgaagtgggtccggtataacggacctgtccctaagccgaggcctggtgcgtgcattgacagcgaggcccgtgccgcaaattacacaagcagtctcaatctgcccgataaaacactgcagtttgtgaaggaccatccgcttatggatgacagtgtgacaccaatcgataatagaccacggctcattaaaaaagacgtgaattacacccagattgtggttgataggacccaagccctagacgggaccgtgtatgacgtcatgttcgtgagtaccgatcgaggcgcactgcataaggctatatcccttgagcacgccgtgcacatcattgaggaaacacagttgttccaggacttcgagcccgtgcagacgttgttgcttagctcaaaaaaaggtaacagattcgtctacgctggatcaaactccggcgtcgttcaggcaccgcttgctttctgcggcaagcacggaacctgcgaggactgcgtgctagctcgtgacccctattgtgcctggtcccctcctacagctacttgtgtcgcactgcaccaaactgagtctccttccaggggcctcatacaggagatgagcggagacgcttctgtctgcccagcatcgtcccccaaacctctgcctcctcctgggagctcctccctgagctgtctaggtcatgtgggcgataggcgactctcctctccttggactccctggcctgcttcaggcgctggacctgactcttcatcccgcgtcagcttactgcctccattcctgtccgatcaggctcagcatgtccatgccctcggcaacttttatctgttttgccaggccacgggtcctgccgacattcgatttgtttgggaaaagaatggcagggctctggagacatgcgtgccggtccaaacccacgctttaccagacggacgggcacatgcacttagttggctgcaggatgcaattagagaatccgctgaatacaggtgttctgtgctcagtagcgctggcaataaaacaagtaaagtgcaagtggcagtgatgcgcccagaggtgacccatcaagaaagatggacccgcgaactatcggcctggagggctgtggcgggagagcacgaccggatgatgcagtcctggaggaaagcgtgggagtcttgctctaaggatactctgtag

SEQ ID NO: 309663 - DNA, 372 bp, Artificial Sequence
  derived and/or modified sequence
atgtggacacagagatggaaaagaagtgtttctccaggcccagctgacatacgcttcgtgtgggagaagaatggaagggccctcgagacatgtgtgcctgtccagacacatgctttacctgatgggcgagcccacgccctgtcctggctgcaggacgcgatccgtgaaagtgccgaataccgctgcagcgtactgtcatctgctggaaacaagacttcaaaagtgcaggtggcggttatgcggcctgaggtcacccaccaggaacggtggacaagagagctttccgcctggcgggctgtcgccggagagcatgacaggatgatgcagtcctggcggaaagcgtgggaaagctgttccaaggacactttgtag

SEQ ID NO: 309664 - DNA, 2217 bp, Artificial Sequence
  derived and/or modified sequence
atgaggatgtgcactcctatccggggtcttctgatggcactcgccgtcatgtttgggacagctatggccttcgcgcctatccccaggattacatgggaacacagagaggtacacctggtgcagttccatgagcccgatatctacaattactctgccctgttgctgagcgaagataaggatacattgtatattggggctagagaagctgtttttgccgttaacgcactaaacattagtgagaaacaacacgaagtgtactggaaagtgtctgaggacaaaaaagcaaaatgtgccgaaaaggggaaatccaaacaaactgagtgcctcaactacatccgagttttgcagccccttagcgccactagcctttacgtgtgcggtacaaacgcatttcaacccgcatgcgatcacctaaatttgacaagtttcaagtttctgggtaagaatgaggacggaaaagggagatgtccatttgaccctgctcatagctacacctcagtcatggtggacggggaactgtactccggcacgtcctacaacttcttgggttccgagcctattatctcccgcaattcgtctcacagccccctgaggaccgagtatgctattccttggttaaatgaacccagcttcgtgttcgccgacgtcatccgaaagtcaccagatagcccagatggggaagatgacagagtctatttcttcttcacggaagtctccgtcgagtacgagtttgtctttcgcgttctaatcccaaggattgcccgagtttgtaagggagaccagggcggtctgcgtacacttcagaagaaatggacaagctttttaaaggcacgtctgatttgcagcaggcctgatagcggcctggtgttcaatgtcctgagagatgtgttcgtgttgaggtcgcctgggctcaaggtgcccgtcttctatgcattatttacgccgcagttaaataacgtgggactgtctgcggtatgtgcctacaacctgtctacagctgaggaggtatttagccatggtaaatacatgcagtccactaccgtggaacagagccatactaagtgggtgcggtataatgggccagtgccaaagccaagacccggagcttgcattgactctgaagctagagcagctaattatacaagcagcctgaacttgcccgacaagaccctccagttcgtgaaagatcaccctcttatggatgacagtgtgacaccaatcgacaacaggcctaggcttattaagaaagacgtcaattacacacagatcgtcgtggaccgaacacaagcattggatggcacagtatacgatgtgatgtttgtgtctacagatcgaggagccctgcacaaagccattagccttgagcacgcggttcacattatcgaggagacacagctgttccaggactttgaaccagtgcagacccttctgctttcaagtaaaaaggggaacaggttcgtgtacgccggtagcaatagcggtgtggtccaggctcccctggctttctgcgggaagcacggcacctgtgaggactgcgtgctagccagagatccttattgcgcttggagccctcctacagccacgtgtgtcgctctccatcagacagagagcccctcgcgcggacttattcaggaaatgtccggagatgcaagtgtctgtccagcctccagccctaagcccctacctcctccaggcagtagttcattgtcctgcttggggcatgtcggagatagacggctgtcatctccctggaccccctggcctgcctctggagccggtcccgacagttctagtcgcgtaagtcttcttcctcccttcctgtctgaccaggcacagcatgtgcacgccctggggaatttttaccttttttgtcaggctaccggacccgcagatatccggtttgtctgggaaaagaatggcagggcgctggagacttgtgtccccgtgcaaactcatgcactacccgacggcagagcacacgcactgagttggctgcaggacgccatccgagagtcggccgagtaccgctgttccgtcctgtctagcgccggaaacaagacttcaaaagtgcaggtggccgtaatgaggcctgaggtcacgcatcaggagcgctggactcgcgaactttccgcatggcgtgccgtggcaggcgagcatgaccggatgatgcaaagctggcgcaaagcctgggaaagctgcagcaaagatactctctag

SEQ ID NO: 309665 - DNA, 3146 bp, Artificial Sequence
  derived and/or modified sequence
ggcaacccgctcgggtccccttccacactgtggaagctttgttctttcgctcttgctactgctagctctttgggtccacgctgcttttatgagctgtaacactcaccgcgaagatctgcagcttcactcctgagcccagcgagaccacgagcccaccgggaggaacgaacaactccagacgcgctgccttaagagctgtaacactcaccgtgaaggtctgcagcttcactcccgagccagcgagaccacgaacccaccagaaggaagaaactctgaacacatctgaacatcagaagggacagactccagacgcgccaccactctgctaacaccagatagtggaaagaaaccatgtgctgaaatgtttgacgacactgatggtttgactctgctaactggaatggcttattgtgcaagaaagtacacctggtcgggtcctggggctcatctctagcaccagcaaagatttctgaagacgtctttctagaaatgactggaaagtttcaagaggcataagatacagcatttcttctgaggccctgaagaagtatcaagtgggctttgacattgcggtggtgagagcgacccctcctcacctggagaactgggaaatgtggattctcagggaccgcgctgttcacgagctccaggctgtgctgctggccctggtcctggggcgctgagccgcatctgcaatagcacacctgcccggccacctgctgccgtgagcctttgctgctgaagcccctggggtcgcctctacctgatgaggatgtgcacccccattagggggctgctcatggcccttgcagtgatgtttgggacagcgatggcatttgcacccataccccggatcacctgggagcacagagaggtgcacctggtgcagtttcatgagccagacatctacaactactcagccttgctgctgagcgaggacaaggacaccttgtacataggtgcccgggaggcggtcttcgctgtgaacgcactcaacatctccgagaagcagcatgaggtgtattggaaggtctcagaagacaaaaaagcaaaatgtgcagaaaaggggaaatcaaaacagacagagtgcctcaactacatccgggtgctgcagccactcagcgccacttccctttacgtgtgtgggaccaacgcattccagccggcctgtgaccacctgaacttaacatcctttaagtttctggggaaaaatgaagatggcaaaggaagatgtccctttgacccagcacacagctacacatccgtcatggttgatggagaactttattcggggacgtcgtataattttttgggaagtgaacccatcatctcccgaaattcttcccacagtcctctgaggacagaatatgcaatcccttggctgaacgagcctagtttcgtgtttgctgacgtgatccgaaaaagcccagacagccccgacggcgaggatgacagggtctacttcttcttcacggaggtgtctgtggagtatgagtttgtgttcagggtgctgatcccacggatagcaagagtgtgcaagggggaccagggcggcctgaggaccttgcagaagaaatggacctccttcctgaaagcccgactcatctgctcccggccagacagcggcttggtcttcaatgtgctgcgggatgtcttcgtgctcaggtccccgggcctgaaggtgcctgtgttctatgcactcttcaccccacagctgaacaacgtggggctgtcggcagtgtgcgcctacaacctgtccacagccgaggaggtcttctcccacgggaagtacatgcagagcaccacagtggagcagtcccacaccaagtgggtgcgctataatggcccggtacccaagccgcggcctggagcgtgcatcgacagcgaggcacgggccgccaactacaccagctccttgaatttgccagacaagacgctgcagttcgttaaagaccaccctttgatggatgactcggtaaccccaatagacaacaggcccaggttaatcaagaaagatgtgaactacacccagatcgtggtggaccggacccaggccctggatgggactgtctatgatgtcatgtttgtcagcacagaccggggagctctgcacaaagccatcagcctcgagcacgctgttcacatcatcgaggagacccagctcttccaggactttgagccagtccagaccctgctgctgtcttcaaagaagggcaacaggtttgtctatgctggctctaactcgggcgtggtccaggccccgctggccttctgtgggaagcacggcacctgcgaggactgtgtgctggcgcgggacccctactgcgcctggagcccgcccacagcgacctgcgtggctctgcaccagaccgagagccccagcaggggtttgattcaggagatgagcggcgatgcttctgtgtgcccggcctcgtctcctaagcccctccctcctcctggctcctcttccctgtcctgtctgggccatgtgggggacaggaggctttcctctccctggaccccctggccagcctcgggtgcggggcccgacagcagctcgagggtctccttgctgccgcccttcctgagtgaccaggcacagcacgtgcacgccctggggaacttctacctcttctgccaggccacaggtcctgcagacattcgctttgtctgggagaagaatgggcgagctctggagacctgtgtccctgtgcagacccatgcactgcccgatggcagggcccatgcactcagctggctgcaggacgccatcagggaaagcgctgagtatcgctgctctgtcctctcctcagcagggaacaagacttcgaaggtgcaggttgctgtgatgagacctgaagtgacccaccaggagaggtggaccagagagctctctgcctggagggctgtggctggggagcacgaccggatgatgcagagctggaggaaggcgtgggaaagctgtagcaaggacaccctgtagccaccaggaaggagtccctgacaccgacctcaaccccaacaagaccctgctgccactgaccacagccacccccggagaaggcctggtcccccacaactgtgaactgtcttgcccaagcctgctctgaacacagccattgggccaccacctgatgggcagaggc

SEQ ID NO: 309666 - DNA, 1837 bp, Artificial Sequence
  derived and/or modified sequence
agcccagagaaaaacaacagaggtttgcggcagaagtggccaatgtcgggcccagagtccatgctcaaggctggaagcccatcctggatgtgctgcactcggcagtcctagtgtaattctgcagggcctggcccctgccagggtctgagctctccagcctgtggcatctactcccctccaagcccaccccagtgtctcaattggagagacaggccctcatggtccccactctggcccagccccctctgcacacagctggccgagctctgggcctctccatgctgtggccctggtgatggcagagccttgggatgtctctgtccatgtggtcacaggacatgtgtgtggcagcagggccatggtggggtgggatgctgttccaaggcccagaaccattctgtaagaaaccagcacagcgctgcaagaaagggggtcctaggggacacaggccacacaggtgtgctttgaaaaatggcaattaaggtcaaagagcaggaagtccacaggacgggccaaggccaaggctcccgctggccatggggaagccacctccagggcagtcccagggactgaattggaagttgtcccaagtcacttcaggtccaactgggacagcagaggtaacccccctgcaccctcatggggcagcttctttgggtcctaaatgtggactcagaggtggaaacggtctgtgtccccaggtcctgcagacattcgctttgtctgggagaagaatgggcgagctctggagacctgtgtccctgtgcagacccatgcactgcccgatggcagggcccatgcactcagctggctgcaggacgccatcagggaaagcgctgagtatcgctgctctgtcctctcctcagcagggaacaagacttcgaaggtgcaggttgctgtgatgagacctgaagtgacccaccaggagaggtggaccagagagctctctgcctggagggctgtggctggggagcacgaccggatgatgcagagctggaggaaggcgtgggaaagctgtagcaaggacaccctgtagccaccaggaaggagtccctgacaccgacctcaaccccaacaagaccctgctgccactgaccacagccacccccggagaaggcctggtcccccacaactgtgaactgtcttgcccaagcctgctctgaacacagccattgggccaccacctgatgggcagaggcgggacagtggagaagcctggaacccaagtgggcctgtgacaggaactaagacttaaaaaattaggtgcttacctgggacagtaagttctgtctggcacaagcaggtaaccaggatggctaacaggctttgatagctgctcgtgaactaaaacagcagggtgtgtgcaggttcctcctctacggtcaggcagcaggctctgaaggctgatcctacaccgtcccagtgactccccttgacagagtgcccccaccccctaatagccaacagggttagcatggccagcacagatcgctgcttttattgatgcaaatcaagcctgctgcttctcctccctgcagacttagccaaggaactccaagatgcatgactgggacaagaaaaggtgagactccacatggaaatgccttgccctaaaccttgaatgactgtgagatgcgatctgggagtgcatctgtcaagtctttgtgttttcttcactaacctcagaatactgggctctattttatcaagcgctgcagtttatgcctctgtcccgtcaatgctcagcttctgcaacaggacaccaaacttgatgcagaaagccaaataggtcaattatgcaaatctcctggtgccatattaaatttcttgacgatgg

SEQ ID NO: 309667 - DNA, 4275 bp, Artificial Sequence
  derived and/or modified sequence
actctgctaacaccagatagtggaaagaaaccatgtgctgaaatgtttgacgacactgatggtttgactctgctaactggaatggcttattgtgcaagaaagtacacctggtcgggtcctggggctcatctctagcaccagcaaagatttctgaagacgtctttctagaaatgactggaaagtttcaagaggcataagatacagcatttcttctgaggccctgaagaagtatcaagtgggctttgacattgcggtggtgagagcgacccctcctcacctggagaactgggaaatgtggattctcagggaccgcgctgttcacgagctccaggctgtgctgctggccctggtcctggggcgctgagccgcatctgcaatagcacacctgcccggccacctgctgccgtgagcctttgctgctgaagcccctggggtcgcctctacctgatgaggatgtgcacccccattagggggctgctcatggcccttgcagtgatgtttgggacagcgatggcatttgcacccataccccggatcacctgggagcacagagaggtgcacctggtgcagtttcatgagccagacatctacaactactcagccttgctgctgagcgaggacaaggacaccttgtacataggtgcccgggaggcggtcttcgctgtgaacgcactcaacatctccgagaagcagcatgaggtgtattggaaggtctcagaagacaaaaaagcaaaatgtgcagaaaaggggaaatcaaaacagacagagtgcctcaactacatccgggtgctgcagccactcagcgccacttccctttacgtgtgtgggaccaacgcattccagccggcctgtgaccacctgaacttaacatcctttaagtttctggggaaaaatgaagatggcaaaggaagatgtccctttgacccagcacacagctacacatccgtcatggttgatggagaactttattcggggacgtcgtataattttttgggaagtgaacccatcatctcccgaaattcttcccacagtcctctgaggacagaatatgcaatcccttggctgaacgagcctagtttcgtgtttgctgacgtgatccgaaaaagcccagacagccccgacggcgaggatgacagggtctacttcttcttcacggaggtgtctgtggagtatgagtttgtgttcagggtgctgatcccacggatagcaagagtgtgcaagggggaccagggcggcctgaggaccttgcagaagaaatggacctccttcctgaaagcccgactcatctgctcccggccagacagcggcttggtcttcaatgtgctgcgggatgtcttcgtgctcaggtccccgggcctgaaggtgcctgtgttctatgcactcttcaccccacagctgaacaacgtggggctgtcggcagtgtgcgcctacaacctgtccacagccgaggaggtcttctcccacgggaagtacatgcagagcaccacagtggagcagtcccacaccaagtgggtgcgctataatggcccggtacccaagccgcggcctggagcgtgcatcgacagcgaggcacgggccgccaactacaccagctccttgaatttgccagacaagacgctgcagttcgttaaagaccaccctttgatggatgactcggtaaccccaatagacaacaggcccaggttaatcaagaaagatgtgaactacacccagatcgtggtggaccggacccaggccctggatgggactgtctatgatgtcatgtttgtcagcacagaccggggagctctgcacaaagccatcagcctcgagcacgctgttcacatcatcgaggagacccagctcttccaggactttgagccagtccagaccctgctgctgtcttcaaagaagggcaacaggtttgtctatgctggctctaactcgggcgtggtccaggccccgctggccttctgtgggaagcacggcacctgcgaggactgtgtgctggcgcgggacccctactgcgcctggagcccgcccacagcgacctgcgtggctctgcaccagaccgagagccccagcaggggtttgattcaggagatgagcggcgatgcttctgtgtgcccggcctcgtctcctaagcccctccctcctcctggctcctcttccctgtcctgtctgggccatgtgggggacaggaggctttcctctccctggaccccctggccagcctcgggtgcggggcccgacagcagctcgagggtctccttgctgccgcccttcctgagtgaccaggcacagcacgtgcacgccctggggaacttctacctcttctgccaggccacaggtcctgcagacattcgctttgtctgggagaagaatgggcgagctctggagacctgtgtccctgtgcagacccatgcactgcccgatggcagggcccatgcactcagctggctgcaggacgccatcagggaaagcgctgagtatcgctgctctgtcctctcctcagcagggaacaagacttcgaaggtgcaggttgctgtgatgagacctgaagtgacccaccaggagaggtggaccagagagctctctgcctggagggctgtggctggggagcacgaccggatgatgcagagctggaggaaggcgtgggaaagctgtagcaaggacaccctgtagccaccaggaaggagtccctgacaccgacctcaaccccaacaagaccctgctgccactgaccacagccacccccggagaaggcctggtcccccacaactgtgaactgtcttgcccaagcctgctctgaacacagccattgggccaccacctgatgggcagaggcgggacagtggagaagcctggaacccaagtgggcctgtgacaggaactaagacttaaaaaattaggtgcttacctgggacagtaagttctgtctggcacaagcaggtaaccaggatggctaacaggctttgatagctgctcgtgaactaaaacagcagggtgtgtgcaggttcctcctctacggtcaggcagcaggctctgaaggctgatcctacaccgtcccagtgactccccttgacagagtgcccccaccccctaatagccaacagggttagcatggccagcacagatcgctgcttttattgatgcaaatcaagcctgctgcttctcctccctgcagacttagccaaggaactccaagatgcatgactgggacaagaaaaggtgagactccacatggaaatgccttgccctaaaccttgaatgactgtgagatgcgatctgggagtgcatctgtcaagtctttgtgttttcttcactaacctcagaatactgggctctattttatcaagcgctgcagtttatgcctctgtcccgtcaatgctcagcttctgcaacaggacaccaaacttgatgcagaaagccaaataggtcaattatgcaaatctcctggtgccatattaaatttcttgacgatggaatgagtctcatgagtgttttgttctacctgctttcaagtctctaattattaaagctgtatctctgaagactgtgtcactgtgtgtgtgaacttgtcctaaagctactcagcctttaatcttacacacacgtctcttcttgtctgttgaatgacagttttcatgtctatcataaaaccaaagcctctgttaaaagtcaagccgcacccctctggtgatcctagcaaatactgagtgtcttcccagcagtgtgacaatgacctgttttgcatcccctctttctggagctggacaaattctctaccagcctttgtgtgggatcagcatacatcgcctgctaattccttcaggatccatcacaacaggtgtcctgaagatgctggagacaccctggttgtctccacacgttccccctccgcaccccaagtcgagaggcccagctgcctgtgaggtgtgtgcttgcccatccagccaaggatgccagtcttgctcacggaaccatcacatactcataacctgaagttttcctgtaaaatatccatcagctcactgtggttcttgctttgggtgtggcttcaaccactacaaactgatgagtgaaatgctatgggctttaggcttatattcttggtgctgttttctgtctcttctcctgaagtctggatttcaagcactttcacacttaacaaaataattacatacttgaagttttcgtaatgtggagtgttctactgggaaatggagttatgaggatgaatttctgagtctttctttgctctgctggaaaaaataaaaatagagttgtacattg

SEQ ID NO: 309668 - DNA, 180 bp, Artificial Sequence
  derived and/or modified sequence
atgagaatgtgcacccccatcagaggcctgctgatggccctggccgtgatgttcggcaccgccatggccttcgcccccatccccagaatcacctgggagcacagagaggtgcacctggtgcagttccacgagcccgacatctacaactacagcgccctgctgctgagcgaggacaagtag

SEQ ID NO: 309669 - DNA, 441 bp, Artificial Sequence
  derived and/or modified sequence
atgagaatgtgcacccccatcagaggcctgctgatggccctggccgtgatgttcggcaccgccatggccttcgcccccatccccagaatcacctgggagcacagagaggtgcacctggtgcagttccacgagcccgacatctacaactacagcgccctgctgctgagcgaggacaaggacaccctgtacatcggcgccagagaggccgtgttcgccgtgaacgccctgaacatcagcgagaagcagcacgaggtgtactggaaggtgagcgaggacaagaaggccaagtgcgccgagaagggcaagagcaagcagaccgagtgcctgaactacatcagagtgctgcagcccctgagcgccaccagcctgtacgtgtgcggcaccaacgccttccagcccgcctgcgaccacctgaacctgaccagcttcaagttcctgtag

SEQ ID NO: 309670 - DNA, 231 bp, Artificial Sequence
  derived and/or modified sequence
atgagaatgtgcacccccatcagaggcctgctgatggccctggccgtgatgttcggcaccgccatggccttcgcccccatccccagaatcacctgggagcacagagaggtgcacctggtgcagttccacgagcccgacatctacaactacagcgccctgctgctgagcgaggacaaggacaccctgtacatcggcgccagagaggccgtgttcgccgtgaacgccctgtag

SEQ ID NO: 309671 - DNA, 201 bp, Artificial Sequence
  derived and/or modified sequence
atgagaatgtgcacccccatcagaggcctgctgatggccctggccgtgatgttcggcaccgccatggccttcgcccccatccccagaatcacctgggagcacagagaggtgcacctggtgcagttccacgagcccgacatctacaactacagcgccctgctgctgagcgaggacaaggacaccctgtacatcggcgcctag

SEQ ID NO: 309672 - DNA, 180 bp, Artificial Sequence
  derived and/or modified sequence
atgcgcatgtgtactcccatccgaggcctgctcatggcactcgccgtgatgtttggcacggccatggccttcgcacccattccccggattacttgggagcaccgcgaggtgcacctggtgcagtttcacgaacccgatatctacaactactcagctcttctattgtctgaggacaagtag

SEQ ID NO: 309673 - DNA, 441 bp, Artificial Sequence
  derived and/or modified sequence
atgagaatgtgcactcccatcagaggcctccttatggccctagcagtcatgttcgggacagccatggcttttgctccgattcccagaatcacctgggagcaccgcgaagtccacctagtgcaattccacgaacccgacatctataattacagcgcactgctgttatccgaggataaggacacactgtatatcggcgctcgcgaagctgtatttgctgtgaacgccttgaatatcagtgagaagcagcatgaggtgtactggaaggtgagcgaggataaaaaggcaaagtgcgcggagaaagggaaatctaaacaaactgagtgtcttaactacattagggtactgcagcccctcagcgccacgtccttgtatgtatgtggtacaaacgcattccaacccgcgtgtgaccatctgaatttgacttccttcaagttcctttag

SEQ ID NO: 309674 - DNA, 231 bp, Artificial Sequence
  derived and/or modified sequence
atgcggatgtgtacaccaatccgtggcctgctgatggccctcgctgtaatgtttgggactgctatggcatttgctcccattccacgtattacgtgggagcatcgggaggttcatctcgtgcagtttcacgagcccgacatctataattacagcgcccttctcctctccgaagacaaggataccctgtacataggtgcccgtgaggccgtcttcgccgtcaacgctctttag

SEQ ID NO: 309675 - DNA, 201 bp, Artificial Sequence
  derived and/or modified sequence
atgagaatgtgcactcctatccgagggctactgatggctttagccgtgatgttcggcactgccatggccttcgcccctatcccaagaattacctgggagcatagagaggtccatctagttcagttccacgagcccgacatctacaattattctgcgctgctgctgtcagaggacaaggacacactctatatcggagcatag

SEQ ID NO: 309676 - DNA, 180 bp, Artificial Sequence
  derived and/or modified sequence
atgaggatgtgcacccccatccggggcctgctgatggccctggccgtgatgtttggaacagccatggcctttgcccccatcccccgcatcacctgggagcaccgggaggtgcacctggtgcagttccacgagccagacatctacaactacagcgccctgctgctgtctgaggacaagtag

SEQ ID NO: 309677 - DNA, 441 bp, Artificial Sequence
  derived and/or modified sequence
atgaggatgtgcacccccatccggggcctgctgatggccctggccgtgatgtttggaacagccatggcctttgcccccatcccccgcatcacctgggagcaccgggaggtgcacctggtgcagttccacgagccagacatctacaactacagcgccctgctgctgtctgaggacaaggacaccctgtacatcggggcccgggaggccgtgtttgctgtgaatgccctgaacatcagcgagaagcagcacgaggtgtactggaaggtgtctgaggacaagaaggccaagtgtgccgagaagggcaagagcaagcagacagaatgtctgaactacatccgggtgctgcagcccctgagcgccaccagcctgtatgtgtgtggcaccaatgccttccagcctgcctgtgaccacctgaacctgaccagcttcaagttcctgtag

SEQ ID NO: 309678 - DNA, 231 bp, Artificial Sequence
  derived and/or modified sequence
atgaggatgtgcacccccatccggggcctgctgatggccctggccgtgatgtttggaacagccatggcctttgcccccatcccccgcatcacctgggagcaccgggaggtgcacctggtgcagttccacgagccagacatctacaactacagcgccctgctgctgtctgaggacaaggacaccctgtacatcggggcccgggaggccgtgtttgctgtgaatgccctgtag

SEQ ID NO: 309679 - DNA, 201 bp, Artificial Sequence
  derived and/or modified sequence
atgaggatgtgcacccccatccggggcctgctgatggccctggccgtgatgtttggaacagccatggcctttgcccccatcccccgcatcacctgggagcaccgggaggtgcacctggtgcagttccacgagccagacatctacaactacagcgccctgctgctgtctgaggacaaggacaccctgtacatcggggcctag

SEQ ID NO: 309680 - DNA, 180 bp, Artificial Sequence
  derived and/or modified sequence
atgcggatgtgcacccccatccggggcctgctgatggccctggccgttatgtttggcacggctatggccttcgcacctatcccaagaattacctgggaacaccgggaggttcacctcgtgcagttccatgagccagacatttataattattccgccctcctgctgagtgaggataaatag

SEQ ID NO: 309681 - DNA, 441 bp, Artificial Sequence
  derived and/or modified sequence
atgcggatgtgcacccccatccggggcctgctgatggccctggccgttatgtttggtaccgccatggcgttcgcgccaattccgcgtataacttgggaacacagagaggtgcacttggtccagttccatgaaccagacatttataattacagcgcgctgctgctctctgaagataaagacacattatacattggcgctagagaggccgtcttcgctgttaacgcactgaacatctccgaaaaacagcatgaagtttattggaaggtgagtgaagataagaaggccaagtgcgctgaaaaggggaagagcaagcaaaccgagtgtttaaattatatccgcgtcctgcaacctctgtcggctacgagcctgtacgtgtgtggcaccaacgcctttcagccagcctgcgaccacctaaatctcaccagtttcaagtttctgtag

SEQ ID NO: 309682 - DNA, 231 bp, Artificial Sequence
  derived and/or modified sequence
atgcggatgtgcacccccatccggggcctgctgatggccctggccgtcatgtttgggactgcaatggcatttgctcccataccaagaatcacctgggaacatcgggaagttcacttagtgcagtttcacgagccagatatttacaactactccgctcttctgctgtccgaggataaggatacgctgtacataggcgcgagagaggccgtgtttgccgtgaatgccttgtag

SEQ ID NO: 309683 - DNA, 201 bp, Artificial Sequence
  derived and/or modified sequence
atgcggatgtgcacccccatccggggcctgctgatggccctggccgttatgtttgggaccgccatggcgttcgccccaatccctagaatcacctgggagcaccgagaagtgcatttggtgcagtttcatgagcccgatatttataactacagcgccctgctcctgagcgaggataaagacaccctgtacatcggagcttag

SEQ ID NO: 309684 - DNA, 180 bp, Artificial Sequence
  derived and/or modified sequence
atgcggatgtgtactcctattagaggtctgctcatggccctggccgtgatgttcggcacagcaatggcctttgccccaatcccaaggattacatgggaacaccgcgaggtacatctggttcagttccatgaacctgatatctacaactatagcgccctgctgttgtctgaggacaaatag

SEQ ID NO: 309685 - DNA, 441 bp, Artificial Sequence
  derived and/or modified sequence
atgcggatgtgcactcccatccgtggcctgttaatggcgctggcagtcatgtttggaacagctatggcctttgcccctattcccagaattacatgggagcatcgcgaagttcatctggtccagttccatgaaccagacatttacaactactcagccttgctactgtctgaagacaaagatactctttacattggtgccagggaagcagtgttcgcagtgaacgccctgaatatctcggagaagcaacacgaggtctactggaaagtatcagaagacaaaaaagcaaaatgcgctgagaagggaaagtccaagcagaccgagtgcttaaactatatccgcgtgctgcagccccttagtgccacctccctctatgtgtgcggtacaaacgcttttcagccggcttgcgaccacctgaacttgactagtttcaaattcctatag

SEQ ID NO: 309686 - DNA, 231 bp, Artificial Sequence
  derived and/or modified sequence
atgagaatgtgcacacccattcggggactacttatggcactggcagtgatgttcggcaccgcaatggcgtttgcccctatccccaggatcacctgggagcatcgtgaggtgcatcttgtccagttccacgagccagacatctataactacagcgctttgctcctgtctgaagataaggatactctctacattggggctagagaggccgtgttcgcggtgaacgccctgtag

SEQ ID NO: 309687 - DNA, 201 bp, Artificial Sequence
  derived and/or modified sequence
atgcgaatgtgcaccccaattcgtggtctcttgatggctctggctgtgatgttcgggaccgccatggcttttgcccctattccgagaatcacctgggaacacagggaggttcatctggtacagttccatgagcctgatatctacaattattccgcgctgcttctgagtgaggacaaagacactttatacatcggcgcatag

SEQ ID NO: 309688 - DNA, 563 bp, Artificial Sequence
  derived and/or modified sequence
agtcaggacagacgtcccaggcgagcagaggccctgcgtgaggatggggcggcggggccagatggtgtcctgagtatccatcctccctggtggctgaggacacgctgaccagcgtggggtcaggagcatggcccctggaaagcatttcttctgaggccctgaagaagtatcaagtgggctttgacattgcggtggtgagagcgacccctcctcacctggagaactgggaaatgtggattctcagggaccgcgctgttcacgagctccaggctgtgctgctggccctggtcctggggcgctgagccgcatctgcaatagcacacctgcccggccacctgctgccgtgagcctttgctgctgaagcccctggggtcgcctctacctgatgaggatgtgcacccccattagggggctgctcatggcccttgcagtgatgtttgggacagcgatggcatttgcacccataccccggatcacctgggagcacagagaggtgcacctggtgcagtttcatgagccagacatctacaactactcagccttgctgctgagcgaggacaagg

SEQ ID NO: 309689 - DNA, 907 bp, Artificial Sequence
  derived and/or modified sequence
agagcccttgaaacccctgcagtcaggacagacgtcccaggcgagcagaggccctgcgtgaggatggggcggcggggccagatggtgtcctgagtatccatcctccctggtggctgaggacacgctgaccagcgtggggtcaggagcatggcccctggaaagcaaagatttctgaagacgtctttctagaaatgactggaaagtttcaagaggcataagatacagcatttcttctgaggccctgaagaagtatcaagtgggctttgacattgcggtggtgagagcgacccctcctcacctggagaactgggaaatgtggattctcagggaccgcgctgttcacgagctccaggctgtgctgctggccctggtcctggggcgctgagccgcatctgcaatagcacacctgcccggccacctgctgccgtgagcctttgctgctgaagcccctggggtcgcctctacctgatgaggatgtgcacccccattagggggctgctcatggcccttgcagtgatgtttgggacagcgatggcatttgcacccataccccggatcacctgggagcacagagaggtgcacctggtgcagtttcatgagccagacatctacaactactcagccttgctgctgagcgaggacaaggacaccttgtacataggtgcccgggaggcggtcttcgctgtgaacgcactcaacatctccgagaagcagcatgaggtgtattggaaggtctcagaagacaaaaaagcaaaatgtgcagaaaaggggaaatcaaaacagacagagtgcctcaactacatccgggtgctgcagccactcagcgccacttccctttacgtgtgtgggaccaacgcattccagccggcctgtgaccacctgaacttaacatcctttaagtttctgg

SEQ ID NO: 309690 - DNA, 602 bp, Artificial Sequence
  derived and/or modified sequence
ggtagctggaggagcgggaagcactgactcctgaagaccctggcttcgctttcctgtgtccgttgggctgtccacttctaagactctctttgtcccccgctgccttccgtattcctcagcagatggacccggcatttcttctgaggccctgaagaagtatcaagtgggctttgacattgcggtggtgagagcgacccctcctcacctggagaactgggaaatgtggattctcagggaccgcgctgttcacgagctccaggctgtgctgctggccctggtcctggggcgctgagccgcatctgcaatagcacacctgcccggccacctgctgccgtgagcctttgctgctgaagcccctggggtcgcctctacctgatgaggatgtgcacccccattagggggctgctcatggcccttgcagtgatgtttgggacagcgatggcatttgcacccataccccggatcacctgggagcacagagaggtgcacctggtgcagtttcatgagccagacatctacaactactcagccttgctgctgagcgaggacaaggacaccttgtacataggtgcccgggaggcggtcttcgctgtgaacgcact

SEQ ID NO: 309691 - DNA, 826 bp, Artificial Sequence
  derived and/or modified sequence
ggcaacccgctcgggtccccttccacactgtggaagctttgttctttcgctcttgctactgctagctctttgggtccacgctgcttttatgagctgtaacactcaccgcgaagatctgcagcttcactcctgagcccagcgagaccacgagcccaccgggaggaacgaacaactccagacgcgctgccttaagagctgtaacactcaccgtgaaggtctgcagcttcactcccgagccagcgagaccacgaacccaccagaaggaagaaactctgaacacatctgaacatcagaagggacagactccagacgcgccaccactctgctaacaccagatagtggaaagaaaccatgtgctgaaatgtttgacgacactgatggtttgcatttcttctgaggccctgaagaagtatcaagtgggctttgacattgcggtggtgagagcgacccctcctcacctggagaactgggaaatgtggattctcagggaccgcgctgttcacgagctccaggctgtgctgctggccctggtcctggggcgctgagccgcatctgcaatagcacacctgcccggccacctgctgccgtgagcctttgctgctgaagcccctggggtcgcctctacctgatgaggatgtgcacccccattagggggctgctcatggcccttgcagtgatgtttgggacagcgatggcatttgcacccataccccggatcacctgggagcacagagaggtgcacctggtgcagtttcatgagccagacatctacaactactcagccttgctgctgagcgaggacaaggacaccttgtacataggtgcc

SEQ ID NO: 309692 - DNA, 1722 bp, Artificial Sequence
  derived and/or modified sequence
atgctcctggagagtgttttaatattctttaatcttttggctgtgctgtcatacttgaagtttttcaattgtcagaagcactccccattctcactaagctggtggttttggttaactctcaccggcgtcgcctgcagctgtgcagtggggatcaaatacatgggcgtcttcacctatgtgctggttctaggtgttgccgcagtgcatgcatggcacctgctgggggatcagacactgtctaacgtctgcgtgttctgtcatctcctggcccgggctgttgctctgctggtcattccagtggtcctatatctcctcttcttctatgtgcacctcatcttggtgtttcgcagtggtcctcatgatcagatcatgtcgtcggctttccaggccagtctcgagggggggcttgctagaatcacccagggtcagccactagaagttgcctttgggtcccaagtgaccctcaggaacgtcttcggaaagcctgtcccttgctggttgcatagccaccaggacacttaccctatgatttatgaaaatgggagagggtcatcgcaccaacaacaggtgacctgctatccctttaaagatgtgaacaactggtggatagtcaaggatcctcggagacatcagcttgttgtctcttcacctcctcggcccgtccgtcatggcgacatggtgcagctcgtacatggtatgactacaaggagcctcaatactcacgacgtcgcagccccacttagtccccatagtcaagaggtgtcctgctacattgattataacatttcaatgcctgcccagaacctgtggcgtctcgagattgttaaccggggatcagacactgatgtgtggaaaacaatcctcagtgaggtgcggttcgtgcacgtgaatactagcgctgtcctgaagctgtccggagcgcatttgcctgattgggggtaccggcagctggaaatcgtcggtgaaaaactgagcagagggtatcatggcagtaccgtgtggaatgttgaggaacaccgatacggagccagtcaggagcaacgtgagcgagagagggaattgcacagccccgcacaagtggatgtcagtaggaacttgagtttcatggctaggtttagtgagctgcagtggagaatgctggcactcagaagcgacgactcagagcataagtactctagcagcccccttgaatgggtgaccctagatacaaacatagcctactggttacatccaagaacctccgcacagattcacttgctcggcaatatcgtaatctgggtcagcgggagtctcgccctggcaatttatgcccttctgagcctgtggtacctcctcagacgtcgccgaaacgtgcacgatcttccacaggacgcttggctgcgatgggtgctggccggggccctctgtgctgggggttgggcggtcaactaccttcctttttttctaatggagaaaaccctatttctctatcattatctgcccgcgcttacctttcagatcctgctgttgcctgtggtgctgcagcacataagtgatcacctctgtaggtcccagttgcagcgctctattttttcagcccttgtagtcgcttggtactcatcagcatgccacgtatccaacactcttagaccactgacctacggtgacaagtctctgtccccacatgagttgaaagctctgcgatggaaggatagttgggatattttgatccgcaaacattag

SEQ ID NO: 309693 - DNA, 1722 bp, Artificial Sequence
  derived and/or modified sequence
atgctgctggagagcgtgctgatcttcttcaacctgctggccgtgctgagctacctgaagttcttcaactgccagaagcacagccccttcagcctgtcctggtggttctggctgaccctgactggagtggcctgcagctgtgctgtgggcatcaagtacatgggcgtcttcacctacgtgctggtgctgggcgtggccgctgtgcacgcctggcacctgctgggggaccagaccctgagcaatgtgtgtgtgttctgccacctgctggcccgggctgtggccctgctggtgattcctgtggtgctgtacctgctcttcttctacgtgcacctgatcctggtgttccgcagcggcccccatgaccagatcatgagcagcgccttccaggccagcctggagggcggcctggcccgcatcacccagggccagcccctggaggtggccttcggcagccaggtgaccctgagaaatgtgtttgggaagcctgtgccctgctggctgcacagccaccaggacacctaccccatgatctatgaaaatggccggggcagcagccaccagcagcaggtgacctgctaccccttcaaggatgtgaacaactggtggatcgtgaaggacccccggcggcaccagctggtggtgagcagcccccccaggcctgtgagacatggagacatggtgcagctggtgcacggcatgaccaccaggagcctgaacacccatgatgtggccgcccccctgagcccccacagccaggaggtgtcctgctacatcgactacaacatctccatgcctgcccagaacctgtggaggctggagatcgtgaacagaggaagtgacacagatgtgtggaagaccatcctgtctgaggtgcgctttgtgcacgtgaacaccagcgctgtgctgaagctgagcggggcccacctgcctgactggggctaccggcagctggagatcgtgggggagaagctgagccggggctaccacggcagcacagtgtggaatgtggaggagcacagatatggagccagccaggagcagcgggagcgggagcgggagctgcacagccctgcccaggtggatgtgtccaggaacctgtccttcatggcccgcttcagcgagctgcagtggaggatgctggccctgcggagtgatgattctgagcacaagtacagcagcagccccctggagtgggtgaccctggacaccaacatcgcctactggctgcaccccaggaccagcgcccagatccacctgctgggcaacatcgtcatctgggtgtctggcagcctggccctggccatctatgccctgctgagcctgtggtacctgctgcggaggagaagaaatgtgcatgacctgccccaggatgcctggctgcgctgggtgctggccggggccctgtgtgccggcggctgggccgtgaactacctgcccttcttcctgatggagaagaccctcttcctgtaccactacctgcctgccctgaccttccagatcctgctgctgcctgtggtgctgcagcacatcagtgaccacctgtgccgcagccagctgcagaggagcatcttcagcgccctggtggtggcctggtacagcagcgcctgccacgtgagcaacaccctgcggcccctgacctatggagacaagagcctgagcccccatgagctgaaggccctgcgctggaaggacagctgggacatcctgatcaggaagcactag

SEQ ID NO: 309694 - DNA, 1722 bp, Artificial Sequence
  derived and/or modified sequence
atgctgctggagagcgtgctgatcttcttcaacctgctggccgtgttgtcctacctaaagtttttcaactgtcaaaagcattcacctttctctctctcttggtggttctggcttactttgacaggcgtggcatgtagctgtgctgtgggaataaagtacatgggagtatttacatacgtcttagtgcttggtgttgcagctgttcacgcttggcacctgttgggtgatcaaactctctccaacgtgtgtgtcttttgccacctccttgcacgagcggtggctctgcttgttatcccagtagtcctctatctcctttttttttatgttcacttgatcttggtgttccgaagcggaccccacgaccaaattatgagctctgccttccaagcctcgctcgagggaggcctcgctcgaataacacagggacagccacttgaggtggcctttggaagccaggtaacccttcggaatgttttcgggaaaccggtgccctgctggctgcatagccaccaggatacctaccccatgatctacgagaatgggaggggtagttcccatcaacagcaggtgacatgttacccgttcaaggatgttaataactggtggattgtcaaagaccctaggagacatcaactagtggtgtccagccctcctagacccgtccggcacggggacatggtacagctggtacacgggatgaccaccaggagtctgaatactcatgacgttgccgcccccctgtcgcctcattctcaggaggttagttgttacatcgactacaacatcagcatgcccgcccagaacctgtggaggttggagattgtcaataggggaagcgacaccgacgtgtggaaaactatcttgtctgaagtgagattcgtgcatgttaacacatccgccgtgctaaagctcagcggggcccacctacctgattggggttatcgccagcttgagatcgtcggggaaaagctctcccggggatatcatggcagtactgtctggaatgtggaggaacataggtatggcgcgtctcaggagcaaagggagagggaaagggagcttcacagccctgctcaggttgatgtgtctcgaaatctgtcatttatggcaagattctcagagctgcagtggcgtatgctggcactccggagcgacgatagcgagcataagtacagttcgagtcctttggagtgggtgaccctggacactaatattgcctattggctgcaccccagaaccagcgcccaaattcacctgttgggcaacatcgttatttgggtgtccggctctctcgcactggccatctacgctcttctgtctctatggtatctccttcggaggcgtcggaatgtccatgacctgcctcaggacgcctggttgcggtgggtgctggctggggctctttgtgccggcggatgggccgtgaattatcttcctttctttctgatggagaaaacactgttcttgtatcattacctgccagccctcacttttcaaatcctcctcctccctgtcgtgcttcaacatatctccgaccacctatgcagaagccaattacagcgatccattttctctgccctggtggtggcttggtacagttctgcgtgccacgtttctaacactctgaggccgcttacttatggggataagtccttgtcacctcacgaactgaaggctctgagatggaaggactcctgggacatcctgatcagaaagcattag

SEQ ID NO: 309695 - DNA, 1722 bp, Artificial Sequence
  derived and/or modified sequence
atgttgctggaatctgtattgatattttttaacctgctcgccgtgctgtcctacctcaagttttttaactgtcagaaacactctccttttagtttatcttggtggttttggctcaccctcactggcgtcgcctgcagctgtgccgtcggcatcaagtatatgggagtcttcacctatgtgctagtgctgggagttgcggctgtccatgcttggcacttactcggagatcagacactgtctaatgtttgtgtcttttgccatctcttggctcgggcagtggcattgctggtaattcccgtagtgttgtacctgctgtttttctacgttcatctcatactggtgttcagatcaggccctcacgatcagattatgtcgtctgcctttcaggcttctctcgagggcggactcgcacgaattactcagggacagccgctggaagtggcttttgggagtcaagtcacccttcgaaatgtctttgggaaacccgtgccttgttggttgcactcccaccaggacacttatcctatgatctatgaaaatggccgtgggagttcccatcagcagcaggtcacatgttaccccttcaaagacgtaaataattggtggatcgttaaggatcccaggcgccaccaactagtagtcagtagcccacccagaccggtgaggcatggcgacatggtgcagctggttcatgggatgacaacccggagcctgaatacgcatgatgtcgccgcacctttgagccctcactcccaagaggtctcttgctacatcgattataacatttccatgccagcccagaatctgtggcggcttgagattgtcaacaggggatcagatactgatgtgtggaaaacgattttaagcgaagtgagattcgtgcacgtgaatactagtgcagttctgaaactctcaggcgcacacctgcctgattggggatatagacaattggagatcgtgggagaaaagctctcaagagggtatcacggttcaactgtctggaatgtagaggagcatcgctatggcgcatcccaggagcaacgggagcgcgagagggaactgcactctcccgcacaggtggatgtgtctcggaatctcagctttatggctcggtttagcgagttacaatggcggatgctcgcactcagatcggatgattctgagcacaagtacagttcatctccactggagtgggtaacactggataccaacattgcttattggctgcatccccgaacgtctgcccagatccacttgttgggtaacatcgtgatctgggtgtcaggaagtcttgccctggccatctacgctcttctgagcctttggtacctgctgagaaggaggagaaacgtgcacgacctcccacaggacgcttggctgaggtgggttctggctggggctctttgtgcaggaggatgggccgttaactatctgcccttctttctaatggagaagacattgtttctgtatcactacctgccagctctcacatttcagattcttctgttgcctgtggtcctgcagcatattagtgaccatctgtgccgctcccagttgcagagaagcatcttttcagcgctggtagtagcatggtacagtagtgcgtgccatgtgtctaacaccttaaggcccctgacatacggcgacaaaagcctgagtccgcatgagctgaaagctctgcggtggaaagacagctgggatattcttatcagaaagcattag

SEQ ID NO: 309696 - DNA, 2189 bp, Artificial Sequence
  derived and/or modified sequence
gaacgttgagcagggcggtgggtggtgcggagtgccgagcggcctcacccccaaccgtcggcccagtcggacggttccgaggcgttgccgggagccgggcgcggctctgtgtggactcggagaaacgcgggttatttaggaggattcgatggcaattttttgtggaacagaattggagcagagaatgctctcatcactcagtcaaggctaatgcttttggaatcagtgttaatatttttcaatctattggccgtgttgtcctacctgaagttcttcaactgccaaaagcacagccctttttctctgagctggtggttctggctaacactgacaggggtcgcttgttcctgtgcagtgggcatcaagtacatgggtgtgttcacgtacgtgctcgtgctgggtgttgcagctgtccatgcctggcacctgcttggagaccagactttgtccaatgtctgtgtgttctgtcacttgctcgcccgagcagtggctttgctggtcatcccggtcgtcctgtacttactgttcttctacgtccacttgattctagtcttccgctctgggccccacgaccaaatcatgtccagtgccttccaggccagcttagagggaggactagctcggatcactcagggtcagccactggaggtggcctttgggtcccaggtcactctgaggaacgtctttgggaaacctgtgccctgctggcttcattcccaccaggacacctaccccatgatatatgagaacggccgaggcagctcccaccagcaacaggtgacctgttaccccttcaaagatgtcaataactggtggattgtaaaggatcccaggaggcaccagctggtggtgagcagccctccgagacctgtgaggcacggggacatggtgcagctggtccacggcatgaccacccgctccctgaacacgcatgatgttgcagcccccctgagcccccattcacaggaggtctcctgctacattgactataacatctccatgcccgcccagaacctctggagactggaaattgtgaacagaggatctgacacagacgtctggaagaccatcctctcagaggtccgctttgtgcacgtgaacacttccgctgtcttaaagctgagcggggctcacctccctgactgggggtatcggcaactggagatcgtcggggagaagctgtcccggggctaccacgggagcacggtgtggaacgtggaggagcaccgatacggcgcgagccaggagcagagggagcgggaacgggagctgcactcacctgcgcaggtggacgtcagcaggaacctcagcttcatggcgagattctcggagctgcagtggaggatgctggcgctgagaagtgatgactcggaacacaagtacagctccagcccactggagtgggtcaccctggacaccaatattgcctactggctgcaccccaggaccagcgctcagatccacctacttggaaacatagtgatctgggtttcgggcagcctcgctctggccatctacgccctgctgtccttgtggtacctgctccgacggcgaagaaatgtccatgacctccctcaggatgcctggctgcgctgggtgctggctggggcgctgtgtgccggtggctgggcagtgaactacctcccgttcttcctgatggagaagacactcttcctctaccactacctgcccgcactcaccttccaaatccttctgctccctgtggtcctgcagcacatcagcgaccacctgtgcaggtcccagctccagaggagcatcttcagcgccctggtggtggcctggtactcctccgcgtgccacgtgtccaacacgctgcgcccactcacctacggggacaagtcactctcgccacatgaactcaaggcccttcgctggaaagacagctgggacatcttgatccgaaaacactagaacaagagtgtggcaaagaacacccgtgctggggtcgggatgaggttgaagggtcttggtcaatgtacgtaatgagcagggtgggccccacgctgggaggacacgggctgggctgagcagggcctctagtggaacacatgggggtctcattgaaaagctctctgatgagcacctccttttgtgcaaagttaattttttctcgacaataaagatattccgtgtctttacccctgaactaagacacagggagtatttca

SEQ ID NO: 309697 - DNA, 1722 bp, Artificial Sequence
  derived and/or modified sequence
atgctgctggagagcgtgctgatcttcttcaacctgctggccgtgctgagctacctgaagttcttcaactgccagaagcacagccccttcagcctgagctggtggttctggctgaccctgaccggcgtggcctgcagctgcgccgtgggcatcaagtacatgggcgtgttcacctacgtgctggtgctgggcgtggccgccgtgcacgcctggcacctgctgggcgaccagaccctgagcaacgtgtgcgtgttctgccacctgctggccagagccgtggccctgctggtgatccccgtggtgctgtacctgctgttcttctacgtgcacctgatcctggtgttcagaagcggcccccacgaccagatcatgagcagcgccttccaggccagcctggagggcggcctggccagaatcacccagggccagcccctggaggtggccttcggcagccaggtgaccctgagaaacgtgttcggcaagcccgtgccctgctggctgcacagccaccaggacacctaccccatgatctacgagaacggcagaggcagcagccaccagcagcaggtgacctgctaccccttcaaggacgtgaacaactggtggatcgtgaaggaccccagaagacaccagctggtggtgagcagcccccccagacccgtgagacacggcgacatggtgcagctggtgcacggcatgaccaccagaagcctgaacacccacgacgtggccgcccccctgagcccccacagccaggaggtgagctgctacatcgactacaacatcagcatgcccgcccagaacctgtggagactggagatcgtgaacagaggcagcgacaccgacgtgtggaagaccatcctgagcgaggtgagattcgtgcacgtgaacaccagcgccgtgctgaagctgagcggcgcccacctgcccgactggggctacagacagctggagatcgtgggcgagaagctgagcagaggctaccacggcagcaccgtgtggaacgtggaggagcacagatacggcgccagccaggagcagagagagagagagagagagctgcacagccccgcccaggtggacgtgagcagaaacctgagcttcatggccagattcagcgagctgcagtggagaatgctggccctgagaagcgacgacagcgagcacaagtacagcagcagccccctggagtgggtgaccctggacaccaacatcgcctactggctgcaccccagaaccagcgcccagatccacctgctgggcaacatcgtgatctgggtgagcggcagcctggccctggccatctacgccctgctgagcctgtggtacctgctgagaagaagaagaaacgtgcacgacctgccccaggacgcctggctgagatgggtgctggccggcgccctgtgcgccggcggctgggccgtgaactacctgcccttcttcctgatggagaagaccctgttcctgtaccactacctgcccgccctgaccttccagatcctgctgctgcccgtggtgctgcagcacatcagcgaccacctgtgcagaagccagctgcagagaagcatcttcagcgccctggtggtggcctggtacagcagcgcctgccacgtgagcaacaccctgagacccctgacctacggcgacaagagcctgagcccccacgagctgaaggccctgagatggaaggacagctgggacatcctgatcagaaagcactag

SEQ ID NO: 309698 - protein, 156 aa, Artificial Sequence
  derived and/or modified sequence
MAYQIVLELHFSHCAAMGAALLMLIENALITQSRLMLLESVLIFFNLLAVLSYLKFFNCQKHSLPLWAPRPNHVQCLPGQLRGRTSSDHSGSATGGGLWVPGHSEERLWETCALLASFPPGHLPHDVRYENGRGSSHQQQVTCYPFKDVNNWWIVK

SEQ ID NO: 309699 - DNA, 2652 bp, Artificial Sequence
  derived and/or modified sequence
gtctggccccgcaggctcggtgaatcgaacgttgagcagggcggtgggtggtgcggagtgccgagcggcctcacccccaaccgtcggcccagtcggacggttccgaggcgttgccgggagccgggcgcggctctgtgtggactcggagaaacgcggttttgacgaagtatattatgggcagtacatctctttttacatgaaacaaatcttcttcttggatgacagtgggccgccatttggccacatggtgctggccttgggaggttatttaggaggattcgatggcaattttttgtggaacagaattggagcagaatacagtagcaacgtgcctgtgtggtccctgcgcctgctgccagcactcgcgggggccttgtcggtccccatggcctaccagatagtgttggagctccacttttctcattgtgccgccatgggagctgctctgttgatgcttatcgagaatgctctcatcactcagtcaaggctaatgcttttggaatcagtgttaatatttttcaatctattggccgtgttgtcctacctgaagttcttcaactgccaaaagcacagtcttccgctctgggccccacgaccaaatcatgtccagtgccttccaggccagcttagagggaggactagctcggatcactcagggtcagccactggaggtggcctttgggtcccaggtcactctgaggaacgtctttgggaaacctgtgccctgctggcttcattcccaccaggacacctaccccatgatgtaagatatgagaacggccgaggcagctcccaccagcaacaggtgacctgttaccccttcaaagatgtcaataactggtggattgtaaaggatcccaggaggcaccagctggtggtgagcagccctccgagacctgtgaggcacggggacatggtgcagctggtccacggcatgaccacccgctccctgaacacgcatgatgttgcagcccccctgagcccccattcacaggaggtctcctgctacattgactataacatctccatgcccgcccagaacctctggagactggaaattgtgaacagaggatctgacacagacgtctggaagaccatcctctcagaggtccgctttgtgcacgtgaacacttccgctgtcttaaagctgagcggggctcacctccctgactgggggtatcggcaactggagatcgtcggggagaagctgtcccggggctaccacgggagcacggtgtggaacgtggaggagcaccgatacggcgcgagccaggagcagagggagcgggaacgggagctgcactcacctgcgcaggtggacgtcagcaggaacctcagcttcatggcgagattctcggagctgcagtggaggatgctggcgctgagaagtgatgactcggaacacaagtacagctccagcccactggagtgggtcaccctggacaccaatattgcctactggctgcaccccaggaccagcgctcagatccacctacttggaaacatagtgatctgggtttcgggcagcctcgctctggccatctacgccctgctgtccttgtggtacctgctccgacggcgaagaaatgtccatgacctccctcaggatgcctggctgcgctgggtgctggctggggcgctgtgtgccggtggctgggcagtgaactacctcccgttcttcctgatggagaagacactcttcctctaccactacctgcccgcactcaccttccaaatccttctgctccctgtggtcctgcagcacatcagcgaccacctgtgcaggtcccagctccagaggagcatcttcagcgccctggtggtggcctggtactcctccgcgtgccacgtgtccaacacgctgcgcccactcacctacggggacaagtcactctcgccacatgaactcaaggcccttcgctggaaagacagctgggacatcttgatccgaaaacactagaacaagagtgtggcaaagaacacccgtgctggggtcgggatgaggttgaagggtcttggtcaatgtacgtaatgagcagggtgggccccacgctgggaggacacgggctgggctgagcagggcctctagtggaacacatgggggtctcattgaaaagctctctgatgagcacctccttttgtgcaaagttaattttttctcgacaataaagatattccgtgtctttacccctgaactaagacacagggagtatttcagaggccagcgtaggagtcattgacaacaaaaagccgagaacccagggccagcagtggagcctcagcagaccagggcctggtccttgctaactgctgcagggtggagtttgatctggcagacccgatcctccttcatgaacacccagcaacctgagcaagtcccggccctgccctcagcgagcccggcaggcgtcctgggacagctcagtgttggagggccacctgaaccacgagccagggctggggcttgcatgtcattgtctatgacagcgtcaagactggcccttggcaccgtgctgtgtggaaaccctcccctctgagactccactgagacgtggctgagtgaaatcttcctcgtcagtggtcaaggtgtgtcatccatacagctccatgcctttgtcttttttaaatgtaattaaaaaaggaaccaactgg

SEQ ID NO: 309700 - DNA, 429 bp, Artificial Sequence
  derived and/or modified sequence
atgtggggtttcctcaagagaccagtggtggtgacggctgacatcaatctgagcttggtagctctcaccgggatgggactgctgtcccgcctctggaggctaacatatccacgcgcagtcgtgtttgatgaagtttattatggacagtacatcagcttttatatgaagcaaatcttctttctcgacgactcaggaccccccttcggtcacatggtgcttgctctaggagggtatctgggcggatttgacgggaacttcctttggaatcgtattggagccgagtacagcagcaatgttcctgtctggtcactgaggctacttcccgccttggccggagctctgagtgtgccaatggcctaccagatcgtactcgagctgcacttcagccactgtgcggccatgggagctgcgctgcttatgttaatctag

SEQ ID NO: 309701 - DNA, 894 bp, Artificial Sequence
  derived and/or modified sequence
atggcatatcagatcgtgctggagctgcacttttcccactgcgccgctatgggcgccgccctcttaatgctcattgaaaacgccctcatcacacagtctaggctgatgttgctggaatctgtgttgatcttctttaacttgttggccgtgctgtcgtacctgaaattctttaactgtcagaaacactccccgtttagtcttagctggtggttctggctcaccttgacgggggtcgcttgctcgtgcgctgttggtatcaagtacatgggagtattcacttatgttctggtactgggagtggccgcagtacatgcgtggcatctactgggtgatcagaccctgagcaacgtgggagcagacgtccagtgctgtatgcggcccgcctgcatgggtcaaatgcaaatgagtcagggcgtatgtgtgttttgccacctgttggcccgcgccgtggcactcctggtaatacccgttgtcctctacctgctcttcttttacgtccatttaatattggtcttccgttccggacctcacgaccagatcatgtcttccgcgtttcaggccagccttgagggcgggttggcccgcatcacgcagggtcaacccctagaggtggcttttggtagtcaggtcacactgaggaacgtgtttggcaaacctgtcccctgctggcttcactcacaccaggacacctacccgatgatttatgagaatggccgggggtcttcccatcagcagcaggttacatgttatccttttaaggacgtcaacaactggtggattgtcaaggatccacggcgccatcagttggtcgtctctagcccaccacgccctgtccgccatggcgatatggtacagctcgtacacggcatgaccacaaggtcgcttaacacatag

SEQ ID NO: 309702 - DNA, 657 bp, Artificial Sequence
  derived and/or modified sequence
atgaagcaaatattctttctggatgactcgggccccccttttggacatatggtgctggccttggggggatacctgggaggtttcgatggcaactttttatggaaccgcattggagcagagtactcatcaaatgtgcctgtatggagtctccgattgcttcccgctctagcgggagcactctctgttcccatggcttatcagattgtgctggagttacacttcagtcactgcgccgcaatgggagcagccctgctgatgctgattgagaatgccctgatcactcagagtcgccttatgctcctcgaatctgtgcttatctttttcaatctgctggcagtgcttagttaccttaagttcttcaactgccagaagcattctcctttttcgctctcttggtggttttggctgacgctgacaggggtagcctgttcgtgtgccgtgggtattaagtatatgggcgtgttcacatacgtgctggtactaggagtggcagctgttcatgcgtggcatctgttaggtgatcagaccctgagtaatgtgggcgcagatgtacagtgctgcatgagacctgcgtgtatgggacaaatgcagatgtctcagggtgtatgtgtgttctgtcacctgcttgctcgggccgttgccctcctagtgatatag

SEQ ID NO: 309703 - DNA, 429 bp, Artificial Sequence
  derived and/or modified sequence
atgtggggcttcctgaagaggcctgtggtggtgacagctgacatcaacctgagcctggtggccctgaccggcatgggcctgctgagccggctgtggaggctgacctaccccagggctgtggtgtttgatgaggtgtactacggccagtacatctccttctacatgaagcagatcttcttcctggatgacagcggcccccccttcggccacatggtgctggccctgggcggctacctgggcggctttgatggcaacttcctgtggaacagaattggagctgagtacagcagcaatgtgcctgtgtggagcctgcggctgctgcctgccctggccggggccctgtctgtgcccatggcctaccagatcgtgctggagctgcacttcagccactgtgccgccatgggcgccgccctgctgatgctgatctag

SEQ ID NO: 309704 - DNA, 894 bp, Artificial Sequence
  derived and/or modified sequence
atggcctaccagatcgtgctggagctgcacttcagccactgtgccgccatgggcgccgccctgctgatgctgattgaaaatgccctgatcacccagagccggctgatgctgctggagagcgtgctgatcttcttcaacctgctggccgtgctgagctacctgaagttcttcaactgccagaagcacagccccttcagcctgtcctggtggttctggctgaccctgactggagtggcctgcagctgtgctgtgggcatcaagtacatgggcgtcttcacctacgtgctggtgctgggcgtggccgctgtgcacgcctggcacctgctgggggaccagaccctgagcaatgtgggcgcagatgtgcagtgctgcatgaggcctgcctgcatgggccagatgcagatgagccagggcgtgtgtgtgttctgccacctgctggcccgggctgtggccctgctggtgattcctgtggtgctgtacctgctcttcttctacgtgcacctgatcctggtgttccgcagcggcccccatgaccagatcatgagcagcgccttccaggccagcctggagggcggcctggcccgcatcacccagggccagcccctggaggtggccttcggcagccaggtgaccctgagaaatgtgtttgggaagcctgtgccctgctggctgcacagccaccaggacacctaccccatgatctatgaaaatggccggggcagcagccaccagcagcaggtgacctgctaccccttcaaggatgtgaacaactggtggatcgtgaaggaccccaggaggcaccagctggtggtgagcagcccccccaggcctgtgcgccacggggacatggtgcagctggtgcacggcatgaccaccaggagcctgaacacctag

SEQ ID NO: 309705 - DNA, 657 bp, Artificial Sequence
  derived and/or modified sequence
atgaagcagatcttcttcctggatgacagcggcccccccttcggccacatggtgctggccctgggcggctacctgggcggctttgatggcaacttcctgtggaacagaattggagctgagtacagcagcaatgtgcctgtgtggagcctgcggctgctgcctgccctggccggggccctgtctgtgcccatggcctaccagatcgtgctggagctgcacttcagccactgtgccgccatgggcgccgccctgctgatgctgattgaaaatgccctgatcacccagagccggctgatgctgctggagagcgtgctgatcttcttcaacctgctggccgtgctgagctacctgaagttcttcaactgccagaagcacagccccttcagcctgtcctggtggttctggctgaccctgactggagtggcctgcagctgtgctgtgggcatcaagtacatgggcgtcttcacctacgtgctggtgctgggcgtggccgctgtgcacgcctggcacctgctgggggaccagaccctgagcaatgtgggcgcagatgtgcagtgctgcatgaggcctgcctgcatgggccagatgcagatgagccagggcgtgtgtgtgttctgccacctgctggcccgggctgtggccctgctggtgatctag

SEQ ID NO: 309706 - DNA, 429 bp, Artificial Sequence
  derived and/or modified sequence
atgtggggcttcctgaagcggcccgtggtggtgaccgccgacatcaacctctccctcgtggcactgactggcatgggcctgctgagccggctgtggcgattgacatatccgcgcgcggtcgtgttcgatgaggtctattatggacagtatatctccttctatatgaaacagatcttcttccttgatgactccggcccgcccttcggacatatggtccttgctctgggcgggtacctggggggttttgatggtaacttcctgtggaatcgcatcggagctgagtattcgtctaatgtgcctgtgtggagcctccgactccttcccgccctcgccggggcactcagcgtacccatggcctaccaaatcgtgctggaactccatttctcacattgtgctgctatgggcgccgccctcctgatgctgatctag

SEQ ID NO: 309707 - DNA, 894 bp, Artificial Sequence
  derived and/or modified sequence
atggcctaccagatcgtgctggagctgcacttcagccactgcgccgctatgggggccgccctactgatgctaattgaaaacgctttaatcactcagagtcggctgatgttgctcgagtcggtgttgattttttttaaccttctagctgtgctcagctacctgaaattctttaattgccagaaacatagtccctttagcctctcctggtggttttggctgactctgacaggagtggcatgttcatgcgctgtgggcatcaaatacatgggggtattcacctacgtcttagttctcggggtcgccgctgtgcacgcctggcacctactcggggatcagactctgtcaaacgtcggagcagacgtgcaatgttgcatgcggccagcctgcatgggacagatgcagatgagccaaggagtgtgtgtcttttgccatcttctggcacgagcagttgccctactggtgattccagtggttttgtacctgctgtttttctacgtgcatttaatcctggtgttccgcagtggccctcacgaccagatcatgtcttcagcctttcaggccagccttgagggcggtctggcccgcattacccagggccaacctctcgaggtggcctttggctctcaagttaccttacgaaatgtgtttggaaaacccgttccctgttggctgcatagtcatcaggatacgtaccctatgatttacgagaatgggcgcggtagttcccatcaacagcaggtaacgtgttatcccttcaaggatgtcaataattggtggatagtcaaggacccacggagacaccagctggttgtttcttctccccctagacctgtcaggcacggcgacatggtacagctcgtacatgggatgaccaccagaagcctgaacacatag

SEQ ID NO: 309708 - DNA, 657 bp, Artificial Sequence
  derived and/or modified sequence
atgaagcagatcttcttcctggacgacagcggcccccccttcggccatatggtgctagcactgggtgggtatctgggagggttcgatggaaacttcctgtggaatagaattggggctgagtactcttccaacgtgcccgtttggagcctgcgtcttctccctgccctggcaggcgccctctctgtccccatggcatatcagatcgtgctggagttgcacttctcccactgtgctgccatgggcgccgcactgttgatgctcatagagaacgcgctcattacgcagtcacggctgatgctgctggagtcggtcctcatcttttttaacctcctggcggtgctgagctatcttaagttcttcaactgtcagaagcactccccgttttcgttgtcttggtggttttggctgactctgaccggcgtcgcctgttcctgcgcagtcggcatcaaatacatgggcgtgttcacctacgtgctggtactgggagtggcagctgttcatgcctggcaccttttgggagatcaaacactgtccaacgtgggagctgacgtgcagtgttgcatgagaccagcctgcatgggccagatgcagatgtcccaaggcgtgtgcgtgttttgccacctgctggctcgggcagtagcgcttctggttatttag

SEQ ID NO: 309709 - DNA, 429 bp, Artificial Sequence
  derived and/or modified sequence
atgtggggattcttgaaacgcccagttgtcgtcactgctgatattaacctctctcttgtggcactcactggtatgggcctcttatcacgcctgtggcggcttacttacccacgtgccgtggtgtttgacgaagtttactacggccagtacatcagtttctacatgaaacagattttcttcctggacgactccggacccccatttggacatatggtactcgctttggggggatatctgggtgggttcgatggcaatttcctgtggaataggatcggtgccgagtattcctctaacgtgcccgtctggagtctaaggctcctgccagccctggccggagccctgagcgtgccgatggcatatcagatcgtgcttgaattgcactttagccactgtgccgctatgggggctgcattgctcatgctgatctag

SEQ ID NO: 309710 - DNA, 894 bp, Artificial Sequence
  derived and/or modified sequence
atggcttaccagattgtcctggagctccacttcagccactgcgccgcaatgggcgctgctctcctgatgcttatcgagaatgcactcatcactcagtctaggctcatgctcctggaatcagtactaatcttctttaacctgctggccgtactatcatacctgaagtttttcaactgccagaaacacagccctttctccctgtcctggtggttctggctgacgctcaccggggtggcctgtagctgtgccgttggtattaaatatatgggtgtgttcacttatgtactagttctaggagtagccgcagttcatgcctggcacctcctgggcgatcagactctcagcaacgtaggagctgatgttcagtgctgtatgcgacccgcatgcatgggccaaatgcagatgagtcagggggtgtgcgttttttgccacctcctggctcgagcagtggcccttctggtgatccctgttgtgttatatttgctgtttttctatgtgcacctgatcttggtgtttcgctccggaccacatgatcagatcatgagctccgcattccaagcttcattagaaggcggactggcccgtatcactcagggccagcctctcgaagtggcttttggctcccaggttacattgcgcaacgtatttggaaaaccagttccttgttggctccattctcatcaggatacataccccatgatctacgagaacgggagagggagctcccaccagcaacaggtgacttgctaccctttcaaggacgttaataactggtggatcgtgaaggaccccagaaggcatcagctcgtagtcagctcccctccaagaccagtgaggcatggggatatggttcagttggtgcacggcatgactacacggtctctgaatacctag

SEQ ID NO: 309711 - DNA, 657 bp, Artificial Sequence
  derived and/or modified sequence
atgaaacagatattctttctcgatgactcagggcctccctttgggcacatggtgctggcgcttggtgggtacctggggggttttgatgggaactttctgtggaataggattggggcagaatactcctccaacgtcccagtctggtcccttagactgctgcccgctttagctggggcactgtcagtaccaatggcatatcagattgtgctagagctccacttcagccattgcgcagctatgggtgccgctttgttgatgctgattgagaacgctctcattacccagtcccgcttgatgctgctcgaatccgtactgatcttctttaacctgctcgccgttttgtcatacctgaaattctttaactgccagaaacattccccatttagtctttcttggtggttctggctcactctgacaggcgtagcatgtagctgtgctgtcggcattaaatatatgggagtattcacttacgttttggtactgggagtggccgcagtccatgcatggcacctgcttggggaccagactcttagtaatgtgggagccgacgtgcagtgttgtatgagacccgcatgcatggggcagatgcagatgtcgcaaggcgtttgcgtcttttgtcacctcctggctcgtgccgtagcactcctggtcatctag

SEQ ID NO: 309712 - DNA, 812 bp, Artificial Sequence
  derived and/or modified sequence
cggtgggtggtgcggagtgccgagcggcctcacccccaaccgtcggcccagtcggacggttccgaggcgttgccgggagccgggcgcggctctgtgtggactcggagaaacgcgggtacatttggggacaccggggacgagagcccagcccggacttgggggagtccgtcagtgccggacgcgggtccctggcttgcggacgggctggggccgggggcgtccccgtctttccggagctgggggcggggttcgggcccgggcagatgcggcgttcgggcggccgagccccgaagtaagaactccgtggcgcgtgcagccctagggaggaagggcgtgctgcgggtgcagtctcaggggcgtctgcctgagcccgcttttctacaagatgtggggatttttgaagcgccctgtagtggtgacggctgacatcaacttgagccttgtggccctgactgggatggggttactgagccggctgtggcgactcacctacccgcgggctgtggtttttgacgaagtatattatgggcagtacatctctttttacatgaaacaaatcttcttcttggatgacagtgggccgccatttggccacatggtgctggccttgggaggttatttaggaggattcgatggcaattttttgtggaacagaattggagcagaatacagtagcaacgtgcctgtgtggtccctgcgcctgctgccagcactcgcgggggccttgtcggtccccatggcctaccagatagtgttggagctccacttttctcattgtgccgccatgggagctgctctgttgatgcttatcg
